(19) United States
(12) Patent Application Publication
(10) Pub. No.: US 2009/0017054 A1
(43) Pub. Date: Jan. 15, 2009

(54) NUCLEIC ACID AND AMINO ACID SEQUENCES RELATING TO STREPTOCOCCUS PNEUMONIAE FOR DIAGNOSTICS AND THERAPEUTICS

(76) Inventors: Lynn Doucette-Stamm, Framingham, MA (US); David Bush, Somerville, MA (US); Qiandong Zeng, Waltham, MA (US); Timothy Opperman, Somerville, MA (US); Chad Eric Houseweart, Waltham, MA (US)

Correspondence Address: MR. REZA YACOOB;AVENTIS PASTEUR LIMITED, 1755 STEELES AVE. WEST, TORONTO, ON, M2R 3T4, CA

(21) Appl. No.: 12/168,094

(22) Filed: Jul. 4, 2008

Related U.S. Application Data
(63) Continuation of application No. 11/524,834, filed on Sep. 21, 2006, now abandoned.
Application No. 11/524,834 is a division of application No. 11/027,892, filed on Dec. 30, 2004, now Pat. No. 7,378,514.
Application No. 11/027,892 is a division of application No. 10/640,833, filed on Aug. 14, 2003, now abandoned.
Application No. 10/640,833 is a continuation of application No. 09/583,110, filed on May 26, 2000, now Pat. No. 6,699,703.
Application No. 09/583,110 is a continuation-in-part of application No. 09/107,433, filed on Jun. 30, 1998, now Pat. No. 6,800,744.
(60) Provisional application No. 60/085,131, filed on May 12, 1998.
(60) Provisional application No. 60/051,553, filed on Jul. 2, 1997.

(51) Int. Cl. A61K 39/09; C07H 21/04; C12N 15/63; A61P 31/04; C12N 5/10; C07K 14/315

(52) U.S. Cl. 424/190.1; 536/23.7; 435/320.1; 435/325; 530/350

(57) ABSTRACT

The invention provides isolated polypeptide and nucleic acid sequences derived from Streptococcus pneumoniae that are useful in diagnosis and therapy of pathological conditions; antibodies against the polypeptides; and methods for the production of the polypeptides. The invention also provides methods for the detection, prevention and treatment of pathological conditions resulting from bacterial infection.

### RELATED APPLICATIONS

[0001] This application is a continuation of U.S. application Ser. No. 11/524,834, filed Sep. 21, 2006, which is a divisional of U.S. application Ser. No. 11/027,892, filed Dec. 30, 2004, which is a divisional of U.S. application Ser. No. 10/640,833, filed Aug. 14, 2003, now abandoned, which is a continuation of U.S. application Ser. No. 09/583,110 (now U.S. Pat. No. 6,699,703) filed May 26, 2000, which is a continuation-in-part of U.S. application Ser. No. 09/107,433 (now U.S. Pat. No. 6,800,744), filed Jun. 30, 1998, which claims the benefit of U.S. Provisional Applications Nos. 60/085,131, filed May 12, 1998 and of U.S. Application No. 60/051,553, filed Jul. 2, 1997. The entire teachings of the above applications are incorporated herein by reference.

### INCORPORATION BY REFERENCE OF MATERIAL

[0002] This application incorporates by reference the Sequence Listing filed concurrently herewith:

[0003] File name: APL-97-01-US-CO50_Seq_Listing.txt; created Jul. 4, 2008, 7.95 MB in size.

[0004] This application also incorporates by reference Table 2 filed concurrently herewith:

[0005] File name: Table 2.txt; created Jun. 16, 2008, 351 KB in size.

### FIELD OF THE INVENTION

[0006] The invention relates to isolated nucleic acids and polypeptides derived from Streptococcus pneumoniae that are useful as molecular targets for diagnostics, prophylaxis and treatment of pathological conditions, as well as materials and methods for the diagnosis, prevention, and amelioration of pathological conditions resulting from bacterial infection.

### BACKGROUND OF THE INVENTION

[0007] Streptococcus pneumoniae (S. pneumoniae) is a common, spherical, gram-positive bacterium. Worldwide it is a leading cause of illness among children, the elderly, and individuals with debilitating medical conditions (Breiman, R. F. et al., 1994, JAMA 271: 1831). S. pneumoniae is estimated to be the causal agent in 3,000 cases of meningitis, 50,000 cases of bacteremia, 500,000 cases of pneumonia, and 7,000,000 cases of otitis media annually in the United States alone (Reichler, M. R. et al., 1992, J. Infect. Dis. 166: 1346; Stool, S. E. and Field, M. J., 1989 Pediatr. Infect. Dis J. 8: S11). In the United States alone, 40,000 deaths result annually from S. pneumoniae infections (Williams, W. W. et al., 1988 Ann. Intern. Med. 108: 616) with a death rate approaching 30% from bacteremia (Butler, J. C. et al., 1993, JAMA 270: 1826). Pneumococcal pneumonia is a serious problem among the elderly of industrialized nations (Käyhty, H. and Eskola, J., 1996 Emerg. Infect. Dis. 2: 289) and is a leading cause of death among children in developing nations (Käyhty, H. and Eskola, J., 1996 Emerg. Infect. Dis. 2: 289; Stansfield, S. K., 1987 Pediatr. Infect. Dis. 6: 622).

[0008] Vaccines against S. pneumoniae have been available for a number of years. There are a large number of serotypes based on the polysaccharide capsule (van Dam, J. E., Fleer, A., and Snippe, H., 1990 Antonie van Leeuwenhoek 58: 1) although only a fraction of the serotypes seem to be associated with infections (Martin, D. R. and Brett, M. S., 1996 N. Z. Med. J. 109: 288). A multivalent vaccine against capsular polysaccharides of 23 serotypes (Smart, L. E., Dougall, A. J. and Gridwood, R. W., 1987 J. Infect. 14: 209) has provided protection for some groups but not for several groups at risk for pneumococcal infections, such as infants and the elderly (Mäkel, P. H. et al., 1980 Lancet 2: 547; Sankilampi, U., 1996 J. Infect. Dis. 173: 387). Conjugated pneumococcal capsular polysaccharide vaccines have somewhat improved efficacy, but are costly and, therefore, are not likely to be in widespread use (Käyhty, H. and Eskola, J., 1996 Emerg. Infect. Dis. 2: 289).

[0009] At one time, S. pneumoniae strains were uniformly susceptible to penicillin. The report of a penicillin-resistant strain of (Hansman, D. and Bullen, M. M., 1967 Lancet 1: 264) was followed rapidly by many reports indicating the worldwide emergence of penicillin-resistant and penicillin non-susceptible strains (Klugman, K. P., 1990 Clin. Microbiol. Rev. 3: 171). S. pneumoniae strains which are resistant to multiple antibiotics (including penicillin) have also been observed recently within the United States (Welby, P. L., 1994 Pediatr. Infect. Dis. J. 13: 281; Ducin, J. S. et al., 1995 Pediatr. Infect. Dis. J. 14: 745; Butler, J. C., 1996 J. Infect. Dis. 174: 986) as well as internationally (Boswell, T. C. et al., 1996; J. Infect. 33: 17; Catchpole, C., Fraise, A., and Wise, R., 1996 Microb. Drug Resist. 2: 431; Tarasi, A. et al., 1997 Microb. Drug Resist. 3: 105).

[0010] A high incidence of morbidity is associated with invasive S. pneumoniae infections (Williams, W. W. et al., 1988 Ann. Intern. Med. 108: 616). Because of the incomplete effectiveness of currently available vaccines and antibiotics, the identification of new targets for antimicrobial therapies, including, but not limited to, the design of vaccines and antibiotics, which may help prevent infection or that may be useful in fighting existing infections, is highly desirable.

### SUMMARY OF THE INVENTION

[0011] The present invention fulfills the need for diagnostic tools and therapeutics by providing bacterial-specific compositions and methods for detecting, treating, and preventing bacterial infection, in particular S. pneumoniae infection.

[0012] The present invention encompasses isolated polypeptides and nucleic acids derived from S. pneumoniae that are useful as reagents for diagnosis of bacterial infection, components of effective antibacterial vaccines, and/or as targets for antibacterial drugs, including anti-S. pneumoniae drugs. The nucleic acids and peptides of the present invention also have utility for diagnostics and therapeutics for S. pneumoniae and other Streptococcus species. They can also be used to detect the presence of S. pneumoniae and other Streptococcus species in a sample; and in screening compounds for the ability to interfere with the S. pneumoniae life cycle or to inhibit S. pneumoniae infection. More specifically, this invention features compositions of nucleic acids corresponding to entire coding sequences of S. pneumoniae proteins, including surface or secreted proteins or parts thereof, nucleic acids capable of binding mRNA from S. pneumoniae proteins to block protein translation, and methods for producing S. pneumoniae proteins or parts thereof using peptide synthesis and recombinant DNA techniques. This invention also features antibodies and nucleic acids useful as probes to detect S. pneumoniae infection. In addition, vaccine compositions and methods for the protection or treatment of infection by S. pneumoniae are within the scope of this invention.

[0013] The nucleotide sequences provided in SEQ ID NO: 1-SEQ ID NO: 2661, a fragment thereof, or a nucleotide sequence at least 99.5% identical to a sequence contained within SEQ ID NO: 1-SEQ ID NO: 2661 may be “provided” in a variety of medias to facilitate use thereof. As used herein, “provided” refers to a manufacture, other than an isolated nucleic acid molecule, which contains a nucleotide sequence of the present invention, i.e., the nucleotide sequence provided in SEQ ID NO: 1-SEQ ID NO: 2661, a fragment thereof, or a nucleotide sequence at least 99.5% identical to a sequence contained within SEQ ID NO: 1-SEQ ID NO: 2661. Uses for and methods for providing nucleotide sequences in a variety of media is well known in the art (see e.g., EPO Publication No. EP 0 756 006).

[0014] In one application of this embodiment, a nucleotide sequence of the present invention can be recorded on computer readable media. As used herein, “computer readable media” refers to any media which can be read and accessed directly by a computer. Such media include, but are not limited to: magnetic storage media, such as floppy discs, hard disc storage media, and magnetic tape; optical storage media such as CD-ROM; electrical storage media such as RAM and ROM; and hybrids of these categories such as magnetic/optical storage media. A person skilled in the art can readily appreciate how any of the presently known computer readable media can be used to create a manufacture comprising computer readable media having recorded thereon a nucleotide sequence of the present invention.

[0015] As used herein, “recorded” refers to a process for storing information on computer readable media. A person skilled in the art can readily adopt any of the presently known methods for recording information on computer readable media to generate manufactures comprising the nucleotide sequence information of the present invention.

[0016] A variety of data storage structures are available to a person skilled in the art for creating a computer readable media having recorded thereon a nucleotide sequence of the present invention. The choice of the data storage structure will generally be based on the means chosen to access the stored information. In addition, a variety of data processor programs and formats can be used to store the nucleotide sequence information of the present invention on computer readable media. The sequence information can be represented in a word processing text file, formatted in commercially-available software such as WordPerfect and Microsoft Word, or represented in the form of an ASCII file, stored in a database application, such as DB2, Sybase, Oracle, or the like. A person skilled in the art can readily adapt any number of data processor structuring formats (e.g. text file or database) in order to obtain computer readable media having recorded thereon the nucleotide sequence information of the present invention.

[0017] By providing the nucleotide sequence of SEQ ID NO: 1-SEQ ID NO: 2661, a fragment thereof, or a nucleotide sequence at least 99.5% identical to a sequence contained within SEQ ID NO: 1-SEQ ID NO: 2661 in computer readable form, a person skilled in the art can routinely access the sequence information for a variety of purposes. Computer software is publicly available which allows a person skilled in the art to access sequence information provided in a computer readable media. Examples of such computer software include programs of the “Staden Package”, “DNA Star”, “MacVector”, GCG “Wisconsin Package” (Genetics Computer Group, Madison, Wis.) and “NCBI toolbox” (National Center for Biotechnology Information).

[0018] Computer algorithms enable the identification of S. pneumoniae open reading frames (ORFs) within SEQ ID NO: 1-SEQ ID NO: 2661 which contain homology to ORFs or proteins from other organisms. Examples of such similarity-search algorithms include the BLAST [Altschul et al., J. Mol. Biol. 215:403-410 (1990)] and Smith-Waterman [Smith and Waterman (1981) Advances in Applied Mathematics, 2:482-489] search algorithms. These algorithms are utilized on computer systems as exemplified below. The ORFs so identified represent protein encoding fragments within the S. pneumoniae genome and are useful in producing commercially important proteins such as enzymes used in fermentation reactions and in the production of commercially useful metabolites.

[0019] The present invention further provides systems, particularly computer-based systems, which contain the sequence information described herein. Such systems are designed to identify commercially important fragments of the S. pneumoniae genome. As used herein, “a computer-based system” refers to the hardware means, software means, and data storage means used to analyze the nucleotide sequence information of the present invention. The minimum hardware means of the computer-based systems of the present invention comprises a central processing unit (CPU), input means, output means, and data storage means. A person skilled in the art can readily appreciate that any one of the currently available computer-based systems is suitable for use in the present invention. The computer-based systems of the present invention comprise a data storage means having stored therein a nucleotide sequence of the present invention and the necessary hardware means and software means for supporting and implementing a search means. As used herein, “data storage means” refers to memory which can store nucleotide sequence information of the present invention, or a memory access means which can access manufactures having recorded thereon the nucleotide sequence information of the present invention.

[0020] As used herein, “search means” refers to one or more programs which are implemented on the computer-based system to compare a target sequence or target structural motif with the sequence information stored within the data storage means. Search means are used to identify fragments or regions of the S. pneumoniae genome which are similar to, or “match”, a particular target sequence or target motif. A variety of known algorithms are known in the art and have been disclosed publicly, and a variety of commercially available software for conducting homology-based similarity searches are available and can be used in the computer-based systems of the present invention. Examples of such software include, but is not limited to, FASTA (GCG Wisconsin Package), Bic_SW (Compugen Bioccelerator, BLASTN2, BLASTP2 and BLASTX2 (NCBI) and Motifs (GCG). BLASTN2, A person skilled in the art can readily recognize that any one of the available algorithms or implementing software packages for conducting homology searches can be adapted for use in the present computer-based systems.

[0021] As used herein, a “target sequence” can be any DNA or amino acid sequence of six or more nucleotides or two or more amino acids. A person skilled in the art can readily recognize that the longer a target sequence is, the less likely a target sequence will be present as a random occurrence in the database. The most preferred sequence length of a target sequence is from about 10 to 100 amino acids or from about 30 to 300 nucleotide residues. However, it is well recognized that many genes are longer than 500 amino acids, or 1.5 kb in length, and that commercially important fragments of the S. pneumoniae genome, such as sequence fragments involved in gene expression and protein processing, will often be shorter than 30 nucleotides.

[0022] As used herein, “a target structural motif,” or “target motif,” refers to any rationally selected sequence or combination of sequences in which the sequence(s) are chosen based on a specific functional domain or three-dimensional configuration which is formed upon the folding of the target polypeptide. There are a variety of target motifs known in the art. Protein target motifs include, but are not limited to, enzymatic active sites, membrane spanning regions, and signal sequences. Nucleic acid target motifs include, but are not limited to, promoter sequences, hairpin structures and inducible expression elements (protein binding sequences).

[0023] A variety of structural formats for the input and output means can be used to input and output the information in the computer-based systems of the present invention. A preferred format for an output means ranks fragments of the S. pneumoniae genome possessing varying degrees of homology to the target sequence or target motif. Such presentation provides a person skilled in the art with a ranking of sequences which contain various amounts of the target sequence or target motif and identifies the degree of homology contained in the identified fragment.

[0024] A variety of comparing means can be used to compare a target sequence or target motif with the data storage means to identify sequence fragments of the S. pneumoniae genome. In the present examples, implementing software which implement the BLASTP2 and bic_SW algorithms (Altschul et al., J. Mol. Biol. 215:403-410 (1990); Compugen Biocellerator) was used to identify open reading frames within the S. pneumoniae genome. A person skilled in the art can readily recognize that any one of the publicly available homology search programs can be used as the search means for the computer-based systems of the present invention.

[0025] The invention features S. pneumoniae polypeptides, preferably a substantially pure preparation of an S. pneumoniae polypeptide, or a recombinant S. pneumoniae polypeptide. In preferred embodiments: the polypeptide has biological activity; the polypeptide has an amino acid sequence at least 60%, 70%, 80%, 90%, 95%, 98%, or 99% identical to an amino acid sequence of the invention contained in the Sequence Listing, preferably it has about 65% sequence identity with an amino acid sequence of the invention contained in the Sequence Listing, and most preferably it has about 92% to about 99% sequence identity with an amino acid sequence of the invention contained in the Sequence Listing; the polypeptide has an amino acid sequence essentially the same as an amino acid sequence of the invention contained in the Sequence Listing; the polypeptide is at least 5, 10, 20, 50, 100, or 150 amino acid residues in length; the polypeptide includes at least 5, preferably at least 10, more preferably at least 20, more preferably at least 50,100, or 150 contiguous amino acid residues of the invention contained in the Sequence Listing. In yet another preferred embodiment, the amino acid sequence which differs in sequence identity by about 7% to about 8% from the S. pneumoniae amino acid sequences of the invention contained in the Sequence Listing is also encompassed by the invention.

[0026] In preferred embodiments, the S. pneumoniae polypeptide is encoded by a nucleic acid of the invention contained in the Sequence Listing, or by a nucleic acid having at least 60%, 70%, 80%, 90%, 95%, 98%, or 99% homology with a nucleic acid of the invention contained in the Sequence Listing.

[0027] In a preferred embodiment, the subject S. pneumoniae polypeptide differs in amino acid sequence at 1, 2, 3, 5, 10 or more residues from a sequence of the invention contained in the Sequence Listing. The differences, however, are such that the S. pneumoniae polypeptide exhibits an S. pneumoniae biological activity, e.g., the S. pneumoniae polypeptide retains a biological activity of a naturally occurring S. pneumoniae enzyme.

[0028] In preferred embodiments, the polypeptide includes all or a fragment of an amino acid sequence of the invention contained in the Sequence Listing; fused, in reading frame, to additional amino acid residues, preferably to residues encoded by genomic DNA 5′ or 3′ to the genomic DNA which encodes a sequence of the invention contained in the Sequence Listing.

[0029] In yet other preferred embodiments, the S. pneumoniae polypeptide is a recombinant fusion protein having a first S. pneumoniae polypeptide portion and a second polypeptide portion, e.g., a second polypeptide portion having an amino acid sequence unrelated to S. pneumoniae. The second polypeptide portion can be, e.g., any of glutathione-S-transferase, a DNA binding domain, or a polymerase activating domain. In preferred embodiment the fusion protein can be used in a two-hybrid assay.

[0030] Polypeptides of the invention include those which arise as a result of alternative transcription events, alternative RNA splicing events, and alternative translational and posttranslational events.

[0031] In a preferred embodiment, the encoded S. pneumoniae polypeptide differs (e.g., by amino acid substitution, addition or deletion of at least one amino acid residue) in amino acid sequence at 1, 2, 3, 5, 10 or more residues, from a sequence of the invention contained in the Sequence Listing. The differences, however, are such that: the S. pneumoniae encoded polypeptide exhibits a S. pneumoniae biological activity, e.g., the encoded S. pneumoniae enzyme retains a biological activity of a naturally occurring S. pneumoniae.

[0032] In preferred embodiments, the encoded polypeptide includes all or a fragment of an amino acid sequence of the invention contained in the Sequence Listing; fused, in reading frame, to additional amino acid residues, preferably to residues encoded by genomic DNA 5′ or 3′ to the genomic DNA which encodes a sequence of the invention contained in the Sequence Listing.

[0033] The S. pneumoniae strain, 14453, from which genomic sequences have been sequenced, has been deposited on Jun. 26, 1997 in the American Type Culture Collection, 10801 University Blvd., Manassas, Va. 20110-2009, and assigned the ATCC designation #55987.

[0034] Included in the invention are: allelic variations; natural mutants; induced mutants; proteins encoded by DNA that hybridize under high or low stringency conditions to a nucleic acid which encodes a polypeptide of the invention contained in the Sequence Listing (for definitions of high and low stringency see Current Protocols in Molecular Biology, John Wiley & Sons, New York, 1989, 6.3.1-6.3.6, hereby incorporated by reference); and, polypeptides specifically bound by antisera to S. pneumoniae polypeptides, especially by antisera to an active site or binding domain of S. pneumoniae polypeptide. The invention also includes fragments, preferably biologically active fragments. These and other polypeptides are also referred to herein as S. pneumoniae polypeptide analogs or variants.

[0035] The invention further provides nucleic acids, e.g., RNA or DNA, encoding a polypeptide of the invention. This includes double stranded nucleic acids as well as coding and antisense single strands.

[0036] In preferred embodiments, the subject S. pneumoniae nucleic acid will include a transcriptional regulatory sequence, e.g. at least one of a transcriptional promoter or transcriptional enhancer sequence, operably linked to the S. pneumoniae gene sequence, e.g., to render the S. pneumoniae gene sequence suitable for expression in a recombinant host cell.

[0037] In yet a further preferred embodiment, the nucleic acid which encodes an S. pneumoniae polypeptide of the invention, hybridizes under stringent conditions to a nucleic acid probe corresponding to at least 8 consecutive nucleotides of the invention contained in the Sequence Listing; more preferably to at least 12 consecutive nucleotides of the invention contained in the Sequence Listing; more preferably to at least 20 consecutive nucleotides of the invention contained in the Sequence Listing; more preferably to at least 40 consecutive nucleotides of the invention contained in the Sequence Listing.

[0038] In another aspect, the invention provides a substantially pure nucleic acid having a nucleotide sequence which encodes an S. pneumoniae polypeptide. In preferred embodiments: the encoded polypeptide has biological activity; the encoded polypeptide has an amino acid sequence at least 60%, 70%, 80%, 90%, 95%, 98%, or 99% homologous to an amino acid sequence of the invention contained in the Sequence Listing; the encoded polypeptide has an amino acid sequence essentially the same as an amino acid sequence of the invention contained in the Sequence Listing; the encoded polypeptide is at least 5, 10, 20, 50, 100, or 150 amino acids in length; the encoded polypeptide comprises at least 5, preferably at least 10, more preferably at least 20, more preferably at least 50,100, or 150 contiguous amino acids of the invention contained in the Sequence Listing.

[0039] In another aspect, the invention encompasses: a vector including a nucleic acid which encodes an S. pneumoniae polypeptide or an S. pneumoniae polypeptide variant as described herein; a host cell transfected with the vector; and a method of producing a recombinant S. pneumoniae polypeptide or S. pneumoniae polypeptide variant; including culturing the cell, e.g., in a cell culture medium, and isolating an S. pneumoniae polypeptide or an S. pneumoniae polypeptide variant, e.g., from the cell or from the cell culture medium.

[0040] In another series of embodiments, the invention provides isolated nucleic acids comprising sequences at least about 8 nucleotides in length, more preferably at least about 12 nucleotides in length, and most preferably at least about 15-20 nucleotides in length, that correspond to a subsequence of any one of SEQ ID NO: 1-SEQ ID NO: 2661 or complements thereof. Alternatively, the nucleic acids comprise sequences contained within any ORF (open reading frame), including a complete protein-coding sequence, of which any of SEQ ID NO: 1-SEQ ID NO: 2661 forms a part. The invention encompasses sequence-conservative variants and function-conservative variants of these sequences. The nucleic acids may be DNA, RNA, DNA/RNA duplexes, protein-nucleic acid (PNA), or derivatives thereof.

[0041] In another aspect, the invention features, a purified recombinant nucleic acid having at least 50%, 60%, 70%, 80%, 90%, 95%, 98%, or 99% homology with a sequence of the invention contained in the Sequence Listing.

[0042] In another aspect, the invention features nucleic acids capable of binding mRNA of S. pneumoniae. Such nucleic acid is capable of acting as antisense nucleic acid to control the translation of mRNA of S. pneumoniae. A further aspect features a nucleic acid which is capable of binding specifically to an S. pneumoniae nucleic acid. These nucleic acids are also referred to herein as complements and have utility as probes and as capture reagents.

[0043] In another aspect, the invention features an expression system comprising an open reading frame corresponding to S. pneumoniae nucleic acid. The nucleic acid further comprises a control sequence compatible with an intended host. The expression system is useful for making polypeptides corresponding to S. pneumoniae nucleic acid.

[0044] In another aspect, the invention features a cell transformed with the expression system to produce S. pneumoniae polypeptides.

[0045] In yet another embodiment, the invention encompasses reagents for detecting bacterial infection, including S. pneumoniae infection, which comprise at least one S. pneumoniae-derived nucleic acid defined by any one of SEQ ID NO: 1-SEQ ID NO: 2661, or sequence-conservative or function-conservative variants thereof.

[0046] Alternatively, the diagnostic reagents comprise polypeptide sequences that are contained within any open reading frames (ORFs), including complete protein-coding sequences, contained within any of SEQ ID NO: 1-SEQ ID NO: 2661, or polypeptide sequences contained within any of SEQ ID NO: 2662-SEQ ID NO: 5322, or polypeptides of which any of the above sequences forms a part, or antibodies directed against any of the above peptide sequences or function-conservative variants and/or fragments thereof.

[0047] The invention further provides antibodies, preferably monoclonal antibodies, which specifically bind to the polypeptides of the invention. Methods are also provided for producing antibodies in a host animal. The methods of the invention comprise immunizing an animal with at least one S. pneumoniae-derived immunogenic component, wherein the immunogenic component comprises one or more of the polypeptides encoded by any one of SEQ ID NO: 1-SEQ ID NO: 2661 or sequence-conservative or function-conservative variants thereof; or polypeptides that are contained within any ORFs, including complete protein-coding sequences, of which any of SEQ ID NO: 1-SEQ ID NO: 2661 forms a part; or polypeptide sequences contained within any of SEQ ID NO: 2662-SEQ ID NO: 5322; or polypeptides of which any of SEQ ID NO: 2662-SEQ ID NO: 5322 forms a part. Host animals include any warm blooded animal, including without limitation mammals and birds. Such antibodies have utility as reagents for immunoassays to evaluate the abundance and distribution of S. pneumoniae-specific antigens.

[0048] In yet another aspect, the invention provides a method for detecting bacterial antigenic components in a sample, which comprises the steps of: (i) contacting a sample suspected to contain a bacterial antigenic component with a bacterial-specific antibody, under conditions in which a stable antigen-antibody complex can form between the antibody and bacterial antigenic components in the sample; and (ii) detecting any antigen-antibody complex formed in step (i), wherein detection of an antigen-antibody complex indicates the presence of at least one bacterial antigenic component in the sample. In different embodiments of this method, the antibodies used are directed against a sequence encoded by any of SEQ ID NO: 1-SEQ ID NO: 2661 or sequence-conservative or function-conservative variants thereof, or against a polypeptide sequence contained in any of SEQ ID NO: 2662-SEQ ID NO: 5322 or function-conservative variants thereof.

[0049] In yet another aspect, the invention provides a method for detecting antibacterial-specific antibodies in a sample, which comprises: (i) contacting a sample suspected to contain antibacterial-specific antibodies with a S. pneumoniae antigenic component, under conditions in which a stable antigen-antibody complex can form between the S. pneumoniae antigenic component and antibacterial antibodies in the sample; and (ii) detecting any antigen-antibody complex formed in step (i), wherein detection of an antigen-antibody complex indicates the presence of antibacterial antibodies in the sample. In different embodiments of this method, the antigenic component is encoded by a sequence contained in any of SEQ ID NO: 1-SEQ ID NO: 2661 or sequence-conservative and function-conservative variants thereof, or is a polypeptide sequence contained in any of SEQ ID NO: 2662-SEQ ID NO: 5322 or function-conservative variants thereof.

[0050] In another aspect, the invention features a method of generating vaccines for immunizing an individual against S. pneumoniae. The method includes: immunizing a subject with an S. pneumoniae polypeptide, e.g., a surface or secreted polypeptide, or active portion thereof, and a pharmaceutically acceptable carrier. Such vaccines have therapeutic and prophylactic utilities.

[0051] In another aspect, the invention features a method of evaluating a compound, e.g. a polypeptide, e.g., a fragment of a host cell polypeptide, for the ability to bind an S. pneumoniae polypeptide. The method includes: contacting the candidate compound with an S. pneumoniae polypeptide and determining if the compound binds or otherwise interacts with an S. pneumoniae polypeptide. Compounds which bind S. pneumoniae are candidates as activators or inhibitors of the bacterial life cycle. These assays can be performed in vitro or in vivo.

[0052] In another aspect, the invention features a method of evaluating a compound, e.g. a polypeptide, e.g., a fragment of a host cell polypeptide, for the ability to bind an S. pneumoniae nucleic acid, e.g., DNA or RNA. The method includes: contacting the candidate compound with an S. pneumoniae nucleic acid and determining if the compound binds or otherwise interacts with an S. pneumoniae polypeptide. Compounds which bind S. pneumoniae are candidates as activators or inhibitors of the bacterial life cycle. These assays can be performed in vitro or in vivo.

### DETAILED DESCRIPTION OF THE INVENTION

[0053] The sequences of the present invention include the specific nucleic acid and amino acid sequences set forth in the Sequence Listing that forms a part of the present specification, and which are designated SEQ ID NO: 1-SEQ ID NO: 5322. Use of the terms “SEQ ID NO: 1-SEQ ID NO: 2661”, “SEQ ID NO: 2662-SEQ ID NO: 5322”, “the sequences depicted in Table 2”, etc., is intended, for convenience, to refer to each individual SEQ ID NO individually, and is not intended to refer to the genus of these sequences. In other words, it is a shorthand for listing all of these sequences individually. The invention encompasses each sequence individually, as well as any combination thereof.

### Definitions

[0054] “Nucleic acid” or “polynucleotide” as used herein refers to purine- and pyrimidine-containing polymers of any length, either polyribonucleotides or polydeoxyribonucleotides or mixed polyribo-polydeoxyribo nucleotides. This includes single- and double-stranded molecules, i.e., DNA-DNA, DNA-RNA and RNA-RNA hybrids, as well as “protein nucleic acids” (PNA) formed by conjugating bases to an amino acid backbone. This also includes nucleic acids containing modified bases.

[0055] A nucleic acid or polypeptide sequence that is “derived from” a designated sequence refers to a sequence that corresponds to a region of the designated sequence. For nucleic acid sequences, this encompasses sequences that are homologous or complementary to the sequence, as well as “sequence-conservative variants” and “function-conservative variants.” For polypeptide sequences, this encompasses “function-conservative variants.” Sequence-conservative variants are those in which a change of one or more nucleotides in a given codon position results in no alteration in the amino acid encoded at that position. Function-conservative variants are those in which a given amino acid residue in a polypeptide has been changed without altering the overall conformation and function of the native polypeptide, including, but not limited to, replacement of an amino acid with one having similar physico-chemical properties (such as, for example, acidic, basic, hydrophobic, and the like). “Function-conservative” variants also include any polypeptides that have the ability to elicit antibodies specific to a designated polypeptide.

[0056] An “S. pneumoniae-derived” nucleic acid or polypeptide sequence may or may not be present in other bacterial species, and may or may not be present in all S. pneumoniae strains. This term is intended to refer to the source from which the sequence was originally isolated. Thus, a S. pneumoniae-derived polypeptide, as used herein, may be used, e.g., as a target to screen for a broad spectrum antibacterial agent, to search for homologous proteins in other species of bacteria or in eukaryotic organisms such as fungi and humans, etc.

[0057] A purified or isolated polypeptide or a substantially pure preparation of a polypeptide are used interchangeably herein and, as used herein, mean a polypeptide that has been separated from other proteins, lipids, and nucleic acids with which it naturally occurs. Preferably, the polypeptide is also separated from substances, e.g., antibodies or gel matrix, e.g., polyacrylamide, which are used to purify it. Preferably, the polypeptide constitutes at least 10, 20, 50 70, 80 or 95% dry weight of the purified preparation. Preferably, the preparation contains: sufficient polypeptide to allow protein sequencing; at least 1, 10, or 100 mg of the polypeptide.

[0058] A purified preparation of cells refers to, in the case of plant or animal cells, an in vitro preparation of cells and not an entire intact plant or animal. In the case of cultured cells or microbial cells, it consists of a preparation of at least 10% and more preferably 50% of the subject cells.

[0059] A purified or isolated or a substantially pure nucleic acid, e.g., a substantially pure DNA, (are terms used interchangeably herein) is a nucleic acid which is one or both of the following: not immediately contiguous with both of the coding sequences with which it is immediately contiguous (i.e., one at the 5′ end and one at the 3′ end) in the naturally-occurring genome of the organism from which the nucleic acid is derived; or which is substantially free of a nucleic acid with which it occurs in the organism from which the nucleic acid is derived. The term includes, for example, a recombinant DNA which is incorporated into a vector, e.g., into an autonomously replicating plasmid or virus, or into the genomic DNA of a prokaryote or eukaryote, or which exists as a separate molecule (e.g., a cDNA or a genomic DNA fragment produced by PCR or restriction endonuclease treatment) independent of other DNA sequences. Substantially pure DNA also includes a recombinant DNA which is part of a hybrid gene encoding additional S. pneumoniae DNA sequence.

[0060] A “contig” as used herein is a nucleic acid representing a continuous stretch of genomic sequence of an organism.

[0061] An “open reading frame”, also referred to herein as ORF, is a region of nucleic acid which encodes a polypeptide. This region usually represents the total coding region for the polypeptide and can be determined from a stop to stop codon or from a start to stop codon.

[0062] As used herein, a “coding sequence” is a nucleic acid which is transcribed into messenger RNA and/or translated into a polypeptide when placed under the control of appropriate regulatory sequences. The boundaries of the coding sequence are determined by a translation start codon at the five prime terminus and a translation stop codon at the three prime terminus. A coding sequence can include but is not limited to messenger RNA, synthetic DNA, and recombinant nucleic acid sequences.

[0063] A “complement” of a nucleic acid as used herein refers to an anti-parallel or antisense sequence that participates in Watson-Crick base-pairing with the original sequence.

[0064] A “gene product” is a protein or structural RNA which is specifically encoded by a gene.

[0065] As used herein, the term “probe” refers to a nucleic acid, peptide or other chemical entity which specifically binds to a molecule of interest. Probes are often associated with or capable of associating with a label. A label is a chemical moiety capable of detection. Typical labels comprise dyes, radioisotopes, luminescent and chemiluminescent moieties, fluorophores, enzymes, precipitating agents, amplification sequences, and the like. Similarly, a nucleic acid, peptide or other chemical entity which specifically binds to a molecule of interest and immobilizes such molecule is referred herein as a “capture ligand”. Capture ligands are typically associated with or capable of associating with a support such as nitro-cellulose, glass, nylon membranes, beads, particles and the like. The specificity of hybridization is dependent on conditions such as the base pair composition of the nucleotides, and the temperature and salt concentration of the reaction. These conditions are readily discernable to one of ordinary skill in the art using routine experimentation.

[0066] “Homologous” refers to the sequence similarity or sequence identity between two polypeptides or between two nucleic acid molecules. When a position in both of the two compared sequences is occupied by the same base or amino acid monomer subunit, e.g., if a position in each of two DNA molecules is occupied by adenine, then the molecules are homologous at that position. The percent of homology between two sequences is a function of the number of matching or homologous positions shared by the two sequences divided by the number of positions compared×100. For example, if 6 of 10 of the positions in two sequences are matched or homologous then the two sequences are 60% homologous. By way of example, the DNA sequences ATTGCC and TATGGC share 50% homology. Generally, a comparison is made when two sequences are aligned to give maximum homology.

[0067] Nucleic acids are hybridizable to each other when at least one strand of a nucleic acid can anneal to the other nucleic acid under defined stringency conditions. Stringency of hybridization is determined by: (a) the temperature at which hybridization and/or washing is performed; and (b) the ionic strength and polarity of the hybridization and washing solutions. Hybridization requires that the two nucleic acids contain complementary sequences; depending on the stringency of hybridization, however, mismatches may be tolerated. Typically, hybridization of two sequences at high stringency (such as, for example, in a solution of 0.5×SSC, at 65° C.) requires that the sequences be essentially completely homologous. Conditions of intermediate stringency (such as, for example, 2×SSC at 65° C.) and low stringency (such as, for example 2×SSC at 55° C.), require correspondingly less overall complementarity between the hybridizing sequences. (1×SSC is 0.15 M NaCl, 0.015 M Na citrate).

[0068] The terms peptides, proteins, and polypeptides are used interchangeably herein.

[0069] As used herein, the term “surface protein” refers to all surface accessible proteins, e.g. inner and outer membrane proteins, proteins adhering to the cell wall, and secreted proteins.

[0070] A polypeptide has S. pneumoniae biological activity if it has one, two and preferably more of the following properties: (1) if when expressed in the course of an S. pneumoniae infection, it can promote, or mediate the attachment of S. pneumoniae to a cell; (2) it has an enzymatic activity, structural or regulatory function characteristic of an S. pneumoniae protein; (3) or the gene which encodes it can rescue a lethal mutation in an S. pneumoniae gene. A polypeptide has biological activity if it is an antagonist, agonist, or super-agonist of a polypeptide having one of the above-listed properties.

[0071] A biologically active fragment or analog is one having an in vivo or in vitro activity which is characteristic of the S. pneumoniae polypeptides of the invention contained in the Sequence Listing, or of other naturally occurring S. pneumoniae polypeptides, e.g., one or more of the biological activities described herein. Especially preferred are fragments which exist in vivo, e.g., fragments which arise from post transcriptional processing or which arise from translation of alternatively spliced RNAs. Fragments include those expressed in native or endogenous cells as well as those made in expression systems, e.g., in CHO cells. Because peptides such as S. pneumoniae polypeptides often exhibit a range of physiological properties and because such properties may be attributable to different portions of the molecule, a useful S. pneumoniae fragment or S. pneumoniae analog is one which exhibits a biological activity in any biological assay for S. pneumoniae activity. Most preferably the fragment or analog possesses 10%, preferably 40%, more preferably 60%, 70%, 80% or 90% or greater of the activity of S. pneumoniae, in any in vivo or in vitro assay.

[0072] Analogs can differ from naturally occurring S. pneumoniae polypeptides in amino acid sequence or in ways that do not involve sequence, or both. Non-sequence modifications include changes in acetylation, methylation, phosphorylation, carboxylation, or glycosylation. Preferred analogs include S. pneumoniae polypeptides (or biologically active fragments thereof) whose sequences differ from the wild-type sequence by one or more conservative amino acid substitutions or by one or more non-conservative amino acid substitutions, deletions, or insertions which do not substantially diminish the biological activity of the S. pneumoniae polypeptide. Conservative substitutions typically include the substitution of one amino acid for another with similar characteristics, e.g., substitutions within the following groups: valine, glycine; glycine, alanine; valine, isoleucine, leucine; aspartic acid, glutamic acid; asparagine, glutamine; serine, threonine; lysine, arginine; and phenylalanine, tyrosine. Other conservative substitutions can be made in view of the table below.

TABLE 1
CONSERVATIVE AMINO ACID REPLACEMENTS

| For Amino Acid | Code | Replace with any of |
|---|---|---|
| Alanine | A | D-Ala, Gly, beta-Ala, L-Cys, D-Cys |
| Arginine | R | D-Arg, Lys, D-Lys, homo-Arg, D-homo-Arg, |
| | | Met, Ile, D-Met, D-Ile, Orn, D-Orn |
| Asparagine | N | D-Asn, Asp, D-Asp, Glu, D-Glu, Gln, D-Gln |
| Aspartic Acid | D | D-Asp, D-Asn, Asn, Glu, D-Glu, Gln, D-Gln |
| Cysteine | C | D-Cys, S-Me-Cys, Met, D-Met, Thr, D-Thr |
| Glutamine | Q | D-Gln, Asn, D-Asn, Glu, D-Glu, Asp, D-Asp |
| Glutamic Acid | E | D-Glu, D-Asp, Asp, Asn, D-Asn, Gln, D-Gln |
| Glycine | G | Ala, D-Ala, Pro, D-Pro, β-Ala, Acp |
| Isoleucine | I | D-Ile, Val, D-Val, Leu, D-Leu, Met, D-Met |
| Leucine | L | D-Leu, Val, D-Val, Leu, D-Leu, Met, D-Met |
| Lysine | K | D-Lys, Arg, D-Arg, homo-Arg, D-homo-Arg, |
| | | Met, D-Met, Ile, D-Ile, Orn, D-Orn |
| Methionine | M | D-Met, S-Me-Cys, Ile, D-Ile, Leu, D-Leu, |
| | | Val, D-Val |
| Phenylalanine | F | D-Phe, Tyr, D-Thr, L-Dopa, His, D-His, Trp, |
| | | D-Trp, Trans-3,4, or 5-phenylproline, cis-3,4, |
| | | or 5-phenylproline |
| Proline | P | D-Pro, L-I-thioazolidine-4-carboxylic acid, |
| | | D-or L-1-oxazolidine-4-carboxylic acid |
| Serine | S | D-Ser, Thr, D-Thr, allo-Thr, Met, D-Met, |
| | | Met(O), D-Met(O), L-Cys, D-Cys |
| Threonine | T | D-Thr, Ser, D-Ser, allo-Thr, Met, D-Met, |
| | | Met(O), D-Met(O), Val, D-Val |
| Tyrosine | Y | D-Tyr, Phe, D-Phe, L-Dopa, His, D-His |
| Valine | V | D-Val, Leu, D-Leu, Ile, D-Ile, Met, D-Met |

[0073] Other analogs within the invention are those with modifications which increase peptide stability; such analogs may contain, for example, one or more non-peptide bonds (which replace the peptide bonds) in the peptide sequence. Also included are: analogs that include residues other than naturally occurring L-amino acids, e.g., D-amino acids or non-naturally occurring or synthetic amino acids, e.g., β or γ amino acids; and cyclic analogs.

[0074] As used herein, the term “fragment”, as applied to an S. pneumoniae analog, will ordinarily be at least about 20 residues, more typically at least about 40 residues, preferably at least about 60 residues in length. Fragments of S. pneumoniae polypeptides can be generated by methods known to those skilled in the art. The ability of a candidate fragment to exhibit a biological activity of S. pneumoniae polypeptide can be assessed by methods known to those skilled in the art as described herein. Also included are S. pneumoniae polypeptides containing residues that are not required for biological activity of the peptide or that result from alternative mRNA splicing or alternative protein processing events.

[0075] An “immunogenic component” as used herein is a moiety, such as an S. pneumoniae polypeptide, analog or fragment thereof, that is capable of eliciting a humoral and/or cellular immune response in a host animal.

[0076] An “antigenic component” as used herein is a moiety, such as an S. pneumoniae polypeptide, analog or fragment thereof, that is capable of binding to a specific antibody with sufficiently high affinity to form a detectable antigen-antibody complex.

[0077] The term “antibody” as used herein is intended to include fragments thereof which are specifically reactive with S. pneumoniae polypeptides.

[0078] As used herein, the term “cell-specific promoter” means a DNA sequence that serves as a promoter, i.e., regulates expression of a selected DNA sequence operably linked to the promoter, and which effects expression of the selected DNA sequence in specific cells of a tissue. The term also covers so-called “leaky” promoters, which regulate expression of a selected DNA primarily in one tissue, but cause expression in other tissues as well.

[0079] Misexpression, as used herein, refers to a non-wild type pattern of gene expression. It includes: expression at non-wild type levels, i.e., over or under expression; a pattern of expression that differs from wild type in terms of the time or stage at which the gene is expressed, e.g., increased or decreased expression (as compared with wild type) at a predetermined developmental period or stage; a pattern of expression that differs from wild type in terms of decreased expression (as compared with wild type) in a predetermined cell type or tissue type; a pattern of expression that differs from wild type in terms of the splicing size, amino acid sequence, post-translational modification, or biological activity of the expressed polypeptide; a pattern of expression that differs from wild type in terms of the effect of an environmental stimulus or extracellular stimulus on expression of the gene, e.g., a pattern of increased or decreased expression (as compared with wild type) in the presence of an increase or decrease in the strength of the stimulus.

[0080] As used herein, “host cells” and other such terms denoting microorganisms or higher eukaryotic cell lines cultured as unicellular entities refers to cells which can become or have been used as recipients for a recombinant vector or other transfer DNA, and include the progeny of the original cell which has been transfected. It is understood by individuals skilled in the art that the progeny of a single parental cell may not necessarily be completely identical in genomic or total DNA compliment to the original parent, due to accident or deliberate mutation.

[0081] As used herein, the term “control sequence” refers to a nucleic acid having a base sequence which is recognized by the host organism to effect the expression of encoded sequences to which they are ligated. The nature of such control sequences differs depending upon the host organism; in prokaryotes, such control sequences generally include a promoter, ribosomal binding site, terminators, and in some cases operators; in eukaryotes, generally such control sequences include promoters, terminators and in some instances, enhancers. The term control sequence is intended to include at a minimum, all components whose presence is necessary for expression, and may also include additional components whose presence is advantageous, for example, leader sequences.

[0082] As used herein, the term “operably linked” refers to sequences joined or ligated to function in their intended manner. For example, a control sequence is operably linked to coding sequence by ligation in such a way that expression of the coding sequence is achieved under conditions compatible with the control sequence and host cell.

[0083] The “metabolism” of a substance, as used herein, means any aspect of the expression, function, action, or regulation of the substance. The metabolism of a substance includes modifications, e.g., covalent or non-covalent modifications of the substance. The metabolism of a substance includes modifications, e.g., covalent or non-covalent modification, the substance induces in other substances. The metabolism of a substance also includes changes in the distribution of the substance. The metabolism of a substance includes changes the substance induces in the distribution of other substances.

[0084] A “sample” as used herein refers to a biological sample, such as, for example, tissue or fluid isolated from an individual (including without limitation plasma, serum, cerebrospinal fluid, lymph, tears, saliva and tissue sections) or from in vitro cell culture constituents, as well as samples from the environment.

[0085] Technical and scientific terms used herein have the meanings commonly understood by one of ordinary skill in the art to which the present invention pertains, unless otherwise defined. Reference is made herein to various methodologies known to those of skill in the art. Publications and other materials setting forth such known methodologies to which reference is made are incorporated herein by reference in their entireties as though set forth in full. The practice of the invention will employ, unless otherwise indicated, conventional techniques of chemistry, molecular biology, microbiology, recombinant DNA, and immunology, which are within the skill of the art. Such techniques are explained fully in the literature. See e.g., Sambrook, Fritsch, and Maniatis, Molecular Cloning; Laboratory Manual 2nd ed. (1989); DNA Cloning, Volumes I and II (D. N Glover ed. 1985); Oligonucleotide Synthesis (M. J. Gait ed, 1984); Nucleic Acid Hybridization (B. D. Hames & S. J. Higgins eds. 1984); the series, Methods in Enzymology (Academic Press, Inc.), particularly Vol. 154 and Vol. 155 (Wu and Grossman, eds.); PCR—A Practical Approach (McPherson, Quirke, and Taylor, eds., 1991); Immunology, 2d Edition, 1989, Roitt et al., C. V. Mosby Company, and New York; Advanced Immunology, 2d Edition, 1991, Male et al., Grower Medical Publishing, New York.; DNA Cloning: A Practical Approach, Volumes I and II, 1985 (D. N. Glover ed.); Oligonucleotide Synthesis, 1984, (M. L. Gait ed); Transcription and Translation, 1984 (Hames and Higgins eds.); Animal Cell Culture, 1986 (R. I. Freshney ed.); Immobilized Cells and Enzymes, 1986 (IRL Press); Perbal, 1984, A Practical Guide to Molecular Cloning; and Gene Transfer Vectors for Mammalian Cells, 1987 (J. H. Miller and M. P. Calos eds., Cold Spring Harbor Laboratory).

[0086] Any suitable materials and/or methods known to those of skill can be utilized in carrying out the present invention: however preferred materials and/or methods are described. Materials, reagents and the like to which reference is made in the following description and examples are obtainable from commercial sources, unless otherwise noted.

S. pneumoniae Genomic Sequence

[0087] This invention provides nucleotide sequences of the genome of S. pneumoniae which thus comprises a DNA sequence library of S. pneumoniae genomic DNA. The detailed description that follows provides nucleotide sequences of S. pneumoniae, and also describes how the sequences were obtained and how ORFs and protein-coding sequences were identified. Also described are methods of using the disclosed S. pneumoniae sequences in methods including diagnostic and therapeutic applications. Furthermore, the library can be used as a database for identification and comparison of medically important sequences in this and other strains of S. pneumoniae.

[0088] To determine the genomic sequence of S. pneumoniae, DNA was isolated from strain 14453 of S. pneumoniae and mechanically sheared by nebulization to a median size of 2 kb. Following size fractionation by gel electrophoresis, the fragments were blunt-ended, ligated to adapter oligonucleotides, and cloned into each of 20 different pMPX vectors (Rice et al., abstracts of Meeting of Genome Mapping and Sequencing, Cold Spring Harbor, N.Y., May 11-May 15, 1994, p. 225) and the PUC19 vector to construct a series of “shotgun” subclone libraries.

[0089] DNA sequencing was achieved using two sequencing methods. The first method used multiplex sequencing procedures essentially as disclosed in Church et al., 1988, Science 240:185; U.S. Pat. Nos. 4,942,124 and 5,149,625). DNA was extracted from pooled cultures and subjected to chemical or enzymatic sequencing. Sequencing reactions were resolved by electrophoresis, and the products were transferred and covalently bound to nylon membranes. Finally, the membranes were sequentially hybridized with a series of labelled oligonucleotides complimentary to “tag” sequences present in the different shotgun cloning vectors. In this manner, a large number of sequences could be obtained from a single set of sequencing reactions. The remainder of the sequencing was performed on ABI377 automated DNA sequencers. The cloning and sequencing procedures are described in more detail in the Exemplification.

[0090] Individual sequence reads were assembled using PHRAP (P. Green, Abstracts of DOE Human Genome Program Contractor-Grantee Workshop V, January. 1996, p. 157). The average contig length was about 3-4 kb.

[0091] A variety of approaches are used to order the contigs so as to obtain a continuous sequence representing the entire S. pneumoniae genome. Synthetic oligonucleotides are designed that are complementary to sequences at the end of each contig. These oligonucleotides may be hybridized to libraries of S. pneumoniae genomic DNA in, for example, lambda phage vectors or plasmid vectors to identify clones that contain sequences corresponding to the junctional regions between individual contigs. Such clones are then used to isolate template DNA and the same oligonucleotides are used as primers in polymerase chain reaction (PCR) to amplify junctional fragments, the nucleotide sequence of which is then determined.

[0092] The S. pneumoniae sequences were analyzed for the presence of open reading frames (ORFs) comprising at least 180 nucleotides. As a result of the initial analysis of ORFs based on stop-to-stop codon reads, it should be understood that these ORFs may not correspond to the ORF of a naturally-occurring S. pneumoniae polypeptide. These ORFs may contain start codons which indicate the initiation of protein synthesis of a naturally-occurring S. pneumoniae polypeptide. Such start codons within the ORFs provided herein can be identified by those of ordinary skill in the relevant art, and the resulting ORF and the encoded S. pneumoniae polypeptide is within the scope of this invention. For example, within the ORFs a codon such as AUG or GUG (encoding methionine or valine) which is part of the initiation signal for protein synthesis can be identified and the portion of an ORF to corresponding to a naturally-occurring S. pneumoniae polypeptide can be recognized.

[0093] The second analysis of the ORFs included identifying the start codons and the predicted coding regions. These ORFs provided in this invention were defined by one or more of the following methods: evaluating the coding potential of such sequences with the program GENEMARK™ (Borodovsky and McIninch, 1993, Comp. 17:123), distinguishing the coding from noncoding regions using the program Glimmer (Fraser et al, Nature, 1997), determining codon usage (Staden et al., Nucleic Acid Research 10: 141), and each predicted ORF amino acid sequence was compared with all protein sequences found in current GENBANK, SWISS-PROT, and PIR databases using the BLAST algorithm. BLAST identifies local alignments occurring by chance between the ORF sequence and the sequence in the databank (Altschal et al., 1990, L Mol. Biol. 215:403-410). Homologous ORFs (probabilities less than 10⁻⁵ by chance) and ORF's that are probably non-homologous (probabilities greater than 10⁻⁵ by chance) but have good codon usage were identified. Both homologous, sequences and non-homologous sequences with good codon usage are likely to encode proteins and are encompassed by the invention.

S. pneumoniae Nucleic Acids

[0094] The nucleic acids of this invention may be obtained directly from the DNA of the above referenced S. pneumoniae strain by using the polymerase chain reaction (PCR). See “PCR, A Practical Approach” (McPherson, Quirke, and Taylor, eds., IRL Press, Oxford, UK, 1991) for details about the PCR. High fidelity PCR can be used to ensure a faithful DNA copy prior to expression. In addition, the authenticity of amplified products can be verified by conventional sequencing methods. Clones carrying the desired sequences described in this invention may also be obtained by screening the libraries by means of the PCR or by hybridization of synthetic oligonucleotide probes to filter lifts of the library colonies or plaques as known in the art (see, e.g., Sambrook et al., Molecular Cloning, A Laboratory Manual 2nd edition, 1989, Cold Spring Harbor Press, NY).

[0095] It is also possible to obtain nucleic acids encoding S. pneumoniae polypeptides from a cDNA library in accordance with protocols herein described. A cDNA encoding an S. pneumoniae polypeptide can be obtained by isolating total mRNA from an appropriate strain. Double stranded cDNAs can then be prepared from the total mRNA. Subsequently, the cDNAs can be inserted into a suitable plasmid or viral (e.g., bacteriophage) vector using any one of a number of known techniques. Genes encoding S. pneumoniae polypeptides can also be cloned using established polymerase chain reaction techniques in accordance with the nucleotide sequence information provided by the invention. The nucleic acids of the invention can be DNA or RNA. Preferred nucleic acids of the invention are contained in the Sequence Listing.

[0096] The nucleic acids of the invention can also be chemically synthesized using standard techniques. Various methods of chemically synthesizing polydeoxynucleotides are known, including solid-phase synthesis which, like peptide synthesis, has been fully automated in commercially available DNA synthesizers (See e.g., Itakura et al. U.S. Pat. No. 4,598,049; Caruthers et al. U.S. Pat. No. 4,458,066; and Itakura U.S. Pat. Nos. 4,401,796 and 4,373,071, incorporated by reference herein).

[0097] Nucleic acids isolated or synthesized in accordance with features of the present invention are useful, by way of example, without limitation, as probes, primers, capture ligands, antisense genes and for developing expression systems for the synthesis of proteins and peptides corresponding to such sequences. As probes, primers, capture ligands and antisense agents, the nucleic acid normally consists of all or part (approximately twenty or more nucleotides for specificity as well as the ability to form stable hybridization products) of the nucleic acids of the invention contained in the Sequence Listing. These uses are described in further detail below.

[0098] Probes

[0099] A nucleic acid isolated or synthesized in accordance with the sequence of the invention contained in the Sequence Listing can be used as a probe to specifically detect S. pneumoniae. With the sequence information set forth in the present application, sequences of twenty or more nucleotides are identified which provide the desired inclusivity and exclusivity with respect to S. pneumoniae, and extraneous nucleic acids likely to be encountered during hybridization conditions. More preferably, the sequence will comprise at least twenty to thirty nucleotides to convey stability to the hybridization product formed between the probe and the intended target molecules.

[0100] Sequences larger than 1000 nucleotides in length are difficult to synthesize but can be generated by recombinant DNA techniques. Individuals skilled in the art will readily recognize that the nucleic acids, for use as probes, can be provided with a label to facilitate detection of a hybridization product.

[0101] Nucleic acid isolated and synthesized in accordance with the sequence of the invention contained in the Sequence Listing can also be useful as probes to detect homologous regions (especially homologous genes) of other Streptococcus species using appropriate stringency hybridization conditions as described herein.

[0102] Capture Ligand

[0103] For use as a capture ligand, the nucleic acid selected in the manner described above with respect to probes, can be readily associated with a support. The manner in which nucleic acid is associated with supports is well known. Nucleic acid having twenty or more nucleotides in a sequence of the invention contained in the Sequence Listing have utility to separate S. pneumoniae nucleic acid from the nucleic acid of each other and other organisms. Nucleic acid having twenty or more nucleotides in a sequence of the invention contained in the Sequence Listing can also have utility to separate other Streptococcus species from each other and from other organisms. Preferably, the sequence will comprise at least twenty nucleotides to convey stability to the hybridization product formed between the probe and the intended target molecules. Sequences larger than 1000 nucleotides in length are difficult to synthesize but can be generated by recombinant DNA techniques.

[0104] Primers

[0105] Nucleic acid isolated or synthesized in accordance with the sequences described herein have utility as primers for the amplification of S. pneumoniae nucleic acid. These nucleic acids may also have utility as primers for the amplification of nucleic acids in other Streptococcus species. With respect to polymerase chain reaction (PCR) techniques, nucleic acid sequences of ≧10-15 nucleotides of the invention contained in the Sequence Listing have utility in conjunction with suitable enzymes and reagents to create copies of S. pneumoniae nucleic acid. More preferably, the sequence will comprise twenty or more nucleotides to convey stability to the hybridization product formed between the primer and the intended target molecules. Binding conditions of primers greater than 100 nucleotides are more difficult to control to obtain specificity. High fidelity PCR can be used to ensure a faithful DNA copy prior to expression. In addition, amplified products can be checked by conventional sequencing methods.

[0106] The copies can be used in diagnostic assays to detect specific sequences, including genes from S. pneumoniae and/or other Streptococcus species. The copies can also be incorporated into cloning and expression vectors to generate polypeptides corresponding to the nucleic acid synthesized by PCR, as is described in greater detail herein.

[0107] Antisense

[0108] Nucleic acid or nucleic acid-hybridizing derivatives isolated or synthesized in accordance with the sequences described herein have utility as antisense agents to prevent the expression of S. pneumoniae genes. These sequences also have utility as antisense agents to prevent expression of genes of other Streptococcus species.

[0109] In one embodiment, nucleic acid or derivatives corresponding to S. pneumoniae nucleic acids is loaded into a suitable carrier such as a liposome or bacteriophage for introduction into bacterial cells. For example, a nucleic acid having twenty or more nucleotides is capable of binding to bacteria nucleic acid or bacteria messenger RNA. Preferably, the antisense nucleic acid is comprised of 20 or more nucleotides to provide necessary stability of a hybridization product of non-naturally occurring nucleic acid and bacterial nucleic acid and/or bacterial messenger RNA. Nucleic acid having a sequence greater than 1000 nucleotides in length is difficult to synthesize but can be generated by recombinant DNA techniques. Methods for loading antisense nucleic acid in liposomes is known in the art as exemplified by U.S. Pat. No. 4,241,046 issued Dec. 23, 1980 to Papahadjopoulos et al.

[0110] The present invention encompasses isolated polypeptides and nucleic acids derived from S. pneumoniae that are useful as reagents for diagnosis of bacterial infection, components of effective antibacterial vaccines, and/or as targets for antibacterial drugs, including anti-S. pneumoniae drugs.

Expression of S. pneumoniae Nucleic Acids

[0111] Table 2 provides a list of open reading frames (ORFs) in both strands. An ORF is a region of nucleic acid which encodes a polypeptide. This region normally represents a complete coding sequence or a total sequence and was determined from an initial analysis of stop to stop codons followed by the prediction of start codons. The first column lists the ORF designation. The second and third columns list the SEQ ID numbers for the nucleic acid and amino acid sequences corresponding to each ORF, respectively. The fourth and fifth columns list the length of the nucleic acid ORF and the length of the amino acid ORF, respectively. Most of the nucleotide sequences corresponding to each ORF begin at the first nucleotide of the start codon and end at the nucleotide immediately preceding the next downstream stop codon in the same reading frame. It will be recognized by one skilled in the art that the natural translation initiation sites will correspond to ATG, GTG, or TTG codons located within the ORFs. The natural initiation sites depend not only on the sequence of a start codon but also on the context of the DNA sequence adjacent to the start codon. Usually, a recognizable ribosome binding site is found within 20 nucleotides upstream from the initiation codon. In some cases where genes are translationally coupled and coordinately expressed together in “operons”, ribosome binding sites are not present, but the initiation codon of a downstream gene may occur very close to, or overlap, the stop codon of the an upstream gene in the same operon. The correct start codons can be generally identified rapidly and efficiently because only a few codons need be tested. It is recognized that the translational machinery in bacteria initiates most polypeptide chains with the amino acid methionine. In some cases, polypeptides are post-translationally modified, resulting in an N-terminal amino acid other than methionine in vivo. The sixth and seventh columns provide metrics for assessing the likelihood of the homology match (determined by the BLASTP2 algorithm), as is known in the art, to the genes indicated in the description field. Specifically, the sixth column represents the “Score” for the match (a higher score is a better match), and the seventh column represents the “P-value” for the match (the probability that such a match could have occurred by chance; the lower the value, the more likely the match is valid). If a BLASTP2 score of less than 46 was obtained, no value is reported in the table the “P-value”. The description field provides, where available, the accession number (AC) or the Swissprot accession number (SP), the locus name (LN), Superfamily Classification (CL), the Organism (OR), Source of variant (SR), E.C. number (EC), the gene name (GN), the product name (PN), the Function Description (FN), the Map Position (MP), Left End (LE), Right End (RE), Coding Direction (DI), the Database from which the sequence originates (DB), and the description (DE) or notes (NT) for each ORF. This information allows one of ordinary skill in the art to determine a potential use and function for each identified coding sequence and, as a result, allows the use of the polypeptides of the present invention for commercial and industrial purposes.

[0112] Using the information provided in SEQ ID NO: 1-SEQ ID NO: 2661 and in Table 2 together with routine cloning and sequencing methods, one of ordinary skill in the art will be able to clone and sequence all the nucleic acid fragments of interest including open reading frames (ORFs) encoding a large variety proteins of S. pneumoniae.

[0113] Nucleic acid isolated or synthesized in accordance with the sequences described herein have utility to generate polypeptides. The nucleic acid of the invention exemplified in SEQ ID NO: 1-SEQ ID NO: 2661 and in Table 2 or fragments of said nucleic acid encoding active portions of S. pneumoniae polypeptides can be cloned into suitable vectors or used to isolate nucleic acid. The isolated nucleic acid is combined with suitable DNA linkers and cloned into a suitable vector.

[0114] The function of a specific gene or operon can be ascertained by expression in a bacterial strain under conditions where the activity of the gene product(s) specified by the gene or operon in question can be specifically measured. Alternatively, a gene product may be produced in large quantities in an expressing strain for use as an antigen, an industrial reagent, for structural studies, etc. This expression can be accomplished in a mutant strain which lacks the activity of the gene to be tested, or in a strain that does not produce the same gene product(s). This includes, but is not limited to, Eucaryotic species such as the yeast Saccharomyces cerevisiae, Methanobacterium strains or other Archaea, and Eubacteria such as E. coli, B. subtilis, S. aureus, S. pneumonia or Pseudomonas putida. In some cases the expression host will utilize the natural S. pneumoniae promoter whereas in others, it will be necessary to drive the gene with a promoter sequence derived from the expressing organism (e.g., an E. coli beta-galactosidase promoter for expression in E. coli).

[0115] To express a gene product using the natural S. pneumoniae promoter, a procedure such as the following can be used. A restriction fragment containing the gene of interest, together with its associated natural promoter element and regulatory sequences (identified using the DNA sequence data) is cloned into an appropriate recombinant plasmid containing an origin of replication that functions in the host organism and an appropriate selectable marker. This can be accomplished by a number of procedures known to those skilled in the art. It is most preferably done by cutting the plasmid and the fragment to be cloned with the same restriction enzyme to produce compatible ends that can be ligated to join the two pieces together. The recombinant plasmid is introduced into the host organism by, for example, electroporation and cells containing the recombinant plasmid are identified by selection for the marker on the plasmid. Expression of the desired gene product is detected using an assay specific for that gene product.

[0116] In the case of a gene that requires a different promoter, the body of the gene (coding sequence) is specifically excised and cloned into an appropriate expression plasmid. This subcloning can be done by several methods, but is most easily accomplished by PCR amplification of a specific fragment and ligation into an expression plasmid after treating the PCR product with a restriction enzyme or exonuclease to create suitable ends for cloning.

[0117] A suitable host cell for expression of a gene can be any procaryotic or eucaryotic cell. For example, an S. pneumoniae polypeptide can be expressed in bacterial cells such as E. coli or B. subtilis, insect cells (baculovirus), yeast, or mammalian cells such as Chinese hamster ovary cell (CHO). Other suitable host cells are known to those skilled in the art.

[0118] Expression in eucaryotic cells such as mammalian, yeast, or insect cells can lead to partial or complete glycosylation and/or formation of relevant inter- or intra-chain disulfide bonds of a recombinant peptide product. Examples of vectors for expression in yeast S. cerivisae include pYepSec1 (Baldari. et al., (1987) Embo J. 6:229-234), pMFa (Kurjan and Herskowitz, (1982) Cell 30:933-943), pJRY88 (Schultz et al., (1987) Gene 54:113-123), and pYES2 (Invitrogen Corporation, San Diego, Calif.). Baculovirus vectors available for expression of proteins in cultured insect cells (SF 9 cells) include the pAc series (Smith et al., (1983) Mol. Cell. Biol. 3:2156-2165) and the pVL series (Lucklow, V. A., and Summers, M. D., (1989) Virology 170:31-39). Generally, COS cells (Gluzman, Y., (1981) Cell 23:175-182) are used in conjunction with such vectors as pCDM 8 (Aruffo, A. and Seed, B., (1987) Proc. Natl. Acad. Sci. USA 84:8573-8577) for transient amplification/expression in mammalian cells, while CHO (dhfr⁻ Chinese Hamster Ovary) cells are used with vectors such as pMT2PC (Kaufman et al. (1987), EMBO J. 6:187-195) for stable amplification/expression in mammalian cells. Vector DNA can be introduced into mammalian cells via conventional techniques such as calcium phosphate or calcium chloride co-precipitation, DEAE-dextran-mediated transfection, or electroporation. Suitable methods for transforming host cells can be found in Sambrook et al. (Molecular Cloning: A Laboratory Manual, 2nd Edition, Cold Spring Harbor Laboratory press (1989)), and other laboratory textbooks.

[0119] Expression in procaryotes is most often carried out in E. coli with either fusion or non-fusion inducible expression vectors. Fusion vectors usually add a number of NH₂ terminal amino acids to the expressed target gene. These NH₂ terminal amino acids often are referred to as a reporter group or an affinity purification group. Such reporter groups usually serve two purposes: 1) to increase the solubility of the target recombinant protein; and 2) to aid in the purification of the target recombinant protein by acting as a ligand in affinity purification. Often, in fusion expression vectors, a proteolytic cleavage site is introduced at the junction of the reporter group and the target recombinant protein to enable separation of the target recombinant protein from the reporter group subsequent to purification of the fusion protein. Such enzymes, and their cognate recognition sequences, include Factor Xa, thrombin and enterokinase. Typical fusion expression vectors include pGEX (Amrad Corp., Melbourne, Australia), pMAL (New England Biolabs, Beverly, Mass.) and pRIT5 (Pharmacia, Piscataway, N.J.) which fuse glutathione S-transferase, maltose E binding protein, or protein A, respectively, to the target recombinant protein. A preferred reporter group is poly(His), which may be fused to the amino or carboxy terminus of the protein and which renders the recombinant fusion protein easily purifiable by metal chelate chromatography.

[0120] Inducible non-fusion expression vectors include pTrc (Amann et al., (1988) Gene 69:301-315) and pET11d (Studier et al., Gene Expression Technology: Methods in Enzymology 185, Academic Press, San Diego, Calif. (1990) 60-89). While target gene expression relies on host RNA polymerase transcription from the hybrid trp-lac fusion promoter in pTrc, expression of target genes inserted into pET11d relies on transcription from the T7 gn10-lac 0 fusion promoter mediated by coexpressed viral RNA polymerase (T7 gn1). This viral polymerase is supplied by host strains BL21 (DE3) or HMS174(DE3) from a resident λ prophage harboring a T7 gn1 under the transcriptional control of the lacUV 5 promoter.

[0121] For example, a host cell transfected with a nucleic acid vector directing expression of a nucleotide sequence encoding an S. pneumoniae polypeptide can be cultured under appropriate conditions to allow expression of the polypeptide to occur. The polypeptide may be secreted and isolated from a mixture of cells and medium containing the peptide. Alternatively, the polypeptide may be retained cytoplasmically and the cells harvested, lysed and the protein isolated. A cell culture includes host cells, media and other byproducts. Suitable media for cell culture are well known in the art. Polypeptides of the invention can be isolated from cell culture medium, host cells, or both using techniques known in the art for purifying proteins including ion-exchange chromatography, gel filtration chromatography, ultrafiltration, electrophoresis, and immunoaffinity purification with antibodies specific for such polypeptides. Additionally, in many situations, polypeptides can be produced by chemical cleavage of a native protein (e.g., tryptic digestion) and the cleavage products can then be purified by standard techniques.

[0122] In the case of membrane bound proteins, these can be isolated from a host cell by contacting a membrane-associated protein fraction with a detergent forming a solubilized complex, where the membrane-associated protein is no longer entirely embedded in the membrane fraction and is solubilized at least to an extent which allows it to be chromatographically isolated from the membrane fraction. Several different criteria are used for choosing a detergent suitable for solubilizing these complexes. For example, one property considered is the ability of the detergent to solubilize the S. pneumoniae protein within the membrane fraction at minimal denaturation of the membrane-associated protein allowing for the activity or functionality of the membrane-associated protein to return upon reconstitution of the protein. Another property considered when selecting the detergent is the critical micelle concentration (CMC) of the detergent in that the detergent of choice preferably has a high CMC value allowing for ease of removal after reconstitution. A third property considered when selecting a detergent is the hydrophobicity of the detergent. Typically, membrane-associated proteins are very hydrophobic and therefore detergents which are also hydrophobic, e.g., the triton series, would be useful for solubilizing the hydrophobic proteins. Another property important to a detergent can be the capability of the detergent to remove the S. pneumoniae protein with minimal protein-protein interaction facilitating further purification. A fifth property of the detergent which should be considered is the charge of the detergent. For example, if it is desired to use ion exchange resins in the purification process then preferably detergent should be an uncharged detergent. Chromatographic techniques which can be used in the final purification step are known in the art and include hydrophobic interaction, lectin affinity, ion exchange, dye affinity and immunoaffinity.

[0123] One strategy to maximize recombinant S. pneumoniae peptide expression in E. coli is to express the protein in a host bacteria with an impaired capacity to proteolytically cleave the recombinant protein (Gottesman, S., Gene Expression Technology: Methods in Enzymology 185, Academic Press, San Diego, Calif. (1990) 119-128). Another strategy would be to alter the nucleic acid encoding an S. pneumoniae peptide to be inserted into an expression vector so that the individual codons for each amino acid would be those preferentially utilized in highly expressed E. coli proteins (Wada et al., (1992) Nuc. Acids Res. 20:2111-2118). Such alteration of nucleic acids of the invention can be carried out by standard DNA synthesis techniques.

[0124] The nucleic acids of the invention can also be chemically synthesized using standard techniques. Various methods of chemically synthesizing polydeoxynucleotides are known, including solid-phase synthesis which, like peptide synthesis, has been fully automated in commercially available DNA synthesizers (See, e.g., Itakura et al. U.S. Pat. No. 4,598,049; Caruthers et al. U.S. Pat. No. 4,458,066; and Itakura U.S. Pat. Nos. 4,401,796 and 4,373,071, incorporated by reference herein).

[0125] The present invention provides a library of S. pneumoniae-derived nucleic acid sequences. The libraries provide probes, primers, and markers which can be used as markers in epidemiological studies. The present invention also provides a library of S. pneumoniae-derived nucleic acid sequences which comprise or encode targets for therapeutic drugs.

[0126] Nucleic acids comprising any of the sequences disclosed herein or sub-sequences thereof can be prepared by standard methods using the nucleic acid sequence information provided in SEQ ID NO: 1-SEQ ID NO: 2661. For example, DNA can be chemically synthesized using, e.g., the phosphoramidite solid support method of Matteucci et al., 1981, J. Am. Chem. Soc. 103:3185, the method of Yoo et al., 1989, J. Biol. Chem. 764:17078, or other well known methods. This can be done by sequentially linking a series of oligonucleotide cassettes comprising pairs of synthetic oligonucleotides, as described below.

[0127] Of course, due to the degeneracy of the genetic code, many different nucleotide sequences can encode polypeptides having the amino acid sequences defined by SEQ ID NO: 2662-SEQ ID NO: 5322 or sub-sequences thereof. The codons can be selected for optimal expression in prokaryotic or eukaryotic systems. Such degenerate variants are also encompassed by this invention.

[0128] Insertion of nucleic acids (typically DNAs) encoding the polypeptides of the invention into a vector is easily accomplished when the termini of both the DNAs and the vector comprise compatible restriction sites. If this cannot be done, it may be necessary to modify the termini of the DNAs and/or vector by digesting back single-stranded DNA overhangs generated by restriction endonuclease cleavage to produce blunt ends, or to achieve the same result by filling in the single-stranded termini with an appropriate DNA polymerase.

[0129] Alternatively, any site desired may be produced, e.g., by ligating nucleotide sequences (linkers) onto the termini. Such linkers may comprise specific oligonucleotide sequences that define desired restriction sites. Restriction sites can also be generated by the use of the polymerase chain reaction (PCR). See, e.g., Saiki et al., 1988, Science 239:48. The cleaved vector and the DNA fragments may also be modified if required by homopolymeric tailing.

[0130] In certain embodiments, the invention encompasses isolated nucleic acid fragments comprising all or part of the individual nucleic acid sequences disclosed herein. The fragments are at least about 8 nucleotides in length, preferably at least about 12 nucleotides in length, and most preferably at least about 15-20 nucleotides in length.

[0131] The nucleic acids may be isolated directly from cells. Alternatively, the polymerase chain reaction (PCR) method can be used to produce the nucleic acids of the invention, using either chemically synthesized strands or genomic material as templates. Primers used for PCR can be synthesized using the sequence information provided herein and can further be designed to introduce appropriate new restriction sites, if desirable, to facilitate incorporation into a given vector for recombinant expression.

[0132] The nucleic acids of the present invention may be flanked by natural S. pneumoniae regulatory sequences, or may be associated with heterologous sequences, including promoters, enhancers, response elements, signal sequences, polyadenylation sequences, introns, 5′- and 3′-noncoding regions, and the like. The nucleic acids may also be modified by many means known in the art. Non-limiting examples of such modifications include methylation, “caps”, substitution of one or more of the naturally occurring nucleotides with an analog, internucleotide modifications such as, for example, those with uncharged linkages (e.g., methyl phosphonates, phosphotriesters, phosphoroamidates, carbamates, etc.) and with charged linkages (e.g., phosphorothioates, phosphorodithioates, etc.). Nucleic acids may contain one or more additional covalently linked moieties, such as, for example, proteins (e.g., nucleases, toxins, antibodies, signal peptides, poly-L-lysine, etc.), intercalators (e.g., acridine, psoralen, etc.), chelators (e.g., metals, radioactive metals, iron, oxidative metals, etc.), and alkylators. PNAs are also included. The nucleic acid may be derivatized by formation of a methyl or ethyl phosphotriester or an alkyl phosphoramidate linkage. Furthermore, the nucleic acid sequences of the present invention may also be modified with a label capable of providing a detectable signal, either directly or indirectly. Exemplary labels include radioisotopes, fluorescent molecules, biotin, and the like.

[0133] The invention also provides nucleic acid vectors comprising the disclosed S. pneumoniae-derived sequences or derivatives or fragments thereof. A large number of vectors, including plasmid and fungal vectors, have been described for replication and/or expression in a variety of eukaryotic and prokaryotic hosts, and may be used for gene therapy as well as for simple cloning or protein expression.

[0134] The encoded S. pneumoniae polypeptides may be expressed by using many known vectors, such as pUC plasmids, pET plasmids (Novagen, Inc., Madison, Wis.), or pRSET or pREP (Invitrogen, San Diego, Calif.), and many appropriate host cells, using methods disclosed or cited herein or otherwise known to those skilled in the relevant art. The particular choice of vector/host is not critical to the practice of the invention.

[0135] Recombinant cloning vectors will often include one or more replication systems for cloning or expression, one or more markers for selection in the host, e.g. antibiotic resistance, and one or more expression cassettes. The inserted S. pneumoniae coding sequences may be synthesized by standard methods, isolated from natural sources, or prepared as hybrids, etc. Ligation of the S. pneumoniae coding sequences to transcriptional regulatory elements and/or to other amino acid coding sequences may be achieved by known methods. Suitable host cells may be transformed/transfected/infected as appropriate by any suitable method including electroporation, CaCl₂ mediated DNA uptake, fungal infection, microinjection, microprojectile, or other established methods.

[0136] Appropriate host cells include bacteria, archebacteria, fungi, especially yeast, and plant and animal cells, especially mammalian cells. Of particular interest are S. pneumoniae, E. coli, B. Subtilis, Saccharomyces cerevisiae, Saccharomyces carlsbergensis, Schizosaccharomyces pombi, SF9 cells, C129 cells, 293 cells, Neurospora, and CHO cells, COS cells, HeLa cells, and immortalized mammalian myeloid and lymphoid cell lines. Preferred replication systems include M13, ColE1, SV40, baculovirus, lambda, adenovirus, and the like. A large number of transcription initiation and termination regulatory regions have been isolated and shown to be effective in the transcription and translation of heterologous proteins in the various hosts. Examples of these regions, methods of isolation, manner of manipulation, etc. are known in the art. Under appropriate expression conditions, host cells can be used as a source of recombinantly produced S. pneumoniae-derived peptides and polypeptides.

[0137] Advantageously, vectors may also include a transcription regulatory element (i.e., a promoter) operably linked to the S. pneumoniae portion. The promoter may optionally contain operator portions and/or ribosome binding sites. Non-limiting examples of bacterial promoters compatible with E. coli include: b-lactamase (penicillinase) promoter; lactose promoter; tryptophan (trp) promoter; araBAD (arabinose) operon promoter; lambda-derived PI promoter and N gene ribosome binding site; and the hybrid tac promoter derived from sequences of the trp and lac UV5 promoters. Non-limiting examples of yeast promoters include 3-phosphoglycerate kinase promoter, glyceraldehyde-3-phosphate dehydrogenase (GAPDH) promoter, galactokinase (GALL) promoter, galactoepimerase promoter, and alcohol dehydrogenase (ADH) promoter. Suitable promoters for mammalian cells include without limitation viral promoters such as that from Simian Virus 40 (SV40), Rous sarcoma virus (RSV), adenovirus (ADV), and bovine papilloma virus (BPV). Mammalian cells may also require terminator sequences, polyA addition sequences and enhancer sequences to increase expression. Sequences which cause amplification of the gene may also be desirable. Furthermore, sequences that facilitate secretion of the recombinant product from cells, including, but not limited to, bacteria, yeast, and animal cells, such as secretory signal sequences and/or prohormone pro region sequences, may also be included. These sequences are well described in the art.

[0138] Nucleic acids encoding wild-type or variant S. pneumoniae-derived polypeptides may also be introduced into cells by recombination events. For example, such a sequence can be introduced into a cell, and thereby effect homologous recombination at the site of an endogenous gene or a sequence with substantial identity to the gene. Other recombination-based methods such as nonhomologous recombinations or deletion of endogenous genes by homologous recombination may also be used.

[0139] The nucleic acids of the present invention find use as templates for the recombinant production of S. pneumoniae-derived peptides or polypeptides.

Identification and Use of S. pneumoniae Nucleic Acid Sequences

[0140] The disclosed S. pneumoniae polypeptide and nucleic acid sequences, or other sequences that are contained within ORFs, including complete protein-coding sequences, of which any of the disclosed S. pneumoniae-specific sequences forms a part, are useful as target components for diagnosis and/or treatment of S. pneumoniae-caused infection

[0141] It will be understood that the sequence of an entire protein-coding sequence of which each disclosed nucleic acid sequence forms a part can be isolated and identified based on each disclosed sequence. This can be achieved, for example, by using an isolated nucleic acid encoding the disclosed sequence, or fragments thereof, to prime a sequencing reaction with genomic S. pneumoniae DNA as template; this is followed by sequencing the amplified product. The isolated nucleic acid encoding the disclosed sequence, or fragments thereof, can also be hybridized to S. pneumoniae genomic libraries to identify clones containing additional complete segments of the protein-coding sequence of which the shorter sequence forms a part. Then, the entire protein-coding sequence, or fragments thereof, or nucleic acids encoding all or part of the sequence, or sequence-conservative or function-conservative variants thereof, may be employed in practicing the present invention.

[0142] Preferred sequences are those that are useful in diagnostic and/or therapeutic applications. Diagnostic applications include without limitation nucleic-acid-based and antibody-based methods for detecting bacterial infection. Therapeutic applications include without limitation vaccines, passive immunotherapy, and drug treatments directed against gene products that are both unique to bacteria and essential for growth and/or replication of bacteria.

Identification of Nucleic Acids Encoding Vaccine Components and Targets for Agents Effective Against S. pneumoniae

[0143] The disclosed S. pneumoniae genome sequence includes segments that direct the synthesis of ribonucleic acids and polypeptides, as well as origins of replication, promoters, other types of regulatory sequences, and intergenic nucleic acids. The invention encompasses nucleic acids encoding immunogenic components of vaccines and targets for agents effective against S. pneumoniae. Identification of said immunogenic components involved in the determination of the function of the disclosed sequences, which can be achieved using a variety of approaches. Non-limiting examples of these approaches are described briefly below.

[0144] Homology to Known Sequences

[0145] Computer-assisted comparison of the disclosed S. pneumoniae sequences with previously reported sequences present in publicly available databases is useful for identifying functional S. pneumoniae nucleic acid and polypeptide sequences. It will be understood that protein-coding sequences, for example, may be compared as a whole, and that a high degree of sequence homology between two proteins (such as, for example, >80-90%) at the amino acid level indicates that the two proteins also possess some degree of functional homology, such as, for example, among enzymes involved in metabolism, DNA synthesis, or cell wall synthesis, and proteins involved in transport, cell division, etc. In addition, many structural features of particular protein classes have been identified and correlate with specific consensus sequences, such as, for example, binding domains for nucleotides, DNA, metal ions, and other small molecules; sites for covalent modifications such as phosphorylation, acylation, and the like; sites of protein:protein interactions, etc. These consensus sequences may be quite short and thus may represent only a fraction of the entire protein-coding sequence. Identification of such a feature in an S. pneumoniae sequence is therefore useful in determining the function of the encoded protein and identifying useful targets of antibacterial drugs.

[0146] Of particular relevance to the present invention are structural features that are common to secretory, transmembrane, and surface proteins, including secretion signal peptides and hydrophobic transmembrane domains. S. pneumoniae proteins identified as containing putative signal sequences and/or transmembrane domains are useful as immunogenic components of vaccines.

[0147] Targets for therapeutic drugs according to the invention include, but are not limited to, polypeptides of the invention, whether unique to S. pneumoniae or not, that are essential for growth and/or viability of S. pneumoniae under at least one growth condition. Polypeptides essential for growth and/or viability can be determined by examining the effect of deleting and/or disrupting the genes, i.e., by so-called gene “knockout”. Alternatively, genetic footprinting can be used (Smith et al., 1995, Proc. Natl. Acad. Sci. USA 92:5479-6433; Published International Application WO 94/26933; U.S. Pat. No. 5,612,180). Still other methods for assessing essentiality includes the ability to isolate conditional lethal mutations in the specific gene (e.g., temperature sensitive mutations). Other useful targets for therapeutic drugs, which include polypeptides that are not essential for growth or viability per se but lead to loss of viability of the cell, can be used to target therapeutic agents to cells.

[0148] Strain-Specific Sequences

[0149] Because of the evolutionary relationship between different S. pneumoniae strains, it is believed that the presently disclosed S. pneumoniae sequences are useful for identifying, and/or discriminating between, previously known and new S. pneumoniae strains. It is believed that other S. pneumoniae strains will exhibit at least 70% sequence homology with the presently disclosed sequence. Systematic and routine analyses of DNA sequences derived from samples containing S. pneumoniae strains, and comparison with the present sequence allows for the identification of sequences that can be used to discriminate between strains, as well as those that are common to all S. pneumoniae strains. In one embodiment, the invention provides nucleic acids, including probes, and peptide and polypeptide sequences that discriminate between different strains of S. pneumoniae. Strain-specific components can also be identified functionally by their ability to elicit or react with antibodies that selectively recognize one or more S. pneumoniae strains.

[0150] In another embodiment, the invention provides nucleic acids, including probes, and peptide and polypeptide sequences that are common to all S. pneumoniae strains but are not found in other bacterial species.

S. pneumoniae Polypeptides

[0151] This invention encompasses isolated S. pneumoniae polypeptides encoded by the disclosed S. pneumoniae genomic sequences, including the polypeptides of the invention contained in the Sequence Listing. Polypeptides of the invention are preferably at least 5 amino acid residues in length. Using the DNA sequence information provided herein, the amino acid sequences of the polypeptides encompassed by the invention can be deduced using methods well-known in the art. It will be understood that the sequence of an entire nucleic acid encoding an S. pneumoniae polypeptide can be isolated and identified based on an ORF that encodes only a fragment of the cognate protein-coding region. This can be achieved, for example, by using the isolated nucleic acid encoding the ORF, or fragments thereof, to prime a polymerase chain reaction with genomic S. pneumoniae DNA as template; this is followed by sequencing the amplified product.

[0152] The polypeptides of the present invention, including function-conservative variants of the disclosed ORFs, may be isolated from wild-type or mutant S. pneumoniae cells, or from heterologous organisms or cells (including, but not limited to, bacteria, fungi, insect, plant, and mammalian cells) including S. pneumoniae into which a S. pneumoniae-derived protein-coding sequence has been introduced and expressed. Furthermore, the polypeptides may be part of recombinant fusion proteins.

[0153] S. pneumoniae polypeptides of the invention can be chemically synthesized using commercially automated procedures such as those referenced herein, including, without limitation, exclusive solid phase synthesis, partial solid phase methods, fragment condensation or classical solution synthesis. The polypeptides are preferably prepared by solid phase peptide synthesis as described by Merrifield, 1963, J. Am. Chem. Soc. 85:2149. The synthesis is carried out with amino acids that are protected at the alpha-amino terminus. Trifunctional amino acids with labile side-chains are also protected with suitable groups to prevent undesired chemical reactions from occurring during the assembly of the polypeptides. The alpha-amino protecting group is selectively removed to allow subsequent reaction to take place at the amino-terminus. The conditions for the removal of the alpha-amino protecting group do not remove the side-chain protecting groups.

[0154] The alpha-amino protecting groups are those known to be useful in the art of stepwise polypeptide synthesis. Included are acyl type protecting groups, e.g., formyl, trifluoroacetyl, acetyl, aromatic urethane type protecting groups, e.g., benzyloxycarbonyl (Cbz), substituted benzyloxycarbonyl and 9-fluorenylmethyloxycarbonyl (Fmoc), aliphatic urethane protecting groups, e.g., t-butyloxycarbonyl (Boc), isopropyloxycarbonyl, cyclohexyloxycarbonyl, and alkyl type protecting groups, e.g., benzyl, triphenylmethyl. The preferred protecting group is Boc. The side-chain protecting groups for Tyr include tetrahydropyranyl, tert-butyl, trityl, benzyl, Cbz, 4-Br-Cbz and 2,6-dichlorobenzyl. The preferred side-chain protecting group for Tyr is 2,6-dichlorobenzyl. The side-chain protecting groups for Asp include benzyl, 2,6-dichlorobenzyl, methyl, ethyl and cyclohexyl. The preferred side-chain protecting group for Asp is cyclohexyl. The side-chain protecting groups for Thr and Ser include acetyl, benzoyl, trityl, tetrahydropyranyl, benzyl, 2,6-dichlorobenzyl and Cbz. The preferred protecting group for Thr and Ser is benzyl. The side-chain protecting groups for Arg include nitro, Tos, Cbz, adamantyloxycarbonyl and Boc. The preferred protecting group for Arg is Tos. The side-chain amino group of Lys may be protected with Cbz, 2-Cl-Cbz, Tos or Boc. The 2-Cl-Cbz group is the preferred protecting group for Lys.

[0155] The side-chain protecting groups selected must remain intact during coupling and not be removed during the deprotection of the amino-terminus protecting group or during coupling conditions. The side-chain protecting groups must also be removable upon the completion of synthesis, using reaction conditions that will not alter the finished polypeptide.

[0156] Solid phase synthesis is usually carried out from the carboxy-terminus by coupling the alpha-amino protected (side-chain protected) amino acid to a suitable solid support. An ester linkage is formed when the attachment is made to a chloromethyl or hydroxymethyl resin, and the resulting polypeptide will have a free carboxyl group at the C-terminus. Alternatively, when a benzhydrylamine or p-methylbenzhydrylamine resin is used, an amide bond is formed and the resulting polypeptide will have a carboxamide group at the C-terminus. These resins are commercially available, and their preparation was described by Stewart et al., 1984, Solid Phase Peptide Synthesis (2nd Edition), Pierce Chemical Co., Rockford, Ill.

[0157] The C-terminal amino acid, protected at the side chain if necessary and at the alpha-amino group, is coupled to the benzhydrylamine resin using various activating agents including dicyclohexylcarbodiimide (DCC), N,N′-diisopropyl-carbodiimide and carbonyldiimidazole. Following the attachment to the resin support, the alpha-amino protecting group is removed using trifluoroacetic acid (TFA) or HCl in dioxane at a temperature between 0 and 25° C. Dimethylsulfide is added to the TFA after the introduction of methionine (Met) to suppress possible S-alkylation. After removal of the alpha-amino protecting group, the remaining protected amino acids are coupled stepwise in the required order to obtain the desired sequence.

[0158] Various activating agents can be used for the coupling reactions including DCC, N,N′-diisopropyl-carbodiimide, benzotriazol-1-yl-oxy-tris-(dimethylamino)-phosphonium hexa-fluorophosphate (BOP) and DCC-hydroxybenzotriazole (HOBt). Each protected amino acid is used in excess (>2.0 equivalents), and the couplings are usually carried out in N-methylpyrrolidone (NMP) or in DMF, CH₂Cl₂ or mixtures thereof. The extent of completion of the coupling reaction is monitored at each stage, e.g., by the ninhydrin reaction as described by Kaiser et al., 1970, Anal. Biochem. 34:595. In cases where incomplete coupling is found, the coupling reaction is repeated. The coupling reactions can be performed automatically with commercially available instruments.

[0159] After the entire assembly of the desired polypeptide, the polypeptide-resin is cleaved with a reagent such as liquid HF for 1-2 hours at 0° C., which cleaves the polypeptide from the resin and removes all side-chain protecting groups. A scavenger such as anisole is usually used with the liquid HF to prevent cations formed during the cleavage from alkylating the amino acid residues present in the polypeptide. The polypeptide-resin may be deprotected with TFA/dithioethane prior to cleavage if desired.

[0160] Side-chain to side-chain cyclization on the solid support requires the use of an orthogonal protection scheme which enables selective cleavage of the side-chain functions of acidic amino acids (e.g., Asp) and the basic amino acids (e.g., Lys). The 9-fluorenylmethyl (Fm) protecting group for the side-chain of Asp and the 9-fluorenylmethyloxycarbonyl (Fmoc) protecting group for the side-chain of Lys can be used for this purpose. In these cases, the side-chain protecting groups of the Boc-protected polypeptide-resin are selectively removed with piperidine in DMF. Cyclization is achieved on the solid support using various activating agents including DCC, DCC/HOBt or BOP. The HF reaction is carried out on the cyclized polypeptide-resin as described above.

[0161] Methods for polypeptide purification are well-known in the art, including, without limitation, preparative disc-gel electrophoresis, isoelectric focusing, HPLC, reversed-phase HPLC, gel filtration, ion exchange and partition chromatography, and countercurrent distribution. For some purposes, it is preferable to produce the polypeptide in a recombinant system in which the S. pneumoniae protein contains an additional sequence tag that facilitates purification, such as, but not limited to, a polyhistidine sequence. The polypeptide can then be purified from a crude lysate of the host cell by chromatography on an appropriate solid-phase matrix. Alternatively, antibodies produced against a S. pneumoniae protein or against peptides derived therefrom can be used as purification reagents. Other purification methods are possible.

[0162] The present invention also encompasses derivatives and homologues of S. pneumoniae-encoded polypeptides. For some purposes, nucleic acid sequences encoding the peptides may be altered by substitutions, additions, or deletions that provide for functionally equivalent molecules, i.e., function-conservative variants. For example, one or more amino acid residues within the sequence can be substituted by another amino acid of similar properties, such as, for example, positively charged amino acids (arginine, lysine, and histidine); negatively charged amino acids (aspartate and glutamate); polar neutral amino acids; and non-polar amino acids. The isolated polypeptides may be modified by, for example, phosphorylation, sulfation, acylation, or other protein modifications. They may also be modified with a label capable of providing a detectable signal, either directly or indirectly, including, but not limited to, radioisotopes and fluorescent compounds.

[0163] To identify S. pneumoniae-derived polypeptides for use in the present invention, essentially the complete genomic sequence of a virulent, methicillin-resistant isolate of Streptococcus pneumoniae isolate was analyzed. While, in very rare instances, a nucleic acid sequencing error may be revealed, resolving a rare sequencing error is well within the art, and such an occurrence will not prevent one skilled in the art from practicing the invention.

[0164] Also encompassed are any S. pneumoniae polypeptide sequences that are contained within the open reading frames (ORFs), including complete protein-coding sequences, of which any of SEQ ID NO: 2662-SEQ ID NO: 5322 forms a part. Table 2, which is appended herewith and which forms part of the present specification, provides a putative identification of the particular function of a polypeptide which is encoded by each ORF. As a result, one skilled in the art can use the polypeptides of the present invention for commercial and industrial purposes consistent with the type of putative identification of the polypeptide.

[0165] The present invention provides a library of S. pneumoniae-derived polypeptide sequences, and a corresponding library of nucleic acid sequences encoding the polypeptides, wherein the polypeptides themselves, or polypeptides contained within ORFs of which they form a part, comprise sequences that are contemplated for use as components of vaccines. Non-limiting examples of such sequences are listed by SEQ ID NO in Table 2, which is appended herewith and which forms part of the present specification.

[0166] The present invention also provides a library of S. pneumoniae-derived polypeptide sequences, and a corresponding library of nucleic acid sequences encoding the polypeptides, wherein the polypeptides themselves, or polypeptides contained within ORFs of which they form a part, comprise sequences lacking homology to any known prokaryotic or eukaryotic sequences. Such libraries provide probes, primers, and markers which can be used to diagnose S. pneumoniae infection, including use as markers in epidemiological studies. Non-limiting examples of such sequences are listed by SEQ ID NO in Table 2, which is appended

[0167] The present invention also provides a library of S. pneumoniae-derived polypeptide sequences, and a corresponding library of nucleic acid sequences encoding the polypeptides, wherein the polypeptides themselves, or polypeptides contained within ORFs of which they form a part, comprise targets for therapeutic drugs.

### Specific Example: Determination of Candidate Protein Antigens for Antibody and Vaccine Development

[0168] The selection of candidate protein antigens for vaccine development can be derived from the nucleic acids encoding S. pneumoniae polypeptides. First, the ORF's can be analyzed for homology to other known exported or membrane proteins and analyzed using the discriminant analysis described by Klein, et al. (Klein, P., Kanehsia, M., and DeLisi, C. (1985) Biochimica et Biophysica Acta 815, 468-476) for predicting exported and membrane proteins.

[0169] Homology searches can be performed using the BLAST algorithm contained in the Wisconsin Sequence Analysis Package (Genetics Computer Group, University Research Park, 575 Science Drive, Madison, Wis. 53711) to compare each predicted ORF amino acid sequence with all sequences found in the current GenBank, SWISS-PROT and PIR databases. BLAST searches for local alignments between the ORF and the databank sequences and reports a probability score which indicates the probability of finding this sequence by chance in the database. ORFs with significant homology (e.g. probabilities lower than 1×10⁻⁶ that the homology is only due to random chance) to membrane or exported proteins represent protein antigens for vaccine development. Possible functions can be provided to S. pneumoniae genes based on sequence homology to genes cloned in other organisms.

[0170] Discriminant analysis (Klein, et al. supra) can be used to examine the ORF amino acid sequences. This algorithm uses the intrinsic information contained in the ORF amino acid sequence and compares it to information derived from the properties of known membrane and exported proteins. This comparison predicts which proteins will be exported, membrane associated or cytoplasmic. ORF amino acid sequences identified as exported or membrane associated by this algorithm are likely protein antigens for vaccine development.

Production of Fragments and Analogs of S. pneumoniae Nucleic Acids and Polypeptides

[0171] Based on the discovery of the S. pneumoniae gene products of the invention provided in the Sequence Listing, one skilled in the art can alter the disclosed structure (of S. pneumoniae genes), e.g., by producing fragments or analogs, and test the newly produced structures for activity. Examples of techniques known to those skilled in the relevant art which allow the production and testing of fragments and analogs are discussed below. These, or analogous methods can be used to make and screen libraries of polypeptides, e.g., libraries of random peptides or libraries of fragments or analogs of cellular proteins for the ability to bind S. pneumoniae polypeptides. Such screens are useful for the identification of inhibitors of S. pneumoniae.

[0172] Generation of Fragments

[0173] Fragments of a protein can be produced in several ways, e.g., recombinantly, by proteolytic digestion, or by chemical synthesis. Internal or terminal fragments of a polypeptide can be generated by removing one or more nucleotides from one end (for a terminal fragment) or both ends (for an internal fragment) of a nucleic acid which encodes the polypeptide. Expression of the mutagenized DNA produces polypeptide fragments. Digestion with “end-nibbling” endonucleases can thus generate DNA's which encode an array of fragments. DNA's which encode fragments of a protein can also be generated by random shearing, restriction digestion or a combination of the above-discussed methods.

[0174] Fragments can also be chemically synthesized using techniques known in the art such as conventional Merrifield solid phase f-Moc or t-Boc chemistry. For example, peptides of the present invention may be arbitrarily divided into fragments of desired length with no overlap of the fragments, or divided into overlapping fragments of a desired length.

### Alteration of Nucleic Acids and Polypeptides: Random Methods

[0175] Amino acid sequence variants of a protein can be prepared by random mutagenesis of DNA which encodes a protein or a particular domain or region of a protein. Useful methods include PCR mutagenesis and saturation mutagenesis. A library of random amino acid sequence variants can also be generated by the synthesis of a set of degenerate oligonucleotide sequences. (Methods for screening proteins in a library of variants are elsewhere herein).

[0176] PCR Mutagenesis

[0177] In PCR mutagenesis, reduced Taq polymerase fidelity is used to introduce random mutations into a cloned fragment of DNA (Leung et al., 1989, Technique 1:11-15). The DNA region to be mutagenized is amplified using the polymerase chain reaction (PCR) under conditions that reduce the fidelity of DNA synthesis by Taq DNA polymerase, e.g., by using a dGTP/dATP ratio of five and adding Mn²⁺ to the PCR reaction. The pool of amplified DNA fragments are inserted into appropriate cloning vectors to provide random mutant libraries.

[0178] Saturation Mutagenesis

[0179] Saturation mutagenesis allows for the rapid introduction of a large number of single base substitutions into cloned DNA fragments (Mayers et al., 1985, Science 229:242). This technique includes generation of mutations, e.g., by chemical treatment or irradiation of single-stranded DNA in vitro, and synthesis of a complimentary DNA strand. The mutation frequency can be modulated by modulating the severity of the treatment, and essentially all possible base substitutions can be obtained. Because this procedure does not involve a genetic selection for mutant fragments both neutral substitutions, as well as those that alter function, are obtained. The distribution of point mutations is not biased toward conserved sequence elements.

[0180] Degenerate Oligonucleotides

[0181] A library of homologs can also be generated from a set of degenerate oligonucleotide sequences. Chemical synthesis of a degenerate sequences can be carried out in an automatic DNA synthesizer, and the synthetic genes then ligated into an appropriate expression vector. The synthesis of degenerate oligonucleotides is known in the art (see for example, Narang, S A (1983) Tetrahedron 39:3; Itakura et al. (1981) Recombinant DNA, Proc 3rd Cleveland Sympos. Macromolecules, ed. AG Walton, Amsterdam: Elsevier pp 273-289; Itakura et al. (1984) Annu. Rev. Biochem. 53:323; Itakura et al. (1984) Science 198:1056; Ike et al. (1983) Nucleic Acid Res. 11:477. Such techniques have been employed in the directed evolution of other proteins (see, for example, Scott et al. (1990) Science 249:386-390; Roberts et al. (1992) PNAS 89:2429-2433; Devlin et al. (1990) Science 249: 404-406; Cwirla et al. (1990) PNAS 87: 6378-6382; as well as U.S. Pat. Nos. 5,223,409, 5,198,346, and 5,096,815).

### Alteration of Nucleic Acids and Polypeptides: Methods for Directed Mutagenesis

[0182] Non-random or directed, mutagenesis techniques can be used to provide specific sequences or mutations in specific regions. These techniques can be used to create variants which include, e.g., deletions, insertions, or substitutions, of residues of the known amino acid sequence of a protein. The sites for mutation can be modified individually or in series, e.g., by (1) substituting first with conserved amino acids and then with more radical choices depending upon results achieved, (2) deleting the target residue, or (3) inserting residues of the same or a different class adjacent to the located site, or combinations of options 1-3.

[0183] Alanine Scanning Mutagenesis

[0184] Alanine scanning mutagenesis is a useful method for identification of certain residues or regions of the desired protein that are preferred locations or domains for mutagenesis, Cunningham and Wells (Science 244:1081-1085, 1989). In alanine scanning, a residue or group of target residues are identified (e.g., charged residues such as Arg, Asp, His, Lys, and Glu) and replaced by a neutral or negatively charged amino acid (most preferably alanine or polyalanine). Replacement of an amino acid can affect the interaction of the amino acids with the surrounding aqueous environment in or outside the cell. Those domains demonstrating functional sensitivity to the substitutions are then refined by introducing further or other variants at or for the sites of substitution. Thus, while the site for introducing an amino acid sequence variation is predetermined, the nature of the mutation per se need not be predetermined. For example, to optimize the performance of a mutation at a given site, alanine scanning or random mutagenesis may be conducted at the target codon or region and the expressed desired protein subunit variants are screened for the optimal combination of desired activity.

[0185] Oligonucleotide-Mediated Mutagenesis

[0186] Oligonucleotide-mediated mutagenesis is a useful method for preparing substitution, deletion, and insertion variants of DNA, see, e.g., Adelman et al., (DNA 2:183, 1983). Briefly, the desired DNA is altered by hybridizing an oligonucleotide encoding a mutation to a DNA template, where the template is the single-stranded form of a plasmid or bacteriophage containing the unaltered or native DNA sequence of the desired protein. After hybridization, a DNA polymerase is used to synthesize an entire second complementary strand of the template that will thus incorporate the oligonucleotide primer, and will code for the selected alteration in the desired protein DNA. Generally, oligonucleotides of at least 25 nucleotides in length are used. An optimal oligonucleotide will have 12 to 15 nucleotides that are completely complementary to the template on either side of the nucleotide(s) coding for the mutation. This ensures that the oligonucleotide will hybridize properly to the single-stranded DNA template molecule. The oligonucleotides are readily synthesized using techniques known in the art such as that described by Crea et al. (Proc. Natl. Acad. Sci. USA, 75: 5765[1978]).

[0187] Cassette Mutagenesis

[0188] Another method for preparing variants, cassette mutagenesis, is based on the technique described by Wells et al. (Gene, 34:315[1985]). The starting material is a plasmid (or other vector) which includes the protein subunit DNA to be mutated. The codon(s) in the protein subunit DNA to be mutated are identified. There must be a unique restriction endonuclease site on each side of the identified mutation site(s). If no such restriction sites exist, they may be generated using the above-described oligonucleotide-mediated mutagenesis method to introduce them at appropriate locations in the desired protein subunit DNA. After the restriction sites have been introduced into the plasmid, the plasmid is cut at these sites to linearize it. A double-stranded oligonucleotide encoding the sequence of the DNA between the restriction sites but containing the desired mutation(s) is synthesized using standard procedures. The two strands are synthesized separately and then hybridized together using standard techniques. This double-stranded oligonucleotide is referred to as the cassette. This cassette is designed to have 3′ and 5′ ends that are comparable with the ends of the linearized plasmid, such that it can be directly ligated to the plasmid. This plasmid now contains the mutated desired protein subunit DNA sequence.

[0189] Combinatorial Mutagenesis

[0190] Combinatorial mutagenesis can also be used to generate mutants (Ladner et al., WO 88/06630). In this method, the amino acid sequences for a group of homologs or other related proteins are aligned, preferably to promote the highest homology possible. All of the amino acids which appear at a given position of the aligned sequences can be selected to create a degenerate set of combinatorial sequences. The variegated library of variants is generated by combinatorial mutagenesis at the nucleic acid level, and is encoded by a variegated gene library. For example, a mixture of synthetic oligonucleotides can be enzymatically ligated into gene sequences such that the degenerate set of potential sequences are expressible as individual peptides, or alternatively, as a set of larger fusion proteins containing the set of degenerate sequences.

Other Modifications of S. pneumoniae Nucleic Acids and Polypeptides

[0191] It is possible to modify the structure of an S. pneumoniae polypeptide for such purposes as increasing solubility, enhancing stability (e.g., shelf life ex vivo and resistance to proteolytic degradation in vivo). A modified S. pneumoniae protein or peptide can be produced in which the amino acid sequence has been altered, such as by amino acid substitution, deletion, or addition as described herein.

[0192] An S. pneumoniae peptide can also be modified by substitution of cysteine residues preferably with alanine, serine, threonine, leucine or glutamic acid residues to minimize dimerization via disulfide linkages. In addition, amino acid side chains of fragments of the protein of the invention can be chemically modified. Another modification is cyclization of the peptide.

[0193] In order to enhance stability and/or reactivity, an S. pneumoniae polypeptide can be modified to incorporate one or more polymorphisms in the amino acid sequence of the protein resulting from any natural allelic variation. Additionally, D-amino acids, non-natural amino acids, or non-amino acid analogs can be substituted or added to produce a modified protein within the scope of this invention. Furthermore, an S. pneumoniae polypeptide can be modified using polyethylene glycol (PEG) according to the method of A. Sehon and co-workers (Wie et al., supra) to produce a protein conjugated with PEG. In addition, PEG can be added during chemical synthesis of the protein. Other modifications of S. pneumoniae proteins include reduction/alkylation (Tarr, Methods of Protein Microcharacterization, J. E. Silver ed., Humana Press, Clifton N.J. 155-194 (1986)); acylation (Tarr, supra); chemical coupling to an appropriate carrier (Mishell and Shiigi, eds, Selected Methods in Cellular Immunology, WH Freeman, San Francisco, Calif. (1980), U.S. Pat. No. 4,939,239; or mild formalin treatment (Marsh, (1971) Int. Arch. of Allergy and Appl. Immunol., 41: 199-215).

[0194] To facilitate purification and potentially increase solubility of an S. pneumoniae protein or peptide, it is possible to add an amino acid fusion moiety to the peptide backbone. For example, hexa-histidine can be added to the protein for purification by immobilized metal ion affinity chromatography (Hochuli, E. et al., (1988) Bio/Technology, 6: 1321-1325). In addition, to facilitate isolation of peptides free of irrelevant sequences, specific endoprotease cleavage sites can be introduced between the sequences of the fusion moiety and the peptide.

[0195] To potentially aid proper antigen processing of epitopes within an S. pneumoniae polypeptide, canonical protease sensitive sites can be engineered between regions, each comprising at least one epitope via recombinant or synthetic methods. For example, charged amino acid pairs, such as KK or RR, can be introduced between regions within a protein or fragment during recombinant construction thereof. The resulting peptide can be rendered sensitive to cleavage by cathepsin and/or other trypsin-like enzymes which would generate portions of the protein containing one or more epitopes. In addition, such charged amino acid residues can result in an increase in the solubility of the peptide.

### Primary Methods for Screening Polypeptides and Analogs

[0196] Various techniques are known in the art for screening generated mutant gene products. Techniques for screening large gene libraries often include cloning the gene library into replicable expression vectors, transforming appropriate cells with the resulting library of vectors, and expressing the genes under conditions in which detection of a desired activity, e.g., in this case, binding to S. pneumoniae polypeptide or an interacting protein, facilitates relatively easy isolation of the vector encoding the gene whose product was detected. Each of the techniques described below is amenable to high through-put analysis for screening large numbers of sequences created, e.g., by random mutagenesis techniques.

[0197] Two Hybrid Systems

[0198] Two hybrid assays such as the system described above (as with the other screening methods described herein), can be used to identify polypeptides, e.g., fragments or analogs of a naturally-occurring S. pneumoniae polypeptide, e.g., of cellular proteins, or of randomly generated polypeptides which bind to an S. pneumoniae protein. (The S. pneumoniae domain is used as the bait protein and the library of variants are expressed as prey fusion proteins.) In an analogous fashion, a two hybrid assay (as with the other screening methods described herein), can be used to find polypeptides which bind a S. pneumoniae polypeptide.

[0199] Display Libraries

[0200] In one approach to screening assays, the candidate peptides are displayed on the surface of a cell or viral particle, and the ability of particular cells or viral particles to bind an appropriate receptor protein via the displayed product is detected in a “panning assay”. For example, the gene library can be cloned into the gene for a surface membrane protein of a bacterial cell, and the resulting fusion protein detected by panning (Ladner et al., WO 88/06630; Fuchs et al. (1991) Bio/Technology 9:1370-1371; and Goward et al. (1992) TIBS 18:136-140). In a similar fashion, a detectably labeled ligand can be used to score for potentially functional peptide homologs. Fluorescently labeled ligands, e.g., receptors, can be used to detect homologs which retain ligand-binding activity. The use of fluorescently labeled ligands, allows cells to be visually inspected and separated under a fluorescence microscope, or, where the morphology of the cell permits, to be separated by a fluorescence-activated cell sorter.

[0201] A gene library can be expressed as a fusion protein on the surface of a viral particle. For instance, in the filamentous phage system, foreign peptide sequences can be expressed on the surface of infectious phage, thereby conferring two significant benefits. First, since these phage can be applied to affinity matrices at concentrations well over 10¹³ phage per milliliter, a large number of phage can be screened at one time. Second, since each infectious phage displays a gene product on its surface, if a particular phage is recovered from an affinity matrix in low yield, the phage can be amplified by another round of infection. The group of almost identical E. coli filamentous phages M13, fd., and f1 are most often used in phage display libraries. Either of the phage gIII or gVIII coat proteins can be used to generate fusion proteins without disrupting the ultimate packaging of the viral particle. Foreign epitopes can be expressed at the NH₂-terminal end of pill and phage bearing such epitopes recovered from a large excess of phage lacking this epitope (Ladner et al. PCT publication WO 90/02909; Garrard et al., PCT publication WO 92/09690; Marks et al. (1992) J. Biol. Chem. 267:16007-16010; Griffiths et al. (1993) EMBO J 12:725-734; Clackson et al. (1991) Nature 352:624-628; and Barbas et al. (1992) PNAS 89:4457-4461).

[0202] A common approach uses the maltose receptor of E. coli (the outer membrane protein, LamB) as a peptide fusion partner (Charbit et al. (1986) EMBO 5, 3029-3037). Oligonucleotides have been inserted into plasmids encoding the LamB gene to produce peptides fused into one of the extracellular loops of the protein. These peptides are available for binding to ligands, e.g., to antibodies, and can elicit an immune response when the cells are administered to animals. Other cell surface proteins, e.g., OmpA (Schorr et al. (1991) Vaccines 91, pp. 387-392), PhoE (Agterberg, et al. (1990) Gene 88, 37-45), and PAL (Fuchs et al. (1991) Bio/Tech 9, 1369-1372), as well as large bacterial surface structures have served as vehicles for peptide display. Peptides can be fused to pilin, a protein which polymerizes to form the pilus-a conduit for interbacterial exchange of genetic information (Thiry et al. (1989) Appl. Environ. Microbiol. 55, 984-993). Because of its role in interacting with other cells, the pilus provides a useful support for the presentation of peptides to the extracellular environment. Another large surface structure used for peptide display is the bacterial motive organ, the flagellum. Fusion of peptides to the subunit protein flagellin offers a dense array of many peptide copies on the host cells (Kuwajima et al. (1988) Bio/Tech. 6, 1080-1083). Surface proteins of other bacterial species have also served as peptide fusion partners. Examples include the Staphylococcus protein A and the outer membrane IgA protease of Neisseria (Hansson et al. (1992) J. Bacteriol. 174, 4239-4245 and Klauser et al. (1990) EMBO J. 9, 1991-1999).

[0203] In the filamentous phage systems and the LamB system described above, the physical link between the peptide and its encoding DNA occurs by the containment of the DNA within a particle (cell or phage) that carries the peptide on its surface. Capturing the peptide captures the particle and the DNA within. An alternative scheme uses the DNA-binding protein LacI to form a link between peptide and DNA (Cull et al. (1992) PNAS USA 89:1865-1869). This system uses a plasmid containing the LacI gene with an oligonucleotide cloning site at its 3′-end. Under the controlled induction by arabinose, a LacI-peptide fusion protein is produced. This fusion retains the natural ability of LacI to bind to a short DNA sequence known as LacO operator (LacO). By installing two copies of LacO on the expression plasmid, the LacI-peptide fusion binds tightly to the plasmid that encoded it. Because the plasmids in each cell contain only a single oligonucleotide sequence and each cell expresses only a single peptide sequence, the peptides become specifically and stablely associated with the DNA sequence that directed its synthesis. The cells of the library are gently lysed and the peptide-DNA complexes are exposed to a matrix of immobilized receptor to recover the complexes containing active peptides. The associated plasmid DNA is then reintroduced into cells for amplification and DNA sequencing to determine the identity of the peptide ligands. As a demonstration of the practical utility of the method, a large random library of dodecapeptides was made and selected on a monoclonal antibody raised against the opioid peptide dynorphin B. A cohort of peptides was recovered, all related by a consensus sequence corresponding to a six-residue portion of dynorphin B. (Cull et al. (1992) Proc. Natl. Acad. Sci. U.S.A. 89-1869).

[0204] This scheme, sometimes referred to as peptides-on-plasmids, differs in two important ways from the phage display methods. First, the peptides are attached to the C-terminus of the fusion protein, resulting in the display of the library members as peptides having free carboxy termini. Both of the filamentous phage coat proteins, pIII and pVII, are anchored to the phage through their C-termini, and the guest peptides are placed into the outward-extending N-terminal domains. In some designs, the phage-displayed peptides are presented right at the amino terminus of the fusion protein. (Cwirla, et al. (1990) Proc. Natl. Acad. Sci. U.S.A. 87, 6378-6382) A second difference is the set of biological biases affecting the population of peptides actually present in the libraries. The LacI fusion molecules are confined to the cytoplasm of the host cells. The phage coat fusions are exposed briefly to the cytoplasm during translation but are rapidly secreted through the inner membrane into the periplasmic compartment, remaining anchored in the membrane by their C-terminal hydrophobic domains, with the N-termini, containing the peptides, protruding into the periplasm while awaiting assembly into phage particles. The peptides in the LacI and phage libraries may differ significantly as a result of their exposure to different proteolytic activities. The phage coat proteins require transport across the inner membrane and signal peptidase processing as a prelude to incorporation into phage. Certain peptides exert a deleterious effect on these processes and are underrepresented in the libraries (Gallop et al. (1994) J. Med. Chem. 37(9):1233-1251). These particular biases are not a factor in the LacI display system.

[0205] The number of small peptides available in recombinant random libraries is enormous. Libraries of 10⁷-10⁹ independent clones are routinely prepared. Libraries as large as 10¹¹ recombinants have been created, but this size approaches the practical limit for clone libraries. This limitation in library size occurs at the step of transforming the DNA containing randomized segments into the host bacterial cells. To circumvent this limitation, an in vitro system based on the display of nascent peptides in polysome complexes has recently been developed. This display library method has the potential of producing libraries 3-6 orders of magnitude larger than the currently available phage/phagemid or plasmid libraries. Furthermore, the construction of the libraries, expression of the peptides, and screening, is done in an entirely cell-free format.

[0206] In one application of this method (Gallop et al. (1994) J. Med. Chem. 37(9):1233-1251), a molecular DNA library encoding 10¹² decapeptides was constructed and the library expressed in an E. coli S30 in vitro coupled transcription/translation system. Conditions were chosen to stall the ribosomes on the mRNA, causing the accumulation of a substantial proportion of the RNA in polysomes and yielding complexes containing nascent peptides still linked to their encoding RNA. The polysomes are sufficiently robust to be affinity purified on immobilized receptors in much the same way as the more conventional recombinant peptide display libraries are screened. RNA from the bound complexes is recovered, converted to cDNA, and amplified by PCR to produce a template for the next round of synthesis and screening. The polysome display method can be coupled to the phage display system. Following several rounds of screening, cDNA from the enriched pool of polysomes was cloned into a phagemid vector. This vector serves as both a peptide expression vector, displaying peptides fused to the coat proteins, and as a DNA sequencing vector for peptide identification. By expressing the polysome-derived peptides on phage, one can either continue the affinity selection procedure in this format or assay the peptides on individual clones for binding activity in a phage ELISA, or for binding specificity in a completion phage ELISA (Barret, et al. (1992) Anal. Biochem 204, 357-364). To identify the sequences of the active peptides one sequences the DNA produced by the phagemid host.

### Secondary Screening of Polypeptides and Analogs

[0207] The high through-put assays described above can be followed by secondary screens in order to identify further biological activities which will, e.g., allow one skilled in the art to differentiate agonists from antagonists. The type of a secondary screen used will depend on the desired activity that needs to be tested. For example, an assay can be developed in which the ability to inhibit an interaction between a protein of interest and its respective ligand can be used to identify antagonists from a group of peptide fragments isolated though one of the primary screens described above.

[0208] Therefore, methods for generating fragments and analogs and testing them for activity are known in the art. Once the core sequence of interest is identified, it is routine for one skilled in the art to obtain analogs and fragments.

Peptide Mimetics of S. pneumoniae Polypeptides

[0209] The invention also provides for reduction of the protein binding domains of the subject S. pneumoniae polypeptides to generate mimetics, e.g. peptide or non-peptide agents. The peptide mimetics are able to disrupt binding of a polypeptide to its counter ligand, e.g., in the case of an S. pneumoniae polypeptide binding to a naturally occurring ligand. The critical residues of a subject S. pneumoniae polypeptide which are involved in molecular recognition of a polypeptide can be determined and used to generate S. pneumoniae-derived peptidomimetics which competitively or noncompetitively inhibit binding of the S. pneumoniae polypeptide with an interacting polypeptide (see, for example, European patent applications EP-412,762A and EP-B31,080A).

[0210] For example, scanning mutagenesis can be used to map the amino acid residues of a particular S. pneumoniae polypeptide involved in binding an interacting polypeptide, peptidomimetic compounds (e.g. diazepine or isoquinoline derivatives) can be generated which mimic those residues in binding to an interacting polypeptide, and which therefore can inhibit binding of an S. pneumoniae polypeptide to an interacting polypeptide and thereby interfere with the function of S. pneumoniae polypeptide. For instance, non-hydrolyzable peptide analogs of such residues can be generated using benzodiazepine (e.g., see Freidinger et al. in Peptides: Chemistry and Biology, G. R. Marshall ed., ESCOM Publisher: Leiden, Netherlands, 1988), azepine (e.g., see Huffman et al. in Peptides: Chemistry and Biology, G. R. Marshall ed., ESCOM Publisher: Leiden, Netherlands, 1988), substituted gama lactam rings (Garvey et al. in Peptides: Chemistry and Biology, G. R. Marshall ed., ESCOM Publisher: Leiden, Netherlands, 1988), keto-methylene pseudopeptides (Ewenson et al. (1986) J Med Chem 29:295; and Ewenson et al. in Peptides: Structure and Function (Proceedings of the 9th American Peptide Symposium) Pierce Chemical Co. Rockland, Ill., 1985), b-turn dipeptide cores (Nagai et al. (1985) Tetrahedron Lett 26:647; and Sato et al. (1986) J Chem Soc Perkin Trans 1:1231), and b-aminoalcohols (Gordon et al. (1985) Biochem Biophys Res Commun 126:419; and et al. (1986) Biochem Biophys Res Commun 134:71).

Vaccine Formulations for S. pneumoniae Nucleic Acids and Polypeptides

[0211] This invention also features vaccine compositions for protection against infection by S. pneumoniae or for treatment of S. pneumoniae infection, a gram-negative spiral microaerophilic bacterium. In one embodiment, the vaccine compositions contain one or more immunogenic components such as a surface protein from S. pneumoniae, or portion thereof, and a pharmaceutically acceptable carrier. Nucleic acids within the scope of the invention are exemplified by the nucleic acids of the invention contained in the Sequence Listing which encode S. pneumoniae surface proteins. Any nucleic acid encoding an immunogenic S. pneumoniae protein, or portion thereof, which is capable of expression in a cell, can be used in the present invention. These vaccines have therapeutic and prophylactic utilities.

[0212] One aspect of the invention provides a vaccine composition for protection against infection by S. pneumoniae which contains at least one immunogenic fragment of an S. pneumoniae protein and a pharmaceutically acceptable carrier. Preferred fragments include peptides of at least about 10 amino acid residues in length, preferably about 10-20 amino acid residues in length, and more preferably about 12-16 amino acid residues in length.

[0213] Immunogenic components of the invention can be obtained, for example, by screening polypeptides recombinantly produced from the corresponding fragment of the nucleic acid encoding the full-length S. pneumoniae protein. In addition, fragments can be chemically synthesized using techniques known in the art such as conventional Merrifield solid phase f-Moc or t-Boc chemistry.

[0214] In one embodiment, immunogenic components are identified by the ability of the peptide to stimulate T cells. Peptides which stimulate T cells, as determined by, for example, T cell proliferation or cytokine secretion are defined herein as comprising at least one T cell epitope. T cell epitopes are believed to be involved in initiation and perpetuation of the immune response to the protein allergen which is responsible for the clinical symptoms of allergy. These T cell epitopes are thought to trigger early events at the level of the T helper cell by binding to an appropriate HLA molecule on the surface of an antigen presenting cell, thereby stimulating the T cell subpopulation with the relevant T cell receptor for the epitope. These events lead to T cell proliferation, lymphokine secretion, local inflammatory reactions, recruitment of additional immune cells to the site of antigen/T cell interaction, and activation of the B cell cascade, leading to the production of antibodies. A T cell epitope is the basic element, or smallest unit of recognition by a T cell receptor, where the epitope comprises amino acids essential to receptor recognition (e.g., approximately 6 or 7 amino acid residues). Amino acid sequences which mimic those of the T cell epitopes are within the scope of this invention.

[0215] Screening immunogenic components can be accomplished using one or more of several different assays. For example, in vitro, peptide T cell stimulatory activity is assayed by contacting a peptide known or suspected of being immunogenic with an antigen presenting cell which presents appropriate MHC molecules in a T cell culture. Presentation of an immunogenic S. pneumoniae peptide in association with appropriate MHC molecules to T cells in conjunction with the necessary co-stimulation has the effect of transmitting a signal to the T cell that induces the production of increased levels of cytokines, particularly of interleukin-2 and interleukin-4. The culture supernatant can be obtained and assayed for interleukin-2 or other known cytokines. For example, any one of several conventional assays for interleukin-2 can be employed, such as the assay described in Proc. Natl. Acad. Sci USA, 86: 1333 (1989) the pertinent portions of which are incorporated herein by reference. A kit for an assay for the production of interferon is also available from Genzyme Corporation (Cambridge, Mass.).

[0216] Alternatively, a common assay for T cell proliferation entails measuring tritiated thymidine incorporation. The proliferation of T cells can be measured in vitro by determining the amount of ³H-labeled thymidine incorporated into the replicating DNA of cultured cells. Therefore, the rate of DNA synthesis and, in turn, the rate of cell division can be quantified.

[0217] Vaccine compositions of the invention containing immunogenic components (e.g., S. pneumoniae polypeptide or fragment thereof or nucleic acid encoding an S. pneumoniae polypeptide or fragment thereof) preferably include a pharmaceutically acceptable carrier. The term “pharmaceutically acceptable carrier” refers to a carrier that does not cause an allergic reaction or other untoward effect in patients to whom it is administered. Suitable pharmaceutically acceptable carriers include, for example, one or more of water, saline, phosphate buffered saline, dextrose, glycerol, ethanol and the like, as well as combinations thereof. Pharmaceutically acceptable carriers may further comprise minor amounts of auxiliary substances such as wetting or emulsifying agents, preservatives or buffers, which enhance the shelf life or effectiveness of the antibody. For vaccines of the invention containing S. pneumoniae polypeptides, the polypeptide is co-administered with a suitable adjuvant.

[0218] It will be apparent to those of skill in the art that the therapeutically effective amount of DNA or protein of this invention will depend, inter alia, upon the administration schedule, the unit dose of antibody administered, whether the protein or DNA is administered in combination with other therapeutic agents, the immune status and health of the patient, and the therapeutic activity of the particular protein or DNA.

[0219] Vaccine compositions are conventionally administered parenterally, e.g., by injection, either subcutaneously or intramuscularly. Methods for intramuscular immunization are described by Wolff et al. (1990) Science 247: 1465-1468 and by Sedegah et al. (1994) Immunology 91: 9866-9870. Other modes of administration include oral and pulmonary formulations, suppositories, and transdermal applications. Oral immunization is preferred over parenteral methods for inducing protection against infection by S. pneumoniae. Cain et. al. (1993) Vaccine 11: 637-642. Oral formulations include such normally employed excipients as, for example, pharmaceutical grades of mannitol, lactose, starch, magnesium stearate, sodium saccharine, cellulose, magnesium carbonate, and the like.

[0220] The vaccine compositions of the invention can include an adjuvant, including, but not limited to aluminum hydroxide; N-acetyl-muramyl-L-threonyl-D-isoglutamine (thr-MDP); N-acetyl-nor-muramyl-L-alanyl-D-isoglutamine (CGP 11637, referred to as nor-MDP); N-acetylmuramyl-L-alanyl-D-isoglutaminyl-L-alanine-2-(1′-2′-dipalmitoyl-sn-glycero-3-hydroxyphos-phoryloxy)-ethylamine (CGP 19835A, referred to a MTP-PE); RIBI, which contains three components from bacteria; monophosphoryl lipid A; trehalose dimycoloate; cell wall skeleton (MPL+TDM+CWS) in a 2% squalene/Tween 80 emulsion; and cholera toxin. Others which may be used are non-toxic derivatives of cholera toxin, including its B subunit, and/or conjugates or genetically engineered fusions of the S. pneumoniae polypeptide with cholera toxin or its B subunit, procholeragenoid, fungal polysaccharides, including schizophyllan, muramyl dipeptide, muramyl dipeptide derivatives, phorbol esters, labile toxin of E. coli, non-S. pneumoniae bacterial lysates, block polymers or saponins.

[0221] Other suitable delivery methods include biodegradable microcapsules or immuno-stimulating complexes (ISCOMs), cochleates, or liposomes, genetically engineered attenuated live vectors such as viruses or bacteria, and recombinant (chimeric) virus-like particles, e.g., bluetongue. The amount of adjuvant employed will depend on the type of adjuvant used. For example, when the mucosal adjuvant is cholera toxin, it is suitably used in an amount of 5 mg to 50 mg, for example 10 mg to 35 mg. When used in the form of microcapsules, the amount used will depend on the amount employed in the matrix of the microcapsule to achieve the desired dosage. The determination of this amount is within the skill of a person of ordinary skill in the art.

[0222] Carrier systems in humans may include enteric release capsules protecting the antigen from the acidic environment of the stomach, and including S. pneumoniae polypeptide in an insoluble form as fusion proteins. Suitable carriers for the vaccines of the invention are enteric coated capsules and polylactide-glycolide microspheres. Suitable diluents are 0.2 N NaHCO3 and/or saline.

[0223] Vaccines of the invention can be administered as a primary prophylactic agent in adults or in children, as a secondary prevention, after successful eradication of S. pneumoniae in an infected host, or as a therapeutic agent in the aim to induce an immune response in a susceptible host to prevent infection by S. pneumoniae. The vaccines of the invention are administered in amounts readily determined by persons of ordinary skill in the art. Thus, for adults a suitable dosage will be in the range of 10 mg to 10 g, preferably 10 mg to 100 mg. A suitable dosage for adults will also be in the range of 5 mg to 500 mg. Similar dosage ranges will be applicable for children. Those skilled in the art will recognize that the optimal dose may be more or less depending upon the patient's body weight, disease, the route of administration, and other factors. Those skilled in the art will also recognize that appropriate dosage levels can be obtained based on results with known oral vaccines such as, for example, a vaccine based on an E. coli lysate (6 mg dose daily up to total of 540 mg) and with an enterotoxigenic E. coli purified antigen (4 doses of 1 mg) (Schulman et al., J. Urol. 150:917-921 (1993); Boedecker et al., American Gastroenterological Assoc. 999:A-222 (1993)). The number of doses will depend upon the disease, the formulation, and efficacy data from clinical trials. Without intending any limitation as to the course of treatment, the treatment can be administered over 3 to 8 doses for a primary immunization schedule over 1 month (Boedeker, American Gastroenterological Assoc. 888:A-222 (1993)).

[0224] In a preferred embodiment, a vaccine composition of the invention can be based on a killed whole E. coli preparation with an immunogenic fragment of an S. pneumoniae protein of the invention expressed on its surface or it can be based on an E. coli lysate, wherein the killed E. coli acts as a carrier or an adjuvant.

[0225] It will be apparent to those skilled in the art that some of the vaccine compositions of the invention are useful only for preventing S. pneumoniae infection, some are useful only for treating S. pneumoniae infection, and some are useful for both preventing and treating S. pneumoniae infection. In a preferred embodiment, the vaccine composition of the invention provides protection against S. pneumoniae infection by stimulating humoral and/or cell-mediated immunity against S. pneumoniae. It should be understood that amelioration of any of the symptoms of S. pneumoniae infection is a desirable clinical goal, including a lessening of the dosage of medication used to treat S. pneumoniae-caused disease, or an increase in the production of antibodies in the serum or mucous of patients.

Antibodies Reactive with S. pneumoniae Polypeptides

[0226] The invention also includes antibodies specifically reactive with the subject S. pneumoniae polypeptide. Anti-protein/anti-peptide antisera or monoclonal antibodies can be made by standard protocols (See, for example, Antibodies: A Laboratory Manual ed. by Harlow and Lane (Cold Spring Harbor Press: 1988)). A mammal such as a mouse, a hamster or rabbit can be immunized with an immunogenic form of the peptide. Techniques for conferring immunogenicity on a protein or peptide include conjugation to carriers or other techniques well known in the art. An immunogenic portion of the subject S. pneumoniae polypeptide can be administered in the presence of adjuvant. The progress of immunization can be monitored by detection of antibody titers in plasma or serum. Standard ELISA or other immunoassays can be used with the immunogen as antigen to assess the levels of antibodies.

[0227] In a preferred embodiment, the subject antibodies are immunospecific for antigenic determinants of the S. pneumoniae polypeptides of the invention, e.g. antigenic determinants of a polypeptide of the invention contained in the Sequence Listing, or a closely related human or non-human mammalian homolog (e.g., 90% homologous, more preferably at least 95% homologous). In yet a further preferred embodiment of the invention, the anti-S. pneumoniae antibodies do not substantially cross react (i.e., react specifically) with a protein which is for example, less than 80% percent homologous to a sequence of the invention contained in the Sequence Listing. By “not substantially cross react”, it is meant that the antibody has a binding affinity for a non-homologous protein which is less than 10 percent, more preferably less than 5 percent, and even more preferably less than 1 percent, of the binding affinity for a protein of the invention contained in the Sequence Listing. In a most preferred embodiment, there is no cross-reactivity between bacterial and mammalian antigens.

[0228] The term antibody as used herein is intended to include fragments thereof which are also specifically reactive with S. pneumoniae polypeptides. Antibodies can be fragmented using conventional techniques and the fragments screened for utility in the same manner as described above for whole antibodies. For example, F(ab′)₂ fragments can be generated by treating antibody with pepsin. The resulting F(ab′)₂ fragment can be treated to reduce disulfide bridges to produce Fab′ fragments. The antibody of the invention is further intended to include bispecific and chimeric molecules having an anti-S. pneumoniae portion.

[0229] Both monoclonal and polyclonal antibodies (Ab) directed against S. pneumoniae polypeptides or S. pneumoniae polypeptide variants, and antibody fragments such as Fab′ and F(ab′)₂, can be used to block the action of S. pneumoniae polypeptide and allow the study of the role of a particular S. pneumoniae polypeptide of the invention in aberrant or unwanted intracellular signaling, as well as the normal cellular function of the S. pneumoniae and by microinjection of anti-S. pneumoniae polypeptide antibodies of the present invention.

[0230] Antibodies which specifically bind S. pneumoniae epitopes can also be used in immunohistochemical staining of tissue samples in order to evaluate the abundance and pattern of expression of S. pneumoniae antigens. Anti S. pneumoniae polypeptide antibodies can be used diagnostically in immuno-precipitation and immuno-blotting to detect and evaluate S. pneumoniae levels in tissue or bodily fluid as part of a clinical testing procedure. Likewise, the ability to monitor S. pneumoniae polypeptide levels in an individual can allow determination of the efficacy of a given treatment regimen for an individual afflicted with such a disorder. The level of an S. pneumoniae polypeptide can be measured in cells found in bodily fluid, such as in urine samples or can be measured in tissue, such as produced by gastric biopsy. Diagnostic assays using anti-S. pneumoniae antibodies can include, for example, immunoassays designed to aid in early diagnosis of S. pneumoniae infections. The present invention can also be used as a method of detecting antibodies contained in samples from individuals infected by this bacterium using specific S. pneumoniae antigens.

[0231] Another application of anti-S. pneumoniae polypeptide antibodies of the invention is in the immunological screening of cDNA libraries constructed in expression vectors such as Igt11, Igt18-23, IZAP, and IORF8. Messenger libraries of this type, having coding sequences inserted in the correct reading frame and orientation, can produce fusion proteins. For instance, Igt11 will produce fusion proteins whose amino termini consist of β-galactosidase amino acid sequences and whose carboxy termini consist of a foreign polypeptide. Antigenic epitopes of a subject S. pneumoniae polypeptide can then be detected with antibodies, as, for example, reacting nitrocellulose filters lifted from infected plates with anti-S. pneumoniae polypeptide antibodies. Phage, scored by this assay, can then be isolated from the infected plate. Thus, the presence of S. pneumoniae gene homologs can be detected and cloned from other species, and alternate isoforms (including splicing variants) can be detected and cloned.

### Kits Containing Nucleic Acids, Polypeptides or Antibodies of the Invention

[0232] The nucleic acid, polypeptides and antibodies of the invention can be combined with other reagents and articles to form kits. Kits for diagnostic purposes typically comprise the nucleic acid, polypeptides or antibodies in vials or other suitable vessels. Kits typically comprise other reagents for performing hybridization reactions, polymerase chain reactions (PCR), or for reconstitution of lyophilized components, such as aqueous media, salts, buffers, and the like. Kits may also comprise reagents for sample processing such as detergents, chaotropic salts and the like. Kits may also comprise immobilization means such as particles, supports, wells, dipsticks and the like. Kits may also comprise labeling means such as dyes, developing reagents, radioisotopes, fluorescent agents, luminescent or chemiluminescent agents, enzymes, intercalating agents and the like. With the nucleic acid and amino acid sequence information provided herein, individuals skilled in art can readily assemble kits to serve their particular purpose. Kits further can include instructions for use.

### Bio Chips and Microarrays

[0233] The nucleic acid sequence of the present invention may be used to detect S. pneumoniae or other species of Streptococcus acid sequence using bio chip technology. Bio chips containing arrays of nucleic acid sequence can also be used to measure expression of genes of S. pneumoniae or other species of Streptococcus. For example, to diagnose a patient with a S. pneumoniae or other Streptococcus infection, a sample from a human or animal can be used as a probe on a bio chip containing an array of nucleic acid sequence from the present invention. In addition, a sample from a disease state can be compared to a sample from a non-disease state which would help identify a gene that is up-regulated or expressed in the disease state. This would provide valuable insight as to the mechanism by which the disease manifests. Changes in gene expression can also be used to identify critical pathways involved in drug transport or metabolism, and may enable the identification of novel targets involved in virulence or host cell interactions involved in maintenance of an infection. Procedures using such techniques have been described by Brown et al., 1995, Science 270: 467-470.

[0234] Bio chips can also be used to monitor the genetic changes of potential therapeutic compounds including, deletions, insertions or mismatches. Once the therapeutic is added to the patient, changes to the genetic sequence can be evaluated for its efficacy. In addition, the nucleic acid sequence of the present invention can be used to determine essential genes in cell cycling. As described in lyer et al., 1999 (Science, 283:83-87) genes essential in the cell cycle can be identified using bio chips. Furthermore, the present invention provides nucleic acid sequence which can be used with bio chip technology to understand regulatory networks in bacteria, measure the response to environmental signals or drugs as in drug screening, and study virulence induction. (Mons et al., 1998, Nature Biotechnology, 16: 45-48. Patents teaching this technology include U.S. Pat. Nos. 5,445,934, 5,744,305, and 5800992.

Drug Screening Assays Using S. pneumoniae Polypeptides

[0235] By making available purified and recombinant S. pneumoniae polypeptides, the present invention provides assays which can be used to screen for drugs which are either agonists or antagonists of the normal cellular function, in this case, of the subject S. pneumoniae polypeptides, or of their role in intracellular signaling. Such inhibitors or potentiators may be useful as new therapeutic agents to combat S. pneumoniae infections in humans. A variety of assay formats will suffice and, in light of the present inventions, will be comprehended by the skilled artisan.

[0236] In many drug screening programs which test libraries of compounds and natural extracts, high throughput assays are desirable in order to maximize the number of compounds surveyed in a given period of time. Assays which are performed in cell-free systems, such as may be derived with purified or semi-purified proteins, are often preferred as “primary” screens in that they can be generated to permit rapid development and relatively easy detection of an alteration in a molecular target which is mediated by a test compound. Moreover, the effects of cellular toxicity and/or bioavailability of the test compound can be generally ignored in the in vitro system, the assay instead being focused primarily on the effect of the drug on the molecular target as may be manifest in an alteration of binding affinity with other proteins or change in enzymatic properties of the molecular target. Accordingly, in an exemplary screening assay of the present invention, the compound of interest is contacted with an isolated and purified S. pneumoniae polypeptide.

[0237] Screening assays can be constructed in vitro with a purified S. pneumoniae polypeptide or fragment thereof, such as an S. pneumoniae polypeptide having enzymatic activity, such that the activity of the polypeptide produces a detectable reaction product. The efficacy of the compound can be assessed by generating dose response curves from data obtained using various concentrations of the test compound. Moreover, a control assay can also be performed to provide a baseline for comparison. Suitable products include those with distinctive absorption, fluorescence, or chemi-luminescence properties, for example, because detection may be easily automated. A variety of synthetic or naturally occurring compounds can be tested in the assay to identify those which inhibit or potentiate the activity of the S. pneumoniae polypeptide. Some of these active compounds may directly, or with chemical alterations to promote membrane permeability or solubility, also inhibit or potentiate the same activity (e.g., enzymatic activity) in whole, live S. pneumoniae cells.

[0238] Overexpression Assays

[0239] Overexpression assays are based on the premise that overproduction of a protein would lead to a higher level of resistance to compounds that selectively interfere with the function of that protein. Overexpression assays may be used to identify compounds that interfere with the function of virtually any type of protein, including without limitation enzymes, receptors, DNA- or RNA-binding proteins, or any proteins that are directly or indirectly involved in regulating cell growth.

[0240] Typically, two bacterial strains are constructed. One contains a single copy of the gene of interest, and a second contains several copies of the same gene. Identification of useful inhibitory compounds of this type of assay is based on a comparison of the activity of a test compound in inhibiting growth and/or viability of the two strains. The method involves constructing a nucleic acid vector that directs high level expression of a particular target nucleic acid. The vectors are then transformed into host cells in single or multiple copies to produce strains that express low to moderate and high levels of protein encoding by the target sequence (strain A and B, respectively). Nucleic acid comprising sequences encoding the target gene can, of course, be directly integrated into the host cell.

[0241] Large numbers of compounds (or crude substances which may contain active compounds) are screened for their effect on the growth of the two strains. Agents which interfere with an unrelated target equally inhibit the growth of both strains. Agents which interfere with the function of the target at high concentration should inhibit the growth of both strains. It should be possible, however, to titrate out the inhibitory effect of the compound in the overexpressing strain. That is, if the compound is affecting the particular target that is being tested, it should be possible to inhibit the growth of strain A at a concentration of the compound that allows strain B to grow.

[0242] Alternatively, a bacterial strain is constructed that contains the gene of interest under the control of an inducible promoter. Identification of useful inhibitory agents using this type of assay is based on a comparison of the activity of a test compound in inhibiting growth and/or viability of this strain under both inducing and non-inducing conditions. The method involves constructing a nucleic acid vector that directs high-level expression of a particular target nucleic acid. The vector is then transformed into host cells that are grown under both non-inducing and inducing conditions (conditions A and B, respectively).

[0243] Large numbers of compounds (or crude substances which may contain active compounds) are screened for their effect on growth under these two conditions. Agents that interfere with the function of the target should inhibit growth under both conditions. It should be possible, however, to titrate out the inhibitory effect of the compound in the overexpressing strain. That is, if the compound is affecting the particular target that is being tested, it should be possible to inhibit growth under condition A at a concentration that allows the strain to grow under condition B.

[0244] Ligand-Binding Assays

[0245] Many of the targets according to the invention have functions that have not yet been identified. Ligand-binding assays are useful to identify inhibitor compounds that interfere with the function of a particular target, even when that function is unknown. These assays are designed to detect binding of test compounds to particular targets. The detection may involve direct measurement of binding. Alternatively, indirect indications of binding may involve stabilization of protein structure or disruption of a biological function. Non-limiting examples of useful ligand-binding assays are detailed below.

[0246] A useful method for the detection and isolation of binding proteins is the Biomolecular Interaction Assay (BIAcore) system developed by Pharmacia Biosensor and described in the manufacturer's protocol (LKB Pharmacia, Sweden). The BIAcore system uses an affinity purified anti-GST antibody to immobilize GST-fusion proteins onto a sensor chip. The sensor utilizes surface plasmon resonance which is an optical phenomenon that detects changes in refractive indices. In accordance with the practice of the invention, a protein of interest is coated onto a chip and test compounds are passed over the chip. Binding is detected by a change in the refractive index (surface plasmon resonance).

[0247] A different type of ligand-binding assay involves scintillation proximity assays (SPA, described in U.S. Pat. No. 4,568,649).

[0248] Another type of ligand binding assay, also undergoing development, is based on the fact that proteins containing mitochondrial targeting signals are imported into isolated mitochondria in vitro (Hurt et al., 1985, Embo J. 4:2061-2068; Eilers and Schatz, Nature, 1986, 322:228-231). In a mitochondrial import assay, expression vectors are constructed in which nucleic acids encoding particular target proteins are inserted downstream of sequences encoding mitochondrial import signals. The chimeric proteins are synthesized and tested for their ability to be imported into isolated mitochondria in the absence and presence of test compounds. A test compound that binds to the target protein should inhibit its uptake into isolated mitochondria in vitro.

[0249] Another ligand-binding assay is the yeast two-hybrid system (Fields and Song, 1989, Nature 340:245-246). The yeast two-hybrid system takes advantage of the properties of the GAL4 protein of the yeast Saccharomyces cerevisiae. The GAL4 protein is a transcriptional activator required for the expression of genes encoding enzymes of galactose utilization. This protein consists of two separable and functionally essential domains: an N-terminal domain which binds to specific DNA sequences (UAS_{G}); and a C-terminal domain containing acidic regions, which is necessary to activate transcription. The native GAL4 protein, containing both domains, is a potent activator of transcription when yeast are grown on galactose media. The N-terminal domain binds to DNA in a sequence-specific manner but is unable to activate transcription. The C-terminal domain contains the activating regions but cannot activate transcription because it fails to be localized to UAS_{G}. In the two-hybrid system, a system of two hybrid proteins containing parts of GAL4: (1) a GAL4 DNA-binding domain fused to a protein ‘X’ and (2) a GAL4 activation region fused to a protein ‘Y’. If X and Y can form a protein-protein complex and reconstitute proximity of the GAL4 domains, transcription of a gene regulated by UAS_{G} occurs. Creation of two hybrid proteins, each containing one of the interacting proteins X and Y, allows the activation region of UAS_{G} to be brought to its normal site of action.

[0250] The binding assay described in Fodor et al., 1991, Science 251:767-773, which involves testing the binding affinity of test compounds for a plurality of defined polymers synthesized on a solid substrate, may also be useful.

[0251] Compounds which bind to the polypeptides of the invention are potentially useful as antibacterial agents for use in therapeutic compositions.

[0252] Pharmaceutical formulations suitable for antibacterial therapy comprise the antibacterial agent in conjunction with one or more biologically acceptable carriers. Suitable biologically acceptable carriers include, but are not limited to, phosphate-buffered saline, saline, deionized water, or the like. Preferred biologically acceptable carriers are physiologically or pharmaceutically acceptable carriers.

[0253] The antibacterial compositions include an antibacterial effective amount of active agent. Antibacterial effective amounts are those quantities of the antibacterial agents of the present invention that afford prophylactic protection against bacterial infections or which result in amelioration or cure of an existing bacterial infection. This antibacterial effective amount will depend upon the agent, the location and nature of the infection, and the particular host. The amount can be determined by experimentation known in the art, such as by establishing a matrix of dosages and frequencies and comparing a group of experimental units or subjects to each point in the matrix.

[0254] The antibacterial active agents or compositions can be formed into dosage unit forms, such as for example, creams, ointments, lotions, powders, liquids, tablets, capsules, suppositories, sprays, aerosols or the like. If the antibacterial composition is formulated into a dosage unit form, the dosage unit form may contain an antibacterial effective amount of active agent. Alternatively, the dosage unit form may include less than such an amount if multiple dosage unit forms or multiple dosages are to be used to administer a total dosage of the active agent. Dosage unit forms can include, in addition, one or more excipient(s), diluent(s), disintegrant(s), lubricant(s), plasticizer(s), colorant(s), dosage vehicle(s), absorption enhancer(s), stabilizer(s), bactericide(s), or the like.

[0255] For general information concerning formulations, see, e.g., Gilman et al. (eds.), 1990, Goodman and Gilman's: The Pharmacological Basis of Therapeutics, 8th ed., Pergamon Press; and Remington's Pharmaceutical Sciences, 17th ed., 1990, Mack Publishing Co., Easton, Pa.; Avis et al. (eds.), 1993, Pharmaceutical Dosage Forms: Parenteral Medications, Dekker, New York; Lieberman et al (eds.), 1990, Pharmaceutical Dosage Forms: Disperse Systems, Dekker, New York.

[0256] The antibacterial agents and compositions of the present invention are useful for preventing or treating S. pneumoniae infections. Infection prevention methods incorporate a prophylactically effective amount of an antibacterial agent or composition. A prophylactically effective amount is an amount effective to prevent S. pneumoniae infection and will depend upon the specific bacterial strain, the agent, and the host. These amounts can be determined experimentally by methods known in the art and as described above.

[0257] S. pneumoniae infection treatment methods incorporate a therapeutically effective amount of an antibacterial agent or composition. A therapeutically effective amount is an amount sufficient to ameliorate or eliminate the infection. The prophylactically and/or therapeutically effective amounts can be administered in one administration or over repeated administrations. Therapeutic administration can be followed by prophylactic administration, once the initial bacterial infection has been resolved.

[0258] The antibacterial agents and compositions can be administered topically or systemically. Topical application is typically achieved by administration of creams, ointments, lotions, or sprays as described above. Systemic administration includes both oral and parental routes. Parental routes include, without limitation, subcutaneous, intramuscular, intraperitoneal, intravenous, transdermal, inhalation and intranasal administration.

### EXEMPLIFICATION

[0259] I. Cloning and Sequencing of S. pneumoniae DNA

[0260] S. pneumoniae chromosomal DNA was isolated according to a basic DNA protocol outlined in Schleif R. F. and Wensink P. C., Practical Methods in Molecular Biology, p. 98, Springer-Verlag, NY., 1981, with minor modifications. Briefly, cells were pelleted, resuspended in TE (10 mM Tris, 1 mM EDTA, pH 7.6) and GES lysis buffer (5.1 M guanidium thiocyanate, 0.1 M EDTA, pH 8.0, 0.5% N-laurylsarcosine) was added. Suspension was chilled and ammonium acetate (NH4Ac) was added to final concentration of 2.0 M. DNA was extracted, first with chloroform, then with phenol-chloroform, and reextracted with chloroform. DNA was precipitated with isopropanol, washed twice with 70% EtOH, dried and resuspended in TE.

[0261] Following isolation whole genomic S. pneumoniae DNA was nebulized (Bodenteich et al., Automated DNA Sequencing and Analysis (J. C. Venter, ed.), Academic Press, 1994) to a median size of 2000 bp. After nebulization, the DNA was concentrated and separated on a standard 1% agarose gel. Several fractions, corresponding to approximate sizes 1000-1500 bp, 1500-2000 bp, 2000-2500 bp, 2500-3000 bp, were excised from the gel and purified by the GeneClean procedure (Bio101, Inc.).

[0262] The purified DNA fragments were then blunt-ended using T4 DNA polymerase. The healed DNA was then ligated to unique BstXI-linker adapters (5′ GTCTTCACCACGGGG (SEQ ID NO: 5323) and 5′ GTGGTGAAGAC (SEQ ID NO: 5324) in 100-1000 fold molar excess). These linkers are complimentary to the BstXI-cut pMPX vectors, while the overhang is not self-complimentary. Therefore, the linkers will not concatemerize nor will the cut-vector religate itself easily. The linker-adopted inserts were separated from the unincorporated linkers on a 1% agarose gel and purified using GeneClean. The linker-adopted inserts were then ligated to each of 20 pMPX vectors to construct a series of “shotgun” subclone libraries. Blunt ended vector was used for cloning into the PUC19 vector. The vectors contain an out-of-frame lacZ gene at the cloning site which becomes in-frame in the event that an adapter-dimer is cloned, allowing these to be avoided by their blue-color.

[0263] All subsequent steps were based either on the multiplex DNA sequencing protocols outlined in Church G. M. and Kieffer-Higgins S., Science 240:185-188, 1988 or by ABI377 automated DNA sequencing methods. Only major modifications to the protocols are highlighted. Briefly, each of the 20 vectors was then transformed into DH5a competent cells (Gibco/BRL, DH5a transformation protocol). The libraries were assessed by plating onto antibiotic plates containing ampicillin, methicillin and IPTG/Xgal. The plates were incubated overnight at 37° C. Successful transformants were then used for plating of clones and pooling into the multiplex pools. The clones were picked and pooled into 40 ml growth medium cultures. The cultures were grown overnight at 37° C. DNA was purified using the Qiagen Midi-prep kits and Tip-100 columns (Qiagen, Inc.). In this manner, 100 mg of DNA was obtained per pool.

[0264] These purified DNA samples were then sequenced either using the multiplex DNA sequencing based on chemical degradation methods (Church G. M. and Kieffer-Higgins S., Science 240:185-188, 1988) or by Sequithrem (Epicenter Technologies) dideoxy sequencing protocols or by ABI dye-terminator chemistry. For the multiplex portion the sequencing reactions were electrophoresed and transferred onto nylon membranes by direct transfer electrophoresis from 40 cm gels (Richterich P. and Church G. M., Methods in Enzymology 218:187-222, 1993). The DNA was covalently bound to the membranes by exposure to ultraviolet light, and hybridized with labeled oligonucleotides complimentary to tag sequences on the vectors (Church, supra). The membranes were washed to rinse off non-specifically bound probe, and exposed to X-ray film to visualize individual sequence ladders. After autoradiography, the hybridized probe was removed by incubation at 65° C., and the hybridization cycle repeated with another tag sequence until the membrane had been probed 41 times. Thus, each gel produced a large number of films, each containing new sequencing information. Whenever a new blot was processed, it was initially probed for an internal standard sequence added to each of the pools. Digital images of the films were generated using a laser-scanning densitometer (Molecular Dynamics, Sunnyvale, Calif.). The digitized images were processed on computer workstations (VaxStation 4000's) using the program REPLICA™ (Church et al., Automated DNA Sequencing and Analysis (J. C. Venter, ed.), Academic Press, 1994). Image processing included lane straightening, contrast adjustment to smooth out intensity differences, and resolution enhancement by iterative gaussian deconvolution. The sequences were then converted to an SCF format so that processing and assembly could proceed on UNIX machines. The ABI dye terminator sequence reads were run on ABI377 machines and the data was directly transferred to UNIX machines following lane tracking of the gels. All multiplex and ABI reads were assembled using PHRAP (P. Green, Abstracts of DOE Human Genome Program Contractor-Grantee Workshop V, January 1996, p. 157) with default parameters and not using quality scores. The initial assembly was done at 7 fold coverage and yielded 511 contigs. Short read length fragments of 200 bp or less found on the ends of contigs facing in the appropriate direction were used to extend off the end of the contigs. These reads were then resequenced with primers using ABI technology to give sequences with a read length of 500 or more bases. This allowed end extensions to be performed without ordering new primers. In addition, missing mates (sequences from clones that only gave one strand reads) were identified and sequenced with ABI technology to allow the identification of additional overlapping contigs.

[0265] End-sequencing of randomly picked genomic lambda was also performed. Sequencing on a both sides was done for all lambda sequences. The lambda library backbone helped to verify the integrity of the assembly and allowed closure of some of the physical gaps.

[0266] To identify S. pneumoniae polypeptides the complete genomic sequence of S. pneumoniae were analyzed essentially as follows: First, all possible stop-to-stop open reading frames (ORFs) greater than 180 nucleotides in all six reading frames were translated into amino acid sequences. Second, the identified ORFs were analyzed for homology to known (archeabacter, prokaryotic and eukaryotic) protein sequences. Third, the predicted coding regions of the sequences and start codons were evaluated with the programs GENEMARK™ (Borodovsky and McIninch, 1993, Comp. Chem. 17:123) and Glimmer (Fraser et al, Nature, 1997).

Identification Cloning and Expression of S. pneumoniae Nucleic Acids

[0267] Expression and purification of the S. pneumoniae polypeptides of the invention can be performed essentially as outlined below.

[0268] To facilitate the cloning, expression and purification of membrane and secreted proteins from S. pneumoniae, a gene expression system, such as the pET System (Novagen), for cloning and expression of recombinant proteins in E. coli, is selected. Also, a DNA sequence encoding a peptide tag, the His-Tag, is fused to the 3′ end of DNA sequences of interest in order to facilitate purification of the recombinant protein products. The 3′ end is selected for fusion in order to avoid alteration of any 5′ terminal signal sequence.

[0269] PCR Amplification and Cloning of Nucleic Acids Containing ORF's Encoding Enzymes

[0270] Nucleic acids chosen (for example, from the nucleic acids set forth in SEQ ID NO: 1-SEQ ID NO: 2661) for cloning from the 14453 strain of S. pneumoniae are prepared for amplification cloning by polymerase chain reaction (PCR). Synthetic oligonucleotide primers specific for the 5′ and 3′ ends of open reading frames (ORFs) are designed and purchased from GibcoBRL Life Technologies (Gaithersburg, Md., USA). All forward primers (specific for the 5′ end of the sequence) are designed to include an NcoI cloning site at the extreme 5′ terminus. These primers are designed to permit initiation of protein translation at a methionine residue followed by a valine residue and the coding sequence for the remainder of the native S. pneumoniae DNA sequence. All reverse primers (specific for the 3′ end of any S. pneumoniae ORF) include a EcoRI site at the extreme 5′ terminus to permit cloning of each S. pneumoniae sequence into the reading frame of the pET-28b. The pET-28b vector provides sequence encoding an additional 20 carboxy-terminal amino acids including six histidine residues (at the extreme C-terminus), which comprise the His-Tag.

[0271] Genomic DNA prepared from strain 14453 of S. pneumoniae is used as the source of template DNA for PCR amplification reactions (Current Protocols in Molecular Biology, John Wiley and Sons, Inc., F. Ausubel et al., eds., 1994). To amplify a DNA sequence containing an S. pneumoniae ORF, genomic DNA (50 nanograms) is introduced into a reaction vial containing 2 mM MgCl₂, 1 micromolar synthetic oligonucleotide primers (forward and reverse primers) complementary to and flanking a defined S. pneumoniae ORF, 0.2 mM of each deoxynucleotide triphosphate; dATP, dGTP, dCTP, dTTP and 2.5 units of heat stable DNA polymerase (Amplitaq, Roche Molecular Systems, Inc., Branchburg, N.J., USA) in a final volume of 100 microliters.

[0272] Upon completion of thermal cycling reactions, each sample of amplified DNA is washed and purified using the Qiaquick Spin PCR purification kit (Qiagen, Gaithersburg, Md., USA). All amplified DNA samples are subjected to digestion with the restriction endonucleases, e.g., NcoI and EcoRI (New England BioLabs, Beverly, Mass., USA) (Current Protocols in Molecular Biology, John Wiley and Sons, Inc., F. Ausubel et al., eds., 1994). DNA samples are then subjected to electrophoresis on 1.0% NuSeive (FMC BioProducts, Rockland, Me. USA) agarose gels. DNA is visualized by exposure to ethidium bromide and long wave uv irradiation. DNA contained in slices isolated from the agarose gel is purified using the Bio 101 GeneClean Kit protocol (Bio 101 Vista, Calif., USA).

Cloning of S. pneumoniae Nucleic Acids into an Expression Vector

[0273] The pET-28b vector is prepared for cloning by digestion with endonucleases, e.g., NcoI and EcoRI (Current Protocols in Molecular Biology, John Wiley and Sons, Inc., F. Ausubel et al., eds., 1994). The pET-28a vector, which encodes a His-Tag that can be fused to the 5′ end of an inserted gene, is prepared by digestion with appropriate restriction endonucleases.

[0274] Following digestion, DNA inserts are cloned (Current Protocols in Molecular Biology, John Wiley and Sons, Inc., F. Ausubel et al., eds., 1994) into the previously digested pET-28b expression vector. Products of the ligation reaction are then used to transform the BL21 strain of E. coli (Current Protocols in Molecular Biology, John Wiley and Sons, Inc., F. Ausubel et al., eds., 1994) as described below.

[0275] Transformation of Competent Bacteria with Recombinant Plasmids

[0276] Competent bacteria, E coli strain BL21 or E. coli strain BL21 (DE3), are transformed with recombinant pET expression plasmids carrying the cloned S. pneumoniae sequences according to standard methods (Current Protocols in Molecular, John Wiley and Sons, Inc., F. Ausubel et al., eds., 1994). Briefly, 1 microliter of ligation reaction is mixed with 50 microliters of electrocompetent cells and subjected to a high voltage pulse, after which, samples are incubated in 0.45 milliliters SOC medium (0.5% yeast extract, 2.0% tryptone, 10 mM NaCl, 2.5 mM KCl, 10 mM MgCl2, 10 mM MgSO4 and 20, mM glucose) at 37° C. with shaking for 1 hour. Samples are then spread on LB agar plates containing 25 microgram/ml kanamycin sulfate for growth overnight. Transformed colonies of BL21 are then picked and analyzed to evaluate cloned inserts as described below.

[0277] Identification of Recombinant Expression Vectors with S. pneumoniae Nucleic Acids

[0278] Individual BL21 clones transformed with recombinant pET-28b S. pneumoniae ORFs are analyzed by PCR amplification of the cloned inserts using the same forward and reverse primers, specific for each S. pneumoniae sequence, that were used in the original PCR amplification cloning reactions. Successful amplification verifies the integration of the S. pneumoniae sequences in the expression vector (Current Protocols in Molecular Biology, John Wiley and Sons, Inc., F. Ausubel et al., eds., 1994).

[0279] Isolation and Preparation of Nucleic Acids from Transformants

[0280] Individual clones of recombinant pET-28b vectors carrying properly cloned S. pneumoniae ORFs are picked and incubated in 5 mls of LB broth plus 25 microgram/ml kanamycin sulfate overnight. The following day plasmid DNA is isolated and purified using the Qiagen plasmid purification protocol (Qiagen Inc., Chatsworth, Calif., USA).

[0281] Expression of Recombinant S. pneumoniae Sequences In E. coli

[0282] The pET vector can be propagated in any E. coli K-12 strain e.g. HMS174, HB101, JM109, DH5, etc. for the purpose of cloning or plasmid preparation. Hosts for expression include E. coli strains containing a chromosomal copy of the gene for T7 RNA polymerase. These hosts are lysogens of bacteriophage DE3, a lambda derivative that carries the lacI gene, the lacUV5 promoter and the gene for T7 RNA polymerase. T7 RNA polymerase is induced by addition of isopropyl-B-D-thiogalactoside (IPTG), and the T7 RNA polymerase transcribes any target plasmid, such as pET-28b, carrying its gene of interest. Strains used include: BL21 (DE3) (Studier, F. W., Rosenberg, A. H., Dunn, J. J., and Dubendorff, J. W. (1990) Meth. Enzymol. 185, 60-89).

[0283] To express recombinant S. pneumoniae sequences, 50 nanograms of plasmid DNA isolated as described above is used to transform competent BL21(DE3) bacteria as described above (provided by Novagen as part of the pET expression system kit). The lacZ gene (beta-galactosidase) is expressed in the pET-System as described for the S. pneumoniae recombinant constructions. Transformed cells are cultured in SOC medium for 1 hour, and the culture is then plated on LB plates containing 25 micrograms/ml kanamycin sulfate. The following day, bacterial colonies are pooled and grown in LB medium containing kanamycin sulfate (25 micrograms/ml) to an optical density at 600 nM of 0.5 to 1.0 O.D. units, at which point, 1 millimolar IPTG was added to the culture for 3 hours to induce gene expression of the S. pneumoniae recombinant DNA constructions.

[0284] After induction of gene expression with IPTG, bacteria are pelleted by centrifugation in a Sorvall RC-3B centrifuge at 3500×g for 15 minutes at 4° C. Pellets are resuspended in 50 milliliters of cold 10 mM Tris-HCl, pH 8.0, 0.1 M NaCl and 0.1 mM EDTA (STE buffer). Cells are then centrifuged at 2000×g for 20 min at 4° C. Wet pellets are weighed and frozen at −80° C. until ready for protein purification.

[0285] A variety of methodologies known in the art can be utilized to purify the isolated proteins. (Current Protocols in Protein Science, John Wiley and Sons, Inc., J. E. Coligan et al., eds., 1995). For example, the frozen cells may be thawed, resupended in buffer and ruptured by several passages through a small volume microfluidizer (Model M-110S, Microfluidics International Corporation, Newton, Mass.). The resultant homogenate may be centrifuged to yield a clear supernatant (crude extract) and following filtration the crude extract may be fractionated over columns. Fractions may be monitored by absorbance at OD₂₈₀ nm. and peak fractions may analyzed by SDS-PAGE.

[0286] The concentrations of purified protein preparations may be quantified spectrophotometrically using absorbance coefficients calculated from amino acid content (Perkins, S. J. 1986 Eur. J. Biochem. 157, 169-180). Protein concentrations are also measured by the method of Bradford, M. M. (1976) Anal. Biochem. 72, 248-254, and Lowry, O. H., Rosebrough, N., Farr, A. L. & Randall, R. J. (1951) J. Biol. Chem. 193, pages 265-275, using bovine serum albumin as a standard.

[0287] SDS-polyacrylamide gels of various concentrations may be purchased from BioRad (Hercules, Calif., USA), and stained with Coomassie blue. Molecular weight markers may include rabbit skeletal muscle myosin (200 kDa), E. coli (-galactosidase (116 kDa), rabbit muscle phosphorylase B (97.4 kDa), bovine serum albumin (66.2 kDa), ovalbumin (45 kDa), bovine carbonic anhydrase (31 kDa), soybean trypsin inhibitor (21.5 kDa), egg white lysozyme (14.4 kDa) and bovine aprotinin (6.5 kDa).

### EQUIVALENTS

[0288] While this invention has been particularly shown and described with references to preferred embodiments thereof, it will be understood by those skilled in the art that various changes in form and details may be made therein without departing from the scope of the invention encompassed by the appended claims.

The application's sequence listing, which the Patent Office published only in electronic form, follows.

SEQUENCE LISTING (5328 sequences)

SEQ ID NO: 1 - DNA, 333 bp, Streptococcus pneumoniae
ttgaaacaccactatcagatctatcaactcttactttttcactttcagaacaaagaccctgagaaatttttcggactcattgaggacactctgaagcaggttcatcctatttttcagactgtctttaaaacctttctaaagaacaaagaaaaaatcgtcaacgctcttcaattaccttattccaacgcaaaattggaagcgaccaataatctcatcaaacttatcaaacgaaacgcctttggatttcggaactttgaaaacttcaaaaaaaggatttttatcgctctgaacatcaaaaaagaaaggacgaattttgtcctttctcgagcttag

SEQ ID NO: 2 - DNA, 519 bp, Streptococcus pneumoniae
atggaacaattacattttatcacaaaattactagacattaaagaccctaatatccagattttagacatcatcaataaggatacacacaaggaaatcatcgccaaactggactacgacgccccatcttgccctgagtgcggaaaccaattgaagaaatatgactttcaaaaaccttctaaaattccttatcttgaaacgactggtatgcctactagaattctccttagaaagcgtcgtttcaagtgctatcactgttcaaaaatgatggtcgctgaaacttctatcgtcaagaataatcaccaaatccctcgtatcatcaaccaaaagattgctcaaaagttaattgaaaagatttctatgactgatattgcccatcagctttccatctcaacttcaactgttattcgtaagctcaatgattttcactttaaacatgatttttcttgtcttcctgagattatgtcctgggacgttgaaacagtccggggagtgactgtttcaatcgggagatggagatga

SEQ ID NO: 3 - DNA, 327 bp, Streptococcus pneumoniae
aacagtccggggagtgactgtttcaatcgggagatggagatgagcttcattgcgcaagattttaacaatctcaatatcatcactgttcttgagggaagaacacaagctatcattcgaaatcactttcttcgctacgatagagccgtccgatgtcgcgtcaaaatcattactatggatatgtttagcccttactatggcttggctaaacagcttcgctttcaaatttctaggctcaggctgaaacagtctcccagactgtttcactcccgaatgctaaaatcgttcttgatcgctttcacattgtgcaacatcttagccgtgctatga

SEQ ID NO: 4 - DNA, 570 bp, Streptococcus pneumoniae
gttcttgatcgctttcacattgtgcaacatcttagccgtgctatgagtcgtgtgcgtgtccaaatcatgaatcagtttcatcgaaaatcccatgaatacaaggctatcaagcgctactggaaactcattcaacaggatagccgtaaactgagtgataaacgtttttatcgtcctacttttcgtatgcacttaaccaataaagagattttagacaagcttttgagctattcacaagacttgaaacaccactatcagctctatcaactcttgctgtttcactttcagaataaggaaccggagaaatttttcggactcattgaggacaatctaaagcaggttcatcctctttttcagactgtctttaaaacctttctaaaggacaaagagaaaatcgtcaacgcccttcaactacactattctaacgccaaattggaagcgaccaataatctcatcaaacttatcaaacgcaatgcctttggttttcggaactttgaaaacttcaaaaaacggattttcatcgccctgaacatcaaaaaagaaaggacgaaatttgtcctttctcaagcttag

SEQ ID NO: 5 - DNA, 366 bp, Streptococcus pneumoniae
gtgcatttgttgaagtattgccaggtatcgatggacttgttcacgtatcacaaatttcacacaaacggattgaaaatccaaaagaagctcttaaagttggtcaagaagttcaagttaaagttcttgaagttaacgcagatgcagaacgcgtgtcactttctattaaagctcttgaagaacgtccagcccaagaagaaggacaaaaagaagaaaaacgtgctgctcgtccacgtcgtccaagacgtcaagaaaagcgtgatttcgaacttccagaaacacaaacaggattttcaatggctgatttgtttggtgatatcgaactttaatcaaattgaaaattcacaaaatcctttgtttactaaataa

SEQ ID NO: 6 - DNA, 1203 bp, Streptococcus pneumoniae
atgaacgaatttgaagatttgctaaatagcgttagtcaagttgagactggtgatgttgttagtgctgaagtattgacagttgatgcgactcaagctaacgttgcaatctctggaactggtgttgaaggtgtcttgactcttcgcgaattgacaaacgatcgtgatgcagatatcaatgactttgttaaagtaggagaagtattggatgttcttgtacttcgtcaagtagttggtaaagatactgatacagttacataccttgtatctaaaaaacgccttgaagctcgcaaagcatgggacaaacttgttggtcgcgaagaagaagttgttactgttaaaggaacgcgtgccgttaaaggtggactttcagtagaatttgaaggtgttcgtggatttatcccagcttcaatgttggatactcgtttcgtacgtaacgctgagcgttttgtaggtcaagaatttgatactaaaatcaaagaagttaacgctaaagaaaaccgcttcatcctttcacgtcgtgaagttgttgaagcagctactgcagcagctcgcgctgaagtattcggtaaattggctgttggtgatgttgtaactggtaaagttgctcgtatcacaagcttcggcgctttcatcgaccttggtggtgttgacggattggttcacttgactgaattgtcacatgaacgtaacgtatcaccaaaatcagttgtaactgttggtgaagaaattgaagtgaaaatccttgatcttaacgaagaagaaggacgtgtatcactttcacttaaagcaacagtaccaggaccatgggatggcgttgagcaaaaattggctaaaggtgatgtagtagaaggaacagttaaacgtttgactgacttcggtgcatttgttgaagtattgccaggtatcgatggacttgttcacgtatcacaaatttcacacaaacggattgaaaatccaaaagaagctcttaaagttggtcaagaagttcaagttaaagttcttgaagttaacgcagatgcagaacgcgtgtcactttctattaaagctcttgaagaacgtccagcccaagaagaaggacaaaaagaagaaaaacgtgctgctcgtccacgtcgtccaagacgtcaagaaaagcgtgatttcgaacttccagaaacacaaacaggattttcaatggctgatttgtttggtgatatcgaactttaa

SEQ ID NO: 7 - DNA, 237 bp, Streptococcus pneumoniae
aataccctaagatattttgctttttatcttgattattacctaagaactggggtagctggattcgaaccaacgcatgagggagtcaaagtcccttgccttaccgcttggctataccccattaatgaaatggagagagagggattcgaacccccgaacccgaaggagcggatttacagtccgccgcgtttagcctcttcgctatctctcctacaatcaacatggactattatatcatga

SEQ ID NO: 8 - DNA, 231 bp, Streptococcus pneumoniae
atgagcaagaaagataaaaaaatcgaaattcaagtagcggatgccaaagttaatgttggtaaagacagttttgaaggttatacattgactatcggtaaaaaagttatcggagaaattgccgaattagacggacaatttgccattataaagaatgggaatgtcgatagtttttataaaaaattggaaaaagctgtggaaattttgattgaaaattataatttagcaaaataa

SEQ ID NO: 9 - DNA, 645 bp, Streptococcus pneumoniae
atgaaaatattggttacaggttttaatccttttggaggtgaaaagattaatccagctttggaggctgtaaaattattaccatctgagattaatggggctgaagttcgctgggtagaaattccaacggttttttataagtcgtcagaagttttagaggcagaaatattacgatatcaaccagatgctgtactttgtattggacaagcaggcggcaggaccggcttaacacctgaacgagtggctattaatcaagatgatgctcgcatacctgataacgaaggcaatcaaccaattgatacaccgattcgtattgatggagcatcggcctattttagtagtttacctatcaaagcgatggtacaagctatcaaaaaacagggacttccggcagttgtatccaatagtgcaggaacctttgtttgcaatcatttgatgtaccaagctctttatttagtggataaaaaattccctaatatgagagcaggtttcatgcatattccatatatgatggaacaagtagtaaataagccgaatactgcaggaatgagtctatgtgatattgtaagaggcatagaggtagctattgaagctattgtagactacaaagataaggatttgcagttagtaggcggtgagactcactga

SEQ ID NO: 10 - DNA, 924 bp, Streptococcus pneumoniae
atgacagagttggcaaagcaactattagagttgacctatattgtgattggttgtcaatttctccatacagcctattgtagttataaagataaaacaaacccagttcgacttgggacatctgcattttggactctattgtctattacgtttataggtggttcctatatgccaaatatgagtattggtattattgtaatcctattatcgctgttaacattgtttaagcaagtccgtatcggaaccttgccatccttagatgaaatgaaagccaatattgaatctaacaggttgaaaaataaaatttttattccagttatgctgatggcaatacttgcgttggtcttagcgcaaatgattccagaatttagcaagatttcgattagccttgccgccttgtttgctacaatttctgttcttgtgattaccaatagtcaccctaagagtctgttatcagaaaataatcgaatgactcagcaagtttcaacaagtggtattgttcctcaattattaggggctttgggggctatttttactgtagcaggtgttggtgatgttatctctcatctgattagcggtattgttccttcagatagtcgctttataggagttttggcctatgttcttggaatggttctattcacaatgattatgggaaatgcttttgcagcattcaccgttattacagcaggtgttggagttccctttgtatttgctctgggagctaatccaattgtggctggtgctcttgccatgacagcaggttattgtgggaccttattgaccccaatggctgctaattttaacgctctaccagcagcattgatggatatgaaagatcagaatggcgttataaaggctcaagcaggtgttgctctagtaatgattgttattcacatattcttaatgtactttctcgcattttag

SEQ ID NO: 11 - DNA, 711 bp, Streptococcus pneumoniae
ttgaatataaaggagtttgatatggagtggattagattaataggaatagcaatcattgttgtgggttttattttaaaatttgatacaattgcaacagtagtcttagctggtttggttacagctttagtttcaggtgtttctctcgttgaatttttggagattttgggaaaagaatttagcaatcagcgagtgctcacgatttttatggttaccttgcctcttgtggggctgtcagaaacctttggactcaagcaacgatcaatcgatttgattcgaaagattaaaggtctgacagttggaaacttctatacagtttatttctttattcgagagttagctggtttcttttcaattcgtctaggaggacaccctcagtttgtcagacctttggttcagcctatgggagaagcagctgcagagtctcaattaggtagaaagttaacagaggttgaagatgagacaataaaagcgcgtgcggctgcgaatgaaaattttggaaatttctttgctcaaaatacgtttgtaggtgctgggggagtcctcttgatagggggaacattagatcagttaggctatgaaagcaattatgcagggattgcttctacatctattattgttgctgttataacacttattgtagtggggatttacaattatttatttgataaaaaattgatatcaaaaaagactaggggaggagaacaaaaatga

SEQ ID NO: 12 - DNA, 705 bp, Streptococcus pneumoniae
gtggtcctgagcacgtcagctattttagtggcttgtggaaaaactgataaagaagcagatgcaccgacaacattttcttatgtctatgcagtagatccagcatcattgggctacagtatagcgactcgaacatcgaggacagacgttattggaaatgttattgatggtttgatggaaaatgataaatacggcaatgttgctccttctcaaaaagactatgatttgaacagtacaggatgggctccaagctatcaagatccagcgtcttacttgaatattatggatccaaaatctggttctgccatgaaacaccttggcattacgaaaggaaaagataaggatgttgtagctaaacctggtttggataaatataagaaattgttagaagatgctgtttctgagatcactgacctagagaagagatatgaaaaatatgccaaagctcaagcttggtcgacagatagttcattattgatgccaacagcttcatctggtggttttccagttgtaagtaacgtagtaccattctcaaaaccatactcacaagttggtattaagggggaaccatatatctttaaaggaatgaaattgcaaaaagatattgttacaacaaaagaatataacgaggtttttaaaaaatggcaaaaagaaaaattggaatccaatagcaaataccaaaaagaactagaaaaatacattaaataa

SEQ ID NO: 13 - DNA, 1023 bp, Streptococcus pneumoniae
atgacagtaacgattgattgggaaaacctcggtttttcctatatgaaattaccttatcgctatcttgctcatttcaaaaatggacaatgggatcaaggagagcttacagaggatgcaactttgcatatttcagagtcttctccaagtcttcactatggacaacaagcatttgaaggtttgaaagcttatcgtactaaggatggcagtgttcaactgttccgtcctgatgaaaatgctaaacgtctgcaacgtacatgtgaccgtctcttgatgccacaagttccgacagacatgtttgtagaagcttgtaaagcagttgtccgtgcgaatgaagaatacgtaccaccatacggaacaggtggaaccttatatcttcgccctcttttgattggtgtcggagatattatcggggtaaaaccggcagaagagtacattttcaccatctttgctatgccagttggaaattactttaaaggcggtttggtcccaaccaacttcttgattcaggatgagtacgaccgtgcagcaccaaatggtacaggtgcggctaaggttggtggaaactatgctgcaagtctcttaccaggaaaaatggccaagtcacgtcatttctcagatgttatctatctggacccatcaactcatacaaagattgaagaagtcggatcagctaacttctttggaattacagctgataatgaatttgtaacaccattgagtccatctatcttgccatctattaccaagtattccttgctttatttggcagaacatcgcttgggattaactcctattgagggtgatgttccaattgataatcttgaccgttttgtagaggcaggtgcctgtggtacagcagcggttatttctccaattggaggtattcaacatggtgatgatttccatgtattctatagtgaaacagaagtaggtcctgtgacgcgtaaattatataatgaattgacgggtattcagtttggcgatattgaagcgccagaaggttggattgtaaaagtagattaa

SEQ ID NO: 14 - DNA, 2472 bp, Streptococcus pneumoniae
atgtctaacattcaaaacatgtccctggaggacatcatgggagagcgctttggtcgctactccaagtacattattcaagaccgggctttgccagatattcgtgatgggttgaagccggttcagcgccgtattctttattctatgaataaggatagcaatacttttgacaagagctaccgtaagtcggccaagtcagtcgggaacatcatggggaatttccacccacacggggattcttctatctatgatgccatggttcgtatgtcacagaactggaaaaatcgtgagattctagttgaaatgcacggtaataacggttctatggacggagatcctcctgcggctatgcgttatactgaggcacgtttgtctgaaattgcaggctaccttcttcaggatatcgagaaaaagacagttccttttgcatggaactttgacgatacggagaaagaaccaacggtcttgccagcagcctttccaaacctcttggtcaatggttcgactgggatttcggctggttatgccacagacattcctccccataatttagctgaggtcatagatgctgcagtttacatgattgaccacccaactgcaaagattgataaactcatggaattcttgcctggaccagacttccctacaggggctattattcagggtcgtgatgaaatcaagaaagcttatgagactgggaaagggcgcgtggttgttcgttccaagactgaaattgaaaagctaaaaggtggtaaggaacaaatcgttattactgagattccttatgaaatcaataaggccaatctagtcaagaaaatcgatgatgttcgtgttaataacaaggtagctgggattgctgaggttcgtgatgagtctgaccgtgatggtcttcgtatcgctatcgaacttaagaaagacgctaatactgagcttgttctcaactacttatttaagtacaccgacctacaaatcaactacaactttaatatggtggcgattgacaatttcacacctcgtcaggttgggattgttccaatcctgtctagctacatcgctcaccgtcgagaagtgattttggcgcgttcacgctttgacaaagaaaaggctgagaaacgtctccatatcgtcgaaggtttgattcgtgtgatttcgattttggatgaagtcattgctcttatccgtgcttctgagaataaggcggacgccaaggaaaacctcaaagttagctatgattttacggaagaacaggctgaggctatcgtaactttgcaactgtaccgtttgaccaataccgatgtggttgtcttgcaggaagaagaagcagagcttcgtgagaagattgctatgctggcggctattatcggtgatgaaaggactatgtacaatctcatgaagaaagaacttcgtgaggtcaagaagaaatttgcaactcctcgtttgagttctttagaagacactgcgaaagcaattgagattgatacagctagtcttatcgctgaggaagatacctacgtcagcgtgaccaaggcaggttacatcaagcgtaccagtccacgttcctttgcggcttccaccttggaagaaattggcaagcgtgatgatgaccgtttgatttttgttcaatctgccaagacaacccagcacctcttgatgttcacaagtcttggaaatgtcatctacagaccaatccatgagttggcagatattcgttggaaggacatcggagagcatctgagccaaaccatcacaaactttgaaacgaatgaagaaatcctttatgtggaagtactggatcagtttgacgatgcgacaacctactttgcagtgactcgccttggtcaaatcaaacgggtagagcgaaaagaattcactccatggcggacctatagatctaagtctgtcaagtatgctaagctcaaagacgatacagatcagattgtagcagtggctccgattaaactagatgatgttgtcttggttagtcaaaatggttatgccctgcgtttcaatatcgaagaggttccggttgtcggtgctaaggcagcaggtgtcaaggctatgaatttgaaagaagatgatgtcctccaatctggctttatctgtaatacttcgtccttctacctcttgacccagcgtggaagcttgaaacgtgtttctattgaggaaattctagcaaccagccgtgccaaacgaggattacaagtcttgcgtgagttgaaaaacaaaccgcatcgtgtcttcttggcaggagcagttgcagagcaaggatttgttggcgatttcttcagtacggaagtggatgtgaacgaccaaactctgcttgtccaatccaataaaggaacaatctatgaaagccgattgcaagacttgaacttgtcagaacgcactagcaatggaagcttcatttctgacacgatttcagatgaagaagtttttgacgcttatcttcaggaagtagttactgaagataaataa

SEQ ID NO: 15 - DNA, 1944 bp, Streptococcus pneumoniae
gtgtcaaaaaaggaaatcaatattaacaattataatgatgatgctattcaggtgctagaagggttggatgcggtccgaaaacgtccggggatgtatattggatcgaccgatggcgctggtcttcatcacctagtttgggaaatcgttgataatgcagtcgatgaagccttgtctgggtttggtgatcgtattgatgtaactatcaataaagacggtagtctaacggttcaagaccatggacgtgggatgccgacaggtatgcacgctatgggaattccaactgttgaggttatctttaccattcttcatgccggagggaaattcggtcaaggtggctataagacatcaggtggacttcacggagtgggttcttccgttgttaacgccctttctagctggttagaagttgaaattacccgtgatggcgcagtttacaagcaacgtttcgaaaatggtggaaaacctgtcacgactttgaagaaaatcggtacagcacccaagtctaaaacaggcaccaaagttacttttatgcctgacgcgactatattttctacgacagatttcaagtacaataccatttcagagcgccttaatgaatcagcctttctcttgaaaaatgtgaccttgtctttaacggacaagcgaacagatgaagcgattgagttccactatgagaatggagtacaagattttgtttcttatctcaacgaagataaggaaatcttgacgccagttctttactttgaaggggaagacaatggttttcaagtggaagtagccctccagtacaatgacggattctcagataacattctatcctttgtcaataacgttcgcaccaaggacggtggaacgcacgagacaggactcaagtctgccattaccaaggtcatgaatgactatgcacgtaaaacaggtcttctcaaggaaaaagataaaaaccttgaaggttcagactatcgtgagggactagcggccgttctttctatcttagttcctgaagaacacttgcagtttgaaggacagaccaaggataaactaggaagccccctagctcgcccagttgtggatggaatagtggctgataagttgacctttttccttatggaaaatggggaattagcttctaacctcatccgcaaggctatcaaggcccgtgatgctcgtgaagcagcacgtaaggcgcgtgatgagagccgaaatgggaagaaaaacaagaaagataagggcttgttgtctgggaaattgaccccagcccaatctaagaatcctgctaagaatgaactctatctagttgagggggactctgccggtggttctgccaaacaaggtcgtgaccgcaagttccaggctattctacctcttcgtggtaaggttatcaatacagccaaggccaagatggcggatatcctcaaaaatgaagagatcaataccatgatttataccattggtgcgggtgttggagcagacttctctattgaagatgccaactatgataagatcattatcatgaccgatgcggataccgacggtgcccatatccagaccttgctcttgacatttttctaccgttacatgcgtccgctagtcgaggcaggtcatgtctatattgccctcccacctctttacaagatgtccaaaggtaaaggaaagaaagaagaagtggcctacgcttggacggacggagaactagaagaactccgtaaacagttcggtaaaggcgctaccctccaacgatacaaaggacttggtgagatgaatgcggaccagctctgggaaacaaccatgaacccagaaacacgtaccctcatccgtgtcacaattgaagatttagcgcgcgccgaacgccgcgtcaatgttctcatgggagataaggtagaaccacgccgtaaatggattgaagataatgtcaagtttacgctagaagaagcgacagtgttttaa

SEQ ID NO: 16 - DNA, 642 bp, Streptococcus pneumoniae
atgattacaatagttttattaatcctagcctatctgctgggttcgattccatctggtctctggattggacaagtattctttcaaatcaatctacgcgagcatggttctggtaacactggaacgaccaacaccttccgcattttaggtaagaaagctggtatggcaacctttgtgattgactttttcaaaggaaccctagcaacgctgcttccgattatttttcatctacaaggcgtttctcctctcatctttggacttttggctgttatcggccataccttccctatctttgcaggatttaaaggtggtaaggctgtcgcaaccagtgctggagtgattttcggatttgcgcctatcttctgtctctaccttgcgattatcttctttggagctctctatcttggcagtatgatttcactgtctagtgtcacagcatcgattgcggctgttatcggggttctgctctttccactttttggttttatcctgagtaactatgactttctcttcatcgctattatcttagcacttgctagtttgattatcattcgtcataaggacaatatagctcgtatcaaaaataaaactgaaaatttggtcccttggggattgaacctaacccatcaagatcctaaaaaataa

SEQ ID NO: 17 - DNA, 1230 bp, Streptococcus pneumoniae
atgggacaattacattttatcacaaaactactcgatatcaaagacacaaatatccaaattatagatgtcgtcaatagggattcacacaaagaaatcatcgccaaactggactacgacgccccatcttgccctgggtgcggaaaccaattgaagaaatatgactttcaaaaaccgtctaagattccttaccttgagacaactggtatgcctactagaatcctccttagaaagcgtcgctttaagtgctatcagtgctcaaaaatagcggtcgctgagacttccctcgtcaagaaaaatcaccaaatccctcgtatcatcaaccaaaagattgctcaaaagttgattgaaaagatttctatgactgatattgcccatcagctttccatctcaacttcaactgttattcgtaagctcaatgattttcactttaaacatgatttttcttgtcttcctgagattatgtcttgggatgagtatgcttttacaaagggaaagatgagcttcattgcgcaagattttaacaatctcaatatcatcactgttcttgagggtagaacacaagctatcattcgaaatcactttcttcgctacgatagagttgtccgatgtcgcgtcaaaattattactatggatatgtttagcccttactatggcttggctaaacagcttcgctttcacattgtacaacatcttagctgtgctatgagtcgtgtgcgtgttcaaatcatgaatcagtttcatcgaaaatcccatgaatacaaggctatcaagcgctactggaagctcatacaacaggatagccgtaaactgagtgataagcgattttatcgtcctacttttcgtatacatttaaccaataaagagattttagacaagcttttgagctattcacaagacttgaaacatcactatcagctctatcaactcttgctgtttcactttcagaataaggaaccggagaaatttttcggactcattgaggacaatcttaagcaggttcatcctatttttcagactgtctttaaaaccttcctcaaagataaagaaaagattgtcaacgcccttcaactacactattctaatgtcaaactggaagcgaccaataatctcatcaaacttatcaagcgcaatgcctttggttttcgaaactttgaaaacttcaaaaaacggattttcatcgctctgaatatcaaaaaagaaaggacaaaatttgtcctttctcgagcttag

SEQ ID NO: 18 - DNA, 834 bp, Streptococcus pneumoniae
atgactgagtttttgttagttcttcttctaaaatccattaaactagctcgttggacctactactatcacttgaaacagctagacaaaacagataaggaccaagagcttaaagctgaaattcaatccatttttatcgaacacaaaggaaattatgcttatcgccgggttcatttagaactaagaaatcgtgcttatctggtaaatcataaaagagttcaaggcttgataaaagtactcaatttacaagctaaaatgcgacagaaacgaaaatattcttctcataaaggagacgttggcaagaaggcagagaatctcattcaaggccaatttgaaggctctaaaacaatggaaaagtgctacacagatgtgacagaatttgccattccagcaagtactcaaaagctttacttatcaccagttttagatggctttaacagtgaaattattgcttttaatctttcttgttcgcctaatttagaacaagtacaaacaatgttggaacaggcattcaaagagaagcactacgagaatacgattctccatagtgaccaaggctggcaatatcaacacgattcttatcatcggttcctagagagtaagggaattcaagcatccatgtcacgtaagggtaacagcccagacaatggtatgatggagtccttctttgggattctgaaatcggaaatgttttacggttatgagaagtcgtttcagtcgtttaagcaattggaacaagctattatagactatattgattactacaacaataaacgaattaaggtaaaactaaaaggacttatccctgtgcaatacagaactaaatccttcggataa

SEQ ID NO: 19 - DNA, 573 bp, Streptococcus pneumoniae
atgaactgcaccccaaaagttagacagaaaaaatctaacttttggggtgtttttattatgaaattaacttatgatgataaagttcagatctatgaacttagaaaacaaggatatagcttagagaagctttcaaataaatttgggataaataattctaatattaggtacatgattaaattgattgatcgttacggaatagagttcgtcaaaaaaggaaaaaatcgttactattctcctgatttaaaacaagaaatgattcataaagtcttacatgaaggctggactaaagatagagtttctcttgaatacggtctcccaagtcgtacgatacttcttaactggctagcacaatacagaaaaaacgggtatactattgttgagaaaacaagagggagagtacctaaaatgggacgtaagccaaaaacgagacctgaagagagaacagaattagaacgtcttcaagcagaaaatgagtacctgagagcggagaaggccatcctaaaaaagttaagagaactccgattgaaggaggaaaaagagaaagaagaaagacagaaattgttcaagaattaa

SEQ ID NO: 20 - DNA, 102 bp, Streptococcus pneumoniae
atgattaaattgattgatcgttacggaatagagttcggcaaaaaaggaaaaaatcgttactattctcctgatttaaaacaagaaatgatttataaagtctga

SEQ ID NO: 21 - DNA, 957 bp, Streptococcus pneumoniae
atgtctattataaccttgctccccctcttggtgtcttctatgctgatttactcagcacctctcatctttacaagtatcggtggtgttttctctgaacgtggtggtgtggtaaacgttggccttgaaggaattatggttatgggtgccttttctggagttgtctttaaccttgaatttgcagaacaatttggagcagcaactccatggctatccttgcttgtagcaggattggttggtagtgttttctctatcatccacgcagcagcgacggttcatttccgtgcagaccatgttgtcagcggtacggtattgaacttgatggcgcctgccttggctgttttcttagttaaagttctttataacaaaggacaaaccgacaacctaagtcaaacttttggacgctttgatttcccagtcttggcaaatatcccagtgattggtgatatcttcttcaagtcaactagtctacttggttatctggcgattgccttctcattccttgcttggtttattctctttaagactcaatttggtcttcgtcttcgctctgtcggtgaacatcctcaagcagcggataccttgggaatcaacgtctacaagatgagatatttagggattattatttcaggttttctaggtggaattggcggagcgatttatgcgcaatcaatctcagttaacttctcagtgacaactattgttggacctggatttatcgcccttgctgcgatgatctttgggaaatggaatccaatcggtgctatgctttctagtctcttctttggactttcacaaagtttggctgttatcggttctcaattgccgttcctacaaggagtgccagcggtttatcttcaaattgcaccttatgttttgacaattcttgtcttagcagccttctttggaaaagcagtcgcaccaaaagcagatggtatcaactacatcaaatcaaaataa

SEQ ID NO: 22 - DNA, 1086 bp, Streptococcus pneumoniae
gtggaaacttgggaaaggagaagagtgatgtctaaaaaattacaacaaatttcggttcccttgatttctgtattcctaggaattttactcggagccattgtcatgtggatcttcggttatgatgctatttggggctacgaagaattgttctatacagcctttggcagtctgcgtgggattggagaaatcttccgtgctatgggtcctctggtcttgattggtcttggttttgcggttgccagtcgagctggtttctttaacgtcggacttcctggtcaggctttggcaggttggattctcagtggttggtttgccctgtcgcatccagatatgccccgtcccttgatgattctagcaaccatcgtgattgccttgattgctggtgggattgtcggagcgattccaggtattcttagggcctatctagggacgtcagaggttattgtaaccatcatgatgaactacattgtcttgtatgtagggaatgcctttatccatgctttccctaaagacttcatgcaaagtacagattcgaccattcgtgttggggctaatgcaacctatcagacaccttggttggctgagttgactggtaactcacggatgaatattggtattttctttgccatcattgccgttgcagttatttggttcatgctcaagaaaacaactcttggttttgaaatccgtgcagttggtcttaatccacatgcttcagaatatgctggtatttctgccaagcggactattatcctatctatgattatttcaggtgccttggcaggtcttggtggatctgttgaaggtttgggaaccttccagaacgtctatgttcaaggttcgtcattagctatcggatttaacggaatggcggttagtttgcttgcggccaactcaccaattggtatactctttgcagccttcctatttggcgttctccaagttggggctcctggtatgaatgcggcgcaggtaccatctgagcttgtcagcattgtaacagcgtctattatcttctttgtcagtgttcattaccttatcgaacgctttgtcaaaccgaaaaaacaagttaaaggaggtaagtaa

SEQ ID NO: 23 - DNA, 1536 bp, Streptococcus pneumoniae
atggcacacgaaaatgtcattgagatgcgtgatattaccaaggtgtttggtggatttgttgctaacgacaaaatcaacttgcacctacgaaaaggtgaaattcatgcacttttaggagaaaatggggctggtaagtccacgctaatgaacatgttagcaggccttcttgaaccaactagtggtgaaatcgcggtcaacggtcaagttgtcaatctcgactccccatctaaagcagctagcttgggaatcgggatggttcaccagcactttatgttggttgaagccttcacagtggctgaaaacatcattttaggtagtgaattgactaaaaatggtgtgctagatatcgctggagctagcaaagaaatcaaggctctttctgaacgttatggcttagctgttgacccttctgccaaggtagcagatatctcagttggagcccaacaacgtgtagaaattttaaaaacactttataggggggctgatatccttatctttgacgaaccaacggctgttttgactccatcagaaattgatgagttgatggctattatgaaaaatcttgtcaaagaaggaaaatcaattatcttgattacccacaaattggatgaaattcgcgcagtttctgaccgtgttacagttatccgtcgtgggaaatcaattgaaaccgttgaaattgcaggggctaccaatgctgatttggcggaaatgatggtaggacgttctgtttcctttaaaacagagaagcaagcctctaaaccaaaagaagtggttttgtctatcaaagatttggtggtcaatgaaaaccgtggtgttccagctgttaaaaatctgtccttggatgttcgtgctggagagattgttggtattgcggggattgatggaaatggtcagtctgaactgattcaagccattacaggtcttcgtaaggttgaatctggtagcattgagctaaaaggagattcaattgtaggcttgcacccacgtcagattacagaactaagtgttgggcacgttccagaagaccgtcaccgtgatggcttgattttggaaatgatgatatctgaaaatattgcccttcaaacctactataaagaaccacatagtaaaaatggaattttgaattattcaaatattacttcttatgctaaaaagctgatggaagagtttgatgttcgcgctgccagtgaattagttcctgcagctgcactctcaggaggaaatcaacaaaaagcaattattgctcgtgaaattgatcgagatcctgatctccttatcgttagtcagccaactcgtgggttggatgtcggtgccattgagtatatccacaaacgcttgattgaagagcgtgataatggcaaggctgtccttgttgtcagctttgaattggatgagattttaaacgtctcagaccgtattgccgttatccacgatggtaagattcaaggtattgtatcaccagaaacaaccaataaacaaggacttggtgtcttgatggctggtggaaacttgggaaaggagaagagtgatgtctaa

SEQ ID NO: 24 - DNA, 420 bp, Streptococcus pneumoniae
ccatttccatcaatccccgcaataccaacaatctctccagcacgaacatccaaggacagatttttaacagctggaacaccacggttttcattgaccaccaaatctttgatagacaaaaccacttcttttggtttagaggcttgcttctctgttttaaaggaaacagaacgtcctaccatcatttccgccaaatcagcattggtagcccctgcaatttcaacggtttcaattgatttcccacgacggataactgtaacacggtcagaaactgcgcgaatttcatccaatttgtgggtaatcaagataattgattttccttctttgacaagatttttcataatagccatcaactcatcaatttctgatggagtcaaaacagccgttggttcgtcaaagataaggatatcagcccccctataa

SEQ ID NO: 25 - DNA, 1092 bp, Streptococcus pneumoniae
ttgcaacatcgttgcacatcttatttaggaggttcagtaatgaacaagaaacaatggctaggtcttggcctagttgcagtggcagcagttggacttgctgcatgtggtaaccgctcttctcgtaacgcagcttcatcttctgatgtgaagacaaaagcagcaatcgtcactgatactggtggtgttgatgacaaatcattcaaccaatcagcttgggaaggtttgcaggcttggggtaaagaacacaatctttcaaaagataacggtttcacttacttccaatcaacaagtgaagctgactacgctaacaacttgcaacaagcggctggaagttacaacctaatctttggtgttggttttgcccttcataatgcagttgaagaagcagctaaagaacacactgacttgaactatgtcttgattgatgatgtgattaaagaccaaaagaatgttgcgagcgtaactttcgctgataatgagtcaggttaccttgcaggtgtggctgcagcaaaaacaactaagacaaaacaagttggttttgtaggtggtatcgaatctgaagttatctctcgttttgaagcaggattcaaggctggtgttgcgtcagtagacccatctatcaaagtccaagttgactacgctggttcatttggtgatgcagctaaaggtaaaacaattgcagccgcacaatacgcagccggtgcagatattgtttaccaagtagctggtggtacaggtgcaggtgtctttgcagaggcaaaatctctcaacgaaagccgtcctgaaaatgaaaaagtttgggttatcggtgttgatcgtgaccaagaagcagaaggtaaatacacttctaaagatggcaaagaatcaaactttgttcttgtatctactttgaaacaagttggtacaactgtaaaagatatttctaacaaggcagaaaaaggagaattccctggcggtcaagtgatcgtttactcattgaaggataaaggggttgacttggcagtaacaaacctttcagaagaaggtaaaaaagctgtcgaagatgcaaaagctaaaatccttgatggaagcgtaaaagttcctgaaaaataa

SEQ ID NO: 26 - DNA, 390 bp, Streptococcus pneumoniae
atggcgactactgagttgattgaactggcaattgaaaccagcaaacatgcctatgtcccctattctcactttcctatcggagcagttttagtagccaaagacggaaatgtttacacgggagtgaatatcgaaaatgttagctatcctttgaccaattgcggtgagagaacagctatttttaaggctatatctgaaggccaaagagaattttcagaattgattgtctatggtcaaactgaaaaaccgatttcaccatgtggtgcttgtcgccaagtaatggtcgaattttttgaacaagatttaaaagtgaccttagtcgcaaaagataaatcgacggtcgagatgacggtcggggagttacttccatattcttttacagacttaaattag

SEQ ID NO: 27 - DNA, 300 bp, Streptococcus pneumoniae
aagtcattattgcaagcttgccttctgacagaccaagaaaaaattgttgtttgccaattggcccaaaaagctggggctgactttgttaacacatctactggcttttcaactggtggtgctacgatagcagatgttagattaatgcgtgaaacagttggatctgatatgggagtcaaggctgctggtggagctcgttcttatgcagatgctcttgcctttgtcgaagcaggtgcgacccgtatcggaacgtcagctggggtagctattttaaaaggagaattggcagatggcgactactga

SEQ ID NO: 28 - DNA, 183 bp, Streptococcus pneumoniae
ttgactcccatatcagatccaactgtttcacgcattaatctaacatctgctatcgtagcaccaccagttgaaaagccagtagatgtgttaacaaagtcagccccagctttttgggccaattggcaaacaacaattttttcttggtctgtcagaaggcaagcttgcaataatgactttcactaa

SEQ ID NO: 29 - DNA, 351 bp, Streptococcus pneumoniae
atgaaattaaataaatatatagatcatacgcttttagaacaagatgcaaagaaagaacaaattgatagtttgttgtctgaggctagagagtatgactttgccagtgtctgcgttaatccgacctgggttgaacatgctaaaaaaggacttgaaggcacagatgttaaggtttgcacagtagtaggtttccctttgggagcaacaacttcagccgtgaaagcatttgagacaaaagaagctatccaaaatggtgcagatgagattgatatggtgatcaatgttggagctctcaaatcaggtaatttagccttggttgagtcagatattcgcgcagtagtggaagcaagtggt

SEQ ID NO: 30 - DNA, 1278 bp, Streptococcus pneumoniae
atgagagcagttgatttaatacaaaaaaaacgagacggtcaagaactgacttcaagtgaaattgaatggctggtagaaggctatgtgtcaggaactgttcctgattatcagatgtctgcctttgctatggctgtttattttaaaggaatgacgactcgagaaatctctgatttaacgatgaatatggttaagactgggcaagagtttgacctgtcagccattgatggtgtgaaagttgacaagcattctactggtggtgtcggcgataaggtaaccttgattttagctcctcttgttgctagcttcggtgtgcctgtagcaaaaatgagtggtcgtggtcttggccatacaggcggaacaattgataaattggagtccattaagggctatcaagtagaacgtagtcaagaggattttattcgtcaggttcaggatattggagtatctgtcattgggcaatcagaccagctggtcaaagcagataagcttctctatgcccttcgtgatgtgaccgcaactgtcgacacgattcctttgattgcgagttcggtgatgagcaagaaaattgcggcaggggcggatgctattttgctagacgtgactgtcggtgagggtgccttcatgaagacggttgatgaggcgcgtgagttggctcaaactatggtagatcttggtaaggttgttggacggaagacagtagcagtgattacggatatgagccagcctttgggacgagcgattggaaatcgtctggaaatccttgaagcattggagattttgcaaggtcaaggacgtcaggatattacccactttatttgtgaattggctcaaattatgcttggtttggcaaatgttaacaagactgttgaagaagttcaccaacatcttgaaaatggtcaagcactggctaagtttgaggaaatggtgcaagcccaaggtggagacttggaagacctctatcgtcctgtaaatgtagctcatgtggtggaaatccctgctcaggaaacgggtgtcatttcagctcttccagctatggactttggtctttatgccatgaggctgggtgctggtcgtgcagttaagtctgatgtcttggactatgaaacaggaattgtttttgaaaagaagattggagactccgttcaaaagggtgaaattgttgcaaaagtatacacaaatgaaaaaattccacctcaactagttacagatttccaaaaatgtgttaaaataagtgatgaagtgaaaaaaatccgtgaaattgtagaaatcatctcctaa

SEQ ID NO: 31 - DNA, 591 bp, Streptococcus pneumoniae
atgagtaaaatgtattatgcagaaaatcctgacgctgctcacgacattcatgagttgagagtggacttgttgggacaaaaaatgacctttttaacggatgcgggtgtttttagcaagaaaatagttgactttggaagtcaactattgctcaagtgtcttgaggtcaaccaaggagaaactgtccttgatgtaggctgtggttacggacctttgggtttgtccttagctaaggcttatggagttcaggctactatggttgatatcaacactcgtgccttggatttagctcggagaaatgctgaaaaaaataatgcaaaagcgacgattttccagtccaacatctatgaacaagttgaaggacattttgatcatgtcatttccaatcctcctatccgtgcgggcaagcaagtcgttcatgaaatcattgagaaaagtaaagatttcttggaaactggtggggatttgacaatcgtcatccagaaaaaacaaggggctccaagtgctaagtccaagatggaggatgtgtttggtaattgtgaaatccttaaaaaagacaaaggatactatatccttagaagtgtgaaagaatga

SEQ ID NO: 32 - DNA, 219 bp, Streptococcus pneumoniae
atgacactattttaccataatttgactcaaattgtaaatcgtttacaaattgataataaaacgaaaaagaccgaagaaagcgagtcacgaagccattttcttcaatctctttcaacacttataaataataaaccatttagaactataaatatcacagtccagataaaaacaaaaagtttatcatctataatcaggcagattattatttctattgcttaa

SEQ ID NO: 33 - DNA, 300 bp, Streptococcus pneumoniae
attctactgatttataagcttataaagggggctttttggttcacaacttataggaggtgtactatgaaaatcttaaaatgttacatattggaactctgttttattttaagttttgctttaccttttataaaaggagccaatgcagataatggtagatgctttgtggaaacctattacggttttacttttttgatggaacatgctattgtaacagctgtctttatctgttcgttcttaattgctttcttactaaaaaacgatgggcgaaatggattgctgcgggtagttattgctttttag

SEQ ID NO: 34 - DNA, 951 bp, Streptococcus pneumoniae
atgatagataaaatacctaggggaaaacaaatgaccaacgaatttttacattttgaaaaaatcagccgccagacttggcaatctttacatcgaaagacaacacctcctttgacagaagaagaattggaatctatcaagagttttaatgaccaaatcagtctccaagacgttacagatatctatctccccttggctcatctgattcagatttacaagcgaactaaggaagatttagccttttcaaaaggaattttcctccaacgtgaaagtaaatctcaaccttttattattggggtttctgggagtgttgccgttggaaaatccacaaccagtcgcctacttcaaatcctactgtcccgtacgtttacagatgctacggttgagttggttacaactgatggttttctctatcccaatcaaaccttgattgagcagggaattttaaatcgtaaaggatttcctgaaagctatgatatggaagctcttctcaacttcttggaccgcatcaaaaatggacaagatgtagatattcctgtctattctcatgaagtttacgacatcgtacccaaaaagaaacaaagtgtcaaagctgctgattttgtaatcgttgagggaattaatgtctttcaaaatccacaaaacgatcgtctctatatcactgacttctttgacttttccatctatgtagatgctggagtggatgatattgaaagttggtatctggaccgtttcttgaaaatgctgagtctagcccaaaacgaccctgatagctactattatcgttttactcagatgccgattggggaagtggagtcctttgcccatcaggtctggaccagtatcaatctcacaaatctgcaaaattatattgaaccaaccagaaatcgtgcagaagtgattcttcataaaagcaagaaccatgaaatcgatgaaatttacttaaaaaagtaa

SEQ ID NO: 35 - DNA, 237 bp, Streptococcus pneumoniae
ttggcaaacattaaatcagctatcaaacgcgctgaattgaacgttaaacaaaacgaaaagaactcagctcaaaaatcagctatgcgtactgctataaaagctttcgaagcaaacccatctgaagaacttttccgtgctgctagctcagctatcgataaagcagaaactaaaggtttgattcacaaaaacaaagcaagccgcgataaagctcgtctttcagctaaacttgctaaataa

SEQ ID NO: 36 - DNA, 525 bp, Streptococcus pneumoniae
atgaaaatcgcaattatcggatattctggttctggtaagtcaactctagcagaaaagttatctaactactactccattccaaaactgcacatggacacactccaatttcaacctggttggcaagacagtgaccacgaatggatgttaaccgagataaaaaactttctcaccaagcataaagcttgggtcatcgatggtaattattcttggtgctactaccaagaacgaatgcaagaagctgaccaaatcatctttctcaatttttcgccattgacctgtctctttagagcctttaagcgttatcttaaataccgtggaaaagtcagagaaagtatggcggcagattgccctgaacgctttgactgggagtttatcagatggattctttgggatggacgtagcaaaactcaaaaagaaaattaccaaaaactttgccaagaatattcacataaagtcactattcttcgaaatcagagagagctagatcaatttctggataagaaaaggaagtcctacaattcataa

SEQ ID NO: 37 - DNA, 711 bp, Streptococcus pneumoniae
atgtctatccatattgctgctcagcagggtgaaattgctgataaaattcttcttcctggggatcctcttcgtgctaagtttattgcggagaatttccttggtgatgctgtttgttttaacgaagtgcgtaacatgtttggttacactggtacttacaagggtcaccgtgtatctgtcatgggaactgggatgggaatgccatctatttcgatttatgcgcgtgagttaatcgtagactacggtgtgaagaaattgattcgtgtgggaactgcaggttctttgaatgaagaggttcatgttcgtgaattagttttggcgcaggcggctgcaaccaactcaaacatcgttcgtaatgactggccacagtacgattttccacaaattgctagctttgatttgcttgataaagcctaccatatcgccaaagaacttggtatgactactcacgttgggaacgttttgtcatctgatgtcttttactcaaattactttgaaaagaatatcgagcttggtaaatggggagtcaaggctgtggaaatggaagcagcagctctttactatcttgctgcccaataccatgttgatgcgctagctatcatgaccatctctgatagcttggtcaatccagacgaagacacaactgcagaagaacgtcaaaataccttcactgatatgatgaaggttggtttggaaaccttgattgcagaataa

SEQ ID NO: 38 - DNA, 513 bp, Streptococcus pneumoniae
gtgtcagcacaaattacgattaaccataaaaaagcgcgctatgttcggattgagctagaaggctataatgccctcagtcttgcagaagttgaagttttccgctttatagctacgaatggtgaaacggcgatacaagtttctaagccagttcaaccaatcagtcagactcctgtgaaggataaaacattgacaattcaacacagtggagcttacattgcccgctactccataacttgggaagaagttccagtagataaagatggaaaccaagttgttcgtagtcattcttgggaaggaaacggtcgcaaccagactgcaggttttgtcctcaacctcccaatcaaagaaaatatgagaaatctgcgagttaagattgagaaaaagacaggtctactatggaatagatggcaaacaatctatgaaaacagaccaattttagctcaacctcaccgtaaaattacccattggggtacgatattgaattccaaggtgagtgacgatgatgtcttgtaa

SEQ ID NO: 39 - DNA, 576 bp, Streptococcus pneumoniae
ttggaaagtcgtaaattagctgttagtggaaaaattaagcattatgtggttgataatgacaatgttgtgactcccttgattcataataatcgtgatattgttacatttacaggtaattcacgctttaaacaccgttctcgtggctattttgaaagtccaatgaatgatattcctaactttaatattggtaaacaagctatcttggataaacatggttatcgtgatccgaaattggataaagtgcgattctttaagaaacaggctctgcctcgatcttctagtcaaccaagcgctgaaccaatggaaaatattgccttaggaaaacaggttactcaaagttcgacagttttcggaggagatgctagaagagctgtggatggcaaagtcgatggtaactatggtcacaattctgtcactcatacaaacttccaatctaagccttggtggcaagtagatttggctaaagaagaaaccattcgccaaatcaatatttacaaccgaacagacactgcccaggatagattggcaaactttgatgtcattcttttagacagttctggtaaagaaattgagtga

SEQ ID NO: 40 - DNA, 408 bp, Streptococcus pneumoniae
gtggtaataggtgtgctagattctaaggaggaattgaaagagtcagaaaatgatgctccaaaactagaaactcctcttagagaggagccaagactagctcctcaaacgcttccggaagcaagtgaagttcttgaaaacaaaagggaagagtcaaaagtagagataacagagccagctcaagcggatgatatccgcaaggttgttggggaattagccaaggatataagtattactaagttgtatatgacaggtcattctcttggaggctacctagctcagattgcagcggttgaagattaccaaaaatatcctgatttttataaccatgtattgaggaaagtgacaactttcagtgctcctaaagtcattacttccagaactgtttgggatgctaagaatggtttctga

SEQ ID NO: 41 - DNA, 810 bp, Streptococcus pneumoniae
atgacatttttaaacaaaatccatgaaactgctactttcctgaaagaaaagggaattgcagcccctgagttcggtctaatccttggatcaggacttggagaattggcagaagaaatcgaaaatccagttgtagtagactatgctgagattccaaactggggccgttcaacagtagtcggtcatgctggtaaattggtatatggtgaactggcaggtcgcaaggtcttggctcttcaaggtcgtttccatttctatgaagggaatcctctggaagtggtgactttcccagttcgtgtgatgaaagttcttggatgtgaaggtgttattgtaaccaatgcagctggcggtatcagatttggtcctggtaccttgatggctatctcagaccatatcaacatgacggggcaaaatccattgatgggtgaaaacttggatgactttggcccacgtttcccagatatgtctagggcctacacaccagaataccgtgccactgcccatgaagtggctaaaaaacttaatatcaagcttgatgaaggtgtctatatcggagttactggtccgacttatgaaacaccagcagaaattcgttcctataagacactgggagcagatgcagttggtatgtctacggttcctgaagttatcgtggcagcccactctggcttgaaagttctgggaatttcatgtatcactaactttgcggctggtttccaagaagaactcaatcacgaagaagttgtagaagtgactgaacgtgttaaaggtgatttcaaaggcttgcttaaagcgattcttgctgaattgtaa

SEQ ID NO: 42 - DNA, 543 bp, Streptococcus pneumoniae
atgacgcgctatgctttgctggtgagaggtatcaatgttggtggtaagaataaggtcgtcatggcggagcttcgtcaagaattgacaaacttgggactggaaaaggttgagagctacatcaacagtggcaatattttctttacttcgatagattccaaagcccaattggttgaaaagctagagactttctttgcagtccattatccatttattcagagcttttctttactgagtctagaggactttgaggcggaacttgaaaatctaccagcttggtggagcagagacttggcacgaaaagattttctcttttacactgagggtttggatgtggaccaagtcatcgcgacagttgaaagtttagagctgaaagatgaagtgctttattttggaaaacttgggattttctgggggaaattttctgaagaatcctattctaagactgcctatcagaagtacttgctgaaggtgcctttctaccgccacattactattcgtaatgctaaaacctttgacaaaattggtcaaatgctaaaaaaataa

SEQ ID NO: 43 - DNA, 1212 bp, Streptococcus pneumoniae
atgtctaaatttaatcgtattcatttggtggtactggattctgtaggaatcggtgcagcaccagatgctaataactttgtcaatgcaggggttccagatggagcttctgacacactgggacacatttcaaaaacagttggtttgaatgtcccaaacatggctaaaataggtcttggaaatattcctcgtgaaactcctcttaagactgtagcagctgaaagcaatccaactggatatgcaacaaaattagaggaagtatctcttggtaaggatactatgactggacactgggaaatcatgggactcaacattactgagcctttcgatactttctggaacggattcccagaagaaatcctgacaaaaatcgaagaattctcaggacgcaaggttattcgtgaagccaacaaaccttattcaggaacggctgttatcgatgattttggaccacgtcagatggaaactggagagttgattatctatacttcagctgaccctgttttgcagattgctgcccacgaagacattattcctttggatgaattgtaccgtatctgtgaatacgctcgttcgattacccttgagcgtcctgcccttcttggtcgcatcattgctcgcccttatgtaggtgaaccaggtaacttcactcgtacggcaaaccgtcgtgacttggctgtatctccattttccccaactgttttggataaattgaatgaggctggtatcgatacttatgctgtgggtaaaatcaacgatatctttaacggtgctggtatcaaccatgacatgggtcacaacaagtcaaatagtcatggaattgatacactattgaagactatgggacttgctgagtttgaaaaaggattctcattcacaaacctagttgactttgatgccctttacggccatcgtcgtaatgctcacggttaccgtgattgcttgcatgagtttgatgaacgcttacctgaaattatcgcagctatgagagagaatgaccttctcttgattactgcggaccatggaaatgacccaacgtatgcaggaacggatcacactcgggaatatattccattgttggcctatagccctgcctttaaaggaaatggtctcattccagtaggacattttgcggatatttcagcgactgttgccgataactttggtgtggaaactgctatgattggggaaagtttcttagataaattggtataa

SEQ ID NO: 44 - DNA, 741 bp, Streptococcus pneumoniae
ttgaataaaaagcggtttcatagtaaaataagaactgagaatgatggaggtaaatcggtggaaaatctgaagaaaatggcaggtatcaaggctgctgagttcgtgagcgatggaatggtcgttggacttggaacaggctcgactgcctattattttgtcgaagaaatcggtcgtcgtatcaaggaagaaggattgcagattacagctataacaacttctagtgtgaccactaaacaggcagaaggccttaatatcccgctcaagtctattgaccaagtagactttgtcgatgtgacggttgatggcgcggatgaagtggatagtcagtttaatggaatcaaaggcggtggtggtgcccttctcatggaaaaggtggtcgcaacaccatcaaaagaatacatttgggtggtggatgaaagcaagctggtcgaaaaactaggtgcttttaaattgccagtagaagtggttcagtatggtgcagagcaagtctttcgtcattttgaacgagctggctacaaaccaagtttccgtgaaaaagacggccaacgttttgtgacggatatgcagaattttatcattgacctcgccttggatgttattgaaaatccaattgcttttggacaagaattggaccatgtcgttggtgttgtggagcatggtttattcaaccaaatggtggataaggtaatcgttgctggacgagatggagttcagatttcaacttcaaaaaaaggaaaatag

SEQ ID NO: 45 - DNA, 186 bp, Streptococcus pneumoniae
aaatatgcattttatttttaccaaacgaataaaaatgagtttatctttgatgtatttgacttgttcatctctttccagctacgaaaacaaactcttaactttgatacgtctagtttagccttaaagcaggcgcatttcaagaatcataaattaagagaaggaagtagatgtatctgtctattttaa

SEQ ID NO: 46 - DNA, 873 bp, Streptococcus pneumoniae
atgaaagtgattaatcaaaccttattagaaaaagttattattgaacgttctcgttcaagtcataaaggagattatggtcgtctgctgctgcttggtggtacttatccttatggtggtgctatcatcgtggctgctttggcagctgtgaaaagtggggcaggattggtgactgttggaacggatagggaaaatatccctgctctgcacagtcatttacctgaggctatggcctttgctcttcaagacaagcaattgttaaaagagcagttggagaaggcagaagttgttttgctgggacctggtttaggagacgatgcttctggagaagatttagttaaacaggtctttgctggcttaaaacagaatcagattttgattgtagacggaggtgccttgactattcttgctaggacaagtctgtcatttccttctagccagcttatcctaactccccaccaaaaggagtgggaaaaactgtctggaattacgattgaaaagcaaaaggaagatacaacggctagtgccctgacttctttccctaaaggaacaattttggtggagaaaggtccggctactcgtgtttggcaagctggccagtctgattattaccagttacaggttggcggtccctatcaggcaactgggggaatgggagatactctggctgggatgatcgcaggatttgtaggccaattccgacaggccagtctctacgagcgtgtagcagtagcgacccatcttcattcagccatagcccaagaactatctcaagaaaattatgtggtcttaccgacggaaatcagcaggtatcttcccaaaataatgaaaattatttgtcaacaagagagggtaagcaaagataaacttgtttaa

SEQ ID NO: 47 - DNA, 921 bp, Streptococcus pneumoniae
gtgttagagggcacttgcagtttttggtataatggaagatatttgaaagaaaagagaagtgatatgacacagattattgatgggaaagctttagcggccaaattgcaggggcagttggctgaaaagactgcaaaattaaaggaagaaacaggtctagtgcctggtttggtagtgattttggttggggataatccagccagccaagtctacgttcgcaacaaggagaggtcagctcttgcggctggttcccgtagcgaagtagtgcgagttccagagactattactcaagaggaattgttagacctgattgctaaatataatcaggatccagcttggcatgggattttggtccagttgccattaccaaaacatatcgatgaagaggcggttttattagccattgacccagaaaaggatgtggatggtttccatcccctaaacatgggacgtctttggtctggacatccagtcatgattccctcgacacctgcaggaattatggaaatgtttcatgaatatgggattgacttggaaggtaaaaatgcggtcgtaatcggtcgttcaaatatcgttggaaaacctatggctcagcttcttttggctaaaaatgcgacagtaaccttggcccactcacgaactcataatcttgccaaggtggctgctaaagcagatattcttgtagtcgcaatcggccgcgccaagtttgtgactgctgactttgtcaaaccaggtgcggttgtcattgacgttgggatgaatcgagatgaaaatgggaagctctgtggagatgttgattatgaggcagttgcaccacttgctagccatatcacgccagtccctggaggtgtcggtcctatgaccattaccatgctgatggagcaaacttatcaagcagcacttcggacattggatagaaaataa

SEQ ID NO: 48 - DNA, 216 bp, Streptococcus pneumoniae
tctgccacctcacgggcaaatcccatctcatgtgttacgataaccatagtcatccctgacttggcaaggtcttgcataacagccaatacctcacctaccatttcaggatccaaggctgaagttggttcgtcaaagagcaaaacatctggttccatagccaacccacgcgcgatggcaatccgttgttgttgcccacccgacagactctgtggataa

SEQ ID NO: 49 - DNA, 735 bp, Streptococcus pneumoniae
atgacagaaaccttgataaaaattgaaaatttacataaatcttttggaaagaatgaagtattgaagggcatcaacctcgagattaaaagaggagaagttgtcgttatcatcggtccttcagggagtgggaaatctaccttgcttcgctctatgaatttgttggaggaagcaaccaaggggaagcttatctttgagggagtcgatattacggacaagaagaatgacctgtttgccatgcgtgagaagatgggcatggttttccaacaatttaacctctttcctaatatgactgtgatggaaaatattaccttgtcacctatcaagactaaaggtgaaagcagggaagttgctgagaagagagcccaagagcttttggaaaaagttggtttgccagataaggcagacgcttatccacagagtctgtcgggtgggcaacaacaacggattgccatcgcgcgtgggttggctatggaaccagatgttttgctctttgacgaaccaacttcagccttggatcctgaaatggtaggtgaggtattggctgttatgcaagaccttgccaagtcagggatgactatggttatcgtaacacatgagatgggatttgcccgtgaggtggcagatcgtgttatctttatggcagacggtgtggttgttgaagatgggacacctgagcagatttttgaacaaacccaagaacaacggactaaagatttcttgagtaaggttttataa

SEQ ID NO: 50 - DNA, 384 bp, Streptococcus pneumoniae
ttgataggtgacaaggtaatattttccatcacagtcatattaggaaagaggttaaattgttggaaaaccatgcccatcttctcacgcatggcaaacaggtcattcttcttgtccgtaatatcgactccctcaaagataagcttccccttggttgcttcctccaacaaattcatagagcgaagcaaggtagatttcccactccctgaaggaccgatgataacgacaacttctcctcttttaatctcgaggttgatgcccttcaatacttcattctttccaaaagatttatgtaaattttcaatttttatcaaggtttctgtcattatttcttatctccttgtcccatatgtttttcaaaagctttcaaggctactgtcagaatag

SEQ ID NO: 51 - DNA, 684 bp, Streptococcus pneumoniae
atgaatttttcttttttacctaagtatttaccttattttaactatggggctgttgtgacgattcttatttctatctgtgttatctttttgggaactattttgggtgttgtcttggcttttgggcaacgttcaaagtttaaaccgcttgtttggttggccaacttgaacgtttggattttccgtgggacaccgatgatggttccaattatgattgcctttgctcttatgcatatcaatgctccgactattcagattggaattttaggtgttgatttttcgcgtctgattccagggattttgattatctctatgaatagtggtgcttatgtttcggagactgttcgtgccggaatcaatgcggttccaaaaggtcagctagaggcggcttattcgctagggattcgtcctaaaaatgcgatgcgttatgtgattttgccacaagcagtcaaaaatatcttgccagcattggggaacgaatttatcaccattatcaaggacagctccctcttatcagctattggggtcatggagttgtggaatggggctacaacagtttctacaacaacctatctacctttaacaccacttttatttgcagcattttactacttgattatgacctctattctgacagtagccttgaaagcttttgaaaaacatatgggacaaggagataagaaataa

SEQ ID NO: 52 - DNA, 231 bp, Streptococcus pneumoniae
atggaatcacatttggttagaatcatcaaccgccttgaagcaatggcaaacgatggcggaaatttaaaacgtaattttgaacgcgaaggagttgttgttgcagaagttgcgtacagccacgacgaagaaaacggcccaatctttacccttcgtgacgtagaagatcgcgaaacgtatacgtttgatagcattgacttaatcgcaatggaaatttacgaacttctctactaa

SEQ ID NO: 53 - DNA, 2259 bp, Streptococcus pneumoniae
atgctttgtcaaaactgtaaaattaacgactcaacaattcatctttacaccaatctcaatggaaaacaaaaacaaattgacctctgtcaaaactgctataagattatcaaaacagatcctaacaatagcctcttcaaaggtatgacggatctgaacaatcgtgacttcgatccctttggtgatttcttcaatgatctaaacaatttcagaccttctagcaatactcctcctattcccccaacccaatcaggtggaggttacggtggaaacggcggttatggttcccaaaatcgtggatctgctcaaactccgccacctagccaagaaaaaggcctgctgaaagaatttggtattaatgtaactgaaattgcccgtcgtggagacattgaccccgttattgggcgcgacgatgagattatccgtgtcatcgagattctcaatcgtagaaccaagaataatcctgtccttatcggtgaacctggtgtcggaaaaacggccgttgtcgaaggtctagctcagaaaattgtcgatggcgatgtgccacataaactccaaggtaaacaagtcatccgtctggatgtggttagcttagttcaaggaacggggattcgaggacaatttgaagaacgcatgcaaaaactcatggaagaaattcgcaaacgtgaagacatcatcctctttatcgatgaaatccatgaaattgttggtgctggttctgcgagtgatggtaatatggacgcaggaaatatcctcaagccagcccttgctcgtggagaactgcaactagtcggtgctactaccctcaatgaataccgtatcattgaaaaggatgctgccctcgagcgtcgtatgcagcctgttaaagtcgatgaaccaacggtggatgaaacaatcactattctcaaagggattcaaaagaaatacgaagattaccaccacgttcaatataccgatgctgcgattgaagcagctgcaactctttccaatcgctacatccaagatcgcttcttgcctgacaaggccattgacctcctagatgaagctggttctaagatgaacttgaccttgaattttgtggatcctaaagtaattgatcagcgcttgattgaggctgaaaatctcaagtctcaagctacacgagaagaagattttgagaaggcggcctacttccgcgaccagattgccaagtataaggaaatgcaaaagaaaaagatcacagaccaggatactcctatcatcagcgagaaaactattgagcacattatcgagcagaaaaccaatatccctgttggtgatttgaaagagaaagaacaatctcaactcatccatctagccgaagatctcaagtctcatgttattggccaagatgatgcagtcgataagattgccaaggctattcgccgtaatcgtgtcggacttggtacccctaaccgcccaatcggaagcttcctcttcgttgggccaactggtgtcggtaagacagaactttccaaacaactggctatcgaactttttggttctgctgatagtatgattcgctttgatatgagtgaatacatggaaaaacatagtgtagctaagttggtcggcgctcctccaggttatgttggctatgatgaggctggtcaattaactgaaaaagttcgccacaatccatattctctcatccttctcgatgaagtggaaaaagctcacccagatgttatgcacatgtttcttcaagtcttggacgatggtcgtttgacagacgggcaaggacgcaccgttagcttcaaggatgccatcattatcatgacctcaaatgcaggtacaggaaagaccgaagctagcgttggatttggtgctactagagaaggacgtaccaattctgtcctcggtgaactcggtaacttctttagcccagagtttatgaaccgttttgatggcattatcgaatttaaggctctcagcaaggataacctccttcagattgtcgagctcatgctagcagatgttaacaagcgcctctctagcaacaacattcgtttggatgtaactgacaaggtcaaggaaaagttggttgacctaggttatgatccaaaaatgggagcacgcccacttcgtcggactattcaagactatattgaggacacaatcactgactactaccttgaaaatccaagcgaaaaagatctcaaagcagttatgactagcaagggaaacattcagattaaatctgccaaaaaagctgaagttaaaagttctgaaaaagaaaaataa

SEQ ID NO: 54 - DNA, 249 bp, Streptococcus pneumoniae
gaggtcaatggccttgtcaggcaagaagcgatcttggatgtagcgattggaaagagttgcagctgcttcaatcgcagcatcggtatattgaacgtggtggtaatcttcgtatttcttttgaatccctttgagaatagtgattgtttcatccaccgttggttcatcgactttaacaggctgcatacgacgctcgagggcagcatccttttcaatgatacggtattcattgagggtagtagcaccgactag

SEQ ID NO: 55 - DNA, 183 bp, Streptococcus pneumoniae
atgttattggccaagatgatgcagtcgataagattgccaaggctattcgccgtaatcgtgtcggacttggtacccctaaccgcccaatcggaagcttcctcttcgttgggccaactggtgtcggtaagacagaactttccaaacaactggctatcgaactttttggttctgctgatagtatga

SEQ ID NO: 56 - DNA, 210 bp, Streptococcus pneumoniae
atgtattcactcatatcaaagcgaatcatactatcagcagaaccaaaaagttcgatagccagttgtttggaaagttctgtcttaccgacaccagttggcccaacgaagaggaagcttccgattgggcggttaggggtaccaagtccgacacgattacggcgaatagccttggcaatcttatcgactgcatcatcttggccaataacatga

SEQ ID NO: 57 - DNA, 342 bp, Streptococcus pneumoniae
ttggttgcaggtctaacaaatggtgagttaatcgctccaataacttacgaagagatgatgacgagcgacttttttgaagcttggtttcagaagtttctcttaccaacattaaccacaccatcggttattattatggataatgcaagattccatagaatggggaagctagaacttttatgcgaagagtttgggcataaacttttacctcttcctccctactcacctgagtacaatcctattgagaaaacatgggcccatatcaaaaagcacctcaaaaaggtattaccaagttgttgcaataccttttacgaggctcttttgtcctgctcttgtttcaattga

SEQ ID NO: 58 - DNA, 348 bp, Streptococcus pneumoniae
atgtggtataatctttttatggcatattcaatagattttcgtaaaaaagttctctcttattgtgagcgaacaggtagtataacagaagcatcacacgttttccaaatctcacgtaataccatttatggctggttaaagctaaaagagaaaacaggagagctaaaccaccaagtaaaaggaacaaaaccaagaaaagttgatagagatagacttaaaaactatcttactgacaatccagacgcttatttgactgaaatagcttctgaatttggctgtcatccaactaccatccactatgcgctcaaagctatgggctacactcgaaaaaaagaaccacagctactatga

SEQ ID NO: 59 - DNA, 423 bp, Streptococcus pneumoniae
gtgaatacagactatattgctcgctatggcgtatatgcagttatccctaatcctgaacaaaaacaaattgttcttgttcaagaaccaaatggtgcttggttcctaccatgtggaaaaattgaagcaggtgaaaatcatcaggaagccctaaagcgtgagttgattgaagagcttggtttcacagcagaaattggtacctattacggacaagctgacgaatatttctattctcgtcatcgtgatgcctactactacaatcctgcctacctctatgaagcaactcctttcaaagaagtacaaaagccactagaaaactttaatcatattgcctggttccctattgacgaggctatcaaaaaccttaaacgtggtagccataaatgggccattgaatcttggaaaaaacagcataagattgactaa

SEQ ID NO: 60 - DNA, 300 bp, Streptococcus pneumoniae
atgaagcttatcaatacgacaaactcacactcgcaacttgtaaaaagtcaactagaaagtaccgatgcaacccttgttgaggtttattctgcagggaatacagatgttatttttacccaagctccgcttcactatgaaatcctcatctcaaacaaacaccgtgctattcgtgagcctgaaatcgaaaccattcaagaatttttcttgaaacgtaaaattgataaggcctctgttgatgaagccaatatcaagacactctactcagagaaattaattggaatttcaatcccaatcaagtaa

SEQ ID NO: 61 - DNA, 594 bp, Streptococcus pneumoniae
aagtactcaatttacaagctaaaatgcgacagaaacgaaaataaaggagacgttggtaagaaggcagagaatctcattcaaggccaatttgaaggctctaaaacaatggaacagtgctacatagatgtgactgaatttgccattccagcaagtactcaaaagctttacttatcaccagttttagatggctttaatagcgaaattatcgcctataatctttcaacttcacccaacttagaacaagtacaaacaatgttggaacaggcattcaaagagaagcactacgagaatacgattctccatagtgaccaaggctggcaataccgacacgattcttatcatcggttcctagagagtaagggaattcaagcatctatgtcacgtaagggtaacagcccagacaatggtatgatggagtccttctttgggattctgaaatcggaaatgttttacggttatgagaagtcgtttcagtcgcttaagcaattggaacaagccattgtagactatattgattactacaacaataagagaattaaggtaaaactaaaaggacttagccctgtgcaatacagaactaaatccttcggataa

SEQ ID NO: 62 - DNA, 264 bp, Streptococcus pneumoniae
ttttcgttagatcttcttctaaaagccattaaactagctcgttcgacctactactatcacttgaaacagctagataaaacagataaggaccaagagcttaaagctgaaattcaatccatttttatcgaacacaagggaaattatgcttatcgtcggatttatttagaactaagaaatcgtgcttatctggtaaattataaaagagttcaaggcttgatgaaagtactcaatttacaagctaaaatgcgacagaaacgaaaataa

SEQ ID NO: 63 - DNA, 102 bp, Streptococcus pneumoniae
atgattaaattgattgatcgttacggaatagagttcggcaaaaaaggaaaaaatcgttactattctcctgatttaaaacaagaaatgattcataaagtctga

SEQ ID NO: 64 - DNA, 351 bp, Streptococcus pneumoniae
atgataattcaactaagtgatttaggtcaagttcaccttgtttgtagcaagatagatatgaggcagggaatagactcattagcctatgtagttaaaacccactttgaattggatcctttctccggtcaagtctttctcttttgtggtggacgtaaagaccgctttaaagccctttactgggatggtcaaggattttggctactatataaacgctttgagaacggcagactgacttggcccagtacagaaaaggatgtcaaagctctcacacctgaacaagtagactggcttatgaagggcttttctatcactccaaaaataaatccatcagaaagtcgtgatttctattga

SEQ ID NO: 65 - DNA, 306 bp, Streptococcus pneumoniae
ttgttatggacccatacaggcgaatcatttttcttaatagctggtggatgtaatactgagtggatgaacgtctttttagaagagctttcacaagcttatccagatgattaccttttattcgttatggacaatgctatatggcataaatcaagtaccttaaagattccgactaatattggctttgcatttattcctccgtacacaccagagatgaaccccattgaacaagtgtggaaagagattcgtaaacgtggatttaaaaataaagcctttcaaactttggaagatgtcatgaatcaactttaa

SEQ ID NO: 66 - DNA, 267 bp, Streptococcus pneumoniae
atgacggttggggaagagaaagcctttcttgcccgccatttgaaggctacagaggcaggagaatttgttacaattgatgccttatttcaggcttataaaaaggagttaggtcgttcctacacacgtgatgccttctatcaactgttgaagcgccatggttggcgaaatattatgccacgtccagaacatcctaggaaaacagacgctcaaaccattgtcgcgtctaaaaataaaatctcaattcaagaagaaaagaaagcgctttaa

SEQ ID NO: 67 - DNA, 1728 bp, Streptococcus pneumoniae
atgtctaatggacaactaatttatttaatggttgcaattgcagtcattttagttctggcttatgtagtggcaatctttctacgtaagcgaaacgaggggagattagaggcgctagaagaaagaaaagaagaactatacaatcttccagtaaatgatgaagtagaagctgtaaaaaatatgcacttgattggacaaagtcaagtggctttccgtgaatggaatcaaaaatgggtcgatttatctctcaactcttttgccgatattgaaaataatctctttgaagcagaaggttataaccattcatttcgttttctcaaggccagtcatcaaattgaccaaattgagagtcaaattactttgattgaagaagatattgcggcaattcgcaatgctttggcagacttagagaagcaagaatctaaaaatagtggtcgtgttcttcatgctttggatttatttgaggaacttcagcatagagttgctgaaaattcagaacagtatggtcaagccttggatgaaattgaaaaacaattagaaaatatccaatctgaattttcacaatttgtaaccttgaattcatcgggtgaccctgtggaagccgcagtgattttggataatacagaaaatcacattttggccttaagtcatattgtggatcgtgttccagccttggttacgacgctttctacagaattgccagatcaattacaggatttggaagccggttatcgtaaactaattgatgctaattatcattttgttgaaacggatattgaagcgcgtttccacttgctttatgaagcattcaagaaaaaccaagagaatattcgtcagttggaattggataatgccgaatatgagaatggacaggcacaagaggaaatcaatgccttgtatgatatttttactcgagaaattgctgctcagaaagtagtggaaaatctacttgcaactcttccaacttaccttcaacatatgaaagagaataatactttattgggagaagatattgcacgtttgaacaagacctatttacttcctgagacagctgcaagccatgttcgtcgtattcagacagaattagagagttttgaggcagctattgttgaggtaacttcaaatcaagaagaaccaacccaagcttattcagttcttgaagaaaatcttgaggatttacaaactcaactaaaagatattgaagatgagcaaatttcagttagtgagcgcctgacacaaattgagaaagatgatattaatgcacgtcaaaaggccaatgtttatgtcaatcgtctccatactatcaagcgatacatggaaaaacgcaatctgccaggtattccacaaactttcttgaagttattctttacggcaagcaataataccgaggatttaatggttgagttagaacaaaaaatgattaacattgaatctgttacccgagttcttgaaattgcaacgaatgatatggaagctttagaaacggaaacttataatattgtacaatatgcaactttgacagagcaactcttgcaatattctaaccgctatcgctcatttgatgaacgcattcaagaagcatttaacgaagctttagatatttttgaaaaagaatttgattatcacgcttcatttgataagatttctcaagcattggaagtggcagagcctggtgtaaccaatcgctttgttacctcatatgagaaaacacgtgaaacgattcgtttttaa

SEQ ID NO: 68 - DNA, 1947 bp, Streptococcus pneumoniae
atgacagaagaaatcaaaaatctgcaggcacaggattatgatgccagtcaaattcaagttttagagggcttagaggctgttcgtatgcgtccagggatgtacattggatcaacctcaaaagaaggtcttcaccatctagtctgggaaattgttgataactcaattgacgaggccttggcaggatttgccagccatattcaagtttttattgagccagatgattcgattactgttgtggatgatgggcgtggtatcccagtcgatattcaggaaaaaacaggccgtcctgctgttgagaccgtctttacagtccttcacgctggaggaaagttcggcggtggtggatacaaggtttcaggtggtcttcacggggtggggtcgtcagtagttaatgccctttccactcaattagacgttcatgttcacaaaaatggtaagattcattaccaagaataccgtcgtggtcatgttgtcgcagatcttgaaatagttggagatacggataaaacaggaacaactgttcacttcacaccggacccaaaaatcttcactgaaacaacaatctttgattttgataaattaaataaacggattcaagagttggcctttctaaatcgcggtcttcaaatttcaattacagataagcgccaaggtttggaacaaaccaagcattatcattatgaaggtgggattgctagttacgttgaatatatcaacgagaacaaggatgtaatctttgatacaccaatctatacagacggtgagatggatgatatcacagttgaggtagccatgcagtacacaactggttaccatgaaaatgtcatgagtttcgccaataatattcatacacatgaaggtggaacgcatgaacaaggtttccgtacagccttgacacgtgttatcaatgattatgctcgtaaaaataagttactgaaagacaatgaagacaacctaacaggggaagatgttcgcgaaggcttaactgcagttatctcagttaaacacccaaatccacagtttgaaggacaaaccaagaccaaattgggaaatagcgaagtggtcaagattaccaatcgcctcttcagtgaagccttctccgatttcctcatggaaaatccacagattgccaaacgtatcgtggaaaaagggattttagctgccaaggctcgtgtggctgccaagcgtgcgcgtgaagtcacacgtaaaaaatctggtttggaaatttccaaccttccagggaaactagcagactgttcttctaataaccctgctgaaacagaactcttcatcgtcgaaggagactcagctggtggatcagccaaatctggtcgtaaccgtgagtttcaggctatccttccaattcgcggtaagattttgaacgttgaaaaagcaagtatggataagattctagctaacgaagaaattcgtagtcttttcacagccatgggaacaggatttggcgcagaatttgatgtttcgaaagcccgttaccaaaaactcgttttgatgaccgatgccgatgtcgatggagcccacattcgtacccttcttttaaccttgatttatcgttatatgaaaccaatcctagaagctggttatgtttatattgcccaaccaccaatctatggtgtcaaggttggaagcgagattaaagaatatatccagccgggtgcagatcaagaaatcaaactccaagaagctttagcccgttatagtgaaggtcgtaccaaaccgactattcagcgttataaggggctaggtgaaatggacgatcatcagctgtgggaaacaaccatggatcccgaacatcgcttgatggctagagtttctgtagatgatgctgcagaagcagataaaatctttgatatgttgatgggggatcgagtagagcctcgtcgtgagtttatcgaagaaaatgctgtctatagtacacttgatgtctaa

SEQ ID NO: 69 - DNA, 573 bp, Streptococcus pneumoniae
atgaagggtatgaaatatcacgattacatctgggatttaggtggaactttactggataattatgaaacttcaacagctgcatttgttgaaacattggcactgtatggtatcacacaagaccatgacagtgtctatcaagctttaaaggtttctactccttttgcgattgagacattcgctcccaatttagagaattttttagaaaagtacaaggaaaatgaagccagagagcttgaacacccgattttatttgaaggagtttctgacctattggaagtcatttcaaatcaaggtggccgtcattttttggtctctcatcgaaatgatcaggttttggaaattttagaaaaaacctctatagcagcttattttacagaagtggtgacttctagctcaggctttaagagaaagccaaatcccgaatccatgctttatttaagagaaaagtatcagattagctctggtcttgtcattggtgatcggccgattgatatcgaagcaggtcaagctgcaggacttgatacccacttgtttaccagtatcgtgaatttaagacaagtattagacatataa

SEQ ID NO: 70 - DNA, 555 bp, Streptococcus pneumoniae
atggtaaaagtagcagttatattagctcagggctttgaagaaattgaagccttgacagttgtagatgtcttgcgtcgagccaatatcacatgtgatatggttggttttgaagagcaagtaacgggttcgcatgcaatccaagtaagagcagatcatgtctttgatggagatttatcagactatgatatgattgttcttcctggaggtatgcctggttctgcacatttacgtgataatcagaccttgattcaagaattgcaaagcttcgagcaagaagggaagaaactagcagccatttgtgcggcaccaattgccctcaatcaagcagagatattgaaaaataagcgatacacttgttatgacggcgttcaagagcaaatccttgatggtcactatgtcaaggaaacagtagtggtagatggtcagttgacaaccagtcggggtccttcaacagcccttgcctttgcctacgagttggtggagcaactaggaggggacgcagagagtttacgaacaggaatgctctatcaagatgtctttggtaaaaatcagtaa

SEQ ID NO: 71 - DNA, 1251 bp, Streptococcus pneumoniae
ttgtatgaaagtataaggttagtatatatgaaacgttctctcgactcaagagtcgattacagtttgctcttgccagtattttttctactggtcatcggtgtggtggctatctatatagccgttagtcatgattaccccaataatattctgcccattttagggcagcaggtcgcctggattgccttggggcttgtgattggttttgtggtcatgctctttaatacagaatttctttggaaggtgaccccctttctatatattttaggcttgggacttatgatcttgccgattgtattttataatccaagcttagttgcatcaacgggtgccaaaaactgggtatcaataaatggaattaccctattccaaccgtcagaatttatgaagatatcctatatcctcatgttggctcgtgtcattgtccaatttacaaagaaacataaggaatggagacgcacggttccgctggactttttgttaattttctggatgattctctttaccattccagtcctagttcttttagcacttcaaagtgacttggggacggctttggtttttgtagccattttctcaggaatcgttttattatcaggggtttcttggaaaattattatcccagtatttgtgactgctgtaacaggagttgctggtttcttagctatctttattagcaaggacggacgagcttttcttcaccagattggaatgccgacctaccaaatcaatcggattttggcttggctcaatccctttgagtttgcccaaacaacgacttaccagcaggctcaagggcagattgccattgggagtggtggcttatttggtcagggatttaatgcttcgaatctgcttatcccagttcgagagtcagatatgatttttacggttattgcagaagattttggctttattggctctgtcctggttattgccctctatctcatgttgatttaccgtatgttgaagattactcttaaatcaaataaccagttctacacttatatttccacaggtttgattatgatgttgctcttccacatctttgagaatatcggtgctgtgactggactacttcctttgacggggattcccttgcctttcatttcgcaagggggatcagctattatcagtaatctgattggtgttggtttgcttttatcgatgagttaccagactaatctagctgaagaaaagagcggaaaagttccattcaaacggaaaaaggttgtattaaaacaaattaaataa

SEQ ID NO: 72 - DNA, 2451 bp, Streptococcus pneumoniae
atgaaaacgattggtaatcgctatgttgtggtggatttagaggcaactagcacaggtagtaaggctaaaattatccaagtgggaattgtcgtgattgaggacggagaaatcgtcgatcactatacgacggatgtcaatccacatgaacccttggatgctcatatcaaagaactgacaggattgacagaccaacgtctggcgcaagcacctgatttttcgcaagttgccagaaaaatatttgacttggtggaggatgggatttttgtagcccataatgttcagtttgatgctaatctcttggcggaaaatttattttttgaaggctatgagctaagaaaccctcgtgttgatacggtcgaattggcccaggtctttttccctgaactggaaaaatatagcttgccgattttgtgtcgagaattaggaattcctcttaaacacgcacacacagccctttcagatgcccaagctacagcagaattacttctttttttacgggaaaagatgacccagcttcctaaaggtctcttggaacgcttgctggaaatggctgacgctctcctatatgagtcctacctggttattgaggaaacttatcgcaaccaatctatcctgagttctccagacttggtccaagttcaaggtctgtattttaagaaaacggcagcttctctggagctacgaaaactatctcaagacttttctaaaaatatttctctgttgaaccttgaagtgagggaggaacaagaaagttttgctaaagaggttggcttgctattgaaagatgaacctgtctttctgattcaagcgccgacagggattgggaaaacctatggctatctcttacccgctttatctcaatccaaagagcgacaaattgttcttagtgttccgacaaagattcttcaaaatcaaatcatggaagaagaaggtaaacgtctcaaggaagtgttccatacagatattcatagcttaaagggaccacaaaattatctgaagttggatgccttttatcattccttgcaggaaaatgatgaaaatcgcttatttagacgctttaaaatgcaagtcttggtctggcttactgagacagagacaggagatttggatgaaatcgggcaactctaccgttaccaacattttctagcagaccttcgtcatgatgggaatttatcatcccagagcttatttgtgacggaagatttttggaaacgtagtcaagaaagggcagagacttgcaagcttttagtgactaatcatgcctatctcgtgaccagacttgaagataatcctgaatttgtcagtgaccgtttactgattattgatgaagtccaaaagattttgttagctctagaaaatctgcttcaagagacctacgatatacaatctattatcgatttaattgataaggctttagtaggagaagaaaacagggttcaacaacggatactagaaagtattcgctttgagtgtctctacttgatagaacaatttcagtctggtaaatctaggaaaaatatcttagattctctggacaatctccatcagtatttttcagaattagaagtagaaggctttgatgagctggttcgctattttacagctgaaggtgattactggcttgaagtaactgaaacgagtcaaaagaaaattcagatttcttctacaaaatcaggccgtactcttctgtcctctttacttcctgagagttgccaagtcctgggagtatcggctactcttgagattagtcagagggtttctttggcagaccttttaggctatcctgaagctaaatttgtcaagattgaatctcggggaaaacaggaacaagaagtggtcatggtcaaagatttccctctggtaacagaaacctccttagaagtctatgccagagaggtagctgctttactagtggaaattcaagctttccagcaaccgattttggttctctttaccgctaaagacatgcttctagcagtatcggatttacttacagttagccacttggcccagtataaaaatggggatgttcatcagctaaagaaacgctttgaaaaaggtgaacaacaaatcttgcttggtgcagcaagtttctgggagggagttgatttttcaagccatccttttgtgattcaagttgtaccgaggcttcctttccaaaatcctcaagaacccttgacgaaaaagattaatcaagaactgaatcaagaagggaaaaatgccttttatgattatcaattgccaatggccattattcgtttaaaacaggctttgggaagaagtatgagacgtgaataccaacgttccttaactcttattttggataggagaatcgtcggaaaacgatacggcaaacaaatagtagcatctctagcagaagaagcgactgttaaaaccatctctcgatccgaagttgacgaggctattgatagattttttaatgaactttga

SEQ ID NO: 73 - DNA, 930 bp, Streptococcus pneumoniae
atggaaaagattgtcattacagcaactgctgaaagtattgaacaagttgaacaactactcgaagctggcgtagaccgtatctatgtcggtgagaaagattttggccttcgtctgccaacgacctttagttatgaccaattacgtgaaatcgctaagttggttcatgatgctggtaaggaattgatcgttgcggtcaatgctctcatgcaccaagatatgatggaccgtatcaagcctttcttagacttcttggaagaaatcaagacagactatattacgattggggatgcaggcgtcttttacgtagttaaccgcgatggttattcatttaagaccatctacgatgcttcaaccatggtaactagcagtcgtcagattaacttctggggacaaaaggctggcgcatctgaggctgttttggcgcgtgaaattccatcagctgaacttttcaaaatgccagaaattttggaaattcctgctgaagttttggtttacggtgctagtgtcatccatcattctaaacgtccgctcttgcaaaactactataactttacacatatcgatgatgaaaagacgcataaacgtgacctcttcttggctgagccaagtgatccagagagccactattccatttttgaagataatcatgggacccatatctttgccaacaatgaccttgatttgatgatcaaattaacagaattggtggagcatggctttactcgctggaaactagaagggctctacactcctggtcagaactttgttgagattgcaaaactctttatccaagcgcgtaacttgattcaagagggcaactttagccatgatcaagtcttcttgctggatgaagaagttcgtaaacttcaccctaaaaaccgtttccttgatacaggattttatgactacgatcctgacatggttagataa

SEQ ID NO: 74 - DNA, 288 bp, Streptococcus pneumoniae
atgcccgtaagaaaattacaatcctatgaggtagactatcaagaagaattaaaccagcagcttcctcattaccaagcttatacacctgaagcgcaatctgatgccaatctcaaggaaatcctattttttattaatatcgctgttttttgtatctgtattgctatctttagttttatctttttagcattaaaattatcaactgctcttgcctttgccgcagcaatcggattcagcttacttgttttaaaagttcaacggtctattatcaaacgaaaacgtagaagataa

SEQ ID NO: 75 - DNA, 1335 bp, Streptococcus pneumoniae
atgttcagtaaacttaaaaaaacatggtatgcggatgactttagttattttatccgcaacttcggtgtcttcaccctgattttttctacaatgactctgattattttacaagtcatgcattcgagtctttatacttcggtggacgataagcttcatggactgagtgaaaatcctcaagcagttattcagctggctataaatagggcaacagaagagattaaagatttagaaaatgctagggcggacgctagtaaagtagaaataaaacctaatgtcagttccaatacggaagtcattctctttgataaagactttactcaacttctttctggaaatcgatttttgggcttggataagattaagttagaaaagaaagaactaggacatatctaccagattcaggtttttaatagctatgggcaggaagaaatctatcgtgtgattttgatggagaccaatattagttcggtttcaaccaatatcaagtatgctgctgtcttgattaataccagtcagttggagcaggctagtcaaaagcatgagcaattgattgtggtcgtgatggctagtttctggattttgtctttacttgccagtctctatctagctagggtcagtgttaggcccctgcttgagagtatgcagaagcaacagtcttttgtggaaaatgccagtcatgagttacgaactccactcgcagttttgcaaaatcgcttagagaccctttttcgtaagccagaagctaccattatggatgtgagcgaaagcattgcatcgagtttggaagaagtccgaaatatgcgttttttaacgacaagcttgctgaacttagctcggagagatgatgggattaagccggagcttgcagaagttccaactagcttttttaatacaactttcacaaactacgagatgattgcttcggaaaataatcgtgtcttccgttttgaaaatcgtatccatcgaacaattgtcacagatcagcttcttctgaaacaactgatgaccattcttttcgataatgccgtcaagtatactgaggaggatggtgaaattgattttcttatctcggcgaccgatcgcaatctttatttacttgtttctgataatggaatcggtatttcgacagaagataaaaagaaaatttttgaccgtttttatcgagtagacaaagctagaacccggcaaaaaggtggttttggtttaggattatccctagccaagcaaattgtagatgctctaaaaggaactgttactgtcaaagataataaacccaagggaacaatctttgaagtgaagattgccattcagacaccatctaaaaagaaaaaataa

SEQ ID NO: 76 - DNA, 675 bp, Streptococcus pneumoniae
atgataaaaatcttattggttgaggatgacctaggtctgtcaaattcagtatttgactttttagacgattttgcggatgttatgcaggtatttgatggagaagaaggtctctacgaagctgagagtggtgtctatgacttgattttgctggatttgatgttgccagaaaaaaatggtttccaagtcttaaaagaattgcgtgaaaagggaattacgacaccagttctgattatgactgccaaggaaagtttggatgacaagggacatggatttgaactgggagcggatgattatctgaccaaacctttctacctagaagaacttaaaatgcggattcaggcccttctcaaacgttcagggaagtttaatgaaaacaccttgacttatgggaatatcgtggttaatttatcaaccaataccgttaaagttgaagatactcctgtcgaattgctggggaaagagttcgatttactagtttatttccttcaaaatcaaaatgtgattttgcctaagacgcagatttttgaccgtctatggggatttgatagtgatacaacgatttcggttgtcgaagtctatgtttcaaaagtccgtaagaaattaaagggaaccacttttgcagagaatttgcaaaccttgcgtagtgttgggtatcttttaaaagatgttcagtaa

SEQ ID NO: 77 - DNA, 2547 bp, Streptococcus pneumoniae
atgcaagcagttgaacattttattaagcaatttgttcctgaacattatgatttatttttagatttgagtcgtgagaccaagactttttctgggaaagtgaccatcactggtcaagcacagagtgaccgcatctccctccaccaaaaagacttggaaatcacctctgtagaagttgcaggtcaagctcgtccatttacagttgaccatgacaatgaagcccttcatatcgaattggctgaggctggtcaagttgaattggttcttgccttttctggtaaaattacagacaacatgacagggatttacccttcttattatacagttgatggagtcaagaaggaggtcttgtctactcagttcgagagccattttgcgcgcgaagctttcccatgtgtggatgagcctgaagccaaagcaacttttgacctctctcttcgctttgaccaagcagaaggtgaattggccttgtcaaacatgccagaaatcgatgttgaaaaccgtaaggaaacaggtatctggaagtttgagacaacacctcgcatgtcttcttacttgttggcctttgttgctggtgatttgcaaggggtgaccgctaaaactaaaaatggtaccctggtaggtgtctactcaaccaaagcacatccactttcaaatcttgatttctcactggatatcgctgttcgctctatcgagttttacgaagattactatggagttaagtatccaattcctcaatctctccacatcgcccttcctgacttctcagctggtgctatggaaaactggggtcttgtgacctaccgtgaagtttacttggttgtcgatgagaactctacatttgctagccgtcaacaagttgcccttgttgtggcccatgaattggctcaccaatggtttgggaacctcgtgactatgaaatggtgggatgacctttggctcaatgaaagtttcgctaatatgatggaatacgtctgtgtggataccatcgaaccaagctggaatatctttgaagatttccaaacaggtggagtacctcttgctcttgaacgtgacgctactgatggcgttcagtctgtccacgtcgaagttaaacatccagatgaaatcaatacactctttgacggcgctatcgtctatgccaaaggaagccgtctcatgcacatgcttcgccgttggctaggagatgctgattttgctaaaggtttgcatgcctactttgaaaaacaccaatacagcaacaccattggtagtgacctttgggatgcccttggtcaagcgtcaggacgtgatgtcgcagccttcatggattcttggttggaacagcctggttacccagttcttactgtcaaagttgaaaatgatgtcttgaagatttcacaaaaacaattcttcatcggtgagaacgaagacaagaaccgtctctgggtggtgcccctcaatagcaactggaaaggcttgcctgatacactcgaaactgaaagtatcgaaatccctggctacgcagctcttcttgctgaaaatgaaggagctcttcgtctcaacactgaaaatactgcccactatattaccgactatcaaggagacttgttagaagctgttcttgctgagctagagacacttgataacacaagcaaactgcaaattgttcaagaacgtcgtttgttggctgaggcagggcacatttcttatgcagacttgcttccagttcttgataaacttgctaaggaagagtcttatctggtggtttcagctgtttctcaagtgatttcagcccttgagcgctttattgatgaaggaacggatgctgaaacagccttcaaaggactggttgctaaattggctcgtcataactatgaccgtcttggttttgaagctaaagacggagaatcagatgaggatgaattggttcgtcagctggctgtttcgatgatgattcgctcaaatgatgcagaagctcgtcaagtcgctagccaaatcttcgcaacacacaaggagaatcttgcagaactcccagcagctattcgttcacaagttctgattaatgagatgaaacatcatgagactaaagacttgttagcactttatcttgatacttatactcacgcaacagatgctgtctttaaacgccagttgacagcagctcttgcatacagtacagatgcggataatatccaaaacttgattacttcttggaaggacaaatttgtggtcaaaccacaggacttgtctgcttggtattaccaattcctagctcatcaagcaactcagaaaacagcttggtcttgggcgcgtgaaaactgggcttggattaaggcagcccttggaggagatatgagctttgatagctttgttatccttcctgctcatgtatttaagactcagcaacgcttggcggaatacaaggagttctttgaaccgcaactttctgaccttgctcttagccgtaacatcggtatgggaatcaaggaaattgcagcgcgtgttgacttgattagccgtgaaaaagctgcagtcgaagcagttgttcttcaatacggaaatgcataa

SEQ ID NO: 78 - DNA, 441 bp, Streptococcus pneumoniae
atgataccgcaagaaatgtggaataaatacaagcaaatcaatcctttgatcggagatgaaatcgatgcttgggcttttggagttgaaccagaccttttagcggatttggtgtttaaaggagaaaagacagcaacagcatcagcctatgacctctatgtactagaagacgaaccacttccccaagtagggaccttcgatatcattttagatagtcaaaatcagtctgtctgcattgtcgaaattacaaaggtttctgttgaactcttcaatcaagtttctgcgcaacatgcctttaaggaaggtgagggagacaaatcacttgcctattggcgccaggttcatgaggactttttcacagactgtttgggtgaagtagggctgacttttacatctgaaagcaaggttgttttagaagaatttcgcaaggtctacccactgtag

SEQ ID NO: 79 - DNA, 876 bp, Streptococcus pneumoniae
atggctatgagaaatcaacttgcccttagtggcgaaaaaattcttgaaaaaatttatcctcaactatttcaccacgtcggcatgattcgtggggaatatttgttgagagagcttaatcaaaacatcatattagcaagttgtcagcaatttgtaaaagattatctagagactatctgctccctgtactcagatgaagaagtttggtatcgtttttctgaattaacgaatacagaagccaattgtttagtggggactagagagttttttgacgaagggcatcccttgtttggctatagaggaaccaggcgtttactggcgtgtttggatgaatttcaggctgaagcacatgtcgttacagaagtttatcaaaccaaccccaatctatctgttatctttccttttgtcaatgatgacgaccaattaaaacaagctattacagtattgcgtcagcagggttttactgggaaagtcggaacgatgattgaattaccgtcagcgtattttgacttatctagtatactggaaacgggcatttcaaagattgtagttggaatgaatgatttgacttcctttgtttttgcgactatgagaaacagtcaatggcatgatatggaaagtccaataatgttagatatgctaagagatatgcaggataaagcaagaaagaacaagattgattttgctgtagcaggctatctgaatacttctttcatacaaaaaatgaatcagttgggtatcaagtgcattatccactacagttctattccagagatttttgatttagagattgaccatccagatcatcttaaacacataaaagaagaaagtaaaaaattacaaaggagtacccatgataccgcaagaaatgtggaataa

SEQ ID NO: 80 - DNA, 729 bp, Streptococcus pneumoniae
atggaactatttaaaacatggaagaaaaatatggttctctatggtcttaaatctcaaattggaactgtctaccgaaacaatgataggacaacaagcttttatgatgttgggaattttctatacctagcaggggagttggattccagattttgggaagattttgttagaaaatatggtttagattataagattattatttcagaaaatactaattggcaagattttctgcatcgaaaagtggggctaaattcttttactcgctattcttttaaagataaggcaaattttcaagttgaatttttaaataatctagttactcatttagaggaaggttacaatattgtgcctattgataatcatatttataactgcttttctacggaagaatggtcacaggatttacagggggattttgagtcctatcaggattttgttttaaaaggtggatttggctttgtgattcttaaaaataatgaactgattgctgggatttcctcagggttagtttaccgtaaagcagttgaagtggaagttgcaactagaccaaacgaacaaggaaatggatttgctaaaaagcttggtgctgcaatgattctagagagtttaaatagagatatgtttccactttgggatgctcataatgaggcttccaaaaaagtagcagaatttttaggatatgagttatctgaaccttatgaagcttttgaactagaggaaattttgatataa

SEQ ID NO: 81 - DNA, 480 bp, Streptococcus pneumoniae
atggaaatcaaaaatcactttggggtctactgtgtttgctttgaaaatggaaagttactttgtattgaaaaaacgagaggcccttatcaacatcggtatgatctacctggaggcagtcagcaacttggtgaaggactgacggaaacgctgactagagaagttatggaagagacgggatttactgttagaagctactctaatcctcgaatctacgatgttttcgtcagagaagagttaaaaaattttatggttcaccatgtcatggccttgtatgatgttgaaatgaatgagagtgcacctcaagttacgatttcggaagctgtgtctgatggtgcgaatgattcacttggatatatttggatggatattcaagagattacagaagaaaatgcatcgccattagtcttgaaggttaagtctgaattattaggatttccagaactggacaagacttcttacatgaattggaaggtgaagtag

SEQ ID NO: 82 - DNA, 228 bp, Streptococcus pneumoniae
tctttttttagcaagtggaaaagcgagcgccatgcaaggacaaatcttgacaatagatggtggctggtctttgaagtaggaggagttggatggaaatcaaaaatcactttggggtctactgtgtttgctttgaaaatggaaagttactttgtattgaaaaaacgagaggcccttatcaacatcggtatgatctacctggaggcagtcagcaacttggtgaaggactga

SEQ ID NO: 83 - DNA, 699 bp, Streptococcus pneumoniae
atgactaaacgtgtactcattacaggagtgagttcaggtattggattggctcaggctcgcctctttttagagaagggctatcaagtttatggagttgaccaaggtgaaaagccactcttagagggtgattttcactttttacagagagatttgaccttggacttggaacctatttttgactggtgccctcaggtggatgttttgtgtaatactgccggagttttggatgattacaaaccactgttggaacaaacggcgcaggacattcaagagatttttgaaatcaactacattattccagtagagttgactcggtattatttgacacaaatgctggaaaataaaaagggaatcatcatcaatatgtgttccattgcttctagcctagcaggtggaggtggtcacgcctatacttcatccaagcatgccttggctggcttcaccaagcagttggctctagactatgctgaagctgggattcaggtctttggtatcgctccaggagcagtcaagacagctatgaccgctgcggattttgaaccaggtggtttagctgactgggtggctagtgaaacaccaatcaagcgctggattgaaccagaggaaatagcagagcttagtctttttttagcaagtggaaaagcgagcgccatgcaaggacaaatcttgacaatagatggtggctggtctttgaagtag

SEQ ID NO: 84 - DNA, 267 bp, Streptococcus pneumoniae
atgaagaatgtagaattaaaggagaaaaacatgacatttgaagagatcctgcctgggttaaaggctaagagaaaatatgtacgaactggttggggaggtgcggaaaactatgtccaactctttgataccatcgagcaaaatgggcttgcacttgaaatgacaccttatttcctaatcaacgtttctggcgaaggagaaggtttttccatgtggagcccgacagtttgtgatgttttggcaacggattgggtagaagtgcatgactaa

SEQ ID NO: 85 - DNA, 927 bp, Streptococcus pneumoniae
atgagatacataactcttggtcaagatgacaaagaattatcagaaattgttctcggaatgatgagaataaaagataagtctgtaaaagaagttgaagagcttgtagaaacagcactttctgttggaatcaatgccttcgacttggctgatatttatggtcgtggtcgttgtgaagaactgttaggtcttgtcctaaaaaatcgtccagatttaagagaaaagatgtggattcagtccaaatgtggcattcgtattgaagaatttacctattttgatttttctaaggactatattataaaatcagtagacggtattttgcaaagattgaagattgatcatctagatagcttgctccttcatcgaccagatgctttgatggaatctgaccaagtagcagaagcctttgatctcctttataaacaaggtaaagttcgagattttggagtttctaatcaaaatcctatgatgatggagttacttaaaaaagatgtcaagcagccgttagctgttaatcagctacaattgagtgcggcttttactccaggatttgaatcagcttttcatgttaatatggaagatagtcaagcagctatgcgagatggcagcatttttgaatattgcaaattacacgatgtggtcattcaagcatggtctgtcttacaattcgggtattttaaagggaattttgttggaaatgagaaatttcaagctttaaatcaagtacttgatcgtttagctattaaatatggagtaacctcttcaactattgccatttcttggatattgcgttatccagcaaaaatgcaggcagttgtaggtaccacaaatcctaagcacttgagagaagttagccaagcggcaaactttagcttaacaagaaaagaatggtatgaaatttatcttgctgcagggaataatttgccgtaa

SEQ ID NO: 86 - DNA, 816 bp, Streptococcus pneumoniae
atgaagaaaatgaagtattacgaagaaacaagcgctttgctacatgagttttctgaggagaatcaaaagtattttgaggagttgtgggaaagttttaatcttgctggatttctctatgatgaagactatctcagagagcagatctatttgatgatgctagatttctcagaagcagaacgagatggcatgagtgcagaggattatctaggtaagaatcctaaaaaaataatgaaagagattctcaagggagcacctcgcagttctatcaaagagtcccttttgacgccaattcttgtcctggtggtattacgttattatcaactactaagtgatttttctaaaggtcctctcttaacagtcaatttgctcacatttttagggcaacttcttatttttctgattggatttggacttgtggccacaattttacgaagaagtttagtccaagattctcctaaaatgaaaattggcacttacattgttgttgggactatagttcttctagttgttttaggatatgtaggaatggcaagcttcatacaagaaggagccttttatattccggctccctgggatagtttgtctgtctttacgatttcgctagttatcggtatttggaattggaaagaagcggtctttcgtccatttgtcagtatgattattgcccatcttgtggtgggttctctgctccgttattatgagtggatgggaatttcaaatgttttccttacaaaagttattcctttagctgtcctctttattggaatctttgtcttgttccgtgggtttaagaagataaaatggagtgaagtatag

SEQ ID NO: 87 - DNA, 216 bp, Streptococcus pneumoniae
gtgatgaaagaaactcagctattaaaaggtgttcttgaaggttgtgtcttggatatgattggtcaaaaagagcggtatggttatgagttggttcagactttgcgagaggctggatttgatactatcgttccaggaactatttatcctttgttgcaaaagttagaaaaaaatcaatggataagaggcgacatgcgccgtcgcagatggtccagatag

SEQ ID NO: 88 - DNA, 237 bp, Streptococcus pneumoniae
atgaaaatcaaagagcaaactaggaagctagccgcgggttgctcaaagcactgctttgaggttgtagatagaactgacgaagtcagctcaaaacatgtttttgaggttgtagatgaaactgacgaagtcagctcaaagcactgctttgaggttgtagatgaaactgacgaagtcagtaaccatacatacggtagggcgacgctgacgtggtttgaagagattttcgaagagtattaa

SEQ ID NO: 89 - DNA, 246 bp, Streptococcus pneumoniae
tactcttcgaaaatctcttcaaaccacgtcagcgtcgccctaccgtatgtatggttactgacttcgtcagtttcatctacaacctcaaagcagtgctttgagctgacttcgtcagtttcatctacaacctcaaaaacatgttttgagctgacttcgtcagttctatctacaacctcaaagcagtgctttgagcaacccgcggctagcttcctagtttgctctttgattttcattgagtataaataa

SEQ ID NO: 90 - DNA, 2040 bp, Streptococcus pneumoniae
gtgttagaaaaacaggtttcatttgcctggaaaggaaaaattatgtctgaaaaaaatttttatattacaacgccgatttactatccatctgggaaacttcatatcggttctgcctacacaactatcgcatgtgatgtcctagcacgttacaaacgcctgatgggctacgatgtattttatctgacaggtcttgatgaacatggtcagaaaatccagcagaaagcggaagaagctggtattacacctcaagcctatgttgatggaatggcggttggagttaaagaactctggcaattactagatatctcatacgataaatttatccgtacaactgatgactaccatgaaaaagttgtcgcacaggtctttgaacgcttacttgctcaagatgatatttacttgggtgaatactctggttggtattcagtatcagacgaagaattctttacagaaagccagctggcagaagttttccgtgatgaagctggaaatgtgactggtggtattgctccatcaggtcatgaggttgaatgggtttctgaagaatcatactttcttcgccttagcaaataccaagaccgtttggtcgaatttttcaaagctcatcctgaatttatcacgccagatggtcgccttaatgaaatgctacgcaacttcatcgagccaggtttggaagatttggcggtatctcgtacaacctttacatggggagtgcctgtcccatcaaatccaaaacacgttgtctacgtttggattgatgcccttcttaactatgcgacagctcttggctacgctcaagacgaacatggtaactttgacaagttctggaatggaacagtcttccatatggtaggaaaagatatccttcgcttccactctatctactggccaatccttcttatgatgttggatgttaaattacctgatcgtttgattgcccatggttggtttgtcatgaaagacggaaaaatgtctaagtcaaaagggaatgtcgtttaccctgaaatgttggtagagcgttatggactagatccacttcgttactacctcatgcgtaaccttccagttggttcagacggaacctttactcctgaagactatgttggccgtatcaactatgaattggctaatgactttgggaacctccttaaccgtacgttttccatgattaataagtactttgatggacaaatccctgcctatgtagaaggtgtgactgaatttgatcatgttcttgctgaggttgcagaacaatcaatcgcagacttccatacacacatggaagcagttgactatccacgtgcgcttgaagcagtctggactctgatctctcgtaccaataaatacatcgatgagaccgcaccatgggtcttggccaaggatgaagctcttcgtgaccaattggcaagtgtcatgagccacttggcagccagcattcgtgtagttgctcacttgattgaaccatttatgatggaaactagtcgtgcagttttgactcaacttggtttggaagaagtttctagtcttgaaaacttgagtttggctgacttcccagcagatgtgactgtagttgccaaaggaacacctatctttccacgtctaaatatggaagaagaaatcgcctatatcaaggaacaaatggaaggcaataaaccagcagtcgaaaaagaatggaatccggacgaagttgagctcaaactaaacaaggatgaaatcaagtttgaagactttgacaaggttgaaatccgtgtggcagaagtcaaagaagtgtctaaagtagaaggttcagataagttgcttcaattctgcttggatgctggtgatggagaagatcgtcagattctttcaggaattgccaaatactatccaaatgaacaagaattggtcggcaagaaagttcaaatcgttgctaacctcaaaccacgtaaaatgatgaaaaaatatgtcagccagggtatgattctctcagctgaacatgatggcaaattaacccttctcacagttgatccagctgtaccaaatggaagtgtgattgggtaa

SEQ ID NO: 91 - DNA, 1260 bp, Streptococcus pneumoniae
atgcagaatctgaaatttgccttttcatctatcatggctcacaagatgcgttctttgcttactatgattgggattattatcggtgtttcatcagttgttgtgattatggctttgggtgattccctatctcgtcaagtcaataaagatatgactaaatctcagaaaaatattagcgtctttttctctcctaaaaaaagtaaagatgggtcttttactcagaaacaatcagcttttacggtttctggaaaggaagaggaagttcctgttgaaccgccaaaaccgcaagaatcctgggtccaagaggcagctaaactgaagggagtggatagttactatgtaaccaattcaacgaatgccatcttgacctatcaagataaaaaggttgagaatgctaatttgacaggtggaaacagaacttacatggacgctgttaagaatgaaattattgcaggtcgtagtctgagagagcaagatttcaaagagtttgcaagtgtcattttgctagatgaggaattgtccattagtttatttgaatctcctcaagaggctattaacaaggttgtagaagtcaatggatttagttaccgggtcattggggtttatactagtccggaggctaaaaggtcaaaaatatatgggtttggtggcttgcctattactaccaatatctcccttgctgcgaattttaatgtagatgaaatagctaatattgtctttcgagtgaatgataccagtttaaccccaactctgggtccagaactggcacgaaaaatgacagagcttgcaggcttacaacagggagaataccaggtggcagatgagtccgttgtatttgcagaaattcaacaatcgtttagttttatgacgacgattattagttccatcgcagggatttctctctttgttggaggaactggtgtcatgaacatcatgctggtttcggtgacagagcgcactcgtgagattggtcttcgtaaggctttgggtgcacaacgtgccaatattttaattcagtttttgattgaatccatgattttgaccttgttaggtggcttaattggcttgacaattgcaagtggtttaactgccttagcaggtttgttactgcaaggtttaatagaaggtatagaagttggagtatcaatcccagttgccctatttagtcttgcagtttcggctagtgttggtatgatttttggagtcttgccagccaacaaggcatcgaaacttgatccaattgaagcccttcgttatgaatga

SEQ ID NO: 92 - DNA, 702 bp, Streptococcus pneumoniae
atgaagcaactaattagtctaaaaaatatcttcagaagttaccgtaatggtgaccaagaactgcaggttctcaaaaatatcaatctagaagtgaatgagggtgaatttgtagccatcatgggaccatctgggtctggtaagtccactctgatgaatacgattggcatgttggatacaccaaccagtggagaatattatcttgaaggtcaagaagtggctgggcttggtgaaaaacaactagctaaggtccgtaaccaacaaatcggttttgtctttcagcagttctttcttctatcgaagctcaatgctctgcaaaatgtagaattgcccttgatttacgcaggagtttcgtcttcaaaacgtcgcaagttggctgaggaatatttagacaaggttgaattgacagaacgtagtcaccatttaccttcagaattatctggtggtcaaaagcaacgtgtagccattgcgcgtgccttggtaaacaatccttctattatcctagcggatgaaccgacaggagccttggataccaaaacaggtaaccaaattatgcaattattggttgatttgaataaagaaggaaaaaccattatcatggtaacgcatgagcctgagattgctgcctatgccaaacgtcagattgtcattcgggatggggtcatttcgtctgacagtgctcagttaggaaaggaggaaaactaa

SEQ ID NO: 93 - DNA, 1200 bp, Streptococcus pneumoniae
atgaagaaaaagaatggtaaagctaaaaagtggcaactgtatgcagcaatcggtgctgcgagtgtagttgtattgggtgccggggggattttactctttagacaaccttctcagactgctctaaaagatgagcctactcatcttgttgttgccaatgaaggaagcgtggcatcctctgttttattgtcagggacagtaacagcaaaaaatgaacaatatgtttattttgatgctagtaagggtgatttagatgaaatccttgtttctgtgggcgataaggtcagcgaagggcaggctttagtcaagtacagtagttcagaagcgcaggcggcctatgattcagctagtcgagcagtagctaaggcagatcgtcatatcaatgaactcaatcaagcacgaaatgaagccgcttcagctcaggctccacagttaccagcgccagtaggaggagaagatgcaacggtgcaaagcccaactccagtggctggaaattctgttgcttctattgatgctcaattgggtgatgcccgtgatgcgcgtgcagatgctgcagcgcaattaagcaaggctcaaagtcaattggatgcaacaactgttctcagtaccctagagggaactgtagtcgaagtcaatagcaatgtttctaaatctccaacaggggcgagtcaagttatggttcatattgtcagcaatgaaaatttacaagtcaagggagaattgtctgagtacaatctagccaacctttctgtaggtcaagaagtaagctttacttctaaagtgtatcctgataaaaaatggactgggaaattaagctatatttctgactatcctaaaaacaatggtgaagcagctagtccagcagccgggaataatacaggttctaaatacccttatactattgatgtgacaggcgaggttggtgatttgaaacaaggtttttctgtcaacattgaggttaaaagcaaaactaaggctattcttgttcctgttagcagtctagtaatggatgatagtaaaaattatgtctggattgtggatgaacaacaaaaggctaaaaaagttgaggtttcattgggaaatgctgacgcagaaaatcaagaaatcacttctggtttaacgaacggtgctaaggtcatcagtaatccaacatcttccttggaagaaggaaaagaggtgaaggctgatgaagcaactaattag

SEQ ID NO: 94 - DNA, 1347 bp, Streptococcus pneumoniae
atgagagaatatgatatcattgctatcggtggaggtagcggaggaatcgctaccatgaaccgtgctggtgaacatggagccaaagcagccgttattgaggaaaagaaattaggtggaacctgtgtcaacgtcggttgtgttcctaaaaaaatcatgtggtacggggcgcaaatcgctgagactttccatcaatttggagaagactacggctttaagactactgatcttaactttaactttgcaaccctacgtcgcaatcgtgaagcctacattgatcgcgctcgttcttcttatgatggtagttttaaacgcaacggtgtagacttgattgaaggtcatgctgaatttgtagattctcatactgtaagcgtaaatggtgaactgattcgtgctaaacatatcgtgattgctacaggtgcccatccaagtattcctaatattcctggtgctgagctaggtggctcttctgatgatgtatttgcctgggaagaacttccagagtcagttgccattctaggcgctggttatatcgccgttgaattagctggcgtactccacacttttggtgtcaagacagatctctttgttcgccgcgatcgtcctttacgtggttttgattcctacatcgttgaaggtttggtcaaggaaatggaaagaacaaacttaccacttcacactcacaaagtccctgccaagttagaaaaaactactgacggcattaccattcatttcgaagatggtactagtcacacagctagccaagttatctgggctacaggccgccgtccaaacgttaagggcttgcaacttgaaaaagctggagtgactctgaacgaacgtggctttatccaagtggatgaataccaaaatactgttgttgagggaatctatgctctaggtgatgtaacgggcgagaaagaactgactccagttgcaatcaaggccggacgtaccctatctgaacgtctctttaacggaaaaactactgcaaaaatggattactcaactattccaactgttgtcttttcacaccctgctatcggaactgttggtttgacagaagagcaagctattaaagaatacggtcaagaccaaatcaaggtttacaaatcaagctttgcatctatgtactctgcttgcactcgcaaccgtcaagaatcccgtttcaaactcataacagctggttcagaagaaaaagttgtcggacttcatggaattggctacggcgttgatgaaatgattcagggatttgccgttgctatcaaaatgggagcaaccaaggctgactttgacgcaactgtagcgattcacccaacttcatctgaagaatttgtaaccatgcgttaa

SEQ ID NO: 95 - DNA, 537 bp, Streptococcus pneumoniae
ttgaaaaaagctcacgtttatgctatccctgctattggggctgctctcattgctgttttggcacaaatcagtcttccaattggacctgttcccttcactctgcaaaactttgcaatcggcttgattgctactgtctttagaccgagagaggctgtactttctgctggactctatcttcttctaggtgctatcggtcttcctgtctttgcaggaggtggagctggttttcaggctttagttggccctactgcaggctatctttggttttatctcgtttactctggacttacttcctctctaaccaacagcaagagtggtgttgttaagatttttcttgcaaacctcttgggtgatgcccttgtctttgtcggcgggattctcagcttgcatttcctagctggaatggcatttgaaaaagctcttgttgtgggggttcttccctttatcattccagaccttggcaaacttctggctattagttttattagccgtcccctacttcaacgccttaaaaatcagacttactttactaactaa

SEQ ID NO: 96 - DNA, 336 bp, Streptococcus pneumoniae
ttgaaaaagctcttgttgtgggggttcttccctttatcattccagaccttggcaaacttctggctattagttttattagccgtcccctacttcaacgccttaaaaatcagacttactttactaactaaaaaaggataccgagttatcatgactcaatatccttttttttattttgaaaacttatactcaatgaaaatcaaagagcaaactaggaagctagccgcaggctgctcaaaacactgttttgaggttgtagatgaaactgacgaagtcagtaaccatacatacggcaaggcaaagctgatgcggtttgaagagattttcgaagagtattag

SEQ ID NO: 97 - DNA, 240 bp, Streptococcus pneumoniae
atgaaactaaaaaaggagaagaaaatggcagaatttacatttgaaatcgaagagcacttgttgactctttctgaaaacgaaaaaggttggaccaaggaaattaaccgtgtgagctttaatggtgcccctgcaaagtttgatattcgtgcttggagtccagaccatactaaaatgggcaaagggattactctctcaaatgaagaatttcaaacgatggtggatgcctttaaaggcaactaa

SEQ ID NO: 98 - DNA, 321 bp, Streptococcus pneumoniae
atgagacataaattccagcaagttctagataaaatacatgattttttaaatggacatgaccaacctgaccagactgaaaccaactcccttacagccactattgaagaggctatccagaaacaaaccgctgttcaccttatcttgtctgagacaagctttacaggtgatatcatcaaatatgatcagcaaggccagcaaattatcgtgaaaaatttttccaaaaatgtgagccggattatccgtataagcgatattcaacgcctgcgatttgtcccctcaactgtccaaacagcccaaaaaaatagatttaagaaagagtga

SEQ ID NO: 99 - DNA, 339 bp, Streptococcus pneumoniae
atgcaagtaatcaaacgtaatggcgaaattgctgaatttaatccagataagatttaccaagccatcttgaaggcagcccaaactgtttatgttttgacagatgatttgcgtcaaaatcttgctcaagtcactaagaaggtagttttggatttacaagaagccaaggtggaacgtgcgactatcagtatgattcaatctatggttgaacatcgtttattgggcgcaggttacattaccattgcagaacactatatttcctatcgtttacaacgtgacttggaaagaagtggttatggagatcatatcgcagttcatttacattttgaacaaattcgctaa

SEQ ID NO: 100 - DNA, 720 bp, Streptococcus pneumoniae
atgaagattgatattttaaccctctttccagagatgttttctccactggagcactcaatcgttggaaaggctcgagaaaaagggctcttggatatccagtatcataattttcgagaaaatgctgaaaaggcccgtcatgtagatgatgagccctacggaggcggtcagggcatgttgctcagagcacaacctattttcgattcctttgatgctattgaaaagaaaaatccgcgcgttattctcctcgatcctgctggaaagcagtttgatcaggcttatgctgaagatttggctcaagaggaagagctaatctttatctgtgggcactatgagggttatgatgagcgcattaagaccttggtaacagatgagatttccctaggcgactatgtcctcactggtggagaattggcagctatgaccatgattgatgctacagttcgcctgattccagaagtgattggcaaggagtctagccaccaagatgatagtttttcttcaggtcttttagaatatcatcagtacacacgtccctatgattatcgaggcatggtcgtgccagatgtattgatgagtggccatcatgaaaagattcgtcagtggcgattgtacgagagtttaaagaaaacctacgagcgcagaccggatttacttgaacattatcaactgacagtagaagaagaaaaaatgctggcagaaatcaaagaaaacaaagaataa

SEQ ID NO: 101 - DNA, 519 bp, Streptococcus pneumoniae
atgaactactttaatgttgggaaaatcgttaatacgcagggattacagggtgagatgcgagtcttgtctgtgacggattttgcagaagaacggtttaaaaaaggagctgagctggctttgtttgatgaaaaagatcagtttgtccaaacagtgaccatcgctagccaccgtaaacagaagaactttgacattattaaattcaaagatatgtaccatatcaatactatcgaaaagtacaagggatacagtctcaaggtcgctgaggaagatttgaatgacctagacgatggtgaattttactatcacgagattatcggtttggaagtctatgagggtgatagcttggttggaaccatcaaggaaatcctgcaaccaggtgctaatgatgtctgggtggtcaaacgaaaaggcaaacgtgatttgcttttaccttatatcccaccagtggttctcaatgttgatattccaaataaacgggtcgatgtggaaatcttagaagggttagacgatgaagattga

SEQ ID NO: 102 - DNA, 801 bp, Streptococcus pneumoniae
gtggatttctttatgaagaggtttgaagtatctacagaaattggtagtctctctgttgcttatcaaaagcaaaagaaagtgctagtttgtctaaatggagcaggtttgctaccaagttatgaaaatttttcacttatacttgaaaaacctcctcctacaattggttatttgacaattgattttccgaacacaggtaggagtccgatttatgaccaagctggaaaaaatctagataatcttgcagatgtggtttatgaagcacttgaagaattagggatttctgaatatatactttgtgtacatagttggagtggaattttagcttgcaaattactcgagaaaccaattaagtgtcagactttagtagtaattgaaccgacaactaaaaaagtcatgtttgctgatttttcagaaaatccttatccagaaatggaagagcagatgaggctgattgacgagtgtggtcctgaactttattttaagaacttaactcaagcaacatttagtcctgaaacgaataaaaaaatctgggaattaatgcaagaaaaaggcttagagttggaaaatcaagatccagaatttcagatatctggagagattactgaggaagattttgagaatttgtcgatagaatctcatgtccctgtatttattttttgtcagacttatagagaaaaagagtacagagaatcagaatattggacttccaatactaaactcattttaggagggaatcaccattatttacaatggtcagaatcggaaaaaattgcggctattattcgagaattgtcagaataa

SEQ ID NO: 103 - DNA, 240 bp, Streptococcus pneumoniae
atggatacgattgaaaatctcattattgcgattgtgaaacccttaatttcacaaccagatgccttaactatcaagattgaggatacaccagaatttttggaatatcatttgaatcttgatcaaagcgatgtgggtcgtgtaatcggtcgtaagggtcgcactatttctgcgataagaacgattgtctactctgtcccaactgaatacaaaaaagtaagaatcgttattgacgaaaaataa

SEQ ID NO: 104 - DNA, 273 bp, Streptococcus pneumoniae
atggcagttaaaatccgtttgactcgtatgggttctaagaaaaaacctttctaccgtatcaacgtagcagattcacgttcaccacgtgacggacgtttcatcgaaacagttggaacttacaacccacttgttgctgaaaaccaagtaactttgaaagaagaccgcgttcttgcatggttggctaatggagctcaaccttcagacacagtacgtaacatcctttcaaaagaaggcgtattgaaaaaattccacgattctaaattttcaaaataa

SEQ ID NO: 105 - DNA, 210 bp, Streptococcus pneumoniae
atgctatccgtgaatactattttagaaaaattttataaagaacaccaagtcaaacccttcatatcgcctgaacgagagttggatacttggcttctaagtcccaagcccgttcccaagcgaaatatggacttattagtagatgattcactagcaggagatatcattttactatggagaatccagtttggtacttttaccactgaaacatga

SEQ ID NO: 106 - DNA, 405 bp, Streptococcus pneumoniae
ttcttagcgtttagagaactggctagctttacgagctttcttaagatctggtttccaaaatactttgagtacacttatggtattgatgcccctaaacatctaaaaactctggtagaaaaagggtatgctcttgtcgaaacttcttttgactcacttgaccatctaaatactaccatgaaaaagaatatcctgaagaagaagggagttactggactttctaaaatgaaatcttgcgacctggatcaagcccttcatgagcatttttcagaagaagaattagctggtcactttcatgtccttctatggacttttttacaatggcattgctatcacacccaatacctatctaagcgcctggttcgtaaactttattgcagctcttcctctaaatttcctaattgttga

SEQ ID NO: 107 - DNA, 213 bp, Streptococcus pneumoniae
atgtccttctatggacttttttacaatggcattgctatcacacccaatacctatctaagcgcctggttcgtaaactttattgcagctcttcctctaaatttcctaattgttgaaccaattgcccgttttatactaagttcttttcagaaaccatttactggggaagaagttgaagattttcaagatgatgatgaaatcccaactattatctaa

SEQ ID NO: 108 - DNA, 804 bp, Streptococcus pneumoniae
atgaaaaaactagcaacccttcttttactgtctactgtagccctagctgggtgtagcagcgtccaacgcagtctgcgtggtgatgattatgttgattccagtcttgctgctgaagaaagttccaaagtagctgcccaatctgccaaggagttaaacgatgctttaacaaacgaaaacgccaatttcccacaactatctaaggaagttgctgaagatgaagccgaagtgattctccacacaagccaaggtgatattcgcattaaactcttccctaaactcgctcctctagcggttgaaaatttcctcactcacgccaaagaaggctactataacggtattaccttccaccgtgtcatcgatggctttatggtccaaactggagatccaaaaggggacggtacaggtggtcagtccatctggcatgacaaggataagactaaagacaaaggaactggtttcaagaacgagattactccttatttgtataacatccgcggtgctcttgctatggctaatactggtcaaccaaacaccaatggcagccagttcttcatcaaccaaaactctacagatacctcttctaaactccctacaagcaagtatccacagaaaattatcgaagcctacaaagaaggtggaaaccctagtctagatggcaaacacccagtctttggtcaagtgattggcggtatggatgttgtggataagattgctaaagccgaaaaagatgaaaaagacaagccaactactgctatcacaatcgacagcatcgaagtggtgaaagactacgattttaaatcttaa

SEQ ID NO: 109 - DNA, 360 bp, Streptococcus pneumoniae
actagggtttccaccttctttgtaggcttcgataattttctgtggatacttgcttgtagggagtttagaagaggtatctgtagagttttggttgatgaagaactggctgccattggtgtttggttgaccagtattagccatagcaagagcaccgcggatgttatacaaataaggagtaatctcgttcttgaaaccagttcctttgtctttagtcttatccttgtcatgccagatggactgaccacctgtaccgtccccttttggatctccagtttggaccataaagccatcgatgacacggtggaaggtaataccgttatagtagccttctttggcgtgagtgaggaaattttcaaccgc

SEQ ID NO: 110 - DNA, 1542 bp, Streptococcus pneumoniae
atgagtattttagaagttaaaaatctgagtcacggttttggtgaccgtgcaatttttgaagatgtgtccttccgtctcctcaagggagaacatatcggcctggtcggtgccaatggtgaaggaaaatcaacctttatgagtatcgtgactggtaaaatgctgccagatgaaggaaaggttgagtggtccaaatatgtgacggctggttacttggatcagcactctgtccttgctgaaagacagtcggtgcgtgatgttctccgtacggcttttgatgagcttttcaaagctgaagctcgtatcaatgacctctatatggaaatggctgaagacggtgcggatgttgatgctctcatggaagaagtaggagaacttcaagaccgtctggagagtcgtgatttctataccttggatgctaagattgacgaagtagcgcgtgctcttggtattatggactttggcatggatacggatgtaacttctttgtcaggtgggcaaagaaccaaggtgcttttggcaaaacttctccttgaaaagcctgatattttgctgttggacgagccgaccaactacttggatgctgagcatattgattggctcaagcgctatctccaaaactatgagaatgcctttgttctcatttcgcacgatattccattcctcaatgacgttatcaatattgtctatcatgtggaaaatcaacagctgacgcgttactctggtgactactaccagttccaagaagtttatgctatgaagaaatctcagctagaggcagcctacgaacgccagcagaaagagattgcagacctcaaggactttgtggctcgtaataaagcccgtgttgcaactcgtaatatggctatgtctcgtcaaaagaaattggataagatggatattatcgaactccaaagtgagaaaccaaaaccatcctttgatttcaaaccagctcgtacaccagggcgctttatcttccaagccaagaacttgcaaattggttacgaccgtcctcttactaagcctttaaatcttaccttcgaacgcaatcaaaaggttgcgattattggtgctaatggtattggaaaaacaactctcttgaagagtctcttgggcattatctcgccaatcgctggggaagtggagcgtggagattatttagaacttggttattttgagcaggaagtagaaggtggtaatcgccaaactcctcttgaagctgtctggaatgcctttcctgcccttaatcaagcagaagtccgtgcagcccttgcccgttgtggtttgacaaccaaacatattgaaagccagattcaagtattatcagggggagagcaagccaaggttcgtttctgtctcttgatgaatcgtgaaaacaacgttttagtgctggacgagccgaccaaccatttggatgtggatgcaaaggatgagctcaaacgcgctctcaaagaatataggggatctatccttatggtctgccacgagccagacttttatgaaggctggatagaccaaatatgggattttaataatttaacttaa

SEQ ID NO: 111 - DNA, 483 bp, Streptococcus pneumoniae
atgatgaagaagacttataatcatattttggtctggggagtcattttctatagcatttgcattgtctatttttgctttactcctcaagaacaatctaccgtgggagtgggaactccagatattcagcatcttggacgcctggtttttcttttgactcctttcaattctctctggaaactgggcgaagtgagtgacattggacaattatgttggatttttttacaaaatatcctcaatgtcttcttgttttttcctctgattttccaactcctttatctatttccaaatttgcggaaaacaaaaaaggtccttctttttagttttcttgtgagtcttggaatcgagtgtacgcaattaatcttggactttttctttgatttcaatcgcgtctttgagattgatgatttgtggaccaacactttgggtggctatctggcttggctcctttataaacgattacataaaaacaagataaggaattaa

SEQ ID NO: 112 - DNA, 1086 bp, Streptococcus pneumoniae
atgaaaccctcaattcatagtttggcacatcaaaccatgcaggaatgggtattggagcagggagaaaagaaattccgtgcagatcaaatctgggaatggctctaccgtaaacgtgtgcagtcatttgaagaaatgaccaacctttccaaggatttgattgctaagctcaatgaccagtttgtggtcaatcccttgaaacaaggtattgtgcaagagtctgctgatggtacagtcaaatatctctttgaattgcccgacggtatgttaattgagactgtactcatgcgtcaacactatggtttatctgtctgtgtgaccactcaggtcggctgtaatatcggttgtaccttctgtgcctctggtttgattaagaagcaacgtgacctcaataacggtgaaatcgtagcgcaaatcatgctggttcagaaatactttgctgagcgtggtcaggatgaacgcgtcagccatatcgttgtcatgggaatcggtgagccctttgataattacaacaatgtcttgaatttctttcgtactatcaatgatgataaaggaatggctatcggtgctcgtcacatcacggtttcaacctcaggtttggctcataaaattcgtgactttgctgatgaaggggttcaggtcaatcttgccgtgtctcttcacgcacctaacaatgaacttcgttcaagtatcatgaagattaaccgtgcctttccgattgaaaaactctttgctgctattgaatactacattgagacaacaaaccgtggtgtaacctttgaatatatcatgcttaatgaagtcaacgacggtgtagaacaagccttggaattgactgaattgctcaagaacatcaagaaattgtcttatgtaaacttgattccttataacccagttagtgagcatgaccaatatagccgtagtcccaaagagcgcgtgttggctttctatgatacgcttaagaaaaaaggggtcaactgtgtggttcgtcaagagcatggtacagatattgacgcagcttgtggacaattgcgctctaacacaatgaaacgtgaccgccagaaggcagtcgcagcggtaaatccttaa

SEQ ID NO: 113 - DNA, 531 bp, Streptococcus pneumoniae
atgcgaaaagaaattgcacctgaattatacaactataacaagtttcctggtccggagttccatttacacggggacaaggtcgaaacggaagggatagctttttccttggttgaaaatatcaaggatgcctttgatgtgacaacttttaatcagcgtttttcagaagtattaaccaagtttgattatatcgtgggggactggagcaacgaacagcttcgcctacgaggtttttacaaggatgaccgaacagaagaaaaacttgaaaaaatcagtcgtttacaagactaccttttagagtattgtagttatggttgtgcctattttgtcttagaaaatgaagcccctaagcgagcatcatttgacaagaaaatgcgtaagacggaagaagaaacaccttctagaaaaggaaagaaaccgactcaaactaaacgaaagtcgaatgcagataagaaaaatagacgtcgtcagaaagaccagcattctcagaaagaggacaagggacaacgtcattttgtcattcgtcagaagtga

SEQ ID NO: 114 - DNA, 606 bp, Streptococcus pneumoniae
atggctattatcttaccagaacttccatatgcatacgacgctttggaaccatacatcgatgcggaaacaatgcatttgcaccatgacaaacaccatcaaacttatgtcaacaatgccaatgcagctttagaaaaacaccctgaaatcggtgaagaccttgaagccttgcttgctgatgtagaatctatcccagctgatatccgtcaagcacttatcaacaatggtggcggacacttgaaccacgctcttttctgggaattgatgactcccgagaaaacagctccttcagcagaactggcagcagcaatcgatgcaacatttggttcatttgaagaattccaagcagccttcactgcagcagcaacaactcgttttggttcaggttgggcatggttggttgtcaacaaagaagggaaacttgaagtgacttcaacagcaaaccaagacacaccaatctcagaaggtaaaaaaccaatcttgggcttggacgtttgggaacatgcttactacgtgaaataccgcaacgtgcgtcctgactacatcaaagctttcttttcagtaatcaactggaataaagtagatgaattgtacgcagctgctaaataa

SEQ ID NO: 115 - DNA, 1038 bp, Streptococcus pneumoniae
atgctagccattgaagaaagtcagaagttgactttatcaaatttaccgagcctgagcctatttacagggacagatcagggtcagtttgaagtgatgaagagtcaagtgttgaaacagattgggtatgattctgctgacctcaactttgcctactttgatatgaaagaagtagtttacaaggatgtggaactggagttggtcagccttcctttctttgcggatgagaaaatcgtgatattagattattttatggatatcacgactgctaagaaacgctttttgacagatgatgagcttaagtcatttgaggaataccttgacaattcttctccaacaaccaagttgataatctttgcagaaggaaagctggatagcaaaagacggttagtcaaattacttaagcgtgatgccaaggtcttcgatgcagtagaagtaaaagaacaagaattgcgccagtatttccaaaagtggagtcagaaacaaggtctgcagtttaccaatcattcttttgaaaatctcctcatcaagtcggggtttcaatttagcgaaatccagaaaaatcttctctttttacagtcctataaggcgaattctgttattgaggaagaggatattgttaacgcaattcccaagaccttgcaggacaatatttttgatttaactcagtttattctgactaaaaagatggatcaggcgcgcgatttggtgagagacttgaccttgcaaggggaagatgaaatcaaactgattgcagtcatgctgggacaatttcggacttttactcaggtgaagattttggcggagtctggccaaacagaatcgcagattgcaagtagtttaggtagttatctgggacgtaacccaaatccttatcaaatcaagtttgcattaagagattcgagaggactttctttgagctttttgaagcaagctatttcctatttgattgagacagactatcagattaagacaggtctttatgaaaaaggtttcctttttgaaaaggcactcttacagattgctagtcaggtcaattga

SEQ ID NO: 116 - DNA, 936 bp, Streptococcus pneumoniae
atggtatcaacgaaaacacaaattgctggttttgagtttgacaattgcttgatgaatgcagcaggtgtggcttgtatgacgatagaggagttagaagaggtcaaaaactcagcggcaggaacctttgttactaagacagcgaccttggacttccgtcaggggaatcctgagccacgctaccaagatgttccacttggttccatcaactctatgggcttgccaaataatggcttagactattatttggattatcttttagatttgcaggaaaaagagtcgaaccgaactttcttcttatctctggtcggcatgtctccagaggaaacccatactattttgaaaaaagtccaagagagtgattttcgtggtctgactgagctaaatctttcctgtccaaatgttccaggtaaacctcagattgcctatgattttgagacaacagaccggattttggcagaagtgtttgcttacttcaccaaacctcttggaattaaattgccaccttattttgatattgttcactttgatcaagcggcagctattttcaacaaatatccgctcaagtttgtcaactgcgttaactctatcggaaacggcctctatatagaagacgaatctgtcgttattcggcctaagaatggttttggtggaattggtggagaatacatcaaaccgactgctctagccaatgttcacgccttttatcaacgtttaaatcctcaaatccaaattatcggaacaggtggcgttctgactggtcgagatgcctttgaacacatcctctgtggagcaagtatggtgcaggtgggaacgacccttcacaaagaaggcgtcagtgcttttgaccgcattaccaatgaactgaaagcaatcatggtggaaaaaggctacgagagcttagaagatttccgtgggaaattgcgctatattgactaa

SEQ ID NO: 117 - DNA, 1191 bp, Streptococcus pneumoniae
atgtcagagcgtaaattattcacgtctgaatctgtatctgaggggcatccggataagattgcagaccaaatttcagatgcgattttggatgctattttagcaaaggatccagaggcgcacgttgctgctgaaacagctgtatatactggttctgtccacgtttttggtgaaatttctacaaatgcctatgtggatattaaccgtgtggttcgtgataccattgcagagattggttataccaatacagaatatggattttctgctgagacggtgggagtacacccatctttggtggaacaatctcctgacatcgctcaaggtgttaacgaagccttggaggttcgtggaaatgctgatcaagatccactggacttgattggagcaggtgaccaagggctcatgtttggatttgcagtagatgaaacagaagagcttatgccattgccaattgcactcagtcataaattggttcgtcgtctggcagaacttcgtaagtctggagaaattagctatctccgtccagatgcaaaatcacaagttacagttgagtacgatgaaaatgaccgtccggtacgtgtagatacagtcgttatttctactcagcatgatccagaggccactaatgaacaaatccatcaagatgtgattgacaaggtcatcaaagaagttattccatcttcttatcttgatgataagacaaaattctttatcaatccgacaggtcgttttgtaatcggtggtcctcaaggggactcaggtttgactggtcgtaagattattgtagatacttatggtggctactctcgtcatggtggtggtgccttctctggtaaagatgcgactaaggtggatcgttcagcctcttatgcggctcgctatattgccaagaatatcgttgcagcaggccttgctaagaaggcagaagtgcagttggcctatgctatcggtgttgcgcaacctgtttctgttcgtatcgatactttcggtacaggaacagtagctgaaagtcaacttgaaaaagcggctcgtcaaatctttgaccttcgccctgcagggattatccaaatgctggacctcaagcgtccaatttaccgtcaaacatcggcttacggtcacatgggacgtacagatattgatcttccatgggaacgtttggataaggtagatgctttgaaagaagcagtaaaataa

SEQ ID NO: 118 - DNA, 1344 bp, Streptococcus pneumoniae
atgtcatttacgaaatttcaatttaaaaactatattagagaagccttgaaggagttaaaatttacaactccaacagaggtgcaagacaagttgattcctattgttttggcaggtcgtgacctagtaggagaatcaaaaacaggttcaggtaagactcatactttcttgttaccgattttccagcaattagatgaagctagcgatagtgtgcaagcagtgattactgcaccgagtcgtgagttggctactcaaatttaccaagtagcgcgtcagatttcagctcactcagatgtcgaagttcgtgtggttaattatgtgggtggtacggataaggctcgccagattgagaaattggcaagcaatcagcctcatattgttattggaacaccaggccgtatctacgacttggttaaatctggtgatttagctattcataaagccaagacatttgttgttgatgaagcagatatgaccttggatatgggattcttggaaactgttgataagattgctggcagtcttccaaaagacttgcaattcatggtcttctcagcgactatcccacaaaaactgcaaccattcttgaaaaaatacttatcaaatcctgttatggagaaaattaagaccaaaacggttatttctgacaccattgataattggttgatttcgaccaagggacatgataagaatgctcaaatttaccagttgactcagttgatgcagccgtatttggcaatgatttttgttaacactaaaacgcgtgctgatgaattgcattcatatctgactgctcaaggcttgaaggttgcaaaaatccatggcgatattgcccctcgtgaacgcaagcgaatcatgaatcaggtgcaaaatctggattttgagtatattgtcgcaacagatttggcagcacgtgggattgacattgaaggtgtcagccatgtcatcaatgatgccattccgcaagacttatctttttttgttcaccgtgttggtcgtactggacgaaatggcctaccaggtacagctattaccctttatcagccaagtgatgactcggatatccgtgagttggagaaattgggaatcaagtttagtcctaagatggtcaaagacggggaatttcaagatacctatgaccgtgatcgtcgtgccaaccgtgagaaaaaacaagataaacttgatatcgaaatgattggtttggttaaaaagaaaaagaaaaaagtcaaaccgggttataagaagaaaattcaatgggcggttgatgaaaagcgccgtaaaaccaagcgtgctgaaaatcgcgctcgcggtcgtgcagagcgtaaagctaaacgtcaaacattttaa

SEQ ID NO: 119 - DNA, 816 bp, Streptococcus pneumoniae
atgaaatttttaacactcaatactcacagttggatggagaaagaagcagaggaaaaattccagattttgcttgaagatattcttgaaaaggactatgatttgatttgttttcaagaaatcaatcaggagatgacctcgtcagaggtggaggttaatgacctttatcaagctttgccagcagctgagcctattcaccaagaccattatgttagactcttggttgaaaagttgttagagcaagggaaaaattactactggacctgggcttataaccatatcggctatgaccgctaccacgaaggtgtggctatcttgtctaaaacacctattgaagccagagaaattttggtttcagatgtggatgatccaacagactatcatactcgccgtgttgccctagctgaaactgtagtcgatggcaaggagctagcagttgccagtgttcatctctcttggtgggataaaggtttccaagaagaatgggcacgatttgaggctgtcttgaaaaaattgaacaagccacttttactagctggagattttaacaacccagcaggtcaggaaggttaccaagctattttagctagtccattagacttacaagacgcatttgaagttgctcaagagaaaagtggtagctatactgttccgcctgaaattgatggctggaaagggaacactgaaccccttcgaatcgattatgtctttactaccaaagagttagcggtggaaaatttacatgtcgtatttgatggtaacaagagtccacaagtgagtgatcactatggcttgaatgctatgttaaactggaaataa

SEQ ID NO: 120 - DNA, 264 bp, Streptococcus pneumoniae
ttgagtgttaaaaatttcattcttttctcccaaaataagaggttggaatacagcttccaacctcaagtatattacaattctactttagcaactgctgttttagctgcaagagaacctgttttttctaacttaactgatttaattgcatcaccatttgtgaagacaactactgttgatgtttcacgtcctgctgcacggatagcatccaagtcagctgtgacaaggagatctcctgctgcaactttttgtccttcagcaacatga

SEQ ID NO: 121 - DNA, 2181 bp, Streptococcus pneumoniae
atgatgaaagatacattcaaaaatgtcttgtctttcgaattttggcaaaaattcggtaaggctttgatggtagttatcgcggttatgccggctgctggtttgatgatttcaatcggtaagtctatcgtgatgattaacccaacctttacaccacttgtcatcacaggtggaattcttgagcaaatcggttggggggttatcggtaaccttcacattttgtttgccctagccattggaggaagctgggctaaagaacgtgctggtggtgctttcgccgctggtcttgccttcatcttgattaaccgtatcactggtacaatctttggtgtatcaggcgatatgttgaaaaatccagatgctatggtaactactttctttggtggttcaatcaaagttgctgattactttatcagtgttcttgaagctccagccttgaacatgggggtattcgtagggattatctcaggttttgtaggggcaactgcttacaacaaatactacaacttccgtaaacttcctgatgcactttcattcttcaacgggaaacgtttcgtaccatttgtagttattcttcgttcagcaatcgctgcaattctacttgctgctttctggccagtagttcaaacaggtatcaataatttcggtatctggattgccaactcacaagaaactgctccaattcttgcaccattcttgtatggtactttggaacgtttgctcttgccatttggtcttcaccacatgttgactatcccaatgaactacacagctcttggtggtacttatgacattttaactggtgcagctaaaggtactcaagtattcggtcaagacccactatggcttgcatgggtaacagaccttgtaaaccttaaaggtactgatgctagtcaataccaacacttgttagatacagtacatccagctcgtttcaaagttggacaaatgatcggttcattcggtatcttgatgggtgtgattgttgctatctaccgtaatgttgatgctgacaagaaacataaatacaaaggtatgatgattgcaacagctcttgcaacattcttgacaggggttactgaaccaatcgaatacatgttcatgttcatcgcaacacctatgtatcttgtttactcacttgttcaaggtgctgccttcgctatggctgacgtcgtaaacctacgtatgcactcattcggttcaatcgagttcttgactcgtacacctattgcaatcagtgctggtattggtatggatatcgttaacttcgtttgggtaactgttctctttgctgtaatcatgtactttatcgcaaacttcatgattcaaaaattcaactacgcaactccagggcgcaacggaaactacgaaactgctgaaggttcagaagaaaccagcagcgaagtgaaagttgcagcaggttctcaagctgtaaacattatcaaccttcttggtggacgtgtaaacatcgttgatgttgatgcatgtatgactcgtcttcgtgtaactgttaaagatgcagataaagtaggaaatgcagagcaatggaaagcagaaggagctatgggtcttgtgatgaaaggacaaggggttcaagctatctacggtccaaaagctgacatattgaaatctgatatccaagatatccttgattcaggtgaaatcattcctgaaactcttccaagccaaatgactgaagcacaacaaaacactgttcacttcaaagatcttactgaggaagtttattcagtagcagacggtcaagttgttggtttggaacaagtaaaggatccagtatttgctcaaaaaatgatgggtgatggatttgcagtagaacctgcaaatggaaacattgtatctccagtttcaggtactgtgtcaagcatcttcccaacaaaacatgcttttggtattgtgacggaagcaggtcttgaagtattggttcacattggtttggacacagtaagtcttgaaggtaaaccatttacagttcatgttgctgaaggacaaaaagttgcagcaggagatctccttgtcacagctgacttggatgctatccgtgcagcaggacgtgaaacatcaacagtagttgtcttcacaaatggtgatgcaattaaatcagttaagttagaaaaaacaggttctcttgcagctaaaacagcagttgctaaagtagaattgtaa

SEQ ID NO: 122 - DNA, 936 bp, Streptococcus pneumoniae
atggatacgatgattagtagattttttcgccatttatttgaagccttaaaaagtttgaaacgaaatggttggatgacagtagctgctgtcagttcagtcatgattactttgaccttggtggcaatatttgcatctgttattttcaatacagcgaaactagctacagatattgaaaataatgtccgtgtagtagtttatatccgaaaggatgtggaagataatagtcagacaattgaaaaagaaggtcaaactgttacaaataatgactaccacaaggtatatgattctttgaagaacatgtctacggttaaaagtgttaccttttcaagtaaagaagaacaatatgaaaaattaaccgagataatgggagataactggaaaatctttgaaggagatgccaatcctctctatgatgcctatattgtagaggcaaacactccaaatgatgtaaaaactatagccgaagatgctaaaaaaattgaaggtgtctctgaggttcaagatggcggtgccaatacagaaagactcttcaagttagcttcatttatccgtgtttggggactagggattgctgctttgttaatttttatcgcagttttcttgatttcaaataccattcgtattaccattatttcccgcagtcgcgaaattcaaatcatgcgcttggtcggagctaaaaacagttatatccgtggaccgttcttgttagaaggagcctttatcggtttattgggagctatcgcaccatctgttttggtctttattgtttatcaaattgtttaccaatctgtcaacaaatcgttggtagggcaaaatctatccatgattagtccagatttatttagtccgttgatgattgccctactatttgtgattggggttttcattggttcattgggatcaggaatatccatgcgccgattcttgaagatttag

SEQ ID NO: 123 - DNA, 207 bp, Streptococcus pneumoniae
actactacacggacattattttcaatatctgtagctagtttcgctgtattgaaaataacagatgcaaatattgccaccaaggtcaaagtaatcatgactgaactgacagcagctactgtcatccaaccatttcgtttcaaactttttaaggcttcaaataaatggcgaaaaaatctactaatcatcgtatccatactctccttttga

SEQ ID NO: 124 - DNA, 693 bp, Streptococcus pneumoniae
atgtcaattattgaaatgagagatgtcgttaaaaaatacgacaacggaacgactgctctacgcggtgtttcggtcagcgttcaaccgggggaatttgcttacatcgtaggaccttcaggagcagggaagtcaacttttattcgttctctgtatcgtgaagtaaaaatcgataaaggaagcctatcagttgctggttttaatctggttaagatcaaaaagaaagatatcccgcttctacgtcgtagtgttggggttgtcttccaggattataaattgttaccaaagaaaactgtctatgaaaatattgcttacgctatggaagtaatcggggaaaatcgccgtaatatcaaaagacgagtgatggaagttttggacctggttggattgaagcataaggttcgttctttcccaaatgaactctcaggtggggagcaacagcggattgcgattgcgcgtgcaattgtaaataatcccaaagtattgatagctgatgagccaacaggaaatctggatccggataattcatgggaaattatgaatctcttggaacggattaacctacaaggaacaactattttgatggcgactcataatagccagattgtaaataccttgcgccaccgtgtcattgccattgaaaatggccgtgtcgttcgtgacgaatcaaaaggagagtatggatacgatgattag

SEQ ID NO: 125 - DNA, 225 bp, Streptococcus pneumoniae
atttcccatgaattatccggatccagatttcctgttggctcatcagctatcaatactttgggattatttacaattgcacgcgcaatcgcaatccgctgttgctccccacctgagagttcatttgggaaagaacgaaccttatgcttcaatccaaccaggtccaaaacttccatcactcgtcttttgatattacggcgattttccccgattacttccatagcgtaa

SEQ ID NO: 126 - DNA, 921 bp, Streptococcus pneumoniae
ttgaatgtatttaaaaacacttacaataccttccataagatggaagagttgcaggatgaagtcgaaattttattggattttttggctgaagacgagtcagtgcatgatgaactggtagcgcagttagccgaacttgataagataatgaccagctacgagatgactttactcttgtcagaaccttatgaccacaacaatgccatcttggaaatccatccaggttctggtggtactgaggcgcaggactggggtgatatgttgcttcgtatgtatactcgttatggtaatgctaaaggctttaaagtggaagtgttggattaccaagcaggtgatgaggctggtattaagtcggtaactttatcatttgaagggcctaatgcctatggtctcctcaagtcagaaatgggtgttcaccgcttagtgcgaatctcaccatttgactctgccaaacgtcgccatacctctttcacatctgtagaagtgatgccagaattggatgatactattgaagtggaaatccgtgaagatgatatcaagatggataccttccgttcaggtggtgccggtggacaaaacgtcaataaagtttcaacaggtgtacgtttaacccacattccaactggaattgttgtccaatcaacagtggatcgtacccagtatggaaatagagatcgtgccatgaagatgttgcaggctaagctctatcaaatggagcaagagaagaaggctgcggaggtagattctctcaaaggtgagaaaaaggagattacttggggaagccaaatccgttcttatgtcttcacgccttatactatggtaaaagatcaccgaactagctttgaggttgctcaggtagataaggttatggatggggacctagatggttttatcgatgcttatctcaagtggcgaattagctaa

SEQ ID NO: 127 - DNA, 657 bp, Streptococcus pneumoniae
atggcagttaaagattttatgacccgcaaggtagtttatattagtccagatacaacagtatctcatgcagcagatttgatgagagagcaaggtttgcaccgtctgcctgttatcgaaaatgatcaattagttggtttggtgactgagggaaccattgcacaagcaagtccatctaaagcaacaagtctttctatatatgagatgaattatcttctgaataagacaaaagtaaaagatgtcatgattcgcgatgttgtcactgtctcaggctatgctagtctagaagatgcaacttatctgatgttgaaaaataagattggtattctccctgtcgtagataaccatcaagtatacggagttattactgaccgtgatgttttccaagcctttcttgaaattgcaggttatggcgaagaagggattcgtgtacgctttgttacagaagatgaagttggtgttcttggaaaaattgtttctttgattgtagaagaaaatttgaatatctcccatacagtcaatattccgcgtaaggatggtaaggtgattatcgaagtgcaaatcgatgaatcaattgatttaccagccttgaaagaaaaatttgaagcaaatggtattcaagtggaagaaatcgctcgcacttcagcaaaagtcttgtaa

SEQ ID NO: 128 - DNA, 711 bp, Streptococcus pneumoniae
atgtctatgttaaaagttgaaaatctttctgtgcattacggtatgatccaagcagtccgtgatgtaagctttgaagttaatgaaggagaagttgtttcccttatcggtgccaacggtgcaggtaagacaactattcttcgcaccttgtcaggtttggttcgaccaagttcaggaaagattgaatttttaggtcaagaaatccaaaaaatgccagctcagaaaatcgtggcaggtggtctttcacaagttccagaaggacgccacgtctttcctggcttgactgttatggaaaatcttgaaatgggagctttcttaaagaaaaatcgtgaagaaaatcaagctaacttgaagaaggttttctcacgctttcctcgtcttgaagaacggaagaaccaagatgcagctactctttcaggaggggaacaacaaatgcttgccatgggacgcgctcttatgtcaacaccaaaacttcttcttttagatgaaccatcaatgggacttgccccaatcttcatccaagagatttttgatatcattcaagatattcagaagcaaggaacaaccgtcctcttgattgaacaaaatgccaataaagcacttgcaatctctgaccgaggatatgtattggaaacaggaaaaatcgtcctatcagggtcaggaaaagaactcgcttcatcagaagaagtcagaaaagcatatctaggtggctaa

SEQ ID NO: 129 - DNA, 201 bp, Streptococcus pneumoniae
atgatatcaaaaatctcttggatgaagattggggcaagtcccattgatggttcatctaaaagaagaagttttggtgttgacataagagcgcgtcccatggcaagcatttgttgttcccctcctgaaagagtagctgcatcttggttcttccgttcttcaagacgaggaaagcgtgagaaaaccttcttcaagttagcttga

SEQ ID NO: 130 - DNA, 765 bp, Streptococcus pneumoniae
atggcattacttgaagtaaaacagttaaccaaacattttggtggtctaacagctgttggagatgtgactcttgaattgaacgaaggggaactggttggattaatcggtccaaacggagctgggaaaaccacccttttcaaccttttgaccggtgtttatgaaccaagtgagggaacagtaactctagatggtcaccttttgaatgggaaatcaccttataagattgcctctttgggacttggacgtactttccaaaatatccgtctctttaaagatttaacagttttagacaatgttttgattgcttttggaaaccatcacaaacagcatgtttttactagtttcttacgcttaccagctttttacaagagtgaaaaagaattaaaggctaaagctttggaattgttgaaaatctttgatttagatggtgatgcagagactcttgctaaaaatctttcctacggacaacaacgtcgtttggaaattgttcgtgcccttgctacggaacctaaaattctcttcttagatgaaccagcagcaggtatgaacccacaggaaacagccgaattgactgagttaattcgtcgtatcaaagatgaatttaagattacaatcatgttgattgaacacgatatgaatctggtcatggaagtaacagaacgtatctacgtacttgaatatggccgtttaattgctcaaggaactccagacgaaattaagaccaataaacgcgttatcgaagcttatctaggaggtgaagcctaa

SEQ ID NO: 131 - DNA, 957 bp, Streptococcus pneumoniae
atgaaggaaaatttaaaagttaatattctatggttactccttttgttagctggctatagcttgattagtgtactggtttcagtcggagtacttaatctattctatgtacagattttacaacaaattggaattaatattattttggctgttggtctcaacttaatcgttggtttttcaggacaattttcacttggtcatgctggtttcatggcgattggtgcctatgcagcagctattattggttctaaatcaccaacctacggtgccttctttggagctatgcttgtaggggctttgctttcaggagcagttgccttacttgtcggcattccaaccttgcgcttgaagggggactatcttgcggtagcaactctaggtgtttctgaaattatccgtatctttatcatcaatggtggaagccttacaaatggtgcggcaggtatcttagggattcctaactttacaacttggcaaatggtttacttctttgtcgtgattacaaccattgcaaccttgaacttcttgcgtagcccaattggtcgttcaaccctctctgttcgtgaagatgaaatcgctgctgagtcagttggggttaatacgactaaaattaaaatcatcgcttttgtctttggtgccattactgcaagtattgctgggtcacttcaggcaggatttatcgggtctgttgtaccgaaagattacaccttcatcaactcaatcaacgttttgattattgttgtatttggtggactcggttccattacaggtgcgattgtttcggctattgttctgggaattttgaatatgcttctccaagatgttgctagtgtgcgtatgattatttacgctttggccttggtattggtaatgattttcagaccaggtggactccttggaacatgggaactgagcctatcacgtttctttaaaaaatctaagaaggaggaacaaaactaa

SEQ ID NO: 132 - DNA, 879 bp, Streptococcus pneumoniae
gtgaatcttatgctccaacaactcgtaaatggtttgattctaggtagtgtttacgcgctgttagccctaggatataccatggtttacggaattatcaagctcatcaacttcgcccatggtgatatttatatgatgggagcctttatcggttatttcttgatcaattctttccaaatgaatttctttgtagcgcttattgtagctatgctagtgacagctattcttggtgtcgtgattgagtttcttgcttaccgacctttgcgccactctactcgtattgctgttttgattacggctattggggtttctttcctattggagaatggaatggtctatctggttggtgccaatacccgtgccttccctcaagcgattcaaacagttcgatatgatttgggaccaattagcttaacaaatgtgcagttaatgattttggccatttccttgattttgatgattttgttacaagtcattgtccaaaagactaagatggggaaagccatgcgtgcagtatcagtagatagcgacgcggcacaattgatggggatcaatgtaaaccgtacgattagctttaccttcgctttgggttctgctcttgcgggtgcggctggtgttctgattgctctttattataactctcttgagcctttgatgggggttactccaggtcttaaatctttcgttgccgcagtacttggtggtatcggaattattcctggtgcggctcttggtggctttgtgattggtctattggaaacctttgcgacagcctttgggatgtcagatttccgtgatgccattgtttatggaatcttgttgttgatcttgattgtccgcccagctggtatccttggtaagaatgtgaaagagaaggtgtaa

SEQ ID NO: 133 - DNA, 1161 bp, Streptococcus pneumoniae
  unsure (160),(253): n at each above location is unknown.
atgaagaaaaaatttgccctatcgtttgtggcgcttgcaagtgtagcacttcttgcagcctgtggagaagtgaagtctggagcagtcaacactgctggtaactcagtagaggaaaagacaattaaaatcgggtttaactttgaagagacaggttctttanctgcatacggaacagctgaacaaaaaggtgcccaattggctgttgatgaaatcaatgccgcaggtggtatcgatggaaaacaaatcgaagtantcgataaagataataagtctgaaacagctgaggctgcttcagttacaactaaccttgtaacccaatctaaagtatcagcagtcgtaggacctgcgacatctggtgcgactgcagctgcggtagcgaacgctacaaaagcaggtgttccattgatctcaccaagtgcgactcaagatggattgactaaaggtcaagattacctctttattggaactttccaagatagcttccaaggaaaaattatctcaaactatgtttctgaaaaattaaatgctaagaaagttgttctttacactgacaatgccagtgactatgctaaagggattgccaaatctttccgcgagtcatacaagggtgaaatcgttgcagatgaaactttcgtagcaggtgacacagacttccaagcagcccttacaaaaatgaaagggaaagactttgatgctatcgttgttcctggttactataatgaggctggtaagattgtaaaccaagcgcgtggtatgggaattgacaaaccaatcgttggtggtgatggattcaacggtgaggagtttgtacaacaagcaactgctgaaaaagcatcaaacatctactttatctcaggcttctcaactactgtagaagtttcagctaaagctaaagccttccttgacgcttaccgtgctaagtacaatgaagagccttcaacatttgcagccttggcttatgattcagttcaccttgtagcaaacgcagcaaaaggtgctaaaaattcaggtgaaatcaagaataaccttgctaaaacaaaagattttgaaggtgtaactggtcaaacaagcttcgatgcagaccacaacacagtcaaaactgcttacatgatgaccatgaacaatggtaaagttgaagcagcagaagttgtaaaaccataa

SEQ ID NO: 134 - DNA, 450 bp, Streptococcus pneumoniae
  unsure (56): n at each above location is unknown.
ttgatttcatcaacagccaattgggcacctttttgttcagctgttccgtatgcagntaaagaacctgtctcttcaaagttaaacccgattttaattgtcttttcctctactgagttaccagcagtgttgactgctccagacttcacttctccacaggctgcaagaagtgctacacttgcaagcgccacaaacgatagggcaaattttttcttcatctttttgtctccttatttcttaaatagtctgttaagaatataccgaattatcagaaaattgtcaatgttttccttgaactttttcgatgataacgttttcctatcgataaagattgcccacaaagggtgtttccaactcttggatatgacaaaccctaacttttttaataaatttttccttgctcaagcgtccgaccaattgctccacttcttgagttggaacatagagttgtaa

SEQ ID NO: 135 - DNA, 249 bp, Streptococcus pneumoniae
atgtttgaaaaagtcaatcgctctggcttgattatctatctttactataatcgtgatgccaaaaaactgcaggattatggagatattacctatcattccaagaaacatcgttacttacaactctatgttccaactcaagaagtggagcaattggtcggacgcttgagcaaggaaaaatttattaaaaaagttagggtttgtcatatccaagagttggaaacaccctttgtgggcaatctttatcgatag

SEQ ID NO: 136 - DNA, 591 bp, Streptococcus pneumoniae
atgattcctgtagttattgaacaaacaagccgtggagaacgttcttacgatatttactcacgtcttctcaaagaccgcatcattatgctgacaggtccggttgaagacaatatggctaactctgttattgcccaactgcttttcttggatgcccaagatagtacaaaagatatttacctttatgtcaatacaccaggggggtctgtttcagctggtttggcaatcgtagataccatgaactttatcaaggcagatgtccaaaccattgttatgggaatggctgcatctatgggaacagtcatcgcatcaagtggagcaaaaggcaaacgtttcatgcttccaaatgctgaatacatgattcaccaaccaatgggcggtacaggtggtggtacccaacaaactgatatggctatcgctgcagaacacttgctcaaaactcgtaataccttggaaaaaatcttggctgaaaattcaggtcagtcaatggaaaaagtccatgcagatgcagaacgtgataactggatgagcgcccaggaaacacttgaatatggctttattgatgaaattatggccaacaattcattgaactaa

SEQ ID NO: 137 - DNA, 651 bp, Streptococcus pneumoniae
ttgaaagaaggaattccaaaaatgggaaaaattgaagttattaatcacccactgattcaacacaaattgtcaatcttgcgtcgtacagatacttctacaaaagcttttcgtgagctagtagatgagattgcaatgttgatggggtatgaagtacttcgtgatcttccactagaagatgtggaaatcgaaacaccaattacaaaaacagttcaaaaacaattggcaggtaagaaattggccatcgtcccaatcttgcgtgcaggtatcgggatggttgatggtctcttgagcttggttccagctgctaaagttggccacatcggtatgtaccgtgatgaagaaacacttcaaccagttgaatacttggtgaaattgcctgaggacattgaccaacgtcaaatttttgtagtagacccaatgttggcaacaggtggctcagcaatcttggctgttgattctcttaaaaaacgtggcgcatcaaatatcaaatttgtctgccttgtatctgctccagagggtgtaaaagcccttcaagaagctcatccagatgtagaaatctttacagcagccttggatgaacgtttgaacgaacacggttatatcgttccaggtcttggagatgctggagaccgcttgttcggtacaaaataa

SEQ ID NO: 138 - DNA, 162 bp, Streptococcus pneumoniae
ttggaattccttctttcaatttattcttcttattataccaaaaaacgggttaaaaatctttctaaaccatttatttttgataatttttacattagatcagcctctttaagagctgtctgtactgtctcaagtggtaaatgggtcaattctgtccctttttct

SEQ ID NO: 139 - DNA, 468 bp, Streptococcus pneumoniae
atgactgaaaaaagactggcctgggatgagtattttgcagcccaagctctactaattgcgaatcgttccacttgtaaacgtgctaaagtgggcgcgattctggtaaaagataataaggttatttccactggttacaatggttcggtgtcagggactgagcattgtattgatcacgaatgtttggtcattgaaggccactgtgttcgcacccttcacgctgaggtcaatgctatccttcaaggtgctgagcgtggtgttcccaaaggttttacagcctatgtaacccattttccttgtctcaactgtacaaaacaattgcttcaggtcggctgcaagcgtgtggtttatatcaaccagtaccgaatggacgactacgcccaatacctttatcaagaaaaagggacagaattgacccatttaccacttgagacagtacagacagctcttaaagaggctgatctaatgtaa

SEQ ID NO: 140 - DNA, 558 bp, Streptococcus pneumoniae
atgtctgaacgtagaatctctgaaaagtctcttgaaaatctcagaaaatcaaaccaagaatccaatttattaaccagagaagccattgaaacagccctcttgcaactcttggaaaaaaaggaactgaccaagattagtatttctgaattggtcaaacgtgcaggtgtttcgcgtgcggccttttatcgcaattatgactccaacgaggaaattttagagagcgtctttaaacgaactgtccacaatattatggaacagctgcatcattacgatttaaagacagacctttatttggtttgggttcaccttttccgggaggccagaaaggaagctagagtaattcaattggccttggattaccatctggaaaaaatctttgtccaagccatgcaggaatttctaggaaaataccatgggaaatcaaaaggtgtcagctcttatcttcattccttctggagctcagccatcgtctctgtccttctaaaatggatcaaggatggcatgaaggtaccagctgaaaagattgcagatttaggtttaccattttttaaaaaatag

SEQ ID NO: 141 - DNA, 846 bp, Streptococcus pneumoniae
atgacttggaagattattgctgactctggttgtgattatcgtcaactgccaacaccagctattaacacaacctttgtaagtgtccccttaaccattcaagtagctgatcaggtctttgttgatgacgccagtctcgatattgaccaaatgatggaaaccatgtatgcaactgcagaagcttcaaaatcggcttgtccaagcccagatgactatttgcgagcatttgaaggtgccaaaaacattttcctagtaaccatcacaggtaccctttctggcagtcacaatagtgctcaactagcaaagaatatttatctggaagaccatcctgacactaagattcatgtgattgatagtttatctgctggtggtgaagttgacctactcgtagaaaaattgaatgacttgattgaccagggcttgtcttttgaagaagtggttgaagctatcaccgcctatcaagaaaaaactaagttgctctttgtcctagccaaagtcgataacttggtgaagaacggccgtttgagcaagcttatcggtacggtcgttggccttctcaacattcgtatggtcggaaaagctagtgaaactggaactctcgaattgctacaaaaagcaaggggatcaaagaaatcagttcaagctgcctatgatgagttagtaaaagctggatatgctggtggccgtattgtcatggcccaacgcaataacgaaaaatgttgtcaacaactctcagagcgaatccgtgaaaccttcccacaagcggatattaaaattctaccaacctctggtctctgcagtttctatgcagaagatggcggtttgctgatgggctatgaaattgattaa

SEQ ID NO: 142 - DNA, 1176 bp, Streptococcus pneumoniae
atgaaacattttgatactattgtcatcggtgggggacctgctggtatgatggctacgatttccagtaacttttatggacagaaaaccctcctcatcgaaaaaaatcggaaacttggaaaaaaattagctgggactggtgggggacgttgcaatgtgaccaacaatggtagcttagacaacctgctagctggaattcctggaaacggacgctttctttacagtgttttctcccagttcgataatcatgacatcatcaacttttttacagaaaatggtgttaaacttaaggtcgaagaccacggacgcgtctttccagccagtgacaagtctcggactattatcgaagctttggaaaagaaaatcactgaactaggtggtcaagttgctactcaaatagaaatcgtttctgttaaaaaagtagatgaccagtttgtccttaagtcagcggatcaaaccttcacttgtgagaaactcattgtcacaacaggtggtaagtcttatccttcgactggttcgactggttttggtcacgagattgctcgccattttaagcataccatcaccgatcttgaggctgctgaaagtcctttattaacagattttccacataaagccttacaagggatttctctggacgatgtgaccctaagttatggtaagcatgtcatcactcatgatttactctttacccactttggtttgtcaggtcctgctgccctacgcatgtctagctttgtcaaaggtggggaggttctctcactcgatgttttgcctcaactttctgagaaggacttggttacatttctagaagaaaatcgggaaaaatccttgaaaaacgctttaaaaaccttgttaccagaacgcttggccgaattttttgtacaaggatatcctgaaaaagtcaaacagctgactgaaaaggaacgagaacaacttgtccagtccattaaagaacttaaaattcctgtaactggaaaaatgtcccttgcaaagtcctttgttaccaagggtggagtcagtctcaaggaaatcaatcctaaaacccttgaaagtaagctggtacctggcctccactttgcaggcgaagttatggatatcaatgcccacacgggtggctttaacatcacttctgccctctgtaccggctgggtggcgggaagtctgcattatgattaa

SEQ ID NO: 143 - DNA, 456 bp, Streptococcus pneumoniae
atgaacagaagagaggcagtcgaatttgttaacatgtgtatgattaaaaacggagataaggtcctggtccaagaccgagttagtcccgactggtctggcattacttttcctggtggtcatgttgaacgtggcgaatcctttgtcgatgctgtcattcgtgaagtgaaagaagaaactggtctgatcatttccaaaccccaactctgtggtatcaaaaactggtatgacgacaaggattatcgttatgtcgtccttttttacaagacagaacactttactggtgaactccagtcttcagacgaagggaaagtttggtgggaggactttgaaaatctttctcatctaaaacttgcaaccgatgatatgtctgatatgcttcgtgtgtttctagaagaagatctcagtgaattcttttactacaaaaacggtgacgactggctttatgatttgaagtaa

SEQ ID NO: 144 - DNA, 519 bp, Streptococcus pneumoniae
ttgccccatttaactaggcagttggactatctaactcgcgaaaggcaacatctggataccttgatttccaccttgcaaaaaactattcaagaacaaaaaggagaaagaaaaatgaccattgaggaaaaattcacgggatttagctatcaagacaatcaaaaatatcaccaagaagcggtagagaaatatggtcaagaagtcatgggacaagcgctcgaacgccaaaaaggtcacgaagacgaggctacggccgcctttaaccaagtctttcaaactttggcacaaaatcttcaagttggtttacctgcaacagcaaccgaaaaccaagagcaagcagccaagctcttgcaagctattcgcacttatggatttgactgctctattgaggtattcggtcatatcggtaaaggttacgtctacaacccagagtttaaggaaaacattgacaagtttggttctggaacagcccagtacacgtcagatgccattgcggcttacgttcagacaaatgcagaataa

SEQ ID NO: 145 - DNA, 1470 bp, Streptococcus pneumoniae
ttgaaaatggttttcttgacagaccttagaaaacatgataggatagtcaagtctatcaatcaaacagaaggctatttgacaactcaagtagctttttcttattttgaaaaaggagatcagagtttaactatgtcagaaaaatcacaatgggggtcgaaacttggctttattctagcatctgctggctcggtcatcgggcttggttccgtttggaagtttccctacatgactgctgctaatggcggtggaggctttttactaatctttctcatttccactattttaatcgatttccctctcctgctggctgagtttgcccttggccgtagtgctggcgtttccgctatcaaaacctttggaaaactgggcaagaataacaagtacaactttatcggttggattggcgcctttgccctctttatcctcttatctttttacagtgttatcggaggatggattctagtctatctaggtattgagtttgggaaattgttccaacttggtggaacgggtgattatgctcagttatttacttcaatcatttcaaatccagccattgccctaggagctcaagcgacctttatcctattgaatatcttcattgtatcacgtggggttcaaaaagggattgaaagagcttcgaaagtcatgatgcccctgctctttatcatctttgtcgtcatcatcgaacgctctctcagtttgccaaatgccatggaaggggttctttacttcctcaaaccagatttttcaaaactgactagcgctggtctcctctatgctctgagacaatctttctttgccctctcactaggggttacagccatgttgacctatgcttcttacttggacaagaaaaccaatctggtccagtcaagaatctccatcgtagccatgaatatctcggtatccatcatggcaggtctagccattttccaagctcggtcccccttcaatatccagtctgaagggggaccgagcttggtctttatcgtcttgcctcaactctttgacaagatgccttttggaaccattttctatgtcctcttcctctttgcgactgtcacttcttctgtcgttatgctggaaatcaatgtagacaatatcaccaatcaggacaacagcaagcgtgctaaatggagtgttattttaggaattttgacctttgtctttggcattccttcagccctatcttacggtgtcatggcggatgttcacatttttggtaaagccttctttgacgctatggacttcttggtttccaatctcctcatgccatttggagctctcttcctttcactttttacaggctatatctttaaaaaggctcttgcaatggaggaactccatctcgatgaaagagcatggaaacaaggactgttccaagtctggctcttccttcttcgtttcgtcattccaatcatcatctgtggtcttcatcgcccaatttatgtaatcaaaaggacttga

SEQ ID NO: 146 - DNA, 945 bp, Streptococcus pneumoniae
atgtcagaaccattatttttacaatcagttatgcaagaaaaaatctggggtggagccaagctacgtgatgagtttggctacgatatcccaagtgaaaaaatcggagaatattgggccatctcagcccatccaaatggagtctctaaagttgccaatggtcgttacgagggaacagatcttgctactttgtatgcggaacaccgtgaattatttggcaatcgtccagaacctgtatttccacttttgaccaagatcctcgatgccaacgactggctcagtgtccaagttcacccagacgatgcttatggactcgagcatgaaggcgaactcggaaaaacagaatgctggtacattatcgcagcggatgaaggttcagagattatctacggtcacaatgccaagtcaaaagaagaactccgccagcaaatcgaggataagaactgggatgcgctgttgacaaaagtgccagttaaagcaggagatttcttctatgtaccaagcggtaccatgcacgctatcggggcgggtatcttgattcttgaaacccagcagtctagcgataccacttaccgtgtctatgactttgaccgtaaggatgacaagggcaatttacgtgaacttcaccttgaaaaatctatcgatgtcttgaacattggtgaacctgcaaatagccgtccagtgacaatcaaagcagatgatctacgttccactctccttgtatccaatgatttcttcgcagtttacaaatgggaaattactggaaaagttaactttgaaaagacagctgactacagcttgttgagtgtcttggctggtcaaggtcaactaactgttgacgggaaaaactatccaatccaaaaagggagacactttatcctaccaagtgatgttgaatcttggactctagaagggcaagatttagaattaattgttagtcatccataa

SEQ ID NO: 147 - DNA, 402 bp, Streptococcus pneumoniae
atgtcattgatagcaatggtgcaagcatcgggtagagcacatttgtttactatttttataaaatcttctccctgctttataagatgtaaaaaagagttcaattcgaactctttttttgctataatgaggggagaaaaatcagacaggagatcgacatgtcagaaccattatttttacaatcagttatgcaagaaaaaatctggggtggagccaagctacgtgatgagtttggctacgatatcccaagtgaaaaaatcggagaatattgggccatctcagcccatccaaatggagtctctaaagttgccaatggtcgttacgagggaacagatcttgctactttgtatgcggaacaccgtgaattatttggcaatcgtccagaacctgtatttccacttttga

SEQ ID NO: 148 - DNA, 330 bp, Streptococcus pneumoniae
tttagtattatcgtagaaaatggactcggtgctatggatacaccggatgagaatggttatgtagcagataactatcggattacttacttagaggcccacatcaaggccatgcgagatgccatttaccaagacggggttgacttgcttggttatacgacttggagctgtatcgatccggtttcagctggcacaggggaaatgaataagcgctatggctttatctatgtagatcgagataatgtaggaaacggagctctcaaacgtagcaagaagaagtccttctattggtacaaggatgtcattgatagcaatggtgcaagcatcgggtag

SEQ ID NO: 149 - DNA, 267 bp, Streptococcus pneumoniae; identical to SEQ ID NO: 66

SEQ ID NO: 150 - DNA, 654 bp, Streptococcus pneumoniae
atggttggcgaaatattatgccacgtccagaacatcctaggaaagcagacgctcaaaccattgtcgcgtctaaaaataaaatctcaattcaagaaggcaagaaagcgctttaaatatagtagacgttttcgtaaggttcgcttgatgtaccaagatgaggctggtttcagtagaatcagtaaactgggatcttgttggtctccaataggagtagatccacatgtccatagtcactatatacgagaatttcgctattgttatggagctgttgatgcctatacaggcgaatcatttttcttaatagctggtagatgtaatactgagtggatgaacgcctttttagaagagctttcacaagcttatccagatgattatcttttactcgttatggacaatgctatatggcataaatcaagtatcttaaagattccgactaatattggttttgcatttattcctccatacacaccagagatgaaccccattgaacaagtgtggaaagagattcgtaaacgtggatttaagaataaagcctttcgaattttggaagatgtcatgaatcaactccaagatgtcatacaaggattggagaaggaggtgataaagtccatcgttaatcggagatggactagaatgctttttgaaagcagatga

SEQ ID NO: 151 - DNA, 348 bp, Streptococcus pneumoniae
atgaatttaaatcaattagatattatcgtttcaaatgttccccaagtctgtgctgacttggagcatattttggataaaaaggcagattatgctgatgatggttttgctcagtttacgattggtagtcactgccttatgttgtcacaaaatcatttggttcctttggaaaactttcagtcaggaatcattattcatatcgaggttgaggatgtagaccagaactacaaacggttgaacgagcttggtataaaggttttacacggaccaactgtaaccgattggggaacagagtccttattagttcaaggacctgctggtctagtgcttgatttttatcgtatgaaatag

SEQ ID NO: 152 - DNA, 1776 bp, Streptococcus pneumoniae
atgactcaagggaaaattactgcatctgcagcaatgcttaacgtattgaaaacatggggcgtagatacaatctacggtatcccatcaggaacactcagctcattgatggacgctttggctgaagacaaagatatccgcttcttacaagttcgccacgaagagacaggtgctcttgcagcggttatgcaagctaaattcggcggctcaatcggggttgcagttggttcaggtggtccaggtgcgactcacttgattaacggtgtttacgatgcagctatggataacactccattcctagcgatccttggatcacgtccagttaacgaattgaacatggatgctttccaagagcttaaccaaaacccaatgtacaacggtatcgctgtttacaacaaacgtgtagcttacgctgagcaattgccaaaagtaattgacgaagcctgccgtgctgcaatttctaaaaaaggtccagctgttgttgaaattccagtaaacttcggtttccaagaaatcgatgaaaactcatactacggttcaggttcatacgaacgctcattcatcgctcctgctttgaacgaagttgaaatcgacaaagctgttgaaatcttgaacaatgctgaacgcccagttatctatgctggatttggtggtgttaaagctggtgaagtgattactgaattgtcacgtaaaatcaaagcaccaatcatcacaactggtaaaaactttgaagctttcgaatggaactatgaaggtttgacaggttctgcttaccgtgttggttggaaaccagccaacgaagtggtctttgaagcagacacagttcttttccttggttcaaacttcccatttgctgaagtttacgaagcattcaagaacactgaaaaattcatccaagtcgatatcgacccttacaaacttggtaaacgtcatgcccttgacgcttcaatccttggtgatgctggtcaagcagctaaagctatccttgacaaagtaaacccagttgaatcaactccatggtggcgtgcaaacgttaagaacaaccaaaactggcgtgattacatgaacaaactcgaaggtaaaactgagggtgaattgcaattgtatcaagtttacaatgcaatcaacaaacatgctgatcaagacgctatctactcaatcgacgtaggtaacactactcaaacatctactcgtcaccttcacatgacacctaagaacatgtggcgtacatctccactctttgcgacaatgggtattgcccttcctggtggtatcgctgctaagaaagacaatccagatcgccaagtatggaacatcatgggtgacggagcattcaacatgtgctacccagacgttatcacaaacgttcaatacgaccttccagttatcaaccttgtcttctcaaatgctgagtacggcttcatcaagaacaaatacgaagatacaaacaaacacttgtttggtgtagacttcacaaacgctgactacgctaaaattgcggaagctcaaggagctgttggattcacagttgaccgtatcgaagacatcgatgcagttgttgcagaagctgttaaattgaacaaagaaggtaaaactgttgtcatcgatgctcgcatcactcaacaccgtccacttccagtagaagtacttgaattggatccaaaacttcactcagaagaagctatcaaagccttcaaggaaaaatacgaagcagaagaactcgtaccattccgtctcttcttggaagaagaaggattgcaatcacgcgcaattaaataa

SEQ ID NO: 153 - DNA, 201 bp, Streptococcus pneumoniae
gtaagaaaacctttcatcgaattctactcaatcttttctgggcttttatctacaatgttgtcgggaattccgattgcagcaggagtcttttcaggtgttggactggctctcaacccagaattggcaggtctagccatggcctttagttctgtatctgttctgaccagttcccttctgttaaattttagtaaaatagactaa

SEQ ID NO: 154 - DNA, 2199 bp, Streptococcus pneumoniae
gtggagactatgacagaaattgtgaaagcaagcttagaaaatggcattcaaaaaatccgtatccgagctgaaaaaggctatcatccagcccatatccagcttcaaaagggaattccagctgagattacctttcatcgtgctactccttcaaactgttataaggaaattctgtttgaagaagaaggtatcttggaaccaatcggcgtagatgaggagaaagtcattcgttttacacctcaagaattagggcgacatgaattttcttgtggcatgaagatgcaaaagggaagctatatagtcgttgagaagactcgaaaatctctatctctcctgcaacgtttttggattactagtatctttactgtgcctcttgtgattctcatgattgggatgttgacaggtagcattagtcatcaagtcatgcattggggaacctttctagcaacaacgcctattatgttagttgcaggtaagccatatatccagagtgcttgggccagttttaaaaagcacaatgccaacatggataccttggttgcgctgggaactctagtggcttatttctatagcctagttgctctctttgctggtctccctgtttacttcgaaagtgctggatttatcctctttttcgttcttttgggagcagtttttgaggaaaaaatgagaaaaaatacgtcccaagctgtggagaaattactggacttgcaagctaaaaccgcagaagtcttgagtgatgatagttatgtccaagttcctttggaacaagtcaaggtaggcgacctgattcgagtgcgtcccggtgaaaagattgctgttgatggtgtcgtagtagaaggtgtctctagtattgacgaatccatggtgacaggtgagagtctgcctgtggacaagacagttggagatactgtcattggctcaaccatcaatcatagtggaacgcttgtctttagagcagaaaaagttggctcagagactgttttggctcagattgtggattttgtgaagaaagctcagacaagtcgtgcgccgattcaggacttgacggataagatttcagggatttttgtcccagtagttgtcattttaggaatcatgaccttttgggtttggttcgtcttgctcagggatagtgtggtcgtgcttggagctagctttgtgtcctctcttctctacggagtggcggttttgattatcgcctgtccttgtgccttgggacttgcaacaccgacagcccttatggtggggacaggacgtagtgccaagatgggggttctcctcaaaaatggaactgtcttacaggaaatccagaaagttcaaactcttgtctttgataagaccgggactttgacggaagggaaacctgtggtaacagatatcatcggcgacgaagtagaagtgtttggattggcagcctccttggaagatgcttctcaacacccactggctgaggctatcgttaagcgagcgagtgaagctggacttgagtttaaaactgttgaaaattttcaggccttgcacgggaaaggtgtttcagggcgaatcaatggaaaacaagttttacttggaaatgctaaaatgctggatggcatggatatttctaatacttatcaagataaactagaagaactagaaaaagaagctaagacagttgtgttcttagctgttgacaatgaaatcaaaggcttgcttgctttgcaagatattcctaaggaaaatgctaagctagccatcagtcagctaaaaaaacgtggtctccgaacagtcatgctgacaggagacaatgctggtgtggcgtgtgctattgcagatcaaatcggaattgaagaggtcattgcaggcgtcttgccagaagaaaaagcccatgaaatccataaactgcaacagtcagggaaagtagcctttgttggggacggtatcaatgacgctcctgcccttagtgtagcagatgtggggattgctatgggagctggaacagatatcgccatcgagtcagcagatttggtgttgacaaccaataatcttttaggagtggttcgtgcctttgatatgagtaagaaaacctttcatcgaattctactcaatcttttctgggcttttatctacaatgttgtcgggaattccgattgcagcaggagtcttttcaggtgttggactggctctcaacccagaattggcaggtctagccatggcctttag

SEQ ID NO: 155 - DNA, 255 bp, Streptococcus pneumoniae
aaggttttcttactcatatcaaaggcacgaaccactcctaaaagattattggttgtcaacaccaaatctgctgactcgatggcgatatctgttccagctcccatagcaatccccacatctgctacactaagggcaggagcgtcattgataccgtccccaacaaaggctactttccctgactgttgcagtttatggatttcatgggctttttcttctggcaagacgcctgcaatgacctcttcaattccgatttga

SEQ ID NO: 156 - DNA, 183 bp, Streptococcus pneumoniae
atggttgagccaatgacagtatctccaactgtcttgtccacaggcagactctcacctgtcaccatggattcgtcaatactagagacaccttctactacgacaccatcaacagcaatcttttcaccgggacgcactcgaatcaggtcgcctaccttgacttgttccaaaggaacttggacataa

SEQ ID NO: 157 - DNA, 372 bp, Streptococcus pneumoniae
atgttaaatagtattgtaaccattatttgtattgcccttatcgcgtttatcttgttttggtttttcaaaaagcctgaaaaatctggacaaaaagcccagcaaaaaaacggataccaagagattcgagtggaagtcatgggaggctatactcctgagttgattgtcctcaagaaatcagtgccagcccgcattgtctttgaccgcaaggatccttcaccatgtctggatcaaattgtttttccagattttggtgtacatgcgaacctgccaatgggggaagagtatgtagtggaaatcacgcctgaacaggctggagagtttggctttgcttgtggtatgaacatgatgcacggcaagatgattgtagagtag

SEQ ID NO: 158 - DNA, 426 bp, Streptococcus pneumoniae
ttgacaaatgtagattttggaggtatggtaatgcagatttcagatgcagaatggcaggtcatgaagattatttggatgcagggggagcagaccagtacagatttgattagggttttggcagagcggttcgactggtccaagtcaaccattcaaactcttttggctcgtttggttgagaaagagtgtctgactcggaaaaaagaaggcaagttctttgtttattcagcccttttaactctagaccaaagtcgggatttacttgtccaagatatcaaagacaaggtttgttcccgtaggattaggaatttgttggctgacttgattgtagaatgtgaatttactcagactgacttggaagacttggaagctgtgatttcagagaagaaatcaagtgctgtaacagaagtaagatgtaattgtatgtaa

SEQ ID NO: 159 - DNA, 807 bp, Streptococcus pneumoniae
atgacttatttacccgttgctttgaccattgcagggactgaccctagtggtggtgctggcattatggcagatttaaagtcattccaagcgagagatgtctatggaatggctgttgtaaccagtcttgtcgctcaaaataccagaggtgttcagctaatcgagcacgtttctcctcaaatgttgaaagcccaattggagagtgtcttttctgatattccacctcaggctgtaaaaactggaatgttggctactactgaaatcatggaaatcatccaaccctatcttaaaaaactggattgtccctatgtccttgatcctgttatggttgctacaagtggagatgccttgattgactcaaatgctagagactatctcaaaacaaacttactacctctagcaactattattacgccaaatcttcctgaagcagaagagattgttggtttttcaatccatgaccccgaagacatgcagcgtgctggtcgcctgattttaaaagaatttggtcctcagtctgtggttatcaaaggcggacatctcaaaggcggacatctcaaaggtggtgctaaagatttcctctttaccaagaatgaacaatttgtctgggaaagcccacgaattcaaacctgtcacacccatggtactggatgtacctttgctgcagtgattactgctgaactagccaagggcaagagtctttaccaggcagttgataaggccaaggcctttatcacaaaagctattcaagatgcccctcaactcggtcatggttctggtccagtcaaccatacaacttttaaagattaa

SEQ ID NO: 160 - DNA, 633 bp, Streptococcus pneumoniae
atgaatagagaagcgcttagactatatctggtaaccaatcgctatcaagattccgtggaaagctttcttgcaaaagttgagacggcctgccgttcaggggttaccatagtccaattgcgagaaaaaaatctcacaaccaatcaatattatcaactggcaaaacaagtcaaggaaataacagatgcttatcaggtccccttgataatcgatgatcggttggatgtttgtcttgcggttgatgctgctggtctgcatattggagatgacgaactcccagtttcggttgcccgacaagtcttgggtcctgaaaaaatcctcggtgtcaccgctaaaacggttaaaagagctctggaagcggagaaatcaggtgcagattacttggggacaggagccatttttccgacaaccaccaaggaaaatgcacccatcaccctgatttcaaccttgaaaacaatttgccaaacggttgccattccaatagttgctattggcggcttgacttcggagaatattgatcagcttatgggcactggcatagctggtgtagctgttgtacgtgatttgatgcaagcagaagatattgaggcaaaaacgcaagcctttttaacaaagttgcatgacattctttcctaa

SEQ ID NO: 161 - DNA, 807 bp, Streptococcus pneumoniae
atgatgcaggcattgacaaatccttttcctataggctctagttccctcattcactgtatgaccaatgagatttcttgtgagatgctggcaaatgggattttggctctgggatgcaaacctgtcatggcagatgatccccgtgaagttcttgattttactaagcaaagccaggctctcttcatcaatttggggcatttgtcagctgagaaggaaaaagcaatccgcatggcagctttgtatgcaaaccaatcttctctcccgatggtagtagatgcggttggcgtaacgacttcatccattcgtaagagcttagttaaagaccttttagactatagacctacggtccttaaaggaaacatgtcagaaattcgaagtcttgttggattaaagcatcacggcgttggggtcgatgcgagtgctaaagatcaagaaacggaggatttgcttcaagtcttgaaagactggtgtcagacctatcctggtatgccattcttagtcacaggtcccaaggaccttattgtttcggagaatcaagttgctgtacttgagaatggctgtactgaattagactggataacagggacaggagacttggttggagccttaacagctgtttttctcagccaaggaaagactggttttgaagcttcttgcttagcagtctcttatctcaatatcgctgctgagaaaatagttgttcaaggaatgggattggaagaatttcgttaccaagtactcaatcagctttcgctcctaagaagagatgaaaattggctagataccatcaaaggagaggtttatgaatag

SEQ ID NO: 162 - DNA, 525 bp, Streptococcus pneumoniae
atgagaaagcaccaactacaagttcacaaattgaccattttatctatgatgattgcccttgatgtagtccttacacctatctttcggattgagggaatggcaccgatgtccagtgtagtcaatattctagcgggaatcatgatgggacctgtttatgccttggctatggctacagtgacagcctttatccgtatgacgactcaagggattccgcctttagctctcacaggagcgacttttggagcccttctagcaggtctcttttataagtacggtcgaaaattttacttttctgccttgggagaaattgtgggaacaggtattattggttctattgtttcctatcctgttatggtgctctttacaggatcggctgctaagcttagttggtttatctacacgcctcgatttttcggagcaaccttgattggtacagcgatttcctttattgcatttcgatttttaatcaagcaggaattctttaaaaaagtgcaaggatatttctttgctgaaaggatagaatga

SEQ ID NO: 163 - DNA, 693 bp, Streptococcus pneumoniae
atggaatttacagatattgcgatggaattatccaagaaagcttggcaggcttcctttcatcatccctttattttacaattacaagaggggaatttagaacctgccattttccgctattacctgattcaggatgcctactatctgaaggccttctcagaaatctatcatcttttggctgataagacttcaaaccaagagatgaaaagactcttgaaacaaaatgctcagggtttagtggagggtgagttatttattcgccaacaatttttcaaggaaatggaaatcagcgaccaggaaatggagcaacatccaattgctccaacctgttatcattacatttctcatatttataggcaatttgcagaaccgaacttagccatcgcttttgcaagcttgcttccttgtccttggttataccatgatataggcaaatcacttaatcttaaaccatcaccaaatcctctctatcaacaatggattgaaacttatattacggatgagttagagcaacagatcagagaggagggagcactggtcaatcagctctatcgagaaagtgatgagacagataagcaaaaaatgctagatgccttccacatcagtgttcatatggaagccaagttttgggagatggcttaccaacaccagacatggaagagcgatttacagtctttagaaaaaggagaagaatag

SEQ ID NO: 164 - DNA, 651 bp, Streptococcus pneumoniae
atggtcaaagtagcaacccagacaccgattatcagtctcttcttgctgattttatccttggaaacatctttcattccttcgattgctctgaatctttcggtagtcgcattttgtattctctttatgctctattaccgtcgatttaaaatgttagcttggatgatcatacttgccattttaccatcttttgccaactactgggcagttcagttacacggagatgcttcacaggcagtcatgcttggaacgagggcctttgtgacagtttgtatcggccttgtctttgtttcctctatttcactaaaagagcttctcttgtacttggctcaaaaggggctatcacgctcttggtcctatgccttgattgtggtattcaattcctttcctctcattcagcaagaaatcaagtccctcaaagaagcttgcctattacgtggtcaagaactgtatttttggtcgcccttgatttacagtaaggttctgatgacagtctttaggtggcgccatctttacctgagagctctgtctgctcatggatatgacgaacatgcacagttgaagaatagctatcggactttttatattcctaaaaaaacaaaattaatctacctgcttttctttttattgcttcaaaccagtctatttttataa

SEQ ID NO: 165 - DNA, 1386 bp, Streptococcus pneumoniae
atgggtctggaactacgagcgattcagtccccaatcttctctgagccgtttgattttacttttcatgcgcaagcctttaccttgttagttgggagcagtggttcaggaaaatccagcctttttcaagtcattgcccaagtcagttctcttccctatagtggtcaagtcctgatagatgggagcgaggtcagtcagctttctatcatcgcacgtgtccagaaggttggcattctctttcaaaatcccaatcatcaatttaccatggagaacttgtttgaggagctgattttcaccttggagaatatcggctatcaccttcaggaaattgattctaaaatagcagaggttgtccagcaatgtcgttgcgaggcaatcttacaccgtcccattcatcacctatcaggtggggaaaagcaaaaagcagcgctggctgtcctctttgccatgaatcctagggtctatctcttggatgagcccttcgcttctattgaccgcaagagcagaatcgagatattggagattctaaaagagttggctcttgatgggaagacagttattttgtgcgaccatgatttatctgactataaagcctatatcgaccatatggttgagctaagagacggaaaactaagggaagtgtttcaaatcccttcctatgagatgacacaggttgcttcaaaggaagttgcttctagcccggaactattccatatgaaccgtgtgactggtgagcttggtaatcgccccctcttttcaattgctgatttcacattctatcaagggatttcctgtatcctgggtgacaatggtgtcgggaaatcaaccctctttcgctctattcttcaatttcaaaagtataaggggcgcattgcatggaaggggacagtcctgaaaaagaaaaagagtttgtaccgtgatctgacgggtgttgttcaggaagctgagaagcagtttatccgagtcagtctgcgagaggagcttcgattagatggacctgattctgaaagaaatcagcggatttttcaagctttacgatattttgatttggagcaggcagtcgataagagtccctatcaattaagtggtggtcagcaaaaaattcttcagctcctgaccatcttgaccagtaaggcttccgtgatcttgctagatgaaccttttgcaggtttggatgatagagcctgccattatttttgcaagtggattgtggaggagaggaatcaaggaagaagttttctgctcattagtcatcgtttagaccctttgatttctgtggttgattattggattgagatgactagtcaggggctcagtcatgtgaaagaagtgaccattaccaaaccacttacatctcagagtagcaatacccaaggggaggtgagatag

SEQ ID NO: 166 - DNA, 561 bp, Streptococcus pneumoniae
atgttgaaaaaatggcagttaaaagatgttatcttgcttgctttcttgtctatcttttttggtggggttttcgttggttcaggatatgtgtataatattctcagtctactcttaacacctcttggtttgcaggcctttgccaatgaaatcctcttcggtctctggtgtatggctgcgcccattgctgccatctttgttccgagagtcggaagtgcaacgattggagaagtgctagctgcgcttgctgaagtcctttatggtagccaatttggtctaggagctcttttgtctggcttggttcaaggtttgggaagtgaatttggttttatcgtaactaagaatcgctatgaaagttggctctctctaactgctaatagtattggggttacgcttgttagctttgtctatgaatacattaagttaggttactacgccttttcccttccgtttgtcctttccttacttgtggtacgttttatttctgtttatttcttctgtaccatcttggttcgtgccattgtcaaactctatcatcagtttgcaactggaggaaaagcatag

SEQ ID NO: 167 - DNA, 225 bp, Streptococcus pneumoniae
aaccaaattcacttcccaaaccttgaaccaagccagacaaaagagctcctagaccaaattggctaccataaaggacttcagcaagcgcagctagcacttctccaatcgttgcacttccgactctcggaacaaagatggcagcaatgggcgcagccatacaccagagaccgaagaggatttcattggcaaaggcctgcaaaccaagaggtgttaagagtagactga

SEQ ID NO: 168 - DNA, 207 bp, Streptococcus pneumoniae
ttgcactcacaaagacagcagatctttcttttgcaaaaaacaaatgacctgtttgatgaattagccattcaagctgaatctagacatagctttttaaaaaaggaaaatcctacttacttagaatccaaggatagatatctattgttcactcatttcccgaacagttttttctatattttttgcatacgatattgccgaaatgattga

SEQ ID NO: 169 - DNA, 630 bp, Streptococcus pneumoniae
atgtttcataaagaattactaaaactatattttatttgtggaacgactacttgccaaggaaaaaatctatatacagtcgttgaggaagccttaaaaggtggtataaccttatttcaatttcgagaaaaaggtgagagtgctttagaaggcttagaaaaacttgagctagctatccaaattaaagaactttgtaaaaaatacaatgttccatttatcgttaatgacgatatagatttagcaatggaaattgacgccgatggcgtacatgttggtcaagatgatattggtgttgatgaaattagaaaattgatgccagataaaataattggtctttctataagaaacgaagaagaatttcaacaatcaaaagttgaatatgtagattatgtaggtgttgggcctgtatttgatacccagtcaaaagatgatgctggtggtgctataggttatgaaggtcttgaattgatgagaaaactattgccacaaatgcctttagttgcaattggtgggatacagacgaaacatattaaagacattataaagaccaatgttgacggcgtttcaatcatttcggcaatatcgtatgcaaaaaatatagaaaaaactgttcgggaaatgagtgaacaatag

SEQ ID NO: 170 - DNA, 804 bp, Streptococcus pneumoniae
gtgaaaaggaaggatttcaatatgacaagtttaaaattattaaaagaaaaagcaccattggtcatttgtataaccaatgatgtagtaaaaaatttcacagcaaatggattagtagcactgggcgtctcaccagccatgagtgagtttccagcagatttagaggatttgttaaagtatgctggtggtttattaataaacataggaacattgacagatgaaaattggaaattataccaagctgctctgaaaattgcggagaaatataatgtcccagcagttttagatcctgtagcctgtggagcaggagaatatagaaaaaaagtagcagatgatctaatcaacaattataaactagcagcgattagaggaaatgctggcgagattgcctctttagtaggaatagatgtggcatctaaaggagtagatagtgcgggcgtagataatattgacgaaattgctctagcagcaaatgagaagttcaatattccaatagtagtaacaggtgaagtggatgccattgctgttaatggagaagtggtaacgattcataatggtagtgctatgatgccgaaagtcattgggacaggatgcttattaggagctgtagtagcaagctttatcggactagaaaaaggtcaagaattgaaatcattagaaacagcaatgttagtttacaatatcgctggagaaatggcagaaaaacgtccaaatggacatcttcctgggacatttaaagttgaatttataaatgccttatacgagattacagatgaagatgtaaaggaattcaaaagagtgaagtaa

SEQ ID NO: 171 - DNA, 411 bp, Streptococcus pneumoniae
ttgttgattagatcatctgctactttttttctatattctcctgctccacaggctacaggatctaaaactgctgggacattatatttctccgcaattttcagagcagcttggtataatttccaattttcatctgtcaatgttcctatgtttattaataaaccaccagcatactttaacaaatcctctaaatctgctggaaactcactcatggctggtgagacgcccagtgctactaatccatttgctgtgaaattttttactacatcattggttatacaaatgaccaatggtgctttttcttttaataattttaaacttgtcatattgaaatccttccttttcactttatacgatctactgatttcgatttatctctatctttcgttaagaaatttttttcatttacgttga

SEQ ID NO: 172 - DNA, 246 bp, Streptococcus pneumoniae
ttgaatgatttatactcaatgaaaatcaaagagcaaactaggaagctaaccgcagattgctcaaaacactgctttgaacctgtagataagactgacgaagtcagctcaaaacactgttttgaggttgtggatagaactgacgaagtcagtaaccatacctacggcaaggtgaaactgacgtggtttgaagagattttcgaagagtattacctcatcaaatttgtaaatatcatgagccttctctag

SEQ ID NO: 173 - DNA, 225 bp, Streptococcus pneumoniae
gtatggttactgacttcgtcagttctatccacaacctcaaaacagtgttttgagctgacttcgtcagtcttatctacaggttcaaagcagtgttttgagcaatctgcggttagcttcctagtttgctctttgattttcattgagtataaatcattcaacgtaaatgaaaaaaatttcttaacgaaagatagagataaatcgaaatcagtagatcgtataaagtga

SEQ ID NO: 174 - DNA, 669 bp, Streptococcus pneumoniae
atggaaacacaagactatgcatttcagccaggtttgactgttggagaattattaaaaagcagtcagaaggattggcaggctgcaatcaatcatcgttttgttaaggaactttttgcggggacaattgagaataaggtcttaaaggactatctgattcaagattatcacttctttgatgccttcttatccatgctgggtgcctgcgtagctcacgcagataaacttgaatccaagcttcgttttgccaagcaactaggctttcttgaagcagatgaagatggttatttccaaaaggcttttaaagagttaaaagtagcagagaatgactatctagaagtgactttgcaccctgtaacaaaagcctttcaggatctaatgtattcggcggtggcttcatcagactatgcccatcttttggtcatgctggtcattgcagaaggtctctatttagactggggttctaaagatttggctttacctgaagtctatattcattcggaatggatcaatctccacagaggtcctttctttgcagagtgggttcaatttctggttgacgaactcaatcgtgtcggtaaaaatcgagaagatttgacagaacttcagcaacgctggaatcaagcagtcgctttagaattagctttttttgatattggttacgatgtctag

SEQ ID NO: 175 - DNA, 1137 bp, Streptococcus pneumoniae
atgtcatacaaaacaagcaatgcagaaggtcatgtagacttcatcaatacctatgatttggagccaatggcgcaacaagttattcctaaagcagcatttggctatatcgctagtggggcggaagatactttcactttaagagagaatatccgcgcctttaaccacaaactcatcgttcctcatacactttgcgatgttgaaaatccaagtacagagattgaatttgcaggtgaaaaactatcttcaccaatcattatggcgcctgttgcggctcataaattggcaaatgaacagggggaagtggcgactgcgcgtggtgtgcatgagtttggttctctttatacaaccagctcttactctactgttgaccttccagagatttctgaagcccttcaagggacaccccattggttccaattttactttagtaaggatgacggtatcaaccgccacatcatggaccgtgtgaaggctgaaggttataaagcgattgtcttgacggcagatgctactgtaggggggaatcgtgaagtggataagcgtaatggttttgtcttcccagttggcatgccgattgttgaagaatacctgccagaaggtgctggtaaatcaatggactttgtttacaaatcagctaaacaacgcttgtctccacgcgatgtagaatttatcgctgaatactctggtcttcctgtgtatgtcaagggaccacaatgccgtgaggacgttgaacgttcacttgctgcaggagcttctggtatctgggtaaccaaccacggtggtcgtcaaatcgacggtggaccagctgcctttgactcgcttcaagaagtggcagaagcagttgatagacgtgtgccgattgtctttgactctggtgttcgtcgtggtcaacacgtctttaaagccttggcttcaggagcagacttggtagctattggtcgccctgttatttatggcttggctctcggtggtagtgtcggtgtgcgtcaagtctttgaacacttgaatgcggaattgaagacagttatgcaattgtctggagctcagaccattgaagatgtcaaacactttaagctccgtcacaatccatacaacccaaccttcccagttgaccctcgtgacttaaaattgtattga

SEQ ID NO: 176 - DNA, 1491 bp, Streptococcus pneumoniae
atgtctacagaacatatggaagaactaaatgaccagcagattgttcgccgtgaaaaaatggctgcgctccgcgaacaaggaatcgatcctttcggaaaacgttttgaacgtactgcaaattcacaagaattaaaagataaatatgccaacctcgataaagaacaattacacgataaaaacgaaacagctactatcgcaggacgcttggtaaccaaacgtggtaaaggaaaagttggttttgcccaccttcaagaccgcgaaggccagattcagatctacgttcgtaaggatgctgtcggtgaagaaaactacgaaatcttcaaaaaagcagaccttggtgacttccttggtgtcgaaggtgaagtgatgcgtacggatatgggagaactctctatcaaggcaacccacatcacacacttgtctaaggctcttcgtcctcttcctgagaaattccatggtttgacagatgttgaaacaatttaccgtaaacgttaccttgacttgatttctaatcgtgaaagctttgaacgctttgtcactcgttcaaaaatcatctctgaaatccgtcgttaccttgaccaaaaaggattccttgaagtggaaacacctgttcttcataatgaagccggtggtgctgctgcccgtccatttatcacccaccacaatgcccaaaacattgacatggtgcttcgtatcgcgactgagcttcacttaaaacgccttatcgtgggtggtatggaacgtgtctatgaaattggccgtatcttccgtaacgaaggaatggacgctactcataaccctgagtttacttctatcgaagtttaccaagcttatgcagacttccaagacatcatggacttgacggaaggcattatccaacacgctgctaaatcagttaagggcgatggcccagtcaactaccaaggtactgaaatcaagattaacgaaccatttaagcgtgttcatatggtggatgctatcagagaaattactggtgtcgatttctggcaagacatgactttagaagaagctaaagctatcgctgctgagaagaaagttccagttgagaaacactacactgaggttggtcacatcatcaatgccttctttgaagagtttgttgaagaaactttaatccaaccaacctttgtctatggacatccagtagctgtatctccactcgctaagaaaaatcctgaagaccaacgctttactgaccgtttcgagctctttatcatgactaaggagtacggtaatgcctttactgaactcaacgacccaatcgaccaacttagccgttttgaagcccaagctaaagccaaagaacttggtgatgatgaagcgacaggaatcgactatgactacattgaagctcttgaatacggtatgccaccaacaggtggtttgggaatcggtatcgaccgtctctgcatgctcctcactgatacaacaactatccgtgatgtattgctcttcccaacaatgaaataa

SEQ ID NO: 177 - DNA, 681 bp, Streptococcus pneumoniae
ttggattggtccattgttgaacaatatctaccactatatcaaaaggcattctttctgaccttgcatattgcagtttggggaattttgggatcctttctgctcggtttaatcgttagtatcatccgacattatcgaatccctgttttggcgcaagtagcgacagcctacattgaattgtcacgtaatacgccccttttgattcaactcttctttctctacttcggtcttccccgaatcgggattgtcctatcttcagaagtctgtgcaacgcttggccttgtctttttaggaggctcctatatggcagaatctttccgaagtgggctggaagccatcagtcaaacccagcaggagattggcctcgctattggtctgacacctctacaggtctttcgctatgtggttcttccgcaagcaacagcggtggcactcccctcctttagtgccaatgtcattttccttatcaaggaaacctctgttttctcagcagtggctttggccgacctcatgtacgtcgccaaggatttgattggtctctactatgagacagacattgcgctagctatgttggtagttgcttatctgatcatgctgctacccatctcactggtctttagctggatagaaaggaggacccgccatgcaggattcgggaatccaagtactctttcaaggaaataa

SEQ ID NO: 178 - DNA, 381 bp, Streptococcus pneumoniae
atgcaggattcgggaatccaagtactctttcaaggaaataatctcctgagaatcttacaggggttgggcgttacgattgggatatccatcctgtctgtcctcttatccatgatgttcggaacagtcatgggaatcatcatgacctcccattctagaatcatacgatttttaacacgattgtatctggaatttatccgtatcatgccccagctggtgctactcttcatcgtttactttggcttggctcgaaactttaatatcaatatctcaggtgagacttcagctattatcatttttaccctctggggaacagctgaaatgggagacttggtacgtggagctatcacttctctccctaaacatcagtttgaaagtggatag

SEQ ID NO: 179 - DNA, 288 bp, Streptococcus pneumoniae
ttgactaatgttcaactttactaccacatcatcatcccacaagtcttaagaagactgctaccgcaggctatcaatcttgtcactcggatgattaaaaccacttcattagttgttttgattggggttgtggaagtgaccaaagttggacaacaaatcatcgatagcaatcgcctgaccatcccaactgcttcattttggatttatggaaccattctagtcttatatttcgcagtttgctaccctatttccaaactatccactcacttagaaaaacattggagaaactaa

SEQ ID NO: 180 - DNA, 213 bp, Streptococcus pneumoniae
atgtctgaaactatcttagaaatcaaggaactaaaaaaatccttcggagacaatcccatcctccaaggactttctctagaaatcaaaaaagggggaagttgttgtcatcctaggggcatctggttgtgggaaaagtaccctccttcgttgcctcaacggcttagaaagtattcaaggtggagatattcttctggatggtcagtctatcgttga

SEQ ID NO: 181 - DNA, 507 bp, Streptococcus pneumoniae
atggtctttcaaagttatgaactctttccccatctggatgtcttacaaaacctcatcctaggccctatcaaagctcaaggaagggacaagaaagaagtaacggaagaagctttgcaattactagagcgtgtcggtttgctggataaacaacatagctttgcccgtcaattatctggtggacagaagcaacgtgttgcaattgtccgtgccctcctaatgcatccagaaatcatcctttttgacgaggtgactgcttcgctggatccagaaatggtgcgtgaggtgctggaacttatcaatgatttgacccaagaaggccgtaccatgattttagtaacccacgaaatgcagtttgcccaagccattactgaccggattatcttcctcgaccaagggaaaatcgctgaagaaggaacagctcaagccttctttaccaatccgcaaaccaaacgagcccaggaatttttaaacgtctttgactttagccaattcggctcatatctataa

SEQ ID NO: 182 - DNA, 201 bp, Streptococcus pneumoniae
atggcttgggcaaactgcatttcgtgggttactaaaatcatggtacggccttcttgggtcaaatcattgataagttccagcacctcacgcaccatttctggatccagcgaagcagtcacctcgtcaaaaaggatgatttctggatgcattaggagggcacggacaattgcaacacgttgcttctgtccaccagataattga

SEQ ID NO: 183 - DNA, 243 bp, Streptococcus pneumoniae
atgaaactattcaaaccactcttaactgttttagcacttgcctttgcccttatctttatcactgcttgtagctcaggtggaaacgctggttcatcctctggaaaaacaactgccaaagctcgcactatcgatgaaatcaaaaaaagcggtgaactgcgaatcgccgtgtttggagataaaaaaccgtttggctacgttgacaatgatggttcttaccaaggctacgctacgatattgaactag

SEQ ID NO: 184 - DNA, 555 bp, Streptococcus pneumoniae
ttgatttcaaacaaggtagatattactcttgctaactttacagtaactgacgaacgtaagaaacaagttgattttgcccttccatatatgaaagtttctctgggtgtcgtatcacctaagactggtctcattacagacgtcaaacaacttgaaggtaaaaccttaattgtcacaaaaggaacgactgctgagacttattttgaaaagaatcatccagaaatcaaactccaaaaatacgaccaatacagtgactcttaccaagctcttcttgacggacgtggagatgccttttcaactgacaatacggaagttctagcttgggcgcttgaaaataaaggatttgaagtaggaattacttccctcggtgatcccgataccattgcggcagcagttcaaaaaggcaaccaagaattgctagacttcatcaataaagatattgaaaaattaggcaaggaaaacttcttccacaaggcctatgaaaaaacacttcacccaacctacggtgacgctgctaaagcagatgacctggttgttgaaggtggaaaagttgattag

SEQ ID NO: 185 - DNA, 648 bp, Streptococcus pneumoniae
atgaatgaaataattacattaaaaaatattgagttgaaattaaaaaaaacatgtgtttttcaaaaccttaattttagttgtaaacagggggaaattataggaattactggtgcgaatggctcagggaaaagtgtattgtttaaattaatagctggtttatatagtccgtcttatggagaagtgttaatcaatggggaaaatattgttcctgagagaaaaattccagctaatttgggagctttgattgaagaacctggttttataaattattatagtggctttaagaatttacaatatttggcaagcatacgaggagtagttggtaatcaggaaatcaatgatacactgaaaatagttggtctatatgagcaaaaagaccagaaagttaaaacttattcgctaggtatgaggaaaaagctagggattgctcaagcaattatggagaatccctctattcttttactagatgaacctatgaatgccttggataaatcaagtgtagaaaatatgagaacattgtttagaaagctctctagtgaaaaagggacaacaattttgattgctagtcatagtgaagaggatattcgtatcttatgtgataaagtatatgcaatagaagataaagtatgtacactgtgttcagattga

SEQ ID NO: 186 - DNA, 705 bp, Streptococcus pneumoniae
ttgaaaatgggaaagttaagtagtcacatatggaggttgaatcagataatctataccaagtacttttggggttatgttcttttttggatattgatttgtttaggattatggtattggttagaaggaaatgatagacttgttatagaaattttaaaagggcctaatctgagtcaaaactcttttttattcttatctatatggttgcttcattggtttattattcatacattttttctagcagttgtatatcgtagaagagcatccgatttctttctggaagtgattcgattttcttctattaagctctggattaggtatcagatttggacctgttttctttatggactcattttaatcatggtaaaagttctagtgattcaatttatgttacagttaccaaactgggatataggagttttgtttatagttgattttttgaatgcttgtgtgttagtcttgttttgctttatgttatacgcactaggagcgaatgtacaaatgaactttgcttgcgttagtttctttttactcatgattgtgtttggtggtctatttgtaggaaatcgaactaattatctattttatattttaaatcgagggaatggagatataggacgagatttatttcttcagttgctatttttagtctttctttttaaaagcattttctatttcactcgtcaaaagaggaggtttatagaatga

SEQ ID NO: 187 - DNA, 204 bp, Streptococcus pneumoniae
caagtctatcatttccttctaaccaataccataatcctaaacaaatcaatatccaaaaaagaacataaccccaaaagtacttggtatagattatctgattcaacctccatatgtgactacttaactttcccattttcaacttttacactctcctccagtttctatgaacaggaaaatacattccatgggatttatgatagatag

SEQ ID NO: 188 - DNA, 807 bp, Streptococcus pneumoniae
ttgtttggttgtttatggtacattttttctacattcagaggactatgtataatgaaacaatttgttcaattttataaaaaagatttcttagcagtattggtttattttatattactgctatcctgtgttttatctagtacagtatatttattgcgctgtcgccaatattcaatccatccaaatgtattagaatggatcttagttttacttcaagatatgacgactggagtatattgctttccgttcacatatatattgttctttttttatttgatgaataactattttaataggttggagtgtcgcattcgtctgaaatcaattaagcactttaccagttttagtttcaaattagcagctcttagtacggggatttggacggcgattttatttttattgatttttctaattgcatttagtaatggttttagcttctctttggagataaaggaggttgattttttaagagaattttatggcataagtattgcaaacaatgctagtttctttataggattttttttctcttatatagcatactatttctttttatccttacttactattagcagtttttcttggtttaaaaaatcaaacatgagcttagtatttctgtttacttttttattcgtagaatccttattctggatttatcagttgaacaatgggataattggattattgccaatttttcagtatatggtaaattccaatccgtatgcattgatttattggcctggcattactatctatcataaatcccatggaatgtattttcctgttcatagaaactggaggagagtgtaa

SEQ ID NO: 189 - DNA, 765 bp, Streptococcus pneumoniae
atggaatttttcatttgtaatcttgtacgagtcgttcaatcacctcggttttatatgtctttatttttgacccttctttgcatgagtttaggaaattttcttgctttcaatggtatttataaaattgaaggtttatcgattttttttgccgcttcttctattcgaggattttcaccgattagcctagtagctgcacttatctgtacactgccctattctagtcagataatagaggatgctgagagtcattttctaacagcacaattgtgccgaatttctaaaaagaggtatctagctattgtaggtagtactgcaattatttcttcttttctagtcttttttctcccctatttattattattaggaattaatcttttagtgactccttatcaggaaatttatattggagattatagtggtgccttaaaagaattatttgattctaatcagtttctctatagtcttgtgacgactctctggtatggagtttggggcgctgtgttctctatttttggactagctagtgctttgctagtgaagaaaaaattaggagctattttcatcccagttgcctatatgatggttggtggtattttatgggctattttagggctatcttacttagaacctgtgacaacgctagctttgggatatcagaaagatatcagtctttccttagttagtgggcatcttgcttttattttatttgttagttgtttggttgtttatggtacattttttctacattcagaggactatgtataa

SEQ ID NO: 190 - DNA, 351 bp, Streptococcus pneumoniae
ttgtttctccctacagttttagctagacagattggaaattatgatttaacgttgccgcgttggggttcggatacaactagtgagcttgagaaagaaaacgcctctgctggaattaataatagtgacagcactggtggcggtaaaaggttaaatacctctattcgtagcgcctatagtgggtcagatattaccccggtatattcattggggtctggctctaggattgtcatgtactataatggaggtggtgacaattatattggttctggtactagattagctatggcgccacaatttggaaatcatgtaagaattcatacttcaggttcttggagtccagattcttattaa

SEQ ID NO: 191 - DNA, 633 bp, Streptococcus pneumoniae
atgacacttgctaaagatatcgctagccacctcttgaaaatccaagccgtttacctcaaaccagaggaacccttcacttgggcatctggtatcaagtcaccgatttacactgataatcgtgtgacactagcctatccagaaactcgtaccctaattgaaaatggttttgtggaagctatcaaagaagcctttcctgaagtagaagtgattgcaggaactgcaacagcagggattccacacggagccattattgctgataagatggacttgccttttgcctacatccgtagcaaaccaaaagaccacggagctggtaatcaaatcgaaggtcgcgtagctcaaggtcaaaaaatggtagtggttgaagaccttatttcaacgggtggttcagttcttgaagctgtagcagcagccaagcgagaaggagcagatgtacttggagttgtagcgattttcagctaccaattgccaaaagcagataagaactttgcagatgctggtgttaaacttgtgacgctttcaaactatagcgagcttatccatctagcccaagaagaaggttacatcacgccagagggccttgatcttctaaaacgctttaaagaagaccaagaaaattggcaagaaggttag

SEQ ID NO: 192 - DNA, 702 bp, Streptococcus pneumoniae
atgcgagaacatcgtccaatcattgctcttgattttcctagttttgaggcggtcaaggaatttttagctctttttccagcagaagaaagcctttatctcaaggtagggatggagctttattacgcagcggggcctgagattgtgtcctacttaaaaggtttgggtcatagtgtctttttggatctcaaacttcatgacattcctaatacagtcaagtcagccatgaaggtcttgtctcagcttggtgtcgatatgactaatgtccatgcggctggtggtgtagagatgatgaaggcggcgcgtgaaggtcttgggagtcaagctaaattgatcgctgtaacgcagctgacatcaacgtcagaagcccagatgcaggagtttcaaaatatccaaaccagtctgcaagagtctgtgatttactatgccaagaagacagctgaagctggcttggatggtgttgtttgctcggctcaggaagtacaagtcatcaagcaggctaccaatccagattttatctgtctgacaccagggattcgtccagctggtgctgcagttggagatcaaaaacgagtcatgacacctgctgatgcctatcaaatcggcagtgactatatcgtagtgggacgtcccattacccaagctgaggatcctgttgcagcttatcataccatcaaggatgaatggacacaggactggaattaa

SEQ ID NO: 193 - DNA, 201 bp, Streptococcus pneumoniae
ctgcctctctggactgctttaaaggttttttactattctattatttctactagcacttgtcaagtaaaaacatggtcactaaagaactataagagaaaaagtaaacctagcgacgcgatgagcgctgggtcgtttggtttcgattgctctcttcctcttgttttttctgttcttcttcttgttttttctcagcttccttag

SEQ ID NO: 194 - DNA, 1200 bp, Streptococcus pneumoniae
atgtcaaaagataagaaaaatgaggacaaagaaatcctcgaagaattgaaagagttatcagaatggcagaaacgaaaccaagaatatctaaaaaagaaggctgaagaagaagcggctctagctgaggagaaggaaaaggaaagacaagctcggatgggagaagaatctgagaagtcagaggacaaacaggaccaggagagtgaaacagaccaggaagattcagaatcagctaaggaagagtctgaagaaaaagtagcatcctcagaggctgacaaagagaaagaagagaaagaagaatcagagtctaaagagaaggaggaacaggataaaaagcttgctaaaaaggctacaaaggaaaaaccagccaaagcaaagattcctggtatccatatcttgcgagccttcacgattttatttccaagtctgcttttattgattgtctctgcctacttgctcagtccttatgcgaccatgaaagatattcgtgttgagggaacggtgcaaactacagctgatgatattcgacaggcttcaggcattcaggattcggattatacgattaaccttctgctagacaaggcaaaatatgaaaagcagattaagtctaactattgggttgaatcagctcaacttgtctatcaatttccaactaagatcactattaaggtcaaggaatatgatattgtggcctactatatttctggtgaaaatcattatcctattctttccagtggtcagcttgagactagttctgtgagtctgaacagtttaccagaaacttatttatcagttctctttaatgatagtgaacaaatcaaggtttttgtctcagaacttgctcaaattagcccagaactcaaggcgactatccaaaaggtggaattagctccaagcaaggtgacatccgatttaattcgattgaccatgaatgattcggacgaagtcttggttcctctatctgaaatgagtaagaaactgccatattacagtaagattaagcctcaattgtcagaaccgagtgtggtcgacatggaagctggaatctacagctacactgtggcggataaattaattatggaagctgaggaaaaagccaaacaagaggctaaggaagctgagaaaaaacaagaagaagaacagaaaaaacaagaggaagagagcaatcgaaaccaaacgacccagcgctcatcgcgtcgctag

SEQ ID NO: 195 - DNA, 444 bp, Streptococcus pneumoniae
gtgaaggctcgcaagatatggataccaggaatctttgctttggctggtttttcctttgtagcctttttagcaagctttttatcctgttcctccttctctttagactctgattcttctttctcttctttctctttgtcagcctctgaggatgctactttttcttcagactcttccttagctgattctgaatcttcctggtctgtttcactctcctggtcctgtttgtcctctgacttctcagattcttctcccatccgagcttgtctttccttttccttctcctcagctagagccgcttcttcttcagccttcttttttagatattcttggtttcgtttctgccattctgataactctttcaattcttcgaggatttctttgtcctcatttttcttatcttttgacatttactttccttatgataaatcttttttcaacaattga

SEQ ID NO: 196 - DNA, 1059 bp, Streptococcus pneumoniae
atgaaaaaaattgtctttacaggtggggggacggttggacacgttaccctcaatcttttgttaatgcctaagttcatcgaagatggttgggaagtccactatatcggggacaagcgtggtatcgaacaccaagaaatccttaagtcaggtttggatgtcaccttccactccattgcgactgggaaattgcgtcgctatttctcttggcaaaatatgctggacgtcttcaaagttggctggggaatcgtccaatcgctctttatcatgttgcgacttcgtccacagacccttttttcaaaggggggctttgtctcagtaccgcctgttatcgctgcgcgtgtgtcaggagtgcctgtctttattcacgaatctgacctgtctatgggcttggccaataaaatcgcctataaatttgcgactaagatgtattcaacctttgagcaagcttcgagtttgtctaaggttgagcatgtgggagcagtgaccaaggtttcagatcaaaaaaatccagaaccagatgaattggtggatattcaaagccactttaatcataaattgccgactgtattgtttgttggcggttctgcaggtgctcgtgtctttaaccaattggtgacagaccataagaaagaactaacagagcgctacaatattatcaatctaactggagattctagcctgaatgagttgagccaaaatctttttcgtgttgactatgtgaccgatctctatcaacccttgatggaattggctgatattgttgtgacacgtggtggtgccaatacgatttttgagctcttggcgatagcaaaattgcatgtcattgtgccacttggtcgtgaagctagtcgtggtgaccagattgaaaatgcagcttactttgttaagaaaggctatgcagaagaccttcaagaaagcgatttgaccttggatagtttggaagagaagctttctcacttactaagtcacaaggaagattaccaagctaagatgaaagcttctaaggaattgaaatctctagcagatttttatcaattgttgaaaaaagatttatcataa

SEQ ID NO: 197 - DNA, 1353 bp, Streptococcus pneumoniae
atgaaagtaatagatcaatttaaaaataagaaagtccttgttttaggtttggccaagtctggtgaatctgcagctcgtttgttggacaagctaggtgccattgtgacagtaaatgatgggaaacctttcgaggacaatccagctgcccaaagtttgctggaagaagggatcaaggtcattacaggtggccatcctttggaactcttggatgaagagtttgcccttatggtgaaaaatccaggtatcccctacaacaatcccatgattgaaaaggctttggccaagggaattccagtcttgactgaggtggaattggcttatttgatttcagaagcaccgattattggtatcacaggatcgaacggtaagacaaccacaacgactatgattggggaagttttgactgctgctgggcaacatggtcttttatcagggaatatcggctatccagctagtcaagtggcccaaactgcgtcggacaaggacacgcttgttatggaactttcttctttccaactcatgggtgttcaagaatttcatccagagattgcggttattaccaacctcatgccaactcatatcgactaccatgggtcattttcggaatatgtagcagccaagtggaatatccagaacaagatgacagcagctgatttccttgtcttgaactttaatcaagacttggcaaaagacttgacttccaagacagaagccactgttgtaccattttcaacacttgaaaaggttgatggagcttatctggaagatggtcaactctacttccgtggtgaagtagtcatggcagcgaatgaaatcggtgttccaggtagccacaatgtggaaaatgcccttgcgactattgctgtagccaagcttcgtggtgtggacaatcaaaccatcaaggaaactctttcagccttcggtggtgtcaaacaccgtctccagtttgtggatgacatcaagggtgttaaattctataacgacagtaaatcaactaatatcttggctactcaaaaagccttgtcaggatttgacaacagcaaggtcgtcttgattgcaggtggtttggaccgtggcaatgagtttgacgaattggtgccagacattcctggactcaagaagatggtcatcctgggtcaatctgcagaacgtgtcaaacgggcagcagacaaggctggtgtcgcttatgtggaggcgacagatattgcagatgcgacccgcaaggcctatgagattgcgactcaaggagatgtggttcttcttagtcctgccaatgccagctgggatatgtatgctaactttgaagtacgtggcgacctctttatcgacacagtagcggagttaaaagaataa

SEQ ID NO: 198 - DNA, 642 bp, Streptococcus pneumoniae
atgattgaactaaagaatatatctaaaaaatttggaagccgtcaactattttcagatacaaatcttcattttgaaggtgggaaaatttatgccttaatcggtacaagtggctgtggtaagacaacattcttgaatatgattggacgattagagccatatgacaaaggacaaatcatctatgatggtacttctcttaaggacatcaagccttctgttttctttagagattacttgggatatttatttcaagattttggcttaattgaaaaccaaaccgtcaaagagaatctcaatctgggtttagttggtaaaaagttgaaggaaaaagagaaaatctctttgatgaaacaagctctaaaccgtgtaaacctctcttatttggatttgaagcaacctatatttgagttatcaggaggagaagcacaacgtgttgcattagcgaagataattttaaaggatccacctttgattctcgcagatgaaccaaccgcttcactagaccccaaaaactctgaggaattactttccatcctagaatctctaaaaaatccgaatcggaccattattattgcgacccacaatcctctgatttgggagcaagtggatcaggtcattcgagttaccgatttatcacatagatga

SEQ ID NO: 199 - DNA, 2022 bp, Streptococcus pneumoniae
atgaagaaactattcatattattatcaactttttttctcagcttcttccttgcttggattattgtcttacgtgcgccacaatatttatatgcaagctatgattccgtttctttacttcgtgtcaaaaaagatactcaggaaccgacgcgtgaggtatttgaacaggaattggagaattttgcaaactcagaacagagtttaatagctagaagaattgtagagccgagtaaggatgggacgactcactttacttatgcaacttatggtcagggaactttaccaaaagaattccaagaagctagccaagaaagtcgtgaacgtagtgatccgctaaatagttatctccttttgtcaggctccttgacgaaagaaaagcttgccgataaattaggagatttgggttataaagcaagtgctgaccgaaagataccgccctattttcttgcttttcgaatattactaaatccccttattttaattagtttagcaatatttggcttatctttctttgctttagtgattatcactcggattaaggaaatgagagcagcaggtataaaactcttttctggtcagactctcttatccatcatggggcattctttatctactgatatcaaatggctccttctatcagccctcctttccttcctaggtgggggagtcgttctttttagtcaaggtttgttttatcctatcttgttagccacctatggttttgggattagtttctatctgttgtttttattggcgatttcaattttactaatgcttctttatctaatgagtttgagttacaaagcattagttcccgttattaaggggagattaccccttaaacgcctgatgattttaaccctattgtgtcagttggttgctgtctttacagtaggctacgctgttaagacaggtttgatgtcttaccaacgattgaaagaacttgaaatttcaaaacaagcatggcaggatagagcagactattatcaaatttcttttggcttaggtgatagaggaaaagatacagaaaatcagagcaagtggtatgcctttgccaaggaagcaatcgaagaagaacaagctctttatgtaaaggataatctgctccattttgccaatccacaaggaaaaaatgaacagggagagacactggatacctatagtccagatgctaatacgctctatgttagtcccagttatttggacaaggaaaaggtcgtggtagatgctgagaccaaacagaagttagcccatctccaaaaaggtgagtttatcctcttgctcccagaacatttgcgctctcgagaagcagaacttaagaaagtttttgaagaaagattgagttattatggaaaatctggtgaggaggcaagtgctcctttggattatgagatgaaagcgcacgttagttatctttcaatgggagaaaagcggtttgtttataataacggtgagaatcccgtatctactcagtatttgactgatccgattttagttgtattcacgccgacttctacaggtgatagttttatatccttatctagttggtctatcaatgctggaaaacaactctttatcaaaggatatgagagtgggctagaactcttgaagaaagctggaatttatgagcaagtatcctatcttaaagaaggaagaagtgtttatctaactcgttataatgaagttcaaactgaaacagcaactttaatcttaggagctattgtggggatagctagttccttgttactattttattctgtcaatcttctatatttcgagcaattccgccgagatatcttgattaaacgaatttcaggtttacgattttttgaaacacatgctcagtatatggttagccaatttgccagttttgtatttggtgctagtctctttattttaagcagtcgagacttggtgattggcttgctcactttattagtctttctagctagtgcagttctgacgctttaccgtcaagcgcagaaagaatctcgtgtttctatgacaattatgaaaggaaaatag

SEQ ID NO: 200 - DNA, 405 bp, Streptococcus pneumoniae
atgttattcttatcacataagaaagcggtttcaataaaagagagaggaggacttattttgttgcattgttgctcaaggtgtgatttttttgaaagaaaaaataaaatgaaaacgaaaaaacatagattacttgctctagctcttatttcaagttttacattattgggagctgcatcagctgctgtacaatatccagatggaggagtatggacgtatggagaaggttcaggaggtggttgggctttttcaaattactatcatggtaaaaaatatcattattcttctcttgtaagtagatggaatagtcattcagataaaggagaagctcctgctggaaaaacctcctatgcatggatttggactaaatggggagaacaagtagcattttactgtgattatgactaa

SEQ ID NO: 201 - DNA, 219 bp, Streptococcus pneumoniae
atgcaaccagtactaaccaaatataaaatagatgccattaacgaattttattcaagtttttcccattcatactatccaagcaaaagagatgatgttatagtacaaaacaattcaaactattgtaaaattcctagcaaaaaagagagccaaaactctcttttttatcttcttttactttttttgactggcatgagtgtaatgtctctaacactaaagtaa

SEQ ID NO: 202 - DNA, 255 bp, Streptococcus pneumoniae
atggtctatttagtcctaggaattttactgctcctactctatgtatttgcgacaccagaaagcattaaagggacagtcaatatcgtcgctatggtatgtattttagtggcactcttgattttattggttctatcttttctgaaaatttttcaattaccaacagaaatattcctagcaatagccatgttgatcctagcttactttagtgttagagacattacactcatgccagtcaaaaaaagtaaaagaagataa

SEQ ID NO: 203 - DNA, 1863 bp, Streptococcus pneumoniae
ttgaatattatagaggaaatcatgacaaaattaagagaagatatccgtaacattgcgattatcgcccacgttgaccacggtaaaacaaccctggttgacgaattattgaaacaatcagaaacgcttgatgcacgtactgaattggcagagcgtgctatggactcaaacgatatcgaaaaagagcgtgggattaccatccttgctaaaaatactgccgttgcttacaacggaactcgtatcaacattatggacacaccaggacacgcggactttggtggagaagttgagcgtatcatgaaaatggttgacggtgttgtcttggtcgtagatgcctatgaaggaaccatgccacaaactcgtttcgtattgaaaaaagccttggaacaagaccttgtcccaatcgtggttgttaacaaaatcgataagccatcagctcgtccagcagaagtagtggatgaagtcttggaacttttcatcgagcttggtgcagatgacgaccagcttgatttcccagtggtttatgcttcagcgatcaacggaacttcttcattgtcagatgatccagctgaccaagaagcgactatggcaccaatctttgacacgattatcgaccatatcccagctccagtagataactcagatgagcctttgcagttccaagtgtcgcttttggactacaatgacttcgttggacgtatcggtatcggtcgtgtcttccgtggtacagttaaggttggggaccaagttaccctttctaaacttgacggtacaactaaaaacttccgtgttacaaaactcttcggtttctttggtttggaacgtcgtgaaatccaagaagccaaagcgggtgacttgattgccgtttcaggtatggaagacatctttgtcggtgaaaccatcactccgacagatgcagtagaagctcttccaatcctacacatcgatgagccaactcttcaaatgactttcttggtcaacaactcaccatttgctggtaaagaaggtaaatgggtaacttctcgtaaggtggaagaacgcttgcaggcagaattgcaaacagacgtttcccttcgtgttgacccaactgattcaccagataaatggactgtttcaggacgtggagaattgcacttgtcaatccttatcgaaacaatgcgtcgtgagggctatgaacttcaagtatctcgtccagaagttatcgtaaaagaaatcgacggtgttaaatgtgaaccatttgaacgtgtacaaatcgacactccagaagaataccaagggtctgttatccaaagcctttctgaacgtaaaggtgaaatgttggatatgatttcaactggtaatggtcaaactcgtttggtcttccttgttccagcgcgtggtttgattggatactcaactgagttcttgtcaatgactcgtggttacggtatcatgaaccataccttcgaccagtacttgccattgattccaggggaaattggtggacgtcaccgtggtgcccttgtttctatcgatgctggtaaggctacaacttactcaatcatgtctatcgaagaacgtggtacgatctttgtcaacccaggtactgaggtttatgaaggaatgatcatcggcgaaaactctcgtgaaaatgacttgacagttaacatcacgaaggcaaaacaaatgaccaacgttcgttcagctactaaggaccaaacagctgttatcaagacgcctcgtatcttgacacttgaagagtctcttgagttcttgaacgacgatgagtacatggaagtaacgcctgagtctatccgtttgcgtaaacaaatccttaacaaagcagagcgtgagaaagctaacaagaagaaaaaatcagctgaataa

SEQ ID NO: 204 - DNA, 726 bp, Streptococcus pneumoniae
atgcgtttagataatttattagcccaagaaaaaatcagccgaaaggccatgaagcaagcactcctcagaggggaaattctagtcgatggttgcccagcccgctccctagctcaaaatatcgatacaggactacaagaactcctttttcaggatcgaatcattcaaggctatgaacacacctatcttatgcttcataaacctgctggtgtcgttacagccaacaaagacaaggaacttccgaccgtcatggacctgcttccatctgacatccagtctgacaagctctatgccgtcggccgactggaccgagatacaacaggactccttctcttgaccgataacggtcccttgggcttccaactcctccatccccaatatcatgtcgataagacttaccaagtccaggttaatggacttctaacacctgaccatatccaaacctttcaaaaaggaattgtctttttagatggcactatctgtaaacctgcaagactagagattctatcagcaagtccttccttcagtcaagcctctatcaccatttcagaaggaaaatttcatcaaatcaagaaaatgttcctctcggttggtgttaaggtgactagcctcaagagaatccaatttggggacttcacattgaacccagatttagcagaaagtaactaccgccctttgaaccaaaaagagttacaaatcattaaaaactatttagagatgagtcgataa

SEQ ID NO: 205 - DNA, 198 bp, Streptococcus pneumoniae
gtgggtatcttgtcgattattcttggtttgttatttccaattgtaggcctgattttgggtatcataggattggtcttggctatttcataccaaaaagagtcacaattagactataaaatagaaaagattcttaatatcttaggaattgtgatttctgtagttaactggattgtagcaatcgccttaatttttcggtaa

SEQ ID NO: 206 - DNA, 381 bp, Streptococcus pneumoniae
atggttacttggattttgtgggcacttatactagcaatgttggcgtggatgggctttaactatcttcgtattcgccgtgcggctaaaattgtggacaatgaggagtttgaagccttgattcgtacgggtcaattgattgatttgcgcgacccagcagaattccacagaaaacatatccttggtgcacgcaatattccttcaagtcagttgaaaactagtcttgcagcccttcgtaaagataaacctgtccttctctacgaaaaccaacgtgcgcaacgagttacaaatgcagctctttacttgaaaaaacaaggtttttctgagatttatatcctttcttatggcttggattcttggaaagggaaagtgaagactagctaa

SEQ ID NO: 207 - DNA, 222 bp, Streptococcus pneumoniae
atgaaaacattctatgatgtgcagcaattcctcaaacgatttggtattattgtttacatgggaaaacgcttatatgatattgaactgatgaagttggaactatctcggatttacgatgcagggttgatggataaattagactatctagaggcagaagcagttcttcgaagagagcacaaggtagaattggattatattgagaaaaatggagaaaagaactaa

SEQ ID NO: 208 - DNA, 909 bp, Streptococcus pneumoniae
atgagaattcaacaattacattatattatcaaaatcgtcgaaactggctccatgaatgaggcagccaagcaactctttatcactcagccaagtctctccaatgcagtgcgagatttggaaaatgaaatgggcattgagatctttatccgcaatcccaagggaatcaccttgacccgtgatgggatggagtttctctcttatgcccgtcaggttgtcgagcagacccagcttctggaggaacgctataaaaatcctgtcgcccaccgcgaactctttagcgtttcgtctcaacactatgcctttgtggtcaatgcctttgtctctttgctcaagaaaagcgatatggagaaatacgaactcttccttcgtgaaactcggacttgggagattatcgacgacgtcaagaacttccgcagtgaggtcggggtcctcttcttaaacagttacaaccgtgatgttttaaccaagatgctggatgacaatcacctgctagcccaccatctcttcacagcgcaaccgcatatctttgtcagcaagaccaaccctctggcaaagaaagacaaggtgaaactgtctgatttggagaatttcccttacctcagctatgaccaagggacgcacaactccttctacttttcagaagagattctttctcaagaacaccacaagaaatccattgtggtcagtgaccgtgccaccctctttaatctcttgattggtttggatggttataccattgcgacagggattttgaacagcaacctaaacggagacaatatcgtttctatcccactggatattgatgacccgattgagctggtctatatccagcatgagaaaaccagcctatctaagatgggcgaacgctttatcgactatctactagaagaagttcagtttgatagttga

SEQ ID NO: 209 - DNA, 756 bp, Streptococcus pneumoniae
atgcctactattctcattaccggagctagcggtggtctagctcaagaaatggtcaaactcctgcccaatgaccaactcatcttgcttggtagaaataaggaaaaattagcccaactctacggaaattattcccatgcagaattgattgaaattgatattaccgacgattcagccctagaagctctggtaactgatctttatctccgctatggcaagattgatgtcttgattaacaacgctggttacgggatttttgagggatttgaccagattgctgataaagatattcaccagatgtttgaggtcaatacctttgccctgatgaatctgtctcgtcaccttgcggctcgtatgaaggaaagcagcaaagggcatatcatcaacatcgtcagcatggcaggtctaatagctactggcaagtctagtctttactcagcgaccaagtttgcggctattggtttttcaaatgctctgcgactcgaacttatgccctatggagtctatgtgacaacagtcaatccaggtccaatccgaacaggattttttgaccaagctgacccagatggaacttatcttaaatcggttgaccgcttcctcttagaggcagatgcagtggctaaaaagattgtcaagattataggcaaaaataaacgagaactcaatctcccgattttgttgaacctagcccataagttttatactctctttcccaagctagctgataagttggcaggggaaacttttaattataagtaa

SEQ ID NO: 210 - DNA, 930 bp, Streptococcus pneumoniae
atggatattcaatttttaggaacgggggctggtcagccctctaaagcccgcaacgtttcaagtctcgccctgaaacttttggatgagattaacgaagtttggctctttgactgtggagaaggtacgcaaaatcgcattctggaaaccacaattcgaccacgtaaggtcagcaaaatctttattacccatctgcatggagaccacatttttggtttgccaggtttcctttctagccgtgcctttcaggccaatgaagagcagacagatttggaaatctacggacctcaaggaatcaagtcatttgtcttaaccagccttcgtgtgtcaggttctcgtctgccctaccgcattcatttccatgagtttgaccaagattctctaggtaaaattcttgaaatcgataaattcactgtgtatgcagaggagctggaccacactattttctgtgttggctatcgtgtcatgcaaaaggatctagaagggacgctggatgctgaaaaactcaaggctgctggtgttccgttcggcccgctttttggtaaaatcaaaaatggccaggatcttgttttggaagacggaactgaaatcaaggcagcagactatatctcagcgccacgtccaggtaagattatcactattttaggagacactcgaaaaacggatgccagtgtgcgtctggctgtcaatgcagatgtcctagttcatgagtccacttatggcaagggtgatgaaaaaattgctcgtaaccatggtcactcaactaatatgcaagctgcacaagtagcggtagaagcaggtgccaaacgcctcctactcaaccatatcagtgcccgtttcctctcaaaagatattagcaaactcaagaaagacgctgccacaatttttgaaaatgtccatgtggtcaaagacttggaagaagtggaaatctag

SEQ ID NO: 211 - DNA, 624 bp, Streptococcus pneumoniae
atgactgatattaaaactttggctctaaagtatggaggttatacaagtctggacaaggtctatctggatcagcttctagctggtaaaacagatcaggagcagttaacacttattacacctccgccaagtgttgttaatgcctactttgcagaactctatcagaaaaagagtcctcaggctgcgacggattattttgcagaactcagtcaggaactgaatctttacaatactgagccaagtttcaccctagaaaataagccttttattcggcttaatctgtctggtaaatcctttggtttttgttatgagagtgacggccttggtcggattttctttgaaaatgaggagaaaatctcggatgacttgctctttgaaattgcgcaaattttcccccatcaattagtctttgaagagtctggtaagatttacatgaagcctgtcgaggacgaggaagttatcagcctagaaagtctcacagctttgactgatttggaaagattggctgatggtcgaaaacgtctcaaaggctacagccaagaggatttattgcaagaagctgctgctttttctggcaaacgctatttccgatcggaaaaccgcacagccatgttatatattgattaa

SEQ ID NO: 212 - DNA, 1239 bp, Streptococcus pneumoniae
atgattgaaacggagaataaagaggagcgagtcctgctgattggtgtggaattgcagggtatggacagttttgacctctccatggaagaattggctagtttagcgaaaacggcaggggcagtcgttgtagatagctacagacaaaaacgtgaaaaatatgattccaagaccttcgtcggctctggtaagttggaagagattgcgcttatggtggatgcagaagaaatcactactgtcatcgtcaacaatcgtctgaccccaaggcagaatgtcaatctagaggaagttctcggtgttaaggtcattgaccgtatgcagttgattttggatatctttgccatgcgggctcgaagccatgaagggaagctccaagtccacctagcccaattcaaatacctcttgcctcgcttggttggtcaggggattatgctcagccgtcaggcagggggaattggttcccgtggtcctggtgaaagccaactggagctgaaccgtcgtagcgttcgcaatcaaatcacggatatcgagcgccagcttaaggtggttgagaaaaatcgtgcgactgtcagagaaaaacgtttggagtctagcacttttaagattggtttgattggttatactaatgctgggaaatcaactatcatgaacatcttgaccagtaagacccagtatgaagcagatgagctctttgcgactctggatgcgacaaccaagagtattcatctgggaggcaatctccaagtaactttgacagataccgttggctttatccaagatttgccgacagagttggtgtccagtttcaagtcaaccttggaagaaagcaagcatgtggaccttctggttcatgttatcgatgctagcaatccttaccacgaggagcatgaaaaaacggttctctccatcatgaaagacctggacatggaagatattcctcacttgacgctttataataaagcggatttggtggaggatttcacgcctacccaaacgccatataccctcatttctgccaagtctgaggacagtcgtgaaaacttgcaagcattattgctagataagattaaggaaatttttgaagcatttaccctgcgagtgcctttttcaaagtcctacaagattcatgatttagagagtgttgcaattctggaagaacgtgattatcaggaagacggcgaagtgattacaggctacatttccgagaaaaataaatggaggttagaagaattttatgactga

SEQ ID NO: 213 - DNA, 936 bp, Streptococcus pneumoniae
ttgtgttataataatagtaacgaaaaaatgggaatttttcaaggaaaaaagatgaaaacaaaaataattgtgattgttggaccgactgctgttggaaagacggctctagctattgaagttgcaaagcgttttaatggcgaagtggttagtggagatagccagcaagtctatcgaggacttgatattgggacggccaaggctagtccagaagagcaggcagctgttcctcatcatttaatcgatgttagagagataaccgagtcttactcggcttttgattttgtttcagaagctaagatgactattgagggtattcacaaccgtggcaagctagccattatcgccggtgggactggactttatatccagagcttgctagaaggttaccacctaggtggggagactcctcatgaggagattttagcttatcgagctagtttggagccatattcagatgaggaattagcccatttggtggagcaagcaggccttgagattccccagtttaatcgtcgtcgtgctatgcgtgccttagaaattgcccattttggtcaggatttggaaaatcaagagatcttgtatgaaccgctgattatctgcttggatgatgaacgtagtcaactttatgagcgtatcaaccaccgagtggatttgatgtttgaggctgggcttttggatgaggccaagtggctgtttgaccattcccctaatgtacaggctgctaaaggaattggctataaggaactctttccttatttccgtggagagcagacctttgaggaagctcgtgagagtcttaatcaggcgacccgtcgttttgccaagcgtcagctgacctggttccgtaatcgcatgctggtcaccttttatcatattggagaatctggtgtacaagaccgcattttaagccagatagaggagtctttagatgattga

SEQ ID NO: 214 - DNA, 189 bp, Streptococcus pneumoniae
atgaaagctgctttttgctcttctggttcgattactttctttttaaatgcgtatagtgcacatgcaacggcagcgacagttcatgcgacacctgttacaagacctttagcgaatcctttagccatgagtcttcctcctttatattctcaatcagccagcctcctcaagaggtcacatttttctgactga

SEQ ID NO: 215 - DNA, 198 bp, Streptococcus pneumoniae
ccaattttaaacaggttcgggaaattggtcggttgggaaacgtttaaaattcccacccaggtttggtttttaaatgttcctgaggggactatttttttgaatatcaaagcagaagatttgaggttggtggattatgaccctgttaagccacagttgaagtttgccctagcttttaaaagaatagaaaaaagaagttga

SEQ ID NO: 216 - DNA, 663 bp, Streptococcus pneumoniae
ttagagaacaaaattgctccccaattattatggagtcgtcgtttggcagatgggcgtcatatgtgtgctcaagaatggttgacaggcaagatattgaccccctatgatatgaatcgtaagcaaatcgtcaatattttaacccgtcttcatcgctcacgtcggttgatgacacaattgagtcgtttgggctatgccatggaaacacctgtagatttactacagtcttggcaagaaacggctccagatgctttgcgtaaaaatcattttatcagtgaagtgatggctgatttgcgtcagactattccaggatttagagaggaccatgcgaccattgtccatggagatgtacgacatagtaattggattgagacagatagtggcttgatttatttagtagattgggattcggttcgcttgaccgatcgcatgtttgatgtggcccatatgctctgccattatatttcagaacatcagtggaaggaatggttgacctactacggttacaagtacaatcaaacggtattaagtaaattgtattggtatggtcaattgtcttatttgagtcagatttccaagtattatatgaaccaagatttagaaaatgtcaatcgggagattcatggtttgcgtcatttccgagacaagtatggaaagagaagatga

SEQ ID NO: 217 - DNA, 636 bp, Streptococcus pneumoniae
atgagagttagaaatcgtaaaggggcaacagaattactagaggcaaatccccagtatgtggtcctcaatcccttggaagccaaggcaaaatggcgggacttgtttggcaatgataatcccattcatgtggaagttggaagtggaaagggtgcctttgtttcaggtatggccaagcaaaaccctgacatcaactatatcgggattgatattcaaaagtctgttttgagctacgctttggacaaggtgcttgaagttggagtgcctaacatcaagctcttgtgggtagatggttctgacttgactgactactttgaagacggtgagattgatcgcttgtatctgaacttttcagatccatggccgaaaaaacgccatgaaaagcgtcgtttgacctacaagacctttttggacaccttcaaacgtatcttgcctgaaaatggagaaattcatttcaaaacggataaccgtggcttgtttgagtacagtttagtgagcttttctcaatatggcatgaaactcaatggtgtctggctagatttgcatgccagtgattttgaaggcaatgtcatgacagaatacgagcaaaaattctcaaacaaggggcaagttatctaccgagttgaggcagaattttaa

SEQ ID NO: 218 - DNA, 267 bp, Streptococcus pneumoniae
gtggatatcgagtatggaaagattggcagtgacatgattctcagtatttttgtagataaacccgaaggaattaccttgaacgacacggcagacttgacagaaattatcagtccctgtcctagacaccatcaagccagatcccttcccagaacaatatttcctagaaattaccagtccaggcttggaacgtcctttgaaaaccaaggatgccgtcgctggagcggttggaaaatacatccatgtcggactctaccaagccatcgataa

SEQ ID NO: 219 - DNA, 309 bp, Streptococcus pneumoniae
cagaaattatcagtccctgtcctagacaccatcaagccagatcccttcccagaacaatatttcctagaaattaccagtccaggcttggaacgtcctttgaaaaccaaggatgccgtcgctggagcggttggaaaatacatccatgtcggactctaccaagccatcgataagcaaaaggtctttgaaggaactttgttggccttcgaagaggacgagttgactatggaatatatggacaagacgcgtaagaaaaccgtccgaattccatacagtttagtatcaaaagcacgtttagcagttaaattatag

SEQ ID NO: 220 - DNA, 1137 bp, Streptococcus pneumoniae
atgagtaaagaaatgctagaggccttccgcattttggaagaagacaagggaatcaaaaaagaagatatcatcgacgcagtagtagagtcgcttcgttccgcttatcgcagacgctatggtcagtcagacagcgtagctattgacttcaacgaaaaaacaggtgactttacagtttatactgtccgtgaagttgttgatgaagtatttgatagccgtttggaaatcagcttgaaagatgctcttgccattaattcagcttatgaacttggagacaaaatcaagtttgaagaagcaccagctgagtttggtcgtgtagcagcccaatctgccaaacaaaccatcatggaaaaaatgcgcaagcaaacacgtgccatcacttacaatacttacaaagaacatgagcaagaaatcatgtctggtacagtagaacgctttgacaaccgctttatctatgtcaaccttggtagcatcgaagcccaattgtcaaaacaagaccaaattcctggagaagtttttgcttctcatgatcgtatcgaagtttatgtttacaaggttgaagacaaccctcgtggtgtgaacgtctttgttagccgtagccatccagaaatgatcaaacgtttgatggagcaagaaattccagaagtttatgatggaactgttgaaatcatgagcgtggctcgtgaagcaggtgaccgtacgaaggttgctgttcgtagccacaatccaaacgtggatgctatcggtacaatcgttggacgtggtggtgctaatatcaagaagattactagcaaattccacccagctcgttacgatgctaaaaatgaccgcatggtaccaatcgaagaaaatatcgatgttatcgagtgggtagcagatccagctgaatttatctacaatgccatcgctcctgctgaggttgaccaagttatctttgatgaaaacgacagcaaacgtgccttggtggttgttccagataacaagctttctcttgccattggtcgtcgtggacaaaacgtgcgcttggcggctcacttgactggttaccgtatcgatatcaagtctgctagcgaatttgaagccatggaagacgctgcttcagtagagttggaagtagaaaacgatactgtagaagaataa

SEQ ID NO: 221 - DNA, 294 bp, Streptococcus pneumoniae
atgaaaacaagaaaaatccctttgcgcaagtctgttgtgtctaacgaagtgattgataagcgtgatttgctccgcattgttaagaacaaggaaggacaagtctttattgatcctacgggcaaggccaatggccgcggcgcttatatcaaactagacaatgcagaagccctagaggcgaaaaagaagaaggtctttaaccgcagctttagcatggaagtggaagaaagcttttatgacgagttgatcgcttatgtggatcacaaagtgaaaagaagagagttgggacttgaataa

SEQ ID NO: 222 - DNA, 300 bp, Streptococcus pneumoniae
ttgaataagcaaaagataagtaatctcttggggcttgctcagcgagcagggcgcatcatatcgggtgaagaattggtggtcaaggccattcaagacggcaaggccaagttggtctttctagctcatgatgctggacccaatctggccaagaagattcaagataaaagtcattattatcaagtagaaattgtaaccgtgttttcaacactggaattaagcatagcagtcgggaaatcgagaaaggttttggctgtaacagatgctggatttacaaagaaaatgaggtctcttatggaatag

SEQ ID NO: 223 - DNA, 495 bp, Streptococcus pneumoniae
ttgcccttattttgcttacgtcgttctgcctgctctttagcacgggcttcacgctcagccttgaaattacggctttgcggtttcgctgctactttttctgttttcggagcaactggctcagccggttttgcctcttccttagctacagctggtttagctggctcagatttttcggctttcttttctgcacttacttttggtgctgcaggttttgcttctactttcggagcagctgcaggcttaaagctggcagcaatttttgcagcgacagcttcttccacacttgatgagtggcttttcacatccaagcccaactcttttgcacgcgctacaacttctttactttcttttccaagttcttttgcgatttcgtacaatcttttcttagacaaatcatgtcctcctcttctattccataagagacctcattttctttgtaaatccagcatctgttacagccaaaacctttctcgatttcccgactgctatgcttaa

SEQ ID NO: 224 - DNA, 2793 bp, Streptococcus pneumoniae
ttgtctaagaaaagattgtacgaaatcgcaaaagaacttggaaaagaaagtaaagaagttgtagcgcgtgcaaaagagttgggcttggatgtgaaaagccactcatcaagtgtggaagaagctgtcgctgcaaaaattgctgccagctttaagcctgcagctgctccgaaagtagaagcaaaacctgcagcaccaaaagtaagtgcagaaaagaaagccgaaaaatctgagccagctaaaccagctgtagctaaggaagaggcaaaaccggctgagccagttgctccgaaaacagaaaaagtagcagcgaaaccgcaaagccgtaatttcaaggctgagcgtgaagcccgtgctaaagagcaggcagaacgacgtaagcaaaataagggcaataaccgtgaccaacaacaaaacggaaaccgtcagaaaaacgacggacgtaatggtggaaaacaaggtcaaagcaaccgcgacaatcgtcgctttaatgaccaagctaagaagcagcaaggtcagcaaaaacgtagaaatgagcgccgtcagcaagaggacaaacgttcaaatcaagtggctccacgtattgactttaaagcccgtgcagcagccctaaaagcagagcaaaatgcagagtacgctcgttcaagtgaggaacgcttcaagcagtatcaggctgctaaagaagccttggctcaagctaacaaacgcaaggaaccagaggaaatctttgaagaagcggctaagttagctgaacaagcacagcaagttcaagcagtggttgaagtcgtccctgagaaaaaagaacctgcagtggatacacgtcgtaaaaaacaagctcgaccagacaaaaatcgtgacgattatgatcatgaagaagatggtcctagaaaacaacaaaagaatcgaagtagtcaaaatcaagtgagaaatcaaaagaatagtaactggaataacaacaaaaagaacaaaaaaggcaataacaagaacaaccgtaatcagactccaaaacctgttacggagcgtaaattccatgaattgccaacagaatttgaatatacagatggtatgaccgttgcggaaatcgcaaaacgtatcaaacgtgaaccagctgaaattgttaagaaacttttcatgatgggtgtcatggccacacaaaaccaatccttggatggggaaacaattgaactcctcatggtggattacggtatcgaagccaaacaaaaggttgaagtggataatgctgacatcgaacgtttctttgtcgaagatggttatctcaatgaagatgaattggttgagcgtccaccagttgttactatcatgggacacgttgaccacggtaaaacaacccttttggatactcttcgtaactcacgtgttgcgacaggtgaagcaggtggtattactcagcatatcggtgcctaccaaatcgtggaaaatggtaagaagattaccttccttgatacaccaggacacgcggcctttacatcaatgcgtgcgcgtggtgcttctgttaccgatattacgatcttggtcgtagcggcagatgacggggttatgcctcagactattgaagccatcaaccactcaaaagcagctaacgttccaatcatcgtagctattaacaagattgataaaccaggtgctaacccagaacgcgttatcggtgaattggcagagcatggtgtgatgtcaaccgcttggggtggagattctgaatttgttgaaatctcggctaaattcaaccaaaatatcgaagaattgttggaaacagtccttcttgtggctgaaatccaagaactcaaagcagacccaacagttcgtgcgatcggtacggttatcgaagcgcgcttggataaaggaaaaggtgcggtcgcaacccttcttgtacaacaaggtaccttgaatgttcaagacccaatcgttgtcggaaataccttcggtcgtgtccgtgctatgaccaacgaccttggtcgtcgtgttaaagttgctggaccatcaacaccagtctctatcacaggtttgaacgaagcaccgatggcgggtgaccactttgccgtttacgaggatgaaaaatctgcgcgtgcagcaggtgaagagcgtgccaaacgtgccctcatgaaacaacgtcaagctacccaacgtgttagccttgaaaacctctttgatacccttaaagctggggaactcaaatctgttaatgttatcatcaaggccgatgtacaaggttctgttgaagccctttctgcctcacttcaaaagattgacgtggaaggtgtcaaagtgactatcgtccactcagcggtcggtgctatcaacgaatcagatgtgacccttgccgaagcttcaaatgcctttatcgttggtttcaacgtacgccctacaccacaagctcgtcaacaagcagaagctgacgatgtggaaatccgtcttcacagcattatctacaaggttatcgaagagatggaagaagctatgaaagggatgcttgatccagaatttgaagaaaaagttattggtgaagcggttatccgtgaaaccttcaaggtgtctaaagtcggaactatcggtggatttatggttatcaacggtaaggttgcccgtgactctaaagtccgtgttatccgtgatggtgtcgttatctatgatggtgaactcgcaagcttgaaacactataaagacgacgtgaaagaagtgacaaacggtcgtgaaggtggattgatgatcgacggctacaatgatattaagatggatgatgtgattgaggcgtatgtcatggaagaaatcaagagataa

SEQ ID NO: 225 - DNA, 246 bp, Streptococcus pneumoniae
ttgggctttttggttatccgaagcaaggttactcaaaatggtgtaataaaccttggcaacagacaagtcacccagcatctgaacatctgtgatggtcacaccttggacacgtggatcacggactttcttttgcaaaatctcattgacttcacgcttgatttccatgcccacacgatccgtacggaaatgatttgccatgatattcctttctctactttgaaccaaaagctaggccagcagacctag

SEQ ID NO: 226 - DNA, 351 bp, Streptococcus pneumoniae
atggcaaatcatttccgtacggatcgtgtgggcatggaaatcaagcgtgaagtcaatgagattttgcaaaagaaagtccgtgatccacgtgtccaaggtgtgaccatcacagatgttcagatgctgggtgacttgtctgttgccaaggtttattacaccattttgagtaaccttgcttcggataaccaaaaagcccaaatcgggcttgaaaaagcaactggtaccatcaaacgtgaacttggtcgcaatttgaaattgtacaaaatcccagatttgaccttcgtcaaagacgagtccatcgagtatggaaacaagattgacgagatgctacgcaatctggataagaactaa

SEQ ID NO: 227 - DNA, 780 bp, Streptococcus pneumoniae
atggctgaacaagacttagctatgcaagtattacaacaagtggtaaaactaccagttgttaaggttgatagttcgaaatttttagtggataagttttccaaagaattgggtccacaggacattcctaccttattggaacaaggtccaacgtctctcttatctcaagaaatcttagatcgagtagctaatgcttgtattcgggacaatgtattattagcgagtgggacttctgttttggcaggattacctggagggcttgctatggcaattaccattccagctgatgtggctcaattttatgctttctctctgaaattggctcaagaattaggttatatttatggttatgaggatctttgggtttcacgagaggagttgagtgaagatgctcaaaataccctcttgctttatctaggcgtaatgttaggggtgaatggaactgctgctttgctacgtgctggtggtataacaattgccaaacaggtaatgaaaacagtgcctaataaagctttaacaaagacgctttggtaccctattttgaaaaaagtcttaaaaatatttggtgtgaatcttaccaagggagggttggccaaaggaatggggaaatttattcctatcttgggtggtatcatttcaggtggtttaacctttgcaactatgaaaccaatgggggaaagcttgcagaaagaattatccaagctagtcaactatagtgaagttcaatatcaagaagatgttgaaacaatccgaaaagaggctgaaatcatcgaaggagagtaa

SEQ ID NO: 228 - DNA, 252 bp, Streptococcus pneumoniae
gtgaagttcaatatcaagaagatgttgaaacaatccgaaaagaggctgaaatcatcgaaggagagtaatatgggactcataaaaactctagctaaaatttatggtaattactttttgaccgtgcaaggtgtaaaagtgatgaaaacgataaagaaagctgaccatgtcgttgttggtctgggcaaactttttattgcagataagctaatggatacggctcggtggctcattaagccagaggagagagaatga

SEQ ID NO: 229 - DNA, 222 bp, Streptococcus pneumoniae
gtggggttcctgctagttttctgcgacttggattaccatctagataagtttaaagaaccaatccaatatcttgtaaaacagcaattgaactgcaaaagaaatgatcatccaaaagaatttcacaatcccaataatcggtttgataaaaagaatagcaagaagaccaaaaaaatttcattctctctcctctggcttaatgagccaccgagccgtatccattag

SEQ ID NO: 230 - DNA, 195 bp, Streptococcus pneumoniae
ctcttcgaaaatctcttcaaaccacgtcagcttcaccttgcagtatatatgttactgacttcgtcagttctatccacaacctcaaaacggtgttttgagctgacttcgtcagttctatccacaacctcaaaacactgttttaagcaacctgcggctagcttcctagtttgctctttgattttcattgagtattag

SEQ ID NO: 231 - DNA, 234 bp, Streptococcus pneumoniae
atggacaatatcatcgatgtgtcaattcctgttgcagaagtggtggacaagcatccagaagtcttggaaattctagtggagttgggttttaaaccccttgccaatcccttaatgcgcaatacagttggtcgtaaagtatcacttaaacagggttctaagctagcaggaactcctatggacaagattgtacgcacactggaagcgaatggctacgaagtgattggattagactaa

SEQ ID NO: 232 - DNA, 1335 bp, Streptococcus pneumoniae
atgacagatgaacggattcatgtcctacgggatattttgttagaattgcacaatggcgcctctcctgagtcggttcaagatcgctttgatgcgacctttacgggcgtgtcagccatcgagatttcccttatggagcacgagctgatgaactcggattcgggcgtcacttttgaagatgttatggaactctgtgatgtccatgccaatctttttaaaaatgctatcaaaggtgtcgaagtttcagatactgagcatccaggtcacccagttcgtgtcttcaaagaagaaaatctggctctccgtgcggccttgattcgcattcgtagattgttagatacctatgagtctatggaagacgaggaaatgctggcggagatgcgtaagggtttggtgcgtcagatgggacttgtgggtcaatttgacatccattaccaacgtaaggaagaactcttctttcctatcatggagcgctatggacacgattcacctcccaaagttatgtggggagtggatgatcagattagggaactctttcaaacagctctaacgacagccaagtcactaccagaagtgtcaattagcagtgtaaaggaagcttttgaagcttttgcgacagagtttgaaagtatgattttcaaggaagagtccatcctgctcatgattctccttgagtcttttactcaggatgactggcttcagattgcggaggagagtgatgcctatggctatgccatcatccgtccgtcagagaaatgggtgccagaacgacagatctttattgaggaaaagattgcagaggagcctgtacagctagatacggcagaaggtcaagttcaacaagtcatagatacgccagaaggccattttaccattacctttacccctaaggaaaaggaagctgtgctggaccgccatagtcaacaggcttttggtaatggctatctttcagtcgagcaggccaatctcatcctcaatcatctccctatggagattacctttgtcaataaagaagatattttccagtattacaatgacaatacgccagctgatgagatgattttcaaacggacgccgtcccaagtcgggcgcaatgtcgaactctgtcatccgcctaagtatttggacaaggtcaaggctatcatgaagggacttcgtgaggggaccaaggacaagtatgaaatgtggttcaagtctgagtcgcgaggaaagtttgtccacatcacctatgctgcagtacacgatgaaaacggagaattccaaggtgtactggaatacgttcaggatatccagccctaccgtgagattgatacggactatttccgtggattagaataa

SEQ ID NO: 233 - DNA, 255 bp, Streptococcus pneumoniae
atgagttacgaacaagaatttatgaaggaatttgaagcttgggtcaatacccaaatcatgattaacgacatggcgcacaaggaaagccaaaaagtttacgaagaagaccaggacgagcgtgccaaagatgccatgattcgctacgagagtcgcttggatgcttatcagttcttgcttggtaagtttgaaaacttcaaagtaggcaagggattccatgatttgccagaaggcttgtttggtgagcgaaattattaa

SEQ ID NO: 234 - DNA, 396 bp, Streptococcus pneumoniae
atgtcaaagaaactcaatcgtaaaaaacaattacgaaatggcctccgacgcgcaggtgccttttcaagtactgtgactaaggttgtagatgagacaaaaaaagtcgtgaagcgtgcagaacagtcagcaagcgcagctggtaaggctgtttctaaaaaagttgaacaagcagtagaagctcccaaagagcaagctcaaaaagtagctaattctgtagaagattttgcagcaaatttgggtggacttccacttgatcgtgccaagactttctatgatgaaggaatcaagtctgcttcagatttcaaaaactggactgaaaaagaactccttgccttgaaaggaatcggcccagctaccatcaagaaattgaaagaaaatggcatcaagttcaagtaa

SEQ ID NO: 235 - DNA, 207 bp, Streptococcus pneumoniae
gtggacttctcagcgccgccactttctgtaaaatgtgggattcaaaacacctctaatggctctattgtagcaagattttttcggaaatgcaaggctcaagaaaaattacttgaacttgatgccattttctttcaatttcttgatggtagctgggccgattcctttcaaggcaaggagttctttttcagtccagtttttgaaatctga

SEQ ID NO: 236 - DNA, 450 bp, Streptococcus pneumoniae
gtgattggagtcgttgcgagagagaatgccgcagagcagatcaaacagtatcaaaaatttactgtgaatatttctgatgaaacttctatgcttgcgatggagcaggctggttttatcagtcatcaggagaaattggaacgtttgggagtgcattatgaaatttctgaacgaactcagatttctattttagacgcctgtccacttgttttagattgtcgggtagataggattgttgaggaagacggtatttgccacatctttgccaagattcttgagcgacttgttgccccagaattcctggatgaaaagggacattttaaaaatcaactgtttgccccaacctatttcatgggagatggatatcagcgcgtttatcgctatctggacaagcgtgtagatatgaagggcagtttcatcaaaaaagcgaggaagaaggatggcaagaactga

SEQ ID NO: 237 - DNA, 558 bp, Streptococcus pneumoniae
atggcaagaactgagctgtcagataaaatcgaaacagaacgtctcgttttacgagtccgtactgtggcggatgctgaggatatccatgcctacgctagtttgccagaggtcgcctatccagcaggttttcctccagtcaagaccttggaagatgagatttattatctggagcacattcttccggagcgtaatcaaaaggaaaatctcccagcaggctacgggattgtcatcaaaggaacggataagatcgctggctctgtcgatttcaaccatcgctatggggacgatgtgctagagcttggctataccttacactcagactactggggtcgaggttatgttccagaagctgcgcgtgccttgattgacttagcctttaaagatttgggtcttcacaagattgaactaacttgctttggatataaccttcaaagtaaacgagtcgcggaaaagcttggctttaccctcgaagctcgcataagagaccgcaaagatgctcaaggcaactgctgtgatgatttaagatatgccttgctgaagagtgaatgggaggaataa

SEQ ID NO: 238 - DNA, 963 bp, Streptococcus pneumoniae
atgagcgatgtaaaagaggaagtaagctctctatctgagaagcagttacgccaaattgatgttgagtatgctgaattaaatgatagtgatattatcgagcgattagcttatttagaaattaacaacaatgaaaaacgtattgtcatctctgatattgaaccaaccaaggaaataatgtcagtctcggaccaaatttttgagattcaaaagaattttcaaaaaatcaagaatatgttcgaattgtttatttcagatgtctcggattttttaagtattaaaaataaacttgagtcaaaggaattagaaattgaagaggcagatgtaaatcgtttcatgattcatttattatccagtggaaaattgtttgtcgattttaacgaaaaccaaattaaacaaaaatattccaaagatagtgaggagtttgattgtatacatggttttgcaagctatcagtatgatatcaattttacttatcgattttgccattctttgagaaattattcgcaacatactgacttaccaataaatgaggtaaaagctgttagcccagatgatgagactgttataatagatttctatattgatttagattatcttttaaattccaactttaaatggaaaaaattgaaaggggagttgataaaactaaaccaagaaacatctaagattgacgctatagctctagtgaaagaatactttaatgctcttacagagctctatggtaattataataagttgtttttaaagttaaaccataatacattagtagatattaaatcaaagttggaatcattaaaattgaaacactctaggtattatatttcaaagataagcaagtatgatcttaaatataatcctggaaattatactatgtcaccacttgcagcatttgctgaaattgaagagatttatattgaactttcaaaaattggtttggttaaaattgtcaataaaagtaattaa

SEQ ID NO: 239 - DNA, 2652 bp, Streptococcus pneumoniae
atgtctaaagaactttcatctaaatacaatccagccgaggttgaggctggtcgttaccaaaaatggcttgatgctgatgttttcaagccttcaggcgatcaaaaggctaagccttattcaatcgttattccaccaccaaacgttacaggtaaacttcaccttggtcacgcttgggatacaactttgcaagatattatcatccgtcaaaaacgcatgcaaggttttgataccctttggcttcctgggatggaccacgcagggattgccactcaggctaaggtagaggagcgcttgcgtggtgagggcatttcccgctatgaccttggtcgtgagtctttcttgacgaaagtctgggaatggaaagacgaatatgccactactatcaaggaacaatggggcaagatggggctctctgtagactactctcgtgagcgtttcactcttgacgaaggtttgtcaaaagctgttcgtaaggtctttgtggacctttacaagaaaggctggatctaccgtggtgagtttatcatcaactgggacccagcagctcgcacagccctttctgatattgaggtgattcacaaggatgtcgaaggtgccttctaccacatgaactacatgctggaagatggttcacgcgcccttgaagttgctacaactcgtcctgagactatgtttggggacgttgcggttgcggttaatccagaagacccgcgctacaaggacttgattggtaaaaacgtcatccttccaatcgctaataaactcatcccaatcgttggagatgagcacgcagatcctgagtttggtactggtgtcgtgaaaatcacacctgcccacgatccaaatgacttcttggttggccaacgtcataacttgccacaagtcaacgtcatgaacgacgacggaactatgaatgagcttgcctttgaattttcaggcatggatcgttttgaagctcgtaaggcagtcgttgctaagttggaagaaatcggtgcccttgtcaaaatcgaaaaacgtgtccattcagtcggtcactcagaacggacaggtgtcgtagttgagccacgcttgtctactcaatggttcgtcaagatggaccaattggctaagaacgccattgccaaccaagacacagaggacaaggtcgaattctacccacctcgtttcaacgataccttccttcaatggatggaaaatgtccacgactgggttatctctcgtcagctttggtggggtcaccaaatccctgcctggtacaatgctgatggtgaaatgtatgtcggcgaagaagctccagaaggtgacggatggactcaggacgaagacgtcttggatacttggttcagttctgccctctggccattttcaaccatgggctggcctgaagtcgactcagaagactttaaacgttatttcccaacttcaaccttggtaacaggttacgacatcatcttcttctgggtgtctcgtatgatcttccagtcattggaattcacaggccgtcaaccattccaaaacgtccttatccatggtctaattcgtgatgaagaaggacgtaagatgtctaaatctcttggaaatggcattgacccaatggatgttattgataaatatggtacagatagtcttcgttggttcttgtcaaacggctcagctcctggtcaagacgttcgtttctcttacgagaaaatggatgcttcatggaactttattaacaagatttggaacatttctcgctatatcctcatgaacaatggaggtttgacgctggatgtggcgcatgacaatgtcacaaaagttgcaacaggtgaggctggtaatgtgacggaccgctggattctccacaatctcaacgaaaccattgcaaaagttactgaaaactttgataagtttgagtttggtgtggctggtcatatcctttacaacttcatttgggaagaatttgccaactggtatgttgagttgaccaaggaagttctttacagcgacaatgaagacgataaggtaattactcgatctgttctcctctatacgctggataaaatccttcgtctccttcacccaatcatgccgttcgtgacagaagaaatctttggtcagtacgctgaaggctctatcgtgacagcagcatacccaactgtcaacccagcctttgaagaccttgctgcccacactggtgtggaaagtctcaaaaacttgattcgtgctgttcggaatgcgcgtgcggaagtaaatgtagcaccaagcaaacctatcacaatccttgttaagactagcgatagtgacttggaagccttctttaacagcaatgtcaactacatcaagcgctttacaaatccagaacatttggaaatcgcatcaaccatccctgcacctgaactggctatgtcaagcgtcatcacaggagcagaaatctacttgccactggcagaccttctcaatgtcgaagaagaactggctcgtctcgacaaggaactcgctaaatggcaaaaagaactggatatggtcggtaagaaactctctaacgaacgcttcgtagccaacgccaaaccagaagtcgtccaaaaagaacgcgacaaacaagctgactaccaagccaagtatgatgcgaccgtagcacgtattgatgagatgaagaagttggtgaaataa

SEQ ID NO: 240 - DNA, 756 bp, Streptococcus pneumoniae
atgtccaaacaccctcattatgaattgttaaatttaattggctacggtcttgccaagtttgacaagctttttataaaagaatttcaatgctctagcaagtcggagttttatcgctatgtggtttctctgggaattgctgaaacaactggagttgtaaaaaatagaatggatttatttgatccttattttgacaataatcgaaaaggttggtggcagaaagctgaagtttatcgttttcgtaaagatttaattgatatgatgtttggaaatgaagatgttcatagttatgctgaaatagttaaaatgttacttgccagtgaagggaagaaaacaggcataaccatcgttgaaaaaccaatagttcgaactaaattcaaacgtctacaggaaacgggaatggaggctgagaattattttatccttcattttgataaagaagaaaaattccaaggtggacagttaaccgatgcccgtctttatggtgatggatatgactttcaggtagatgtccaagagtattcttaccttgccgaagtaaaaggtatccgaaaatctaaggggcgtgtgcgtttaactgcaaaagaatttgaaaaagtcaaggagtttcaatcggattttattttatccttggtcacaaatctagatgatattccaaagttagtgttaatcgataatcctttaaaacattttgagtttaaaaagaatattatcaaaaatgaaatcattgaatatagaagcgtagaggatttgtattag

SEQ ID NO: 241 - DNA, 804 bp, Streptococcus pneumoniae
atgcaaccaacttacaacattgacaatccaaacttgtcttatgaagcgaagcgtgatttatggcggataggttttggtctgcagaaagttgacaatctagtgccatcagcgtatatggaatctttggctgagaaacagtcccggggagaactgacttatgagcaggtttatgaggatgcaacggcttatcaccatactattgatgcaagtacggaagaggcagacttggtttctctacgtattgtagaactattgtctcgaagaggctttagctttagtcctgcgaccttacttgctattcataaggagttgtttcaagatatatttgaaccctctattccggtggggcaatttcgtcagaccaatatcacaaagaatgaacctgttttgaatggtgaaagtgttgtgtactctgattactccatgattcaaatgaccttagattatgattttaatcaggaaaaacaagttgcatatgcgacactaactcaggcggatgtggttaaacaaatccagcattttatttcaggaatctggcagattcatccatttcgcgaaggaaacactcggacagtaacggtctttttgattcagtatcttcgtgagtttggttttgatattgataatacaccatttcagcaacattccaaatattttcgtgatgccttggtattagataatgcaaagattttacagcgacgttctgagtttttaacagctttttttgaaaatctcttgctcggtggtcaaaatgatttgtcttcagaaaaaatgtatctagatttagacctcgatttttcataa

SEQ ID NO: 242 - DNA, 285 bp, Streptococcus pneumoniae
ccaaggctggcaataccgacacgattcttatcatcggttcctaagagtaagggaattcaagcatctatgtcacgcaagggaaacagccaagacaacggtatgatggagtccttctttgggattctgaaatcggaaatgttttatggctatgagaaaacatttaaatcacttaatcaattggaacaagctattgtagactatattgattactacaacaataaacgaattaaggtaaaactaaaaggacttagccttgtgcaatacagaactaaatccttcggataa

SEQ ID NO: 243 - DNA, 306 bp, Streptococcus pneumoniae
atggaaaagtgctacacagatgtgacagaatttgccattccagcaagtactcaaaagctttacttatcaccagttttagatggctttaacagcgaaattatcgcctataatctttcaacttcacccaacttagaacaagtacaaacaatgttggaacaggcattcacagagaagtactacgagaatacgattctccatagtgaccaaggctggcaataccgacacgattcttatcatcggttcctaagagtaagggaattcaagcatctatgtcacgcaagggaaacagccaagacaacggtatga

SEQ ID NO: 244 - DNA, 273 bp, Streptococcus pneumoniae
atgactgagttttcgttagatcttcttctaaaagccattaaactagctcgttcgacctactactatcacttgaaacagctagacaaaccagataaggaccaagagcttaaagctgaaattcaatccatttttatcgaacacaagggaaattatgcttatcgctgtattcatttagaactaagaaatcgtggttatctggtaaatcataaaagagttcaaggcttgatgaaagtactcaatttacaagctaaaatgcgacagaaacgaaaataa

SEQ ID NO: 245 - DNA, 276 bp, Streptococcus pneumoniae
gtgtacatgaactacaccccaaaagttagacagaaaaaatctaacttttggggtgtttttattatgaaattaacttatgatgataaagttcagatctatgaacttagaaaacaaggatatagcttagagaagctttcaaataaatttgggataaacaattctaatattaggtacatgattaaattgattgatcgttacggaatagagttcgtcaaaaaagggaaaaatcgttactattctcctgatttaaaacaagaaatgattaataaagtctga

SEQ ID NO: 246 - DNA, 1266 bp, Streptococcus pneumoniae
atggctgtttttgtgtctttggatggaattgtggtagaagtacttgatgtcttttcttcttttaatggggatagtgagtttttcttgtgtaaacgtcttaaagacaagagtcagtttgttatggaacgctctcagttcgaggagatgttccaacttcaaagtagtcgcttgacgacgcaagaaaaattacaattgtttacctctgtgtttgctggccgttatgatgtttatgctaagagttttatcaatgatcaagggaaaattcagtattttccttcctatgattgtggttggaagcagttgctacctgaaaaacggagtttccagacattgacggattccgttttgaaatctcattttcgtggggagacagctatcggtatctttcctatgcacttagatgatagctgtcattttttggtactggattttgatgaaggagattggaaagaagctggtttaaccattcgaagaatagccagggaacgccagatggaagcccatttagagatttctcgttcgggtcacggactccatatttggttcttctttgaggaagcgattccgagtcgagaggctcgcttgtttggaaagaaactgatagaactggcaatgcaggaaagtatgcaactgtcctttgattcttttgatcgcatgtttccaaatcaggatgtccttcctaaggggggatttggaaatttgattgccttgccttttcaaggagaagcttaccatcaagtgcgaacggtctttgtggatgaacattttcaaccttatggagaccaatggaggtatctgcaaggaattcagaagatttcaactgctaaagtggcactgttaatccaagaggagttaggcaagcaagaattggataaggagttgaaggtcgttttatccaatatgatccaacttaaaaaatcgtctgtgacacccaagacactgtttttcttgaaaaatatggcttcattttctaatcccgaattttatttaaagcaggctatgcgacagccaacctatcaaattcctgagcgaatgtatttatttggagaatccgattattatttatggctgccaagaggcttgttatatccattgcaagataaatttaagcaggtagttgtggaggataggagaaaggtacaaaggtctattagagtagcatttaagggagagcttactttggagcaagaattagccctgtcagatatgaattctaaagaaaatggtttacttcatgcgggacaggttttggaaagagcgttttag

SEQ ID NO: 247 - DNA, 1197 bp, Streptococcus pneumoniae
atgattcaatctctatttaagttggaaaatagtcaaagtcttttggatgagtatgagatgatgattgtggatgagtgtcaccatatctctgccttgatgtttgaaaaagttgttgctcagcttagagggaagtatctttacggtttgacggctacgcctgagcgtaagaatggtcatgagcctattgtttttcagagaattggtgagatactccatactgctgataagagggaaacggattttaaacggcaattgcaattaagattcacttcttttggtcatttggagattgaaaagaccaaagcaagtaattttatacagctcagtgattggattgctacagactcagcgaggaatcagttgattctcaaggatattctagcccaagtggcagaaggacggaatatcttgggtttagttaatcgaattcaacagatagatgtctttgaaaagttattgaaagagaaagaggttgatgactgttacattattagcggaaaaaccaaagtccgagaaagaacgagtttactggagacgttagaacagttagataaagggtttgttttgttgtctactggaaaatacattggcgaagattttgacttacctcagttggacacgcttatcttggcagcacccttttcttggaaaaataatttaattcagtatgcaggtcggattcatagaaactacaaggataagtctttggtgcgtattttcgattatgtggatattcatgttccttatttagaaaagatgtttcagaaacgacaagtagcttatcgaaagatggattatcgtgtcatcgagggtgaggagaaacaattcgtttatgttgatagtagatatgagaaggtgttgagagaggacttagcaggggaaagacaggaatgtctgcttattttaccttatgtgcaccagacaaaactgatgaattttctaaaagaatttaggattagtcaaattgagatatgtataccagagacggttgcaaataaagcatggctagaccagttgaagagccagaaaattaaagtgtcttttactcaatcaaaaatagtaacgcctattcttttggtgaataagactattgtttggtatggtgcaatgccattattagggaaggtagatgagatgaccatattacgtttggaatcagctagtatagtttctgaactagtggcaggtttacgatag

SEQ ID NO: 248 - DNA, 294 bp, Streptococcus pneumoniae
ataatttcatcaaaattattacccaatgttattttacctaggttaattattttttcggtgatgtacaccaactccaaaggaacgttaataaacatctctgtaaaacgggtcatattatctctatttttgagaaaaaaacttttctcaatatcaattggatttactttatctccagtttttcttccaaaagctattccccttccaaaaagaagaatatcgatatcttttttactttgcgcaattacggcattgtggtttagtattcgttttatgatcataaaatttcccttttaa

SEQ ID NO: 249 - DNA, 840 bp, Streptococcus pneumoniae
atgatcataaaacgaatactaaaccacaatgccgtaattgcgcaaagtaaaaaagatatcgatattcttctttttggaaggggaatagcttttggaagaaaaactggagataaagtaaatccaattgatattgagaaaagtttttttctcaaaaatagagataatatgacccgttttacagagatgtttattaacgttcctttggagttggtgtacatcaccgaaaaaataattaacctaggtaaaataacattgggtaataattttgatgaaattatctatattaatttaacggatcatatttcttcgagcatagaacgttataaagaagggattattatttcgaatcccctacgctgggaaatatcgaaatattataaagaagaatttgaacttgggaaaagggctttacaaataataaaaaaagagttaggtattgaacttccaattgatgaagctgcattcatagcgctacattttgttaatgctaatttagaaaataattttcaagagtcgtataaaatcactgaaataattatgggaattgagaaaatcattcaagatttctattgtactgagtttaaccaagattctattgattattatagattcataactcatataaaattatttgcccatcgcttggttgaaaatacaacttattgtgacgatgatgatgaagacttgttagcattaatgaaaaataaatatcctagagaatatgaatgtggtgaacaggtggcaatgtttatacaaactgagtacaattatttgctgacttctagtgaattagtttatttgatggctcatattcgtcgcttaacaaaaaatttagattaa

SEQ ID NO: 250 - DNA, 1839 bp, Streptococcus pneumoniae
atgagttataaagatacggtacaaaaaatcctcgatgtaattggaggtgaaaaaaatgtcaatagagttacccattgtgtaacacgtttaagattagaattaaaagatgaaaatttagtcaatgatgatgatgtgaagaagataccaggtgtaataggtattatgaaaaagaatggacaatatcaaattatacttggtaatgatgtagctaattattataaagaattcgttaaacttggcaattttgaatccgattcagttgttcaagggcacaaagggaatattttagaaagaatcattgagtatatcgctggttccatgactccaatcattccagcaatgttagggggaggtatgctgaaagtcttggtaattattttaccaatgcttggtatattgcaatcagattctcagactattgcttttttgacattttttggggatgctccatattatttcttaccgctgttattagcttattctgcatcacaaaaattaaaagtaacatctacattagctatgtctgtagcaggtgtacttctccatccaaattttgttcaaatggtgcaatcagggaatcctcttagtttatttggtgcacctgtgacaccagctagttatggttcgtcagtcgttccaattcttattatggtttggttgatgaaatatattgaaaaaatgattgctaaattaacaccagctgttactaagagttttttgcaacctacgctagtattattagtatcaagctgtattgccttagttgtagtcggacctattggagtaattgttggtgaaggattatcaaatctagttgggcaaatgtatggtgtagctggatggcttacattagctattcttggtgctattatgccatttattgttatgactggaatgcattgggcttttgcacctatttttttggcggcatctattgctactccagacgtattaattcttccagcaatgttagggtcaaacttagctcaaggggctgcttcgatggctgttgcattaaagagtaaaaataataatacaaaacaaattgcttttgcagcaggtttctcagccttacttgcagggattaccgaacctgcattatatggtgtgactttaaaatataaaaaaccgctttatgcagctatgattggtggtggattagcgggattatttgcaggtcttactagtgttaaagcatatctatttgctgtcccatctttgatagcgttgcctcaatttatttattctgatgtgccatcaaatattgtaaatgctttaattgtggcggtcatttcggttgttattacctttgtattagcttatatatttggaatcgatgaagaagagagttctagcaatttagaagttaaagctggagtttcaaataaaaaaatgatattttctcctatatcaggagaaatcattccgttaagcgatgtccaggataaaacattttcagataaactaattggagacggagtagcgattatcccaagtgaaggtaaggtttatgcaccatttgatgggaaaattacaaatatttttccgactaagcacgcaattggattgaagagtgatgagggtgttgagttactaattcatattggattagatactgttgagctaaaaggtcaaggttttattagtcatgtagaagaaggagacagagttttcaaaaatcagttgatttttgaaatggacttgaatttaatcaagactaaaggctacgaaacagttacaccagtaattgtaacgaataccaatgattttctagatgtattagtattacctaataatcagacaatcgagcattctaaggaattactggtaatattataa

SEQ ID NO: 251 - DNA, 1416 bp, Streptococcus pneumoniae
atgaccatttttccagatgattttctttggggtggagctgttgcagctaatcaagtagagggagcatataatgaagatggtaagggcttatcagttcaggatgtgttacccaaaggtggattaggagaagcaacagaaaatcctacagaagataacttaaaattgataggtattgatttttatcataaatataaggaagatatatccttgttttctgaaatgggctttaatgtttttcgtacttctattgcatggagtagaatttttccaaaaggagatgaagaagaacctaacgaagctggtttgaaatattatgatgaattgtttgatgaactacatgctcacgggatagagccacttgtaactctttcacactatgagactccattatatttagcaagaaaatatcatggatgggttgataggagaatgattcatttttatgaaaaatttgctcgaacagttttagaaaggtataaagataaagttaaatattggcttacatttaacgaagtaaactctgttttggaattaccatttactagtggaggaatagatatacctaaggagaatctttcgaaacaagaattatatcaagctatacatcatgaattagtcgcctcaagtttggttacaaaaattgctcgtgagattaattcagagtttaaggtgggatgtatggtattagctatgccagcttatccaatgactccaaatccaaaagatgtatgggcgactcatgagtatgagaatctaaattatctattttcagatgtgcatgttagaggttattatccgaattatgcaaaaagatattttaaggaaaatgacattaacatagagtttgcagctgaagatgcagagttattaaaaaattatactgtagattttttatcctttagctattacatgagtgtgactcaatctgctattccaacacagtataattcaggagaagggaatattattggtggtttagtaaatccttatttagagtcttcagagtggggatggcaaattgatccaattggactacgtataattttaaatagatattatgaccgttatcaaatcccattatttatagtagaaaatggattaggtgctaaagatcaactaataaaagatgaacttaataacttaaccgtccaagatgattatagaattcagtatatgaaagaacatttattgcaagttgctgaagctctacaggatggtgttgaaattatgggctatacgtcttggggatgtattgactgtgtttctatgtccactgcacaactttctaaaaggtacggtctcatttatgttgatcgaaatgatgatggaaatggcacattcaatcgatataagaaaatgtcctttacttggtataaaggagtgattgaatcaaatggagaatccttattcaaatag

SEQ ID NO: 252 - DNA, 1047 bp, Streptococcus pneumoniae
atgtcaactattgaagaacaattaaaagcgcttcgcgaagaaacgctggctagcttgaagcagattactgctggaaatgaaaaagagatgcaagatttgcgtgtctctgtccttggtaaaaagggttcgctcactgaaatcctcaaagggatgaaagatgtttctgctgagatgcgtccaatcatcgggaaacacgtcaatgaagctcgtgatgtcttgactgctgcttttgaagaaacagctaagctcttggaagaaaagaaagtcgcggctcaactggctagcgagagtatcgatgtgacgcttccaggtcgtccagttgcgactggtcaccgtcacgttttgacacaaaccagtgaagaaatcgaagatatcttcatcggtatgggttatcaagtcgtggatggttttgaagtggagcaagactactataactttgaacgtatgaaccttccaaaagaccacccagctcgtgatatgcaggatactttctatatcactgaagaaatcttgctccgtacccacacgtctccagttcaggcgcgtgctatggatgcccatgatttttctaaaggtcctttgaagatgatctcgccagggcgtgtcttccgtcgcgatacggacgatgcgacccacagtcaccaattccaccaaatcgaaggcttggtagttgggaaaaatatctctatggctgatcttcaaggaacgcttcagttgattgtccaaaaaatgtttggtgaagagcgtcaaattcgtttgcgtccatcttacttcccattcacagagccatctgttgaggtggatgtttcttgcttcaagtgtggtggagaaggctgtaatatatgtaagaaaacaggttggatcgaaattatgggggccggtatggttcacccacgtgtccttgaaatgagtggtatcgatgcgactgtatactctggctttgcctttggtcttggacaagagcgtgtagctatgctccgttatggaatcaacgatatccgtggattctaccaaggagatgtccgcttctcagaacagtttaaataa

SEQ ID NO: 253 - DNA, 993 bp, Streptococcus pneumoniae
ttggtagaatccacggatatcgttgattccataacggagcatagctacacgctcttgtccaagaccaaaggcaaagccagagtatacagtcgcatcgataccactcatttcaaggacacgtgggtgaaccataccggcccccataatttcgatccaacctgttttcttacatatattacagccttctccaccacacttgaagcaagaaacatccacctcaacagatggctctgtgaatgggaagtaagatggacgcaaacgaatttgacgctcttcaccaaacattttttggacaatcaactgaagcgttccttgaagatcagccatagagatatttttcccaactaccaagccttcgatttggtggaattggtgactgtgggtcgcatcgtccgtatcgcgacggaagacacgccctggcgagatcatcttcaaaggacctttagaaaaatcatgggcatccatagcacgcgcctgaactggagacgtgtgggtacggagcaagatttcttcagtgatatagaaagtatcctgcatatcacgagctgggtggtcttttggaaggttcatacgttcaaagttatagtagtcttgctccacttcaaaaccatccacgacttgataacccataccgatgaagatatcttcgatttcttcactggtttgtgtcaaaacgtgacggtgaccagtcgcaactggacgacctggaagcgtcacatcgatactctcgctagccagttgagccgcgactttcttttcttccaagagcttagctgtttcttcaaaagcagcagtcaagacatcacgagcttcattgacgtgtttcccgatgattggacgcatctcagcagaaacatctttcatccctttgaggatttcagtgagcgaaccctttttaccaaggacagagacacgcaaatcttgcatctctttttcatttccagcagtaatctgcttcaagctagccagcgtttcttcgcgaagcgcttttaa

SEQ ID NO: 254 - DNA, 510 bp, Streptococcus pneumoniae
atgattataaaagtagaaatggcagatgttgaggtgttggctaaaattgccaaacaaacctttcgtgaaacctttgcgtatgataatacggaagagcagttacaggaatactttgaagaggcttatagtctgaaaactttgtcaactgagttgggaaatcctgactctgaaacctatttcattatgcatgaggaggagatagctggttttctcaaagtcaactggggaagtgctcaaactgagagagaattagaggacgcttttgaaattcaacgcctctatgtgctacaaaaattccaaggatttggactaggtaagcaactgtttgaattcgcacttgaacttgctacaaaaaatagtttttcttgggcttggctaggtgtttgggagcataatacaaaagctcaagccttttataatcgatatggttttgaaaaatttagccaacatcattttatggttggtcaaaaagtagatacggattggttactgagaaagaaattaaggtaa

SEQ ID NO: 255 - DNA, 2403 bp, Streptococcus pneumoniae
atgcttatatcttataaatggttaaaagaattggtggacattgatgtgccatcacaagagttggctgaaaaaatgtcaactacaggaatcgaggtagagggtgtcgaatcaccagctgctggtctctcaaaaattgtcgtcggtgaggtcttgtcttgcgaagatgtgccagagactcacctccatgtttgtcaggttaacgttggcgaagaagagcgtcagatcgtttgtggtgccccaaatgtgcgtgctgggatcaaggtcatggtggctcttccaggagctcgtatcgctgataactacaaaatcaaaaaaggaaaaatccgtggtttggagtcacttggaatgatctgttcacttggtgaattgggaatttctgactcagttgtgcctaaggaattcgcagatggcatccaaatcttgcctgaagatgccgtgccaggtgaggaagtcttttcttacctagacttggatgatgaaatcatcgaactttccatcacaccaaaccgtgcagatgccctttctatgtgtggagtggctcacgaagtggcagccatctatgacaaggcagtcaactttaaagaatttactctaacagaaactaatgaagctgcggcagatgccctttctgtcagcattgagacagacaaggcgccttactatgcagctcgtatcttggacaatgtgaccatcgcaccaagtccacaatggttgcaaaaccttctcatgaacgaaggaatccgtcccatcaataacgtagtggacgtgaccaactacatcctgctctattttggtcaaccaatgcatgcctttgacttggataactttgaagggactgacatccgtgtgcgtgaagcgcgtgctggtgaaaaattggtgaccttggacggtgaagaacgtgacttggacgtgaatgacctagtcatcactgtcgcagacaagccagtagcccttgcaggtgtcatgggtggtcaagcaacagaaatctctgaaaaatctagtcgtgttgtccttgaagctgctgttttcaatggcaaatctatccgtaagacaagtggtcgcctgaaccttcgttctgagtcatcttctcgctttgaaaaaggaattaatgtggcaacagttaatgaagcccttgatgcggcagctagcctgattgcggaacttgcaggtgcgacggtgcgtaagggcatcgtttcagcgggtgagcttgatacttcagatgtagaagtttcttcaacccttgctgatgttaaccgtgtcctcggaactgagctgtcttatgctgatgtagaagacgtcttccgtcgtcttggctttggtctttctggaaatgcagacagctttacagtcagagtcccacgtcgtcgttgggatatcacaatcgaagctgacctctttgaagaaattgctcgtatctatggttatgaccgcttgccaactagtctaccaaaagacgatggtacagcaggtgaattgacagccacacaaaaactccgccgtcaagttcgtactattgctgaaggagcaggtttgacagaaatcatcacctatactctaacaactcctgaaaaagcagttgagtttacggctcaaccaagtaaccttacggaactcatgtggccaatgactgtggatcgttcagtcctccgtcaaaatatgatttcaggtatccttgataccgttgcctacaacgtggctcgtaagaataaaaacttggccctttacgagattggaaaagtctttgaacaaacaggtaatccaaaagaagaacttccaaatgaaatcaacagttttgcctttgccttgacaggcttggttgctgaaaaagatttccaaacagcagcagttccagttgatttcttctatgctaagggaatccttgaagccctatttactcgtttgggactccaagtaacctatacagcaacatctgaaatcgctagccttcatccaggtcgtacagccgtgatttcactcggtgaccaagttcttggtttccttggccaagtgcatccagtcactgccaaggcttacgatattccagaaacgtatgtggctgagcttaacctttcagctatcgaagctgcgcttcagccagcgactccatttgtagaaatcaccaaattcccggcagtcagccgtgacgttgcccttctcctcaaggcagaagtgactcatcaagaagttgtagatgctatccaagctgccggcgtgaaacgtttgacagatatcaaactctttgacgtcttctcaggtgagaaattgggacttggtatgaagtcaatggcttatagcttgaccttccaaaatccagaagatagcttaacggacgaagaagtcgcacgctatatggaaaaaatccaagcatcgctcgaagaaaaagtcaatgcagaagtgcgttaa

SEQ ID NO: 256 - DNA, 888 bp, Streptococcus pneumoniae
ttggcacagatttatgccttccccttagctactgcaactatggctgctattttaagtttcttattttttttcctatctttttacaagaaaaataaacaaatacggttttactctggcattttgctcttactatcgctcatattactattattcggaacagataaaaccctttcttctgcatcaaataagactaaaaccttaaaattagtaacttggaacgtcgctaatcaaatagaagcacaacatattgagcgaatttttagccattttgacgccgatatggctatattccctgaactagctaccaatatcagaggtgagcaagaaaaccagagaatcaaactattgtttcatcaagttggactttctatggccaactatgatattttcacttctccacctaccaatagtggaatagctcctgtgactgtgattgtcaagaaaagttatggtttctatacagaagctaaaacttttcatacaacacggttcgggacaattgtattacattcgagaaaacaaaatataccagatatcattgccttgcatactgctcctcctctgccaggtttaatggaaatctggaagcaagacttaaacatcattcataatcaattggcttcaaaatatccaaaggctattattgcaggtgattttaatgcaactatgcgtcatggagcacttgcaaaaataagctctcatagggacgcattaaatgcactgccaccttttgaaagaggaacttggaatagccaaagtccaaaactttttaatgcaacaatagatcatattttattgcctaaaaaccactactatgttaaagatttagacattgtaagttttcaaaactctgatcatagatgtatttttacagaaatcacattttaa

SEQ ID NO: 257 - DNA, 447 bp, Streptococcus pneumoniae
atgttaagattagaagatgggaaaaaagaaggaaaatcaaatagagaaattgcctctctacttggaaaagctcctcaaactatccatactgaaatcaagtatgggacagtccgaaaatgtcttggaaaagggcgcttcaaagaggtttattctgccgactatgctcaacagtcttatgaaaataatcgcaagcactcggtcaagagatcaagcttgaccaaggaactaaaggaaaagattctccactatcataaccaaaaatttttgcctgaaatgatggtgatggctaaaggggttaacgtgggaatttcaaccatttactattggattcatcatggaaagttggggttaagcaaacaggatttgctttatcctagaaaaggaaaatctgttaagaaacaagttagtcccaattttaaacccgctgatcaatctatcgaatcataa

SEQ ID NO: 258 - DNA, 267 bp, Streptococcus pneumoniae
ttggaaggatgtctatctgagctctttagcaaggaggaaatccttgaaagtgatatgcgagtagctatcatgagcgagttgattgaagccagaaataagcaaggaatcagtcagaaaaagctagaggaagtcagtggagtgagtcagcctgttatagctaggatggagacaggtaagactagtccacagttggacacagtcttaaaagtcctagctagtctaggaaagacactagcagtcgttccacttgaacagggaaaaagttga

SEQ ID NO: 259 - DNA, 297 bp, Streptococcus pneumoniae
tttgaaactatatatctgtttcggacaaaagaaaaagacttgaagcaaacgtctcaaatcctttgtatagcttgttttatagctttatttcagttagacggttcaaacgcgttattagtaattcttataagtgactatggcttgttattagaaaagactataactgattctagtcaactttttccctgttcaagtggaacgactgctagtgtctttcctagactagctaggacttttaagactgtgtccaactgtggactagtcttacctgtctccatcctagctataacaggctga

SEQ ID NO: 260 - DNA, 2250 bp, Streptococcus pneumoniae
atgtcaactacaatcgtcggtttccctcgtttgggcgaattccgtgaattaaaatttacaactgaaaaatactttagaaaagaaatctcagaagaagaacttttagcagcagcaaaagacttgcgtgctaaacactggaacattgtcaaagaaaaaggcatcactgaaattccatcaaatgacttttctcactatgataacttcctagatgcggctttccttttcaacgtggtgcctgcatccgttcaaaacttggacttgtctgaccttgagcgctacttcgctttgggacgtggttaccagggagaaaaaggggacgttcgcgccctcccaatgaagaaatggtttaacactaactaccactacatcgttcctaaatttgaaaaagacactcaagtaaaattggctggtcacaagatttttgatgagttccaagaagccaaagaaattggattgaacactcgtcctgttcttgtaggtcccttcactttccttcaattgtcagactttgaagaaggcgtgaaagcagacgacttcgtagatagcttagtggctgcttaccaagaagtttttgctaaattggctgaacttggtgcgacttgcatccaattggatgaagcggctcttgtaaaagacttgacagctgaagaaaaagctctcttcttgaatctttacaacaaactcttggctgacaaaaaaggtcttgaagtcttgcttcaaacttatttcggtgatgttcgtgacgtatacgctgaccttgtaaacttgccagtagatgctatcggttttgactttgttgaaggtaagaaaactcttgaactcgttaaaggtggcttcccagctgacaagactctctatgcaggtattgtcaatggtaaaaacatctggcgcaacaactatgaaaagagcttggctgttcttgagcaaatcccagctgaaaacatcgttttgacaagctcttgctcacttcttcatgtgccatttacaactgctaatgaagaatttgaaccagcactcttgaaccactttgcctttgcagttgaaaaattggatgaaatccgtgacttggatgctatccgcaatggtcaaggttcagaagctcttgcagccaacaaagaactctttgcgactgagcgtgttggtgaaaatgctgaacttcgtgcgcgtatcgctggcttgacagacacagactacactcgtttgccagcctttgcagaacgtgaagctatccaagaagaagctttcaaacttccagctcttccaacaacaacgattggttcattccctcaaacaaaagaagttcgtgccaaacgtttggcttaccgtaaaggtgaattgtctcaaaaagagtacgatgctttccttgctgaaacgattgacgaatggatcaagtggcaagaagatattgactttgatgtccttgttcacggtgaatttgagcgtaatgacatggttgagtacttcggtcaaaacttgtcaggatacctcttctctaaaaatggatgggtacaatcatacggtatgcgtggggtaaaaccaccaatcatctggggtgatgtcactcgtcttaaccctatcactgttaaatggtctagctatgcacaaagtcgtacaaacaaacctgttaaaggtatgttgactggacctgttaccatccttaactggtcattcccacgtgaagacatctctatcaaggattcaactctccaaatcgcccttgctatcaaggatgaagtacttgaccttgaagctgctggtgtgaaaatcatccaaatcgacgaggctgctcttcgtgaaaaattgccactccgccgtagcgactggtacgaagactaccttgactgggctattcctgccttccgcttggtacactcaacagtagcgccagacacacaaatccacactcacatgtgttactcagaatttacagatatcatcccagctatcgataacatggatgcagacgttatttcctttgaagctagccgttcaaaccttgaaatcttggacgaactcaaagcgaaaaacttccaaacagaagtgggacctggggtttacgatatccactcacctcgtgtaccaaatgaaggcgaaatcgacaacacaatcgaagccatccttgctaaagtgccaagcaagaaagtttggatcaaccctgactgtggtttgaaaacacgtggtatcccagaaacaaaagaaagcttgatccgccttgttgaagcagctaaagctgcgcgtgagaaattgtaa

SEQ ID NO: 261 - DNA, 867 bp, Streptococcus pneumoniae
atgtcacgccaaacaccgtcactctcatttgaagtgttccctccaaacccagccgtgggtaatggtaacattatttcagccttgcaggatatgcaggagttggctccccattttatcagtgtaactgccagcaataataaatttaatatcaaggaaacgacggttcgtttggctgactttatccaaaatgatttggcgattccgaccattgcccacttgccagctatttatctaactaaggacaaggttgctgaaactattgctgacttggacaaagttggggtgcagaaaatcttggctcttcgtggggatattattccagacgtggaaccacaaaaggatttccgctatgcaaccgacttgattgagtttatcaaggaacaaacccctcactttgatattattggagcttgctatccagaagggcatccagattcgccaaatcagatttcagatattcaaaatcttaagaagaaagtggatgcaggctgttcgagcctcgtaactcagctcttctttgacaatgagcgcttctatgattttcaggacaagtgcatcttggctgggattgatgttcccattcatgcaggaattatgccaattctgaatcgaaatcaggctctccgactcttgaagacttgtgagaatatccatcttccacgcaaatttaaagccatcttagacaagtatgagcatgaccctgaatcgctcagagcagcaggacttgcctatgcagtggaccaaatcgtggacttggtaactcaggatgttgccggtgtgcatctctatacgatgaataatgctgatacagcaaaatacatccatcaagcaacccatgccttgtttaatcaccagtctctaggataa

SEQ ID NO: 262 - DNA, 270 bp, Streptococcus pneumoniae
gtgctaggaagcttatcttttttcctaagaaatgagaccaaaattcaattactcaagatgctaagccgtcaagcaactcaaaggaaaataggaaatcgaacgacggagcgactgctcctaggcagatttatctttttccacagagttgtaggcgtgttcagttttcaagatacatcattagaaagatttaatattaaagtatctaaacctttcacgctaatcgctatcgggcgattagctaaatgctttactaactctctcgtcaaataa

SEQ ID NO: 263 - DNA, 2214 bp, Streptococcus pneumoniae
atggcaaaacaagtgtttcaaacgacttttgcgggtcgtgagttaattgtagagactggtcaggttgctaagcaagcaaatggctctgttgttgtacgttacggtgagtcaactgtcttgactgctgccgttatgtctaagaaaatggcaactggggatttcttcccactccaagtcaactacgaagaaaaaatgtatgcggctgggaagtttcctggtggctttatgaaacgtgaaggacgtccttcaacagatgcgaccttgacagcgcgtttgattgaccgtccgattcgtcctatgtttgcggaaggtttccgtaatgaagtccaagtcatcaatacagtgctttcttatgatgaaaatgcatctgcaccaatggctgctatgtttggttcatctttggcactgtctatttcagatattccatttgacggaccaattgctggggtacaagtgggatatgtagatggccaaatcatcatcaacccaagtcaagaacaagcagagcaatctcttcttgaattgacagtagctggaaccaagcacgctgtcaacatggtagagtctggtgccaaagaattgtcagaagaaatcatgttggaagcgctccttaaagggcacgaagctgtcaaagaattgattgccttccaagaagaaatcgttgctgctgtcggtaaagaaaaagcagaagtggaattgcttcacgtggatgctgaattgcaagctgaaatcattgcagcctacaacagtgacctccaaaaggcagttcaagtagaagagaaattggcccgtgaagctgcgactcaagtagtgaaagaccaagtgactgccgtttacgaagaaaaatatgcggaccacgaagaatttgaccgtattatgcgtgatgtggctgaaatcttggaacaaatggaacacgcagaagtgcgacgtttaattacagaagacaaggtgcgtcctgatggtcgtaaggtcgatgaaatccgtcctttggatgcggttgtcgacttccttcctcgtgtacatggttcaggtctctttactcgtgggcaaactcaagctctttcagtcttgaccttggctccgatgggagaaactcaaatcattgatggtttggatccagagtacaagaaacgctttatgcaccactataacttccctcaatattctgtaggggaaacaggtcgttacggtgcgccaggtcgtcgtgaaatcggtcacggtgcccttggtgagcgtgctcttgctcaagtcttgccaagcttggaagaattcccatacgctatccgtctagtagcagaagttttggaatcaaacggttcttcatctcaagcttctatctgtgcgggaactcttgcccttatggctggtggtgtgccaatcaaggcgccagtagctggtattgctatgggacttatctcagatggaaataactacacagtattgacagatatccaaggtttggaagatcactttggagatatggacttcaaggttgcaggtactcgtgatgggattacagcccttcaaatggatatcaagattcaagggattactgcagaaatcttgacggaggctcttgctcaagccaagaaagcgcgttttgaaatccttgatgtcattgaagcaaccattccagaagttcgtctagaattggctccaactgctccgaaaattgatacgatcaagattgatgtagacaagattaagattgtcatcggtaagggtggagaaaccatcgacaagattatcgctgaaacaggtgttaagattgatatagacgaagaaggaaatgtgtctatctactctagtgaccaagatgctattaaccgtgccaaagaaattattgctggtttggttcgtgaagccaaagtggatgaagtttaccgtgctaaagtcgttcgtatcgagaaatttggtgcctttgttaacctctttgataagacagatgcccttgttcatatctctgagatggcttggactcgtaccaatcgtgtagaggatttggtagaaatcggggatgaagttgatgttaaggttatcaagattgatgaaaaaggccgtatcgatgcctctatgaaggctcttctacctcgtccgccaaaacctgagcatgatgaaaaaggtgaaaagtctgagcgccctcaccgcccacgtcatcacaaggatcacaaacctaagaaagaatttacagaaacaccaaaagattcagagtaa

SEQ ID NO: 264 - DNA, 618 bp, Streptococcus pneumoniae
atggggtggtggcgcgaaaccattgatatcgtaaaagaaaatgatccagcggcccgcaccactttggaggttttgctgacttatccaggtgtcaaggccttggcggcccaccgtctctcgcattttctctggaagtacgacttcaaactcttagctcgtatgcacagtcagttttggcgcttttggactcagattgagattcatccaggagcccagattgattcaggtgtctttattgaccatggttctggtctggtgattggagagacagcgattgttgaaaaaggcgttcttctctatcacggagtgactctcgggggaacagggaaagactgtggcaaacgccatccgactgtacgaaagggagccctcatatcagcccatgcccaagttatcgggcctgtggaaattggtgaaaatgccaaggtcggtgctgcagcagttgtcgtagcagatgtacctagtgatgtgacggttgtcggtattccggccaagattgtccgtcttcatggtaagaaagatgagcctgttattcacgaagtcgaagaaaaacgggagtattatgtcaataaactcgagcaggctaaagatgccagtcacagatcgtctggtttgtag

SEQ ID NO: 265 - DNA, 885 bp, Streptococcus pneumoniae
atgattcaagcaagaaacaagttaagccaagaagagctatctgaggcgaaaaaagtaattaactgttgccaaaactatgacggtacctatcgcgatccctatctctctaacatgcttaattttgatccaaacatgcccgcctttttcctttattatgaaaaaggcgaacttgttggtttattaactgtctatgcagatgaccaagatgtagaagtgacgatactggttcatccaggtcatcgccgtcaggggattgcgcgtgcattgtttactagttttgagagagaaacagcttctttccccattcggtcagtcacttttcagacagaacgtatttttttagagaatcatcctgactttgccagtaactggggactaatcgaggatgaagagacagaaacctggttaggtaaggatagaagaccatatcagttagcaaaactttctaatcttgaagttttgttagcagatagttcgtatcaggagcaaattagccagttaaaatttcaggcattttcaggggaacatgaatcgagagaagttgtggatagatatgtcgctgaagctctgaaggatccagaaagtcgcttatatattttgttaaaagacggtcaggttattgggacttgcacggttgatttatcgagcgatacgaattacttctacggtttagcaatatcagaacctgaacgtgggaaaggctatggaagctacttagcaaaatcccttgtcaaccaactaattgagcaaaatgataaggaatttcagattgcagtggaagatagcaatgtaggtgccaaacgtttgtatgaaaaaattggctttgtcaaacagacacaggtggtttatctgaatgagaaaggagcaagggattccgaagtgtag

SEQ ID NO: 266 - DNA, 456 bp, Streptococcus pneumoniae
gtgggatttttctacacggaaatagacatccccttgactctcataggcaaagcctttctcgatcaagtcttccacaaaacggatgatgtctgccataaactccactacacgcggatggcgagtcgcaggtttcacgcccaatgccgtcacatcctcacgaaaggcagcgatgtacttatccgcaacctcctgaggtgtgatgccttcttccctggcacggttgataatcttatcatccacatctgtaaaattggaaatataggcaaccttatacccacggtactcaaaatagcgacgaatcgtatcaaaagctaccgtcgaacgggcgtttcccacgtgaatatagttgtacacggttggcccacaaacatacatcttgatcttgccgtcctcaatcgggacaaattctcgcaaatcacgagacatggtgtcatagattttaatcataaatcataa

SEQ ID NO: 267 - DNA, 1344 bp, Streptococcus pneumoniae
atgattaaaatctatgacaccatgtctcgtgatttgcgagaatttgtcccgattgaggacggcaagatcaagatgtatgtttgtgggccaaccgtgtacaactatattcacgtgggaaacgcccgttcgacggtagcttttgatacgattcgtcgctattttgagtaccgtgggtataaggttgcctatatttccaattttacagatgtggatgataagattatcaaccgtgccagggaagaaggcatcacacctcaggaggttgcggataagtacatcgctgcctttcgtgaggatgtgacggcattgggcgtgaaacctgcgactcgccatccgcgtgtagtggagtttatggcagacatcatccgttttgtggaagacttgatcgagaaaggctttgcctatgagagtcaaggggatgtctatttccgtgtagaaaaatcccacaactatgctaaattggctaataaaaccttggaagatttggagctaggtgcttcaggtcgtaccgatgaagaaacggctcgtaaggaaaatcctgtagactttgctctatggaaatcttccaaaccaggtgagatttcttgggatagtccttggggacctggacgtccgggttggcatattgagtgttcagtcatgtcgacagagattttaggtgataccattgatatccacggtggtggagctgacctagagtttccacaccacaccaatgaaattgcccagtctgaagctaaaacaggcaaggcttttgctaactactggatgcacaatggctttgtcaatatcgacaatgtcaaaatgtctaagtccttgggtaacttcattacggtacacgatgcccttaaaactcttgatgggcaagtacttcgtttcttctttgcgacccagcactaccgtaagcctatcaacttcacggaaaaggcagttcgcgatgccgagaccaatctcaagtatctcaagaatacttacgaacaaccatttacaggaaatgtggatgcccaagagttacaaaactttaaagataagtttgtagcagctatggatgaagattttaatgctgccaacggtatcacagttgtctttgaaatggccaaatggatcaactcagggaactatgatgcaagtgtcaagcaagctcttgcagatatgttagaaatttttggaattgtctttgttgaggaagttttggatgcagagattgaagacttgattcaaaaacgccaagaggcgcgtgccaatcgtgactttgcgacagcagaccaaatccgtgaccaattggttactcaaggaattaagctccttgataccaaggatggagtgaggtggacacgtgattga

SEQ ID NO: 268 - DNA, 387 bp, Streptococcus pneumoniae
gtgattgatgtcaatctcattaacgggattgcgctagcctttgagggggatgcggtgtattctatgtatattcgccgtcacctcatcctcaaaggtatgaccaaacccaataaactccatcaagaagcaactaagtacgtgtcagccaaggctcaggctcgcctgattgctctcatgttggaggagcaggtcctaacggaaaaagaagaagaaatctacaaacgtggccgcaataccaatagccacacaaaggctaaaaatgcagatgtcgtgacttatcgtatgtccacgggatttgaagcggttatgggctatctccatatgactgagaatctggaacgtcttgagagtttggtttcatggtgcatccaaaaagtggagggctag

SEQ ID NO: 269 - DNA, 885 bp, Streptococcus pneumoniae
atgagggcaaaagaactacaagactggtttcctgaggctcggatttcagaccaaccagtagagaaagagggctatctcacgctccctttagcttctcagcagtggattttgctggaggaagctgggctcagcgagcgtgaaaagcagttggttgcccttttgacccagcaggagcaggctcgttcgctaaacccttggtattcctatctggttgagggcaagggacaggcaccgcaagtttttaaaaagattcagttggtttattgccatctttcttattttcagcaggaaaatctggcttcttggctagatatgatgcggactctttttccgaattgtcagacagtgctacaggtcggagctcaggattatgttttcgtgcttcaacaagacaaatacacttctgtaagagatattttaagtgatacgattgaagcggttgagtatgactttggacttcgtctttctatcatgttgggtcaggtttggtctcagacgggacatcaagccctatcagacttaatcaaagctgagcgggatttgttcaagacatggtggcgtcagggtcaccaaggtgttcatactttttctcagctctatctttggagtatgggagaaagactcgtggacttgaagccaatcaaggaatgtctacaccagatgattttggatcaagatcagattcaggaaatcattctctctctttgggaaaatagtgctgttctcactaaaacagcccagcaactctatctgcaccgcaattctctccaatacaagattgataaatgggaagagttgacagggcttcagttgaaagagttgaccgacctgaccttgtgttatcaattgattttaggttctttgtcaactatagttggtttgtaa

SEQ ID NO: 270 - DNA, 264 bp, Streptococcus pneumoniae
atgggaagagttgacagggcttcagttgaaagagttgaccgacctgaccttgtgttatcaattgattttaggttctttgtcaactatagttggtttgtaaagaagttaatatttggagaagaggattgctatcttctccatttttatgtgcagagttatagtggcttgatgctgggaaagtacactgtgactgctaaaacattcctagaagttgctttgatttacctaatctatttatgcaaattttatgttattttactataa

SEQ ID NO: 271 - DNA, 600 bp, Streptococcus pneumoniae
atgcaaattttatgttattttactataacagttgttgctaatccaaataatagtggggaagttcatttagatgtaagcattgaagataatcagggaggtagtgggtataatttcagttctgtttcaagtagctcacaaacagctaaatatgaaggagctggttataataacaattcatcattatatataacgattgataaaacgtctgatgcaacagctcttttgaaattaaagttgaataatgttaataatcaacctgctactgaagttcctagttcaggaattactgtaaaattaaatgctaaagataatgctggaaactggacaagtgcttcgaataaaaaagaagtaacagtaaaaattgtttctgctaaaccgacatatccagacaaaattttagtgaaaaatcctgataatataaaagatacagaaaaaaatgccattattgaaaaattgaaagaggcaaataaaaatcatccagcaggagctccaacctttgctaaaggtgaaggagagcatgcaaatgatattgtagcaacttattcagatggtacaacttattatgtaccgttaaatgatgtgacaaaatatgcgaggtag

SEQ ID NO: 272 - DNA, 156 bp, Streptococcus pneumoniae
ttgactcaattcacacctcactgcttagacagactcttccaatcgtctgctttagttagcctactgcgtccctccatcactacatactctagtacaggaatatcaacctgttgtccatcggatacacctttcggtctctccttaggtcccgactaa

SEQ ID NO: 273 - DNA, 246 bp, Streptococcus pneumoniae
atgtggtacagacactcaatatcaaactgcagtaaagctccatggggtctttccgtcctgtcgcgggtaacctgcatcttcacaggtactaaaatttcaccgagtctctcgttgagacagtgcccaaatcattacgcctttcgtgcgggtcggaacttacccgacaaggaatttcgctaccttaggaccgttatagttacggccgccgtttactggggcttcaattcataccttcgcttacgctaa

SEQ ID NO: 274 - DNA, 234 bp, Streptococcus pneumoniae
gtggttccgtatggaagggccatcgctcaacggataaaagctaccctggggataacaggcttatctcccccaagagttcacatcgacggggaggtttggcacctcgatgtcggctcgtcgcatcctggggctgtagtcggtcccaagggttgggctgttcgcccattaaagcggcacgcgagctgggttcagaacgtcgtgagacagttcggtccctatccgtcgcgggcgtag

SEQ ID NO: 275 - DNA, 216 bp, Streptococcus pneumoniae
tgtagcggttatcacgtcgccctgtcacggcgaagatcgcgggttcgattcccgtcgggaccgtttaaggtaacgcaagttattttagactcgttagctcagttggtagagcaattgacttttaatcaatgggtcactggttcgagcccagtacgggtcatatatgcgggtttggcggaattggcagacgcaccagatttaggatctggcgcttaa

SEQ ID NO: 276 - DNA, 189 bp, Streptococcus pneumoniae
ttggtagagtacttggtttgggaccaaggtgtcgcaggttcgaatcctgtcttcccgattcatggcggtgtagctcagctggctagagcgtccggttcatacccgggaggtcgggggttcgatccccttcgccgctataatgatcttgtcggacctttagctcagctggttagagctctcggctcataa

SEQ ID NO: 277 - DNA, 936 bp, Streptococcus pneumoniae
atgaaatcctaccaagctgtctaccaaatcctatctaaagaaaccgactatatcagcggagaaaaaatcgcagaaaaactatccctaagccgaacagcaatttggaaagccatcaagcgactagaacaagaaggcattgaaattgatagtatcaaaaatagaggatataaactgatgaatggtgaccttattcttccagagattctagaagaaaatcttccaattaaagtcagctttaaacccgaaacaaaatcaacacaactagatgcaaaagaagcaattgatttaggccatgaagcaaataccctctatctagcttcctatcaaacagcaggccgaggccgttttcaacgttccttctactcaccacaaggtggtatttatatgacactccatcttaaaccaaatctcccctatgacagattaccatcctacacactacttgtagctggagctgtctacaaagccattaagaacctaactttaatagatgtcgacataaaatgggtcaatgatatctatctaaacaatcataaaattggaggaatccttactgaagcaatgacctctgtagaaactggcttagtcacagatatcattattggagtaggtatcaatttcactattaaagacttccctcaggaattaaaagaaaaagctgccagcttatttaaagctacagctcctataacaaggaatgaattgatcatagaaatctggcgtgctttcttcgaaacaccagcagaagagctattatacctatacaaaaaacagtcattcattctaggaaaagaagtcactttcacactagagcaaaaagactacaagggacttgctaaagacatctcagaaaatggaaaacttttagttcaatgtgataacggaaaagaaatctggctaaatagtggcgaaatttctctcaatagttggaagtaa

SEQ ID NO: 278 - DNA, 861 bp, Streptococcus pneumoniae
atgttagttttttcagaataccagactggaacaatcgaccttgccctaagcttttatggatatgaggaatgcacacctaattactcttttggtccagccattcgtgatacatacgttctacattacattactaaaggacaaggaaaattttattacaagggtaaaattgttgatttaaaagaaggagatttctttctattaaaaccagaggaactaaccttttatcaagcagatagtaaagaaccttgggcctactactggttaggaatcactggagggaaatcccctgattattttgctctttctcaaatttctgatcaatcctatctcatccaatctgaaacttgtcatacccagactactgcaaaactcatctcagacattgtccgcttcgctcagattacaaaatcaagtgaattagctcaactccatatcatgggacaacttcatgaactgatgtttcatctgggaactattgctcccaatcagaaaaaaaagaatatttcatcaacccaccaactctatcttgaatgcaaacgattaattgatagccactatcctcaatcacttacaattcaagatttagcaaaagaactatccgttcacagaagctacttatcaagcgtattcaaagaatttaataccttatcacccaaagaatacctactctacgttcgaatgcaccgagctagacaacttctcgaaaatacccaagagtccatcaaggtaattgcatactcggtaggtttttcagatccactccatttttcgaaagcttataaacaatactttaatcagactccaagtcatacaagaaaagaatactctcaataccaactagtaagaaaggcaacattatga

SEQ ID NO: 279 - DNA, 2163 bp, Streptococcus pneumoniae
atgggagttaggatagagaataatctattttatgttgagagtaaaaatctaagtttgattattgaaaatcgaaatggctacttacttttgaaacatttaggaaagactattaagaactataaaggttccaatagtgtttatgaacgagaccatgccttttcaggaaatccaacggctactaatcgaacctttagtttagatactcagcgacagatttttggacaacatggcttaggagattttaggaaaccaaccatacaggttcagcatagtgtaactgaagtaacagactttcgatttgtagaagcaaagattttaaaaggtcagaatggtccacagggcttaccttctccacatagcatggacgatacagagactcttgtcttaatgttagaagattctaaggctcaacttagtctgactttgtattatactacttttaataatgatgcgactattgctagctacagtaaattagataataatagtaatcaggaagttgtcatccataaagatttttcttttatggctgattttccagctgcagattacgaaatagtaactctgcagggtgcttatgctcgtgaaaagactgttagacgtcaacaggtagaacaaggaatcttttcgattagctcaaaccgaggtgcttctggtcatgctcaaacaccagctcttctactatgcgaacaaggagtcacagaggatgctgggaatgtgtttgctattcaactaatgtatagtggcaactttgaagcttttgttcaaaaaaatcaattgaatgaagttcgggtggctattggcattaatccagaaaacttttcttggaagttagcccctgaggaatactttgaaacaccggtagctttagtgactcattcagatcagggattaactggtattagtcatgaaagtcagaattttgtactgaagcacattattctaagtgaattttctaaaaaagaacgtccaattctaatcaataactgggaagctacttactttgactttcagagagaaaaactgttagagttagcagatgaagctaagaaagttggcattgaactttttgtattagatgatggttggtttggcaatcgttttgatgataatcgtgctttaggtgattgggttgttaatgaggaaaaactgggtggaagtctagaaagtctgatttcagctatccatgaaagaggtttgcagtttggactttggttagaacccgaaatgatttctgtagatagtgatttgtatcgtcaacatcctgactgggctattcaggttcctgattatgagcatacttattctcggaatcaattagtacttaatcttgccaatcctcaggtagtagaatacttgaaaagtgtcttagatcaactcctatcttatcatgagattgattacattaaatgggatatgaaccgcaatatcactaagctagggaatggattaacttatctagagacacagatgcaatctcatcagtacatgctggggctttacgaactcgtttcttatctgacagagaagcacagccatattctctttgagtcctgctctggtggtggtggacgaaatgatcttggtatgatgcgctatttcccacaagtctgggctagtgataatacagatgctattgcacgtttaccaattcaatacggttcatcctatctctatccaaccatttctatgggggctcatgtgtcagcagtaccgaatcatcagatggggcgaacgacaccattagaaacacgtggacatgtagcaatgatgggaaatttgggctatgagcttgatttgacaagtttatcagatgaagagaaagctgagattgctaatcaggtgaacttgtataaagaattacgaccagtagttcagttaggacaacagtatagactaattaatcctgatactgcatccaatgaagctgctgtacaatttaattacaaaaatcaaacgattgtaacctacgttcgcgttttgtcagttgtagagaccatggaaacaactttaaagttaaaagatttggatgaagagggactatatgaattacaggaaaatggcgaagtttactcaggtgcagaactcatgtatgcgggtttaactgttattttatcccaaggagattttttgagtaaacagtatatttttagaagactataa

SEQ ID NO: 280 - DNA, 1260 bp, Streptococcus pneumoniae
atgaaatggtataaaaaaatcggacttcttgcaactacaggtttagctttggttgggctcggcgcttgctccaactatggtaaatctgcggatggcacagtgaccatcgagtatttcaaccagaaaaaagaaatgaccaaaaccttggaagaaatcactcgtgattttgagaaggaaaaccctaagatcaaggtcaaagtcgtcaatgtaccaaatgctggtgaagtattgaagacacgcgttctcgcaggagatgtgcctgatgtggtcaatatttacccacagtccatcgaactgcaagaatgggcaaaagcaggtgtctttgaagatttgagcaacaaagactacctgaaacgcgtgaaaaatggctacgctgaaaaatatgctgtaaacgaaaaagtttacaacgttccttttacagctaatgcttatggaatttactacaacaaagataaattcgaagaactgggcttgaaggttcctgaaacctgggatgaatttgaacagttagtcaaagatatcgttgctaaaggacaaacaccatttggaattgcaggtgcagatgcttggacactcaatggttacaatcaattagcctttgcgacagcaacaggtggaggaaaagaagcaaatcaataccttcgttattctcaaccaaatgccattaaattgtcggatccgattatgaaagatgatatcaaggtcatggacatccttcgcatcaatggctctaagcaaaagaactgggaaggtgctggctataccgatgttatcggagccttcgcacgtggggatgtcctcatgacaccaaatgggtcttgggcgatcacagcgattaatgaacaaaaaccgaactttaagattgggaccttcatgattccaggaaaagaaaaaggacaaagcttaaccgttggtgcgggagacttggcatggtctatctcagccaccaccaaacatccaaaagaagccaatgcctttgtggaatatatgacccgtccagaagtcatgcaaaaatactacgatgtggacggatctccaacagcgatcgaaggggtcaaacaagcaggagaagattcaccgcttgctggtatgaccgaatatgcctttacggatcgtcacttggtctggttgcaacaatactggaccagtgaagcagacttccataccttgaccatgaactatgtcttgaccggtgataaacaaggcatggtcaatgatttgaatgccttctttaacccgatgaaagcggatgtggattag

SEQ ID NO: 281 - DNA, 246 bp, Streptococcus pneumoniae
atgaccacaaaagcccatgcccaatatttttgtaatacttttttcatagtctctctactcctaatccacatccgctttcatcgggttaaagaaggcattcaaatcattgaccatgccttgtttatcaccggtcaagacatagttcatggtcaaggtatggaagtctgcttcactggtccagtattgttgcaaccagaccaagtgacgatccgtaaaggcatattcggtcataccagcaagcggtga

SEQ ID NO: 282 - DNA, 867 bp, Streptococcus pneumoniae
atgaaaaaagtattacaaaaatattgggcatgggcttttgtggtcatccccctcttgttacaagcaattttcttctatgtgccgatgtttcaaggagccttttacagttttaccaactggacaggattgacttacaactacaaatttgtcggcttaaacaactttaagctcctcttcatggatccaaaattcatgaatgcgattggctttaccgcaatcattacgattgccatggtggttggtgagattgcactcgggatcttcattgcgcgtgtcttgaactctaaaatcaaaggccaaaccttcttccgtgcttggttcttcttcccagctgttttatctggtttgacagtggctttgatcttcaagcaagtcttcaactacggtcttccagcgattgggaatgcccttcatattgaatttctccaaaccagtcttttagggactaagtggggagcaatctttgcggctgtctttgtccttctttggcaaggggtggctatgcccatcatcatcttcctagctggtttgcaatctattccaactgagattacagaggcagcaaggattgatggtgcgactagcaagcaagttttctggaacattgaattgccttacttgctaccaagtgtctctatagtctttatcctagccctaaaaggtgggctgactgcctttgaccaagtctttgccatgaccggtggtggtccaaacaatgccacaacctcacttgggctcttggtttataactatgcctttaaaaacaaccaattcggttatgccaatgccattgccgtaatcttgttcttcttaattgtagtgatttcgatcatccaattgagagtatctaagaaatttgaaatttaa

SEQ ID NO: 283 - DNA, 834 bp, Streptococcus pneumoniae
atgaaacaagatgaaagaaaagccctgattggcaaatacattctattgattctaggatcggttctgcttttagtgccgctccttgctaccctctttagttccttcaaacccactaaggatattgtagataatttctttggctttccaaccaacttcacatgggacaactttagccgtctcttagctgatgggattggaggctattattggaactctgtcgtcatcactgtcttgtctttacttgcagtaatgatctttatccctatggcagcctactccatcgctcgcaatatgagtaaaagaaaagcctttaccatcatgtataccctcttaatcctcggaatcttcgtacctttccaagtcatcatgattccgattacggttatgatgagtaaactcggtttggctaatacctttggtttgatcttgctctacttgacctatgcgattccacagaccctctttctctatgttggctatatcaaaatctcgattccagaaagtctggatgaagcagcagagatcgatggggctaatcaatttacaacctatttccgcatcatcttcccaatgatgaaaccgatgcatgcgacaaccatgatcatcaatgccctttggttctggaatgacttcatgttgccactccttgtcttgaaccgggattccaaaatgtggactctgcctttgttccaatacaactacgcaggccaatatttcaacgactacggaccaagctttgcctcttacgtggtcggcattatcagtatcaccattgtctatctcttcttccaacgccatatcatttcaggaatgagcaacggggcagtgaagtaa

SEQ ID NO: 284 - DNA, 1446 bp, Streptococcus pneumoniae
atgatgccaattcaaaataaaaccatgttgattacctattctgatagccttggaaataatcttaaagacttatatgataatttggaagagcattttcgagatgctattggaggagttcaccttttaccatttttcccatcaacaggtgatcgtggatttgcgccagttgactacgacgaagtggactcagcttttggtgattgggaggatgttaagcgtttaggtgagagatattatcttatgtttgattttatgattaatcatatttctcgtcaatccaagtattataaggactatcaagaaaaacatgaagccagtgaatttaaagctctctttttaaactgggataagttttggccagaaaaccgtccgacacagtctgatgtagatttaatttacaagcgtaaggatcgtgcaccaaagcaagagattgtgtttgaagatggttcagtggaacatttgtggaatacctttggtgaggagcagattgatcttgatgtgaccaaagaagtaactatggaatttatccgtaagaccattcagcacttggcaagtaatgggtgtgatttgattcgtctagatgcctttgcttatgcagtgaagaaattggatactaatgatttctttgtggaaccagatatttgggatttattggacaaagttcgagatatcgctactgagtatgggacagagtttttacctgagattcatgaacactattcgattcagtttaaaatagcagaccatgattactatgtttatgattttgctcttccaatggtgacactttatactctttacagttccagaacagagcgtttggctaagtggttaaagatgagcccgatgaagcaatttacgacgctagatacccatgatgggattggagtagtagatgtcaaggatatcctgaccgatgaggagattgactatgcttcaaatgaactctataaggttggagccaatgtcaaacgtaagtactctagtgccgagtataacaacttagatatctaccaaatcaattcaacctactattcagcgcttggagatgatgaagtcaagtattttctcgctcgtctaattcaagcttttgccccaggtattcctcaggtttactatgtgggtctattagcaggcaagaatgacttgaaattattagaagaaactaaagaaggtcgaaatattaatcgtcattactatagcaacgaggaaatagcaaaagaagtgcaacgacctgttgtgaaggcccttctcaatctattttctttccgtaaccgttcagaagcctttgatctagaagggactactgagatagagacaccaacagctcacagcattgtaatcaaacgtcaaaataaagataagtccgtaacagcagtagcagaaattgatttgcaaaatcagacttatcgggtaattgagaatggagttgaagtaacattttga

SEQ ID NO: 285 - DNA, 1194 bp, Streptococcus pneumoniae
ttgaaatcaataggctttattgaaaagctgaaggggttgtctagtaaagagctgattttattgggaattatcctgagtatctttttacccttttatctttttgtagttgtactctgtttatatattatcagtttgatttttacaggagacatgaaaagtattcttcagaaaatgggggagcatccgatgctgcttctttttcttagctatagtactgttatatccattcttgcacaaaattggatgggtcttgtggcttcagtaggaatgtttctatttactattttctttttgcactatcagtcgattttatcccataaattctttcgattgattttgcagttcgtcttgtttggtagtgtcttgtcagctgtttttgccagtttagaacatttccaaattgtgaagaaatttaactatgcttttctttcacccaatatgcaggtgtggcatcagaaccgggcagaagtgaccttctttaatcctaattattatggaattatttgttgtttctgtattatgattgctttctatctgtttacaacgaccaagttgaattggttgaaagtattctgtgtgattgcaggctttgttaatctctttggtttgaactttactcaaaatcgaactgcctttcctgctattatcgctggagcaattatctatctctttacgactattaaaaactggaaggccttttggcttagtattggggtcttcgcgattggtttgagtttcctcttttctagtgatttgggagttcgaatgggtactttagactcttctatggaagaacgcatttctatctgggatgctgggatggccttgtttaagcaaaatcctttttggggtgaagggccattgacctatatgcactcttatcctcggatacatgctccttatcatgaacatgcccacagtctttatattgatacgattctgagttacggaattgtgggtaccattttattagttttgtcttctgttgctcctgttcgcttgatgatggatatgagtcaggagtcggggaaacgtccgattatcggcctttatctatctttccttacagtggttgctgtgcacggaatttttgacttggctctcttctggattcagtcaggctttattttcttgctagttatgtgcagtattccattggagcatcgaatgttggtatcggacatgacggattaa

SEQ ID NO: 286 - DNA, 402 bp, Streptococcus pneumoniae
gctttaggggctgatgaatcagatgattttgaagaactgcatgctgcaagtacacctgctgctaataaaacaagacctgctgtagcagatacaccaatttttttattttctactcccctggttatgggaattatgaatggccacccattatttcaccttattcctttaaaaatcaaacaaattttcagaatatttaggcttgttggcacaaatttttcatttttttttgaatatatgattcaaattgtcgttcgaagtgtcaaagactacagtgaaaataggaaatttgacgcagaaactttggagtttaggaagacatacagtaaaatgaaatacggacggaacaatgtgattttggaattcaaattaaattataacaatattgtagaagtatcattctag

SEQ ID NO: 287 - DNA, 1986 bp, Streptococcus pneumoniae
gtagaaaataaaaaaattggtgtatctgctacagcaggtcttgttttattagcagcaggtgtacttgcagcatgcagttcttcaaaatcatctgattcatcagcccctaaagcttatggctatgtttatacagcagacccagaaaccttggactacctgatttcaagtaaaaatagtacaacagtagtgacttcaaatgggattgatggtttattcactaacgataattacggtaatcttgctcctgcagttgcagaggattgggaagtctctaaggatggtttgacctacacttataagattcgtaaaggggttaaatggtttacctctgatggagaagaatatgcagaggtgacggctaaagatttcgtgaacggtttaaaacacgcagcagataaaaaatcagaagctatgtatttagctgaaaattcggttaaaggcttggcagattatctatcaggaacttcaacagatttttcaacagttggtgtcaaggcggttgatgattatacgttacaatacactttgaaccagcctgaaccgttctggaactctaagttgacctattctattttctggcctctgaatgaagaattcgaaacatcaaaaggaagcgattttgctaaaccaacagatccgacatccttgctttataatggtccattcttgttgaaagggttgactgcaaaatcttctgtagagtttgtaaaaaatgagcaatattgggataaagaaaatgtccacctagatactatcaatctagcttactatgatggatcagatcaggagtcgctagagcgtaacttcactagtggagcttatagttatgcccgtctttaccctaccagctccaactattctaaggttgcagaagaatacaaggacaatatctattacacacaatcaggctctgggattgctggtctgggtgtgaatattgatcgccaaagttacaactatacttctaaaactacagattcagagaaagtagctactaagaaggcattgcttaacaaagatttccgtcaagccttgaattttgctcttgatcgctcagcttactcagctcaaatcaatggtaaagatggagcagctttagcagttcgtaatttatttgtaaaaccagactttgtttcagctggtgagaagacctttggtgatttagtcgctgctcaacttcctgcttatggtgatgagtggaaaggtgtgaatttagctgatgggcaggatggtttattcaatgctgacaaggccaaggcagagtttgcgaaagctaagaaagctttagaagcagacggcgttcagtttcctattcatctggacgttccagtagaccaagcatcaaaaaactacatatctcgtattcagtcctttaaacaatctgtagaaacagttcttggtgttgaaaatgtcgttgttgatattcaacaaatgacaagtgatgaattccttaatattacttactatgctgccaatgcttcatctgaggattgggatgtatcaggaggagtttcatggggtccagactatcaagacccatctacttacctggatattttaaaaacaactagcagtgaaactacaaaaacatatttaggatttgataatccaaatagcccttcagtagttcaagttggtttgaaagaatacgataaattagttgatgaagctgccagagagacaagcgacttgaatgtccgttatgaaaaatatgcagcggctcaagcatggttgacagatagttcactctttattcctgctatggcttcttctggtgcagcaccagtgctttcacgaattgttccatttactggagcttctgcgcaaacaggctctaaggggtcagatgtttacttcaaatatttgaaattacaagataaagtggtgactaaggaagagtatgaaaaagctcgtgaaaaatggttgaaagaaaaagctgaatcaaatgagaaagctcaaaaagaattggcaagtcatgtgaagtaa

SEQ ID NO: 288 - DNA, 1497 bp, Streptococcus pneumoniae
atgaaaaaatatatttttatgcgtgttttgcggtcattggtttcgattttcttagtaacgactttgacctacacgattatctataccttggttcctcgaaaattgattttcaagcaggatcctaactataataaaattgcgacaacggctgataaacgtgataactatgaaaatactgtgtttgagcgtatgggctacattgagtattacgatactagagagttgcaagaaaaggcaagtagcatggattcttctgtaacagtagaagcaaatgcgaccaataaagctatttatgaaaagtacatcaatcaattaggtcatggttggactttgggagaatttactgaaagtggtcaattctatgctactcgtgaaattccaatttttgaacgtgtttttcacttctatgctaacttgattgacattgaccatacaaataaaatccaagaccctgaaaatccagacttgaaacgctaccttcgttttgaaaatgatccagctatcggatggtcattggtcggttcaggaactaaacataaatatctcttgtactttaacagtcagttcccatttgttcatcaaaactttgtgaacttgaatttaggtgactcttacccaacctatgctaatacaccagttcttcaggttattactcaaggtcaaggacaaaccaaaactgcccaagttcagttcccaacaggtaagaaaacgtcttctgtaaatatttactcaagaacctacaagtcacctagtcaggctgactctcgtgaagtagctagctatgggaaagatgatccttatacagcgactgaaagtaattaccaatatccatctatgattgtcagctctgctattactggtttgattggtttggttcttgcctatgctcttgccgtgccacttggttcagccatggctcgtttcaagaacacttggattgatagcctctcaacagggactttgaccttcttgcttgctcttccaacgattgccttggtttacatcgttcgattgattggatcatctattgcccttccagattcattccctatcttgggagctggagattggcgttcttacgttttaccagcagtcatccttggtttgttgggtgctcctgttacagccatttggattcgtcgttacatgattgacttgcaatctcaagactttgttcgtttcgctcgtgcaaaaggtttgtctgaaaaagaaatttcaaacaaacacatctttaaaaatgccatggttccgctggtttcaggaattcctggtgccattattggggttatcggtggtgcaacccttactgaaacagtcttcgccttcccaggtatgggtaaaatgttgattgactctgtaaaagcatctaataactctatggtcgttggtcttgtcttcatctttacatgtatttctatcttctcacgtcttttgggagatatttggatgactattattgacccacgtattaaattgactgagaaaggaggcaaataa

SEQ ID NO: 289 - DNA, 927 bp, Streptococcus pneumoniae
atgtctacaatcgataaagaaaaatttcagtttgtaaaacgtgacgattttgcctctgaaactattgatgcgccagcatattcttactggaaatcagtgtttaaacaatttatgaagaaaaaatcaactgtagtcatgttgggaatcttggtagccatcattttgataagtttcatctacccaatgttttctaagtttgatttcaatgatgtcagcaaggtaaacgactttagtgttcgttatatcaagccaaatgcggagcattggttcggtactgacagtaacggtaaatcgctctttgacggtgtctggttcggagctcgtaactccatcctcatttctgtgattgcgacagtgattaacttggttatcggtgtttttgtcggtggtatttggggtatttcaaaatcagttgaccgtgtcatgatggaagtttacaacgtcatctcaaacatcccacctcttttgattgttattgtcttgacttactcaatcggagctggattctggaatctgatttttgccatgagcgtaacaacatggattggtattgccttcatgatccgtgtgcaaatcttgcgctatcgtgacttggaatacaacttggcgtcacgtactttgggaacaccaaccttgaagattgttgccaaaaatatcatgcctcaattggtatctgttattgtgacaaccatgactcaaatgcttccaagctttatctcatacgaagccttcttgtctttcttcggtcttggattaccgattacagtgccaagtttgggtcgtttgatttcggattattcacaaaacgtaacaaccaatgcttacttgttctggattccattgacaacccttgtcttggtatccttgtcccttttcgtagttggtcaaaacttagcggatgctagtgatccacgtacacatagatag

SEQ ID NO: 290 - DNA, 1068 bp, Streptococcus pneumoniae
atgacaaaagaaaaaaatgtaattttgactgctcgcgatattgtcgtggaatttgacgttcgtgacaaagtattgacagccattcgcggcgtttcccttgaactagttgaaggagaagtattagccttggtaggtgagtcaggatcaggtaaatctgttttgacaaagaccttcacaggtatgctcgaagaaaatggtcgcattgcccaaggtagtattgactaccgtggtcaggatttgacagctttatcttctcacaaggagtgggaacaaattcgtggtgctaagattgcgactatcttccaggacccaatgactagtttggaccccattaaaacaattggtagtcagattacagaagttattgtaaaacaccaaggaaaaacagctaaagaagcgaaagaattggccattgactacatgaataaggttggcattccagacgcagatagacgttttaatgaatacccattccaatattctggaggaatgcgtcaacgtatcgttattgcgattgcccttgcctgccgacctgatgtcttgatctgtgatgagccaacaactgccttggatgtaactattcaagctcagattattgatttgctaaaatctttacaaaacgagtatcatttcacaacaatctttattacccacgaccttggtgtggtggcaagtattgcggataaggtagcggttatgtatgcaggagaaatcgttgagtatggaacggttgaggaagtcttctatgaccctcgccatccatatacatggagtctcttgtctagcttgcctcagcttgctgatgataaaggggatctttactcaatcccaggaacacctccgtcactttatactgacctgaaaggggatgcttttgccttgcgttctgactacgcaatgcagattgacttcgaacaaaaagctcctcaattctcagtatcagagacacattgggctaaaacttggcttcttcatgaggatgctccaaaagtagaaaaaccagctgtgattgcaaatctccatgataagatccgtgaaaaaatgggatttgcccatctggctgactag

SEQ ID NO: 291 - DNA, 339 bp, Streptococcus pneumoniae
atgatatctccattacttgtatcatttagaccgatgatagcacgaccaatagttgttttcccactaccggactcacctacaagcgagaaagtttctcccttgttgataaagaagttagcatttttaaccgcgacaaacttcttacttccttcaccgaaggaaatttctaaatctttgatttctactaatttttcagacatttccttcctcctagtcagccagatgggcaaatcccattttttcacggatcttatcatggagatttgcaatcacagctggtttttctacttttggagcatcctcatgaagaagccaagttttagcccaatgtgtctctga

SEQ ID NO: 292 - DNA, 927 bp, Streptococcus pneumoniae
atgtctgaaaaattagtagaaatcaaagatttagaaatttccttcggtgaaggaagtaagaagtttgtcgcggttaaaaatgctaacttctttatcaacaagggagaaactttctcgcttgtaggtgagtccggtagtgggaaaacaactattggtcgtgctatcatcggtctaaatgatacaagtaatggagatatcatttttgatggtcaaaagattaatggtaagaaatcgcgtgaacaagctgcggaattgattcgtcgaatccagatgattttccaagaccctgccgcaagtttgaatgaacgtgcgactgttgattatattatttctgaaggtctttacaatcaccgtttatttaaggatgaagaagaacgtaaagagaaagttcaaaatattatccgtgaagtaggtcttcttgctgagcacttgactcgttaccctcatgaattctcaggcggtcaacgtcaacgtatcggtattgcccgtgccttggtcatgcaaccagactttgttattgcagatgagccaatttcagccttggacgtttctgtacgtgcccaagtcttgaacttgctcaaaaaattccaaaaagagctcggcctgacctatctcttcatcgcccatgacttgtcggttgttcgctttatttcagatcgtatcgcagttatttacaagggtgttattgtagaggttgcagaaacagaagaattgtttaacaatccaattcacccatatactcaagccttgctttcagcggtaccaatcccagatccaatcttggaacgtaagaaggtcttgaaggtttacgacccaagtcaacacgactatgagactgataagccgtctatggtagaaatccgtccaggtcactatgtttgggcgaaccaaaccgaattggcacgttatcaaaaaggactaaactag

SEQ ID NO: 293 - DNA, 1257 bp, Streptococcus pneumoniae
atggaacaattacattttatcacaaaattactagacattaaagaccctaatatccagattttagacatcatcaataaagatacacacaaggaaatcatcgccaaactggactacgacgccccatcttgccctgagtgcggaagtcaaatgaagaaatatgactttcaaaaaccttctaaaattccttatcttgaaacgactggtatgcctactagaattctccttagaaagcgtcgattcaagtgctatcagtgctcaaaaatagcggtcgctgagacttccctcgtcaagaaaaatcaccaaatccctcgtatcatcaaccaaaagattgctcaaaagttgattgaaaagatttctatgactgatattgcccatcagctttccatctcaacttcaactgttattcgtaagctcaatgattttcactttaaacatgatttttcttgtcttcctgagattatgtcttgggatgagtatgcttttacaaagggaaagatgagcttcattgcgcaagattttaacaatctcaatatcatcactgttcttgagggaagaacacaagctatcattcgaaatcactttcttaaatatgatagagccgtccgatgtcgcgtcaaaattattactatggatatgtttagcccttactatgacttagctagacaacttttcccgtgtgctaaaatcgtgttggatcgctttcacattgtacaacatcttagccgtgctatgagtcgtgtgcgtgttcaaatcatgaatcaattggatcgaaagtctcatgaatacaaggctatcaagcgctactggaaactcattcaacaggatagccgtaaactgagtgataagcgattttatcgtcctacttttcgtatacatttaaccaataaagagattttaaacaagcttttgagttattcggaagacttgaaacaccactatcagctctatcagctcttgctttttcacttccagaataaggaaccagagaaatttttcgggcttattgaggacaatctaaagcaggttcatcctctttttcagactgtctttaaaaccttcctcaaagataaagaaaagattgtcaacgcccttcaactacactattctaatgccaaactggaagcgaccaataatctcatcaaacttatcaagcgcaatgcctttggttttcgaaactttgaaaacttcaaaaaacggatttttatcgctttgaatatcaaaaaagaaaggacaaaatttgtcctttctcgagcttag

SEQ ID NO: 294 - DNA, 288 bp, Streptococcus pneumoniae
atgagctttattgcgcaaaattttgaaaagctcgatatcatcactgttcttgaaggtagaacacaagctgtcatccgagatcactttcttaaatatgatagagccgtccgatgtcgcgtcaaaatcattactatggatatgtttagcccttactatgacttggctaaacagcttcgctttcaaatttctaggctcaggctgaaacagtctcctagactgtttcactcccgaatgctaaaatcgttcttgatcgctttcacattgtacaacatcttagccgtgctatga

SEQ ID NO: 295 - DNA, 519 bp, Streptococcus pneumoniae
atggaacaattacattttatcacaaaattactagacattaaagaccctaatatccagattttagacatcatcaataaggatacacacaaggaaatcatcgccaaactggactatgaagctccatcttgtcctgagtgcggaagtcaaatgaagaaatattactttcaaaaaccttctaaaattccttatcttgaaacaactggtatgcctactagaattctccttagaaagcgtcgtttcaagtgctatcattgttctaaaattatggttgctgaaacttctatcgtcaagaagaatcatcaaatccctcgtatcatcaaccaaaagattgctcaaaagttaattgaaaagatttctatgactgatattgcccatcagctttccatctcaacttcaactgtcattcgaaagctcaatgacttccactttgagtgtaattttagaaatctgcctaagattatgtcttgggacgttgaaacagtccggggagtgactgtttcaatcgggagatggagatga

SEQ ID NO: 296 - DNA, 711 bp, Streptococcus pneumoniae
atgaagaaataccaacaattatttaagcaaatccaagaaaccattcaaaacgagacttacgctgtcggagatttccttcctagcgagcacgaccttatggagcaatatcaagtgagtcgtgataccgtccgaaaggccctgtctctcctccaagaggaaggattgatcaaaaagataagagggcaaggttctcaagtcgtcaaagaagaaaccgtcaatttccctgtatccaacctaaccagctaccaagaactagttaaagaacttggactgcgctctaaaaccaacgtggtcagtctggacaagattattattgataaaaaatcctcgctgataaccggtttcccagagtttcggatggtttggaaggtggtccgccagcgtgtggtggatgatctggtatccgttctggatacagactatctggatatggaactaattccaaatctcactcgccaaattgctgagcagtctatctattcttatatagaaaatggcctcaaactccttattgattatgctcagaaggaaatcaccattgaccactcaagcgaccgagacaagattctcatggacattggcaaagacccttatgtcgtttcgattaaatcaaaagtctatctccaagacggacgccaatttcagtttaccgaaagtcgccataagttagaaaaatttagatttgtagattttgcaaaacgcaagaaataa

SEQ ID NO: 297 - DNA, 1968 bp, Streptococcus pneumoniae
atgggaaaatttgaacaagaagccaaagatctgcttcaggcaattggaggcaaagaaaatgtgactgccgtaactcactgtgcgacacggatgcgctttgttttaagagatgataagaaggctaatgttaaagctatcgagtcaattccagctgttaaaggaacttttacaaatgcaggtcaatttcaggtaatcattggaaatgacgtgcccatcttttataatgattttacagccgtttcaggtattgagggtgtttccaaagaagcaaccaagtctgcagctaagagtaatcaaaacgtggttcaaggtgttatgaccactctggcggaaatctttactccgattattccagccttgattgttggtggattgatcctcggtttccgtaatgtcttggaaggtgtccattggtcgatgttggatggcaagaccatcacagaatcctctcagttttgggcaggggttaatcacttcctctggttgcctggtgaagctatcttccagttcttaccagtagggattacttggtctgtttctcgtaagatgggaaccagccaaattttgggaattgttctcggaatctgtttggtatcgcctcagttgctcaatgcctatgcggttgcttcaacgccagcagctgatatcgcagcaaactgggtttggaattttggttattttactgttaatcgtattggttaccaagcccaagttatcccagccttgcttgcaggtttgagtctgtcttatcttgaaattttttggcgcaaacatatcccagaagtcatttccatgatttttgtaccttttttgtcattgattccagccttgattttggctcatactgtcttggggccaatcggttggacaattggacaaggactttcatcagttgtattggcaggtttaacgggtcctgtaaaatggctcttcggtgcaatttttggtgccctctacgctccatttgtcatcacaggtctgcaccacatgaccaatgccattgatacacaattgattgcggatgctggtggcactgccctctggcctatgattgctctttctaatattgctcaaggctcagccgtgtttgcctattatttcatgcatcgccatgatgagtgtgaggctcaggtttcacttcctgcaaccatttcagcctatctcggtgttacagaaccagctctttttggggttaacgtaaaatatatttatccatttgttgctgggatgactggttcagcccttgcaggcatgttatccgttacttttaatgtaactgcggcttctattggtatcggtggtttgccaggtattctctctattcaacctcaatacatgctgccatttgcaggaactatgctagttgcgattgttgttccaatgctcttgactttcttctttcgcaaggctggtctcttcacaaaaatagagggcgatacgaacttgcaggcagaattcgttgctcaagaagaagcagaatttgtgagccatgaaccagtagaacttacttcggtagaaattatcagcccactaactggccaagtgaaagaattgagtcaagcgacggatcctgtttttgcatcaggtgtcatggggcaaggtctggtcattgaaccaagccaaggtgagttgacctctccagttaatggaacagtgacggttcttttccctaccaagcatgccatcggcattgtctctgacgagggagttgaattgctcatccacatcggtatggatacagtaggtcttgatggcaaaggttttgaaagtcttgtagtccaaggagatcacgttatagttggccagcaactgattcgttttgatatggatgtcattaaggctgcaggtctggtgacagaaactcctgttatcatcaccaaccaagatgcttatacagcgactattactggaacttatccgacaacgatccaagctggagcatctctcatggtcgctacacgaatctaa

SEQ ID NO: 298 - DNA, 1626 bp, Streptococcus pneumoniae
atgacacttgataaaggaaaagtagtctatcaaatctatccaaaatcttacaaagacaccactgaaaacggtattggggatttccgtgggattatcgaaaaaattccctatttagccaaactaggtgtggatatggtctggctcaatccattctatccaagccctcaacgggataatggttacgatatttcagattatatggcagtggatcctctttttggtgatatggctgattttgaggaaatggtgtgtgtcggtaaagagcacaagattgactttatgctggacatggtacttaatcattgttcgacagagcatgaatggtttcagaaagccctagctggtgataagtattatcaagactttttcttcatccaagaccaaccaacagattggcagtctaagtttggtggttctgcatgggcgcctttcggggatactgggaaatactatcttcacctatttgatgagacccaggctgaccttaactggcgcaatcccaatgtccgtaaggagcttttcaaggttgttaatttctggcgcgacaagggtgtcaaaggttttcgatttgatgtgatcaatttgatcggtaaggacgaggtttcagtggactgtcctgaaaatgaagggaagccagcttatacagacaaacccatcgttcataactatttgcgtatgatgaaccaagccacttttggatctgacgatagctttatgacagttggggaaatgtcttctaccaccatggaaaactgtgtcctctattcgtcgcctgatcgtcaggaattatccatgacctttaattttcatcacctcaaggtggactataaggatggacaaaagtggaccttggctccctttgattttgaagagttgaagagtctttaccatagttggggtaaggaaatgagtgataaagacggttggagtgccctcttttggaacaatcacgatcaaccacgtgccttgaaccgttttgtcgatattcaaaacttccgcaaggaaggagccactatgctagcagccagcattcacctgtcacgtgggacaccttatatctacatgggtgaggaaatcgggatgattgacccagactatgattctatggctgattatgtggatgtcgaatcgcttaatgcctatcagatgctcttagaagaaggaaagagtcagcaagaagccttccagattattcaagctaagtcgcgtgataattcacgcattcccatgcagtgggatgcttcggaaaatgcaggattttcaacaggcactccttggttgaaagctggtaaatcctataaatacatcaatgtagaaaatgaaatccagggtccgatttttaccttctatcaagacttgattcgactgcgtaaggaaatgccaatcatttcagaaggaagttacaaaccagcctttgaagatagcaaacaagtctacgcttttgaacgccagtttgaggatcaaaagttactagtgctcaataacttttatgctaaagaagtggaaatcgacttgccagcagtctaccaaaatggacagattttgatatcaaactatgaagatgcagaagtgtctgagaaaattctactcaaaccctatcaaacactggctatttatgtaaattaa

SEQ ID NO: 299 - DNA, 180 bp, Streptococcus pneumoniae
attaatactcttcgaaaatctcttcaaaccgtgtcagttttatctgcaacctcaaagcggtgctttgagcaacctgtggctagcttcctagtttgttctttgattttcattgagtataaacttagcaaggagacctctttttcagaaaagcagggttctttttgctgtctattccatccc

SEQ ID NO: 300 - DNA, 252 bp, Streptococcus pneumoniae
atgatggatttacttttagcaattgtattgattgtgctagcttttctaggaggagctctaggaggaatgtacttggttcgtaagcaaatcgaaaaagaatttgctgacaacccacgtttgaatgctgaagcagttcgtactcttttgagtgcaaatggtcaaaaaccaagcgaagctaaggtacaacaagtttaccaccaaatcatccgccaacaaaaggcagcccttgctaacaataaaaagaaaaaataa

SEQ ID NO: 301 - DNA, 795 bp, Streptococcus pneumoniae
atggataatcgaccaattggttttttggattcgggtgtcgggggcttgaccgttgtgcgcgacgtcatgcgccagcttccccatgaagaaatcgtctatattggagattcggcgcgggcgccctatggcccccgtcctgctgagcaaattcgtgaatatacttggcagctggtcaactttctcttgaccaaggatgtcaaaatgattgtcattgcttgtaacactgcgactgcggtcgtctgggaagaaatcaaggctcaactagatattcctgtcttgggtgtaattttgccaggagcttcggcagccatcaagtccagtcaaggtgggaaaatcggagtgattggaacgcccatgacggtacaatcagacatataccgtcagaaaatccatgatctggatcccgacttacaggtggagagcttggcctgtcccaagtttgctcccttggttgagtcaggtgccctgtcaaccagtgttaccaagaaggtggtctatgaaaccctgcgtcccttggttggaaaggtggatagcctgattttgggctgtactcattatccactccttcgccctattatccaaaatgtgatggggccaaaggttcagctcatcgatagtggggcagagtgcgtacgggatatctcagtcttactcaattattttgaaatcaatcgtggtcgcgatgctggaccactccatcaccgtttttacacaacagccagtagccaaagttttgcacaaattggtgaagaatggctggaaaaagagattcatgtggagcatgtagaattatga

SEQ ID NO: 302 - DNA, 819 bp, Streptococcus pneumoniae
agaatggctggaaaaagagattcatgtggagcatgtagaattatgacaaataaaatttatgaatataaggatgaccaggactggtatgttgggtcttatagtatttttggtggcgttaacagtttgagcgactataagacagattttcctctgtttgaattctccaaaatatttggagatgaagagtatggtttcccgctttcagttactgttttacgttatggttctacctaccgtttgttctcttttgtggtagacatgcttaatcaagatatgggacgaaacttggaagttattcaacgtcatggggccctgctcttggttgaaaatgggcaactcttgtatgtagaattgcctaaagaaggggtcaatgttcatgatttctttgagacaagcaaggtcagagaaaccttgttgattgcgactcgtaacgaaggtaaaaccaaggaattccgagctatctttgataagttaggctacgatgtggaaaatcttaatgactaccctgacctgcctgaagtagcagaaacaggtatgacctttgaagaaaatgcccgccttaaggcagaaaccatttctcaattaacgggcaagatggttttggcagatgattctggtctcaaagtcgatgtccttggtggcttaccaggcgtctggtcagctcgtttcgcaggtgtgggagcaactgaccgtgaaaataatgccaaactcttgcacgaattggccatggtctttgaactcaaggaccgctcggctcagttccacacaaccctagtcgtagccagcccaaataaggaaagtttagtgttgaacaccaga

SEQ ID NO: 303 - DNA, 195 bp, Streptococcus pneumoniae
tggtcaggttatattaactttgaacctaagggtgaaaatggctttggctatgatcccctcttccttgtaggagagacaggtgagtcatcagctgaattaaccctggaagaaaaaaatagtcaatctcaccgtgccttagccgttaagaaacttttggaggtatttccatcatggcaaagcaaaccatcattgtaa

SEQ ID NO: 304 - DNA, 522 bp, Streptococcus pneumoniae
atggcaaagcaaaccatcattgtaatgagcgattcccatggcgatagcttgattgtggaagaagtccgtgatcgctatgtgggcaaagtcgatgccgtttttcataacggcgattctgaactacgtccggattctccactttgggagggcatccgcgttgttaaagggaacatggacttctacgccggctacccagaacgtctggtgactgagcttggttcgaccaagattatccaaactcatggtcacttgtttgacatcaatttcaactttcaaaagttggactactgggctcaggaggaagaggccgctatctgcctctatggtcacttgcatgtgccaagtgcttggatggaaggcaagatcctctttctaaatccaggttctatcagccaaccacgaggtaccatcagagaatgtctctatgctcgtgtggagattgatgatagttacttcaaagtggactttttgacacgagatcacgaggtgtatccaggtttgtccaaggagtttagccgatga

SEQ ID NO: 305 - DNA, 462 bp, Streptococcus pneumoniae
atgattgccaaggagtttgagactttcttgttggggcaggaggaaacttttttgacccctgctaaaaatctagctgtgttgattgatacccacaatgcggatcatgcgaccctcttgcttagtcagatgacctatacccgtgttcccgttgtgacagatgaaaaacagtttgttgggacgattggactcagagatattatggcttatcagatggagcatgacttgagccaagaaatcatggcggatacggatatcgttcatatgacaaaaacggacgtagcggttgtttcgcctgatttcaccattacggaggtcttgcacaagctagtagatgagtccttcttaccggttgtggatacagagggtattttccaagggattattacgcgcaagtccatcctcaaggccgttaatgccctcttgcatgattttagtaaggaatatgagattcgatgccaatga

SEQ ID NO: 306 - DNA, 741 bp, Streptococcus pneumoniae
atgccaatgagagacagaatttcagcctttttagaggaaaagcagggcttgtctgtcaattccaagcagtcctataagtatgatttggagcaatttttagacatggtaggtgagcggatttctgagaccagtctcaagatttaccaagcccagctagccaatctaaaaatcagcgcccagaagcgaaagatttcggcctgtaaccaatttctatactttctctatcaaaaaggagaggtggacagcttttaccgcttggaattagccaaacaagctgaaaagaagacggaaaagccagagattctatacctagactctttttggcaggaaagcgaccatccagagggccgcttgctagcgctcttaatcctagaaatggggctcttgcccagtgagattttagccatcaaggttgcggacatcaatctggattttcaggtgctgcgaatcagcaaggcttcccaacagaggattgtcaccattcccacggccttgctttcagaattggaacccttgatggggcagacctatctttttgaaagaggagggaaaccctattctcgtcagtgggcctttcgtcagttagaatcttttgtcaaggagaaaggttttccatccttatcagctcaagtcttacgtgaacagtttattctaagacaaatagaaaacaaggtcgatttgtacgaaattgcaaaaaaattaggattaaaaacagtcctgaccttagaaaaatatagataa

SEQ ID NO: 307 - DNA, 729 bp, Streptococcus pneumoniae
atggatattaaattaaaagattttgaaggacccctggacttactcttgcatctggtttctaagtaccagatggatatctacgatgtgcccattacggaagtcatcgaacagtatctagcctatgtctcaaccctgcaggccatgcgtctggaagtgacgggtgagtacatggtcatggctagtcagctcatgctgattaagagtcgtaaactccttccgaaggtagcagaagtgacagacttgggggatgacctggagcaggacctcctctctcaaatcgaagaatatcgcaagttcaagctcttgggtgagcacttggaagccaagcaccaagaacgggcccagtattattccaaagcgccgacagagttgatttacgaagatgcggagcttgtgcatgacaagacgaccattgacctctttttggctttttcaaatatcctagccaagaaaaaagaggagtttgcacaaaatcacacgacgatcttgcgggatgagtataagattgaggacatgatgattatcgtgaaagagtccttgattggacgagatcaattgcgcttgcaggatttgttcaaggaagcccagaatgtccaagaggtcatcaccctctttttggcaaccctagagttaatcaaaacccaggagctgatcctcgtgcaagaggagagtttcggagatatctatctcatggaaaagaaggaagaaagtcaagtgcctcaaagctag

SEQ ID NO: 308 - DNA, 570 bp, Streptococcus pneumoniae
atgagtactttagcaaaaatagaagcgctcttgtttgtagcgggtgaagatgggattcgggtccgccagttagctgaactcctctctctgccaccgacaggcatccagcaaagtttaggaaaattagcccagaagtatgaaaaggacccagattccagtttggctttgattgagacaagtggtgcttatagattggtgaccaagcctcaatttgcagagattttgaaggaatactctaaggcgcctatcaaccagagcttgtctcgggctgcccttgagaccttgtccattattgcctacaaacagccgattacgcggatagaaattgatgccatccgtggagttaactcgagtggagccttggcaaagttgcaggcttttgacctgataaaggaagacgggaaaaaggaagtattggggcgccccaacctctatgtgactacggattatttcctagattacatggggataaaccatttagaagaattaccagtgattgatgagcttgagattcaagcccaagaaagccaattatttggtgaaaggatagaagaagatgagaatcaataa

SEQ ID NO: 309 - DNA, 723 bp, Streptococcus pneumoniae
atgagaatcaataagtatattgcccacgcaggtgtggccagtaggagaaaagcagaagagctgattaagcaaggcttggtgacggttaacggccaagtggtgcgtgaactagcaaccactatcaagtcaggcgacaaggtcgaagttgaaggtcaacctatctacaacgaagaaaaggtctactatctgcttaacaaaccacgcggtgtgatttccagtgtgacagatgataagggtcgcaagacggttgtcgacctcttgcccaatgtcaaagagcgtatttaccctgtgggtcgtttggactgggatacatcaggtgtcttgattttgaccaatgatggggactttacagacgagatgattcaccctcgtaatgagattgacaaggtttatgtcgcgcgtgttaaaggtgtggccaataaggacaatctccgccccttgacccgtggtcttgagattgatggtaagaaaaccaagccagctgtttatgaaattctcaaagtggacccagtcaaaaatcgctctgtggtgcagttgaccatccatgaagggcgtaaccatcaggttaaaaagatgtttgaagctgttggtctccaagtagataagttgtctcggactcgtttcggacacctagacttgacaggactccgtccaggagaatcccgtcgtcttaataaaaaagaaatcagccaactacacaccatggctgtaactaagaaataa

SEQ ID NO: 310 - DNA, 243 bp, Streptococcus pneumoniae
atgaaacgaattttaatagcgcctgtgcgcttttaccaacgttttatctcaccagtctttccaccctcttgtcgctttgagctgacttgttccaactacatgattcaggctattgaaaaacatggttttaagggggtattgatgggcttggctcggattttacgttgtcatccctggtcgaaaacaggtaaggaccccgttccagaccacttttcccttaaacgaaatcaagaaggggaatga

SEQ ID NO: 311 - DNA, 525 bp, Streptococcus pneumoniae
gtggcttatttcaaagctttttgtatgtcttcaatcatgagttttgttgattcaagtccgcctccgcttagataccagaggtctggtgttagttggataatcttaccatttttagcagcaggtgtttcagcgataagggcattttctaggacaccgttgttgctagagttgtccccaccgatggcaagggtacggttgatgacaaagaggatgtcagggttgatttctttgacactttcaaagctgacttcttgtccgtggcgtgagtcttcaaatgttgtatcagttggtttgaatttcaaggtttggtacaagaaagagaaacgagatttggcaccaaaggctgccatttttccttcattaaggaggatcgcaagggcctttttgtcagagctttcatttttagtagcgacttcttggatgctcttgtctagcttggccaattcttccttggctttctgtgtaccagtttcgccgaaggcacttgctaaggattcgatattagccttggtagaagtccagtag

SEQ ID NO: 312 - DNA, 966 bp, Streptococcus pneumoniae
atgaaaacatctcttaaactttatttcactgccctagtggccagcttcttgctcctacttggtgcatgtagtacaaactcaagcactagtcagacagagaccagtagctctgctccaacagaggtaaccattaaaagttcactggacgaggtcaaactttccaaagttcctgaaaagattgtgacctttgacctcggcgctgcggatactattcgcgctttaggatttgaaaaaaatatcgtcggaatgcctacaaaaactgttccgacttatctaaaagacctagtgggaactgtcaaaaatgttggttttatgaaagaacctgatttagaagctatcgccgcccttgagcctgatttgattatcgcttcaccacgtacacaaaaattcgtagacaaattcaaagaaatcgccccaaccgttctcttccaagcaagcaaggacgactactggacttctaccaaggctaatatcgaatccttagcaagtgccttcggcgaaactggtacacagaaagccaaggaagaattggccaagctagacaagagcatccaagaagtcgctactaaaaatgaaagctctgacaaaaaggcccttgcgatcctccttaatgaaggaaaaatggcagcctttggtgccaaatctcgtttctctttcttgtaccaaaccttgaaattcaaaccaactgatacaacatttgaagactcacgccacggacaagaagtcagctttgaaagtgtcaaagaaatcaaccctgacatcctctttgtcatcaaccgtacccttgccatcggtggggacaactctagcaacaacggtgtcctagaaaatgcccttatcgctgaaacacctgctgctaaaaatggtaagattatccaactaacaccagacctctggtatctaagcggaggcggacttgaatcaacaaaactcatgattgaagacatacaaaaagctttgaaataa

SEQ ID NO: 313 - DNA, 753 bp, Streptococcus pneumoniae
gtgaaactggaaaacattgacaaatccattcaaaaacaggatattttgcaaggcatttcgcttgaagtcagtcctcaaaaactgacagcctttattggtccaaatggtgctggaaaatcgactctcctctccatcatgagcagactaaccaagaaagatcagggagttctcagtatcaaaggacgtgaaatcgagagctggaattcgcaagaactggcccaagaactaaccatcctaaaacagaaaatcaattaccaagccaaattgactgttgaagaactggtcagttttggacgttttccctacagccgaggtcgacttagatcagaagactgggaaaaaatccgagaaactctgaactatttggaactgaccaacttaaaagaccgctacatcaatagcctgtcaggggggcaactccagcgcgtctttatcgctatggtactggcccaggatacggactttatcttgctggacgaaccactcaataatctcgatatcaagcaaagcgtcagcatgatgcaaattcttcgacgactggtggaggaactcggcaagaccattatcatcgtcctccacgatatcaacatggccagtcagtatgcagatgaaattgtcgccttcaaggacggtcaggtctttagcaagggaagcaccgatcaaatcatgcaggctgacctgctcagccaactttatgagattcccatcacgctagctgatatcaatgacaaaaagatctgtatctatagctag

SEQ ID NO: 314 - DNA, 201 bp, Streptococcus pneumoniae
atgttgatatcgtggaggacgatgataatggtcttgccgagttcctccaccagtcgtcgaagaatttgcatcatgctgacgctttgcttgatatcgagattattgagtggttcgtccagcaagataaagtccgtatcctgggccagtaccatagcgataaagacgcgctggagttgcccccctgacaggctattgatgtag

SEQ ID NO: 315 - DNA, 957 bp, Streptococcus pneumoniae
atgcagactaaaagcaaacataccaagctcttctggattctcattattcttgccatcggagcttgtcttctctacttttggcccatcactcacttgtcagcctttgcttggaagttgcgttcccaaaagatcatcgtttatctcttggtagccatcgcgactgggatttcgaccattagttttcaaaccctgacggaaaatcgcttcctgacgcctagtattttgggaattgaatccttctacgtcctactacaaaccctactactggtttttgaaagcaagtttcttcaacttggcaaatcccctatcttagaattcctagtcttacttcttgtccagtccctcttctttctcgccttacaaggttacttgaagacactgatgaagcaagacctggtcttcatcctgctgatctgtctagcgctcagaagtctctttcgaaatatcagcaccttccttcaagtcctaatggatccaaacgaatacgataaactgcaaaatagtctttttgcctcctttcaacatctcaacacttccatcctagccatcggttctctgatcatcctcgctttgacaatctttttctttcgaaaagcagtcgttctagatgtcttgcacctgcaaagagaaacggctcagatattgggactcgatgttgaaaaagaacagaaagagctcctctggggaatcgtgcttttgacctcaacggccactgccttggtaggacctatggccttcttcggctttatgctggccaacctcacctacctgattgtcaaagactatcagcacaagttactctttatagtggccattctgattggatttattagcttaaccttggggcaagccttgattgaacgagtctttgcactggaaattcgtatcagtatgatcattgagagtgtgggtggcttcttattctttatcttactatataggagggctcgtcagtga

SEQ ID NO: 316 - DNA, 960 bp, Streptococcus pneumoniae
atgaaactttctcattatttaattggcttacttctactcctagtctttctctctattagcattgggaccagtgatttttcatggggaaagctatttgatttcgaccagcagacctggctcctctttcaagagtcccgtctcccaagaactatcagtattctcctgactgcctctagtatgagtatggcaggccttctcatgcagactattacccaaaatcagtttgctgcaccgagtacagttggaacgactgaagccgccaaactgggaatggtgctgagcctttttgtctttccatcggctagtctgacccaaaagatgctcttcgcttttgtttcatccatcgtattcaccctcttcttcctagcctttatgaccatttttactgtaaaggaaaggtggatgttgcctctgattgggatcatctatagcgggattatcggctcagtcacagaagttatcgcctatcgtttcaatctggttcagagtatgactgcctggacccagggctccttctccatgattcagacccatcagtatgagtggctcttcttaggcctcatcatcctgataaccgtttggaaattatcccaaaccttcaccatcatgaatctagggaaagaaaccagcgagagtttggggatttcctactccctacttgaaaaactggccctctttctggtggcgctaacgacaagcgtcaccatgattaccgtgggtggcctaccatttctcggagttatcgttcccaatcttgttcgcaagtgctatggagataatctaagtcaaaccaaactcatggtcgcactggttggtgccaatctagttctggcttgcgatatcctatcccgagttctgattaggccctatgagttgtctgtcagtctcttgctaggaatcatcggtagtctcgtctttatcctacttctctggagagggggacgaaaagatgcagactaa

SEQ ID NO: 317 - DNA, 408 bp, Streptococcus pneumoniae
  unsure (62),(115): n at each above location is unknown.
atgaaccagtttctcaaagtcttatctgaagttggcattcaaaaaatcatgttctttttgantgttcttttttatggaaataactgtattgacaagccggtgattgaagataccntgtttgaccctgtcaacccttatgcagagacaaaactgatgggcgaacgaatgatttactggatggccaatcgctacgactggaaatatgttattttccgttactttaatgttgctggggctgaaatggatgcttcaaacggtctgcgtgtgaaaaatccaactcacatcattccaaatatcaacaagaccgcattgggacaaaatgatagcttaaaaatatttggagatgactacgatacacgtgacggttcatgtattcgagattacatttatgtcttggaccttgcatag

SEQ ID NO: 318 - DNA, 243 bp, Streptococcus pneumoniae
atgaccaaaacaattcttgttacaggtgggactagctacattggctcccataccgttaaagctcttttaaatgctggctatcaggtgcatgtcctcgataatctctccacaggaaatcgagcggctgtggatagtcgtgctagctttaaagaactggatgtttatgatgctagcgccttaaaagcttacttaaaaaaaaatcaaattgatgctgtcttcccttttccagttgaaattttttga

SEQ ID NO: 319 - DNA, 1062 bp, Streptococcus pneumoniae
atgacaacattattttcaaaaattaaagaagtaacagaacttgctgcagtctcaggtcatgaagcgcctgtccgtgcttatcttcgtgaaaagttgacaccgcatgtggatgaagtggtgacagatggcttgggtggtatttttggtatcaaacattcagaagctgtggatgcaccgcgcgtcttggtcgcttctcatatggacgaagttggttttatggtcagcgaaatcaagccagatggtaccttccgtgtcgtagaaatcggtggctggaaccccatggtggttagcagccaacgtttcaaactcttgactcgtgatggtcatgaaattcctgtgatttcaggttctgttcctccgcatttgactcgtggaaaggggggaccaaccatgccagccattgccgatatcgtttttgatggtggttttgcggacaaggctgaggcagaaagttttggcatccgtcctggtgataccattgtaccagatagttctgcaattttgacagccaatgaaaaaaatatcatctcaaaagcttgggataaccgctacggtgtcctcatggtaagcgagctagctgaagctttatcgggtcaaaaactcggcaatgaactctatctgggttctaacgtccaagaagaagttggtctgcgtggcgctcatacctctacaaccaagtttgacccagaagtcttcctcgcagttgattgctcaccagcaggtgatgtctacggtggtcaaggcaagattggagatggaaccttgattcgtttctatgatccaggtcacttgcttctcccagggatgaaggatttccttttgacaacggctgaagaagctggtatcaagtaccaatactactgtggtaaaggcggaacagatgcaggtgcagctcatctgaaaaatggtggtgtcccatcaacaactatcggtgtctgcgctcgttatatccattctcaccaaaccctctatgcaatggatgacttcctagaagcgcaagctttcttacaagccttggtgaagaaattggatcgttcaacggttgatttgattaaacattat

SEQ ID NO: 320 - DNA, 297 bp, Streptococcus pneumoniae
atggtagaaccaaacctagaaagccttataaaagatctttacaatcatgctcgacatgatttgagtgaagatttagttgctgctctcctagagactactaaaaaactgcctactacaaatgagcaattgcaggcagttcgtctctcaggcctggtcaatcgtgaattgctcctaaatcccaaacatccagcacctgagttgctcaacttggctcgctttgtcaaaagagaagaagccaagtacagaggaactgcgacttctgcgcttatgtatgaggaactttttaaaatgctttga

SEQ ID NO: 321 - DNA, 189 bp, Streptococcus pneumoniae
aagatttctataaattcatttgattttcctaatcaatttgttcatatcttatttcattccgctataatttcaccttaccctatctttttcgtagcacccttcaaacagcctatcccctaccgtttgacgattcctcacttcactccacttccattacagaagtttcttcactactatggtctcggctga

SEQ ID NO: 322 - DNA, 444 bp, Streptococcus pneumoniae
atgaaagatagtcatttgctagcccatcatattcgtttgttgaatgggcggatttttcaaaagttactgagtcaagatcctgaggctctttataggggtgaacagggcaagattttagcggttttatggaatagtgaaactggctgcgcaactgcgacagatatcgcgcttgcgactgggcttgcgaataatacgctgacgactatgataaaaaagctagaggaacaaaagcttgtaattgttagtccgtgtggaaaagacaagcgtaagaagtatttagttttaacggagttaggcaagtcccagaaagaagtggggcatcgtgtcagtcagaaattggatactatcttttacaaaggattttcagaggaagaaattcaccaatttgaaggttttcaagaaagaattttggcgaatctgaaagagaagggaaatgaggtttag

SEQ ID NO: 323 - DNA, 765 bp, Streptococcus pneumoniae
atgtcacaacaagtgaaaaatgctcacaacctatacatccatgccattcaagacgggcgagttgctgaggctcaagcccagtctgtaggggatacctatatccaacattcgacaggtgttcctgacgggaaagaaggatttgcagccttctttgcagatttctttgagcgtcatccagagcgtcagattaagattgtccgcaccattgaggatggcaatctggtctttgttcatgttcatcaatatctgaatggtggagaagctcaatgggtgacgacggatactttccgtgaggatgagaatggttgtattgttgagcattgggatgtcattgactactatcgaacacctgaaaatgaccaactagatcaaatttttggagattttgaaatcaaggatttggataagaaagcagaaaataaaaagctggttcgccgtttcttgacagaaattttccaaaatggggagctagagcagtggagtgattatgtggcagacgatttgattcagcataatcatgagattggacaaggaagtgctgcttataaaaactatgtggctgaatatagtgtcacttttgactttgttttccaactcttaggacaaggaaactatgtggttagctatggtcagactcagattgatggcgttgcttatgcccagtacgatatcttccgtttagagaacgggaaaattgtggagcattgggataataaggaagtcatgcctaaggtagaagacttgactaatcgagggaagttttaa

SEQ ID NO: 324 - DNA, 729 bp, Streptococcus pneumoniae
atgattgaatacaaaaatgtagcactgcgctacacagaaaaggatgtcttgagagatgtcaacttacagattgaggatggggaatttatggttttagtagggccttctgggtcaggtaagacgaccatgctcaagatgattaaccgtcttttggaaccaactgatggaaatatttatatggatgggaagcgcatcaaagactatgatgagcgtgaacttcgtctttctactggttatgttttacaggctattgctctttttccaaatctaacagttgcggaaaatattgctctcattcctgaaatgaaggggtggagcaaggaagaaattacgaagaaaacagaagagcttttggctaaggttggtttaccagtagccgagtatgggcatcgcttacctagtgaattatctggtggagaacagcaacgggtcggtattgtccgagctatgattggtcagcccaagattctcctcatggatgaacccttttcagccttggatgctatttctcgcaagcagttgcaggttctgacaaaagaattacataaagagtttgggatgacaacgatttttgtgactcatgatacggatgaagccttaaagttggcagatcgtattgctgttttgcaggatggagagattcgtcaggtgtcgaatcctgagactattttaaaagctcctgcaacagactttgttgcagacttgtttggaggtagtattcatgactaa

SEQ ID NO: 325 - DNA, 222 bp, Streptococcus pneumoniae
ccaatcatagctcggacaataccgacccgttgctgttctccaccagataattcactaggtaagcgatgcccatactcggctactggtaaaccaaccttagccaaaagctcttctgttttcttcgtaatttcttccttgctccaccccttcatttcaggaatgagagcaatattttccgcaactgttagatttggaaaaagagcaatagcctgtaaaacataa

SEQ ID NO: 326 - DNA, 933 bp, Streptococcus pneumoniae
atgactaatttaattgcaacttttcaggatcgttttggtgattggttgacagccctatctcaacatttgcagttgtcacttttgaccttgttactagctattttgcttgcgattcccttggctgtttatcttcgctatcatgagaagttggcggattgggtcttacagattgcagggattttccagaccatcccgtctctggccttgttgggactctttattcccttgatgggaattgggactttaccggcattgacagctctagtgatttatgcgatttttccgattttacaaaatactattactgggctgaagggaattgatccgagtcttcaagaggctgggattgcctttgggatgaccagatgggagcgtctcaagaagtttgaaattccacttgccatgcctgttatcatgtctggaattcggacggcagcggtcttgattatcggtacggctaccttggcgaccttgattggggcagggggactgggttcctttatcctgttgggaattgaccgtaataatgccagtttgattttgattggggccctttcttctgcagtgctagctattgcctttaacttcctactaaaagtaatggaaaaagcgaaattgcggacgattttctctggttttgccttggtggctttattactgggtctgtcttatagtccagcccttttggctcaaaaagagaaggaaaacttgattattgctgggaaaataggcccagaaccagaaattttggctaatatgtataaattgctgattgaagaaaataccagcatgactgcgactgttacaccgaattttgggacgacaagtttcctttatgaagctctgaaaaaaggtgatattgacatttatcctgaatttaccggtacggtgactgaaaagtttgcttcaaccatcacccaaggtgagtcatga

SEQ ID NO: 327 - DNA, 630 bp, Streptococcus pneumoniae
ctgaaaagtttgcttcaaccatcacccaaggtgagtcatgagccagagcaggtttatcaagtggcgcgtgatggcattgccaagcaggatcatctagcctatctcaaacctatgtcttatcaaaatacctatgctgtagctgttccgaaaaagattgctcaagaatatggcttgaagaccatttcggatttgaaaaaagtggaagggcagctgaaggcaggctttacgcttgagtttaacgaccgtgaagatggaaataagggcttgcaatcaatgtatggtctcaatctcaatgtggcgactatgcagccagctcttcgttatcaggcaattcagtcaggggatattcaaatcacggatgcctattcgactgatgcggaattggagcgttatgatttacaggtcttggaagatgacaagcaactcttcccaccttatcaaggggctccactcatgaaagaagctcttctcaagaaacacccagagttggaaagagttcttaatacattggctggtaagattacagaaagccagatgagccagctcaactaccaagtcggtgttgaaggcaagtcagcaaagcaagtagccaaggagtttctccaagaacaaggtttgttgaagaaatga

SEQ ID NO: 328 - DNA, 810 bp, Streptococcus pneumoniae
atgatgcatacttatttgcaaaagaaaattgaaaatatcaaaacaaccctaggtgaaatgtcaggtggttaccgtcgtatggttgcggctatggctgatttaggattttcaggaactatgaaggctatctgggatgacctctttgcccatcgtagttttgcccagtggatttatttgctggttttaggaagttttcctctctggctggagttggtttacgaacatcgtattgttgactggattgggatgatttgtagcttgacagggattatctgtgtaatctttgtatcggaaggtcgagcaagtaattatctttttggcttgattaactctgttatttaccttattttggccctacagaaaggcttttatggtgaggtgctgacgacactttacttcacagtcatgcagccaattggacttctagtttggatttatcaggcacagtttaagaaggaaaagcaggagtttgtcgcgcgtaaactggacggcaagggctggacaaagtatctttccattagtgtgctttggtggttggcctttggcttcatttatcagtctattggtgccaatcgtccctatcgtgattcaatcacagatgcaaccaatggggtagggcaaatcctcatgacagctgtttaccgtgaacagtggatattctgggcggctaccaatgttttttcaatctatctctggtggggagaaagcctgcaaattcaagggaaatatctaatttatctcattaacagtctagttggttggtatcaatggagcaaggcagctaagcagaatactgatttacttaactag

SEQ ID NO: 329 - DNA, 537 bp, Streptococcus pneumoniae
atgactaacattgaccgccgtatcagcaaaaccaaaaaagccatctatcaagcttttatacaacttttgaatgctaagggctacgaggccactactgttcaggatatcattgatctcgcagatgtgggacgatccaccttttactgtcactatgagagtaaggagcttcttctggaccagctctgccgctacctcttccatcatctttttgaaagagagcaagccatttcaaccgaggactacctcgcccacctctttctccattttcataaaaaccaagaccatatcaccagtctgctattttccaaaaatgactacttcctccgtcaactccataaagagctagaacaccatgtctattccgtgctagctgataatttaaaagaagcccaccctaatatgcctacttcttacctccaacacttggtcgtgtccaactttatcgagacattgacctggtggctcaaaaaaggtcaagatttcacaggccaggaagttgtccaattttatctagaccttctcattcctaaaaattga

SEQ ID NO: 330 - DNA, 900 bp, Streptococcus pneumoniae
atgagaaatatgaaggcaaaatatgctgtttgggtggcttttttcttaaatttgacttatgccattgttgagtttattgcaggtggaatatttggttctagcgctgttcttgctgactctgtgcatgacttggtagatgcgattgcaattggaatatcagcttttctagaaacaatctccaatcgtgaagaagacaatcagtacaccttgggctataagcggtttagcctgctaggagccttggtaacagctgtgattctcgtaacgggctctgttctagtcattttggaaaatgtcacgaagattttgcatccgcaaccagtcaatgatgaggggattctctggttaggaattattgcgattactatcaatctgttagcgagtctggtggttggtaagggaaagacaaagaatgagtctattctgaatctgcattttctggaagatacgctagggtgggtagctgttatcctgatggcgattgttcttcgatttacggactggtatatcctagatcctcttttgtcccttgtcatttctttctttattctttcaaaagccctttcacgtttttggtctacactcaagattttcttggatgctgtgccagaaggtcttgatatcaagcaagtaaagagtggcctggaacgattggataatgtggccagccttaatcagcttaatctctggactatggatgctttggaaaaaaatgccattgtccatgtttgtctaaaagaaatggaacatatggaaacttgtaaagagtctattcgaattttcctaaaagattgtggttttcaaaatattaccattgaaattgatgctgacctagaaactcaccaaacccataagcgaaaggtgtgtgacttggaacggagttatgagcatcaacattag

SEQ ID NO: 331 - DNA, 354 bp, Streptococcus pneumoniae
gtgaatattaaatctgccagtgatttgttgggaatttcagcggatacgattcggtattatgaacgggttggtcttgtgccaccgattactcgtactgctactgggattcgtgattttcaagatcaggatatcgaagcgctggaatttattaagtgttttcgttcggcgggtgtctctgtagatagtttagttgactatatgtcgctctaccaaaagggagatgaaacgagagaggagaggcttggtattttagaagaggaaaagcaaaaattagaggagcgcttgtctcagctacagacagctttaaatcgtttaaatctcaaaattaaactttataaggaaggaaaattttaa

SEQ ID NO: 332 - DNA, 1038 bp, Streptococcus pneumoniae
atgaaatcagcagtatatacaaaggcaggtcaggttggacttgctagcattgaacgtccgcaaataatagaagcggatgatgtgattattcgtgtggttcgtgcgtgcgtttgtggttcagatttatggaggtaccgtaatccagaaacgaaagctggacataaaaatagtggacacgaagcgattgggattgttgaagaagctggggaagccattacgacggtgaaaccaggtgattttgtgattgtcccttttacacatggatgtggtgagtgtgatgcctgtcttgctggatttgacggttcttgcgacaatcatattggtaataatttggggggtgattttcaggcagaatatattcgcttccactatgcaaactgggcgctggttaaaatccctggtcaaccttctgattatacagaagggatgctcaagtcccttttgactcttgcagatgtcatgccgacaggctatcatgcagcgcgtgttgcaaatgttcaaaaaggggacaaggttgttgttatcggtgatggggctgttggtcaatgtgctgtcatcgcggctaagatgcgtggagcatcacaaattatccttatgagccgtcatgaagaccgtcaaaagatggctatggagtcaggtgcgacagctgttgttgcagaacgtggtcaagaaggaattaccaaggtgcgtgaaatcctcggcggaggagcagacgcagcacttgaatgtgttggtacggaggctgctatagaacaggcgctaggtgttcttcataatggagggcgtatgggctttgtaggagtcccacactataataatcgtgctcttggttcgacatttatgcaaaatatctctgtagcaggtggggcagcttctgctacaacatacgataagcaatttttactaaaagccgtccttgatggtgatatcaatccaggtcgcgtctttacttcaagttataaactggaagatatcgaccaagcctataaagatatggatgaacgtaagacaattaagtctatgattgtaatcgaataa

SEQ ID NO: 333 - DNA, 1008 bp, Streptococcus pneumoniae
atggctaccttaaaagacattgcacagctagcctctgtctctatcgcgaccgtatcccgcgtcctcaaccgcgaccagagcctatctgttacagaagaaaccagacaccgtattttaaccgttgctgaagagctgggctacaccaagcacctcaagacaggcgagtcccataaacccaagcaaaagattgccattattcaatgggtcagcgaacaaggggagctagacgacctctactactaccagattcgcctaggaatagaaaaaagagcccaagagttggactacgatatcttgcgctattttaatgaccatccttttaccttaagcgaggaagtgattgggattctctgcatcggaaaatttagccgagctcagatttctgcctttgaagaataccaaaaacccctggtctttctagacagtgatacactttccctcggacatacctgcattattacggacttttacactgccatgaaacaggttgtcgattatttcctcagtcaagggatggaccgtatcgggattctaacaggccttgaagaaacaactgaccaagaagaaatcattgaggataagcggctggaaaatttcagaaactacagtcaagcaaaaggaatctatcatgatgaactggtctttcaaggaagatttactgcccagtctggctatgacttaatgaaggaggccattcagagcttgggagaccaacttccgccagcatttttcgcagccagcgatagtttagctatcggtgccctccgtgccctccaagaagctggaatcagcctgccagatcgcgtcagcctcatttcctttaacgacactagtctgaccaaacaggtctatcctcccctctctagtattacagtttatactgaagaaatgggccgagcaggtatggatattcttaacaaggaagtcctccacggtcggaaaatccctagcctgaccatgctgggaaccagactgacattaagagaaagtaccctaaatcaagaatag

SEQ ID NO: 334 - DNA, 1179 bp, Streptococcus pneumoniae
atgacacaacatcttactgctgaaactcttcgcaaagactttcttgctgtttttggtcaagaagcagaccaaattttcttttcaccaggtcgtatcaatttgattggtgaacacacagactacaacggtgggcacgtttttcctgctgctatttccttgggaacttacggtgcagctcgtaagcgtgacgaccaagtcttgcgtttctactcagctaactttgaggacaagggcattatcgaagtgcctctcgctgacctcaagtttgaaaaagagcacaactggaccaattatccaaaaggtgtccttcatttcttgcaagaagctgggcacgtgattgacaaaggttttgatttttatgtttatgggaatatcccaaatggtgctggtttgtcttcttcagcatcccttgaactcttgacaggggtagtggcagagcatctctttgatttaaaattagagcgtctcgatttggttaaaatcggaaaacaaacagaaaataactttatcggagtaaattctggcattatggaccaatttgctattggtatgggggctgaccaacgtgctatttacttagataccaatactttagaatacgacttggtgccacttgatttgaaggacaatgtcgttgttatcatgaacaccaacaaacgccgtgaattggcggactctaaatacaatgaacgtcgtgctgagtgtgaaaaagcagtggaagaattgcaagttgccttggatattcagaccctgggtgaattggacgagtgggccgttgaccaatatagctatctgattaaagatgaaaatcgtttgaaacgtgctcgccatgctgtgcttgaaaaccaacgtacccttaaagctcaagcagcccttcaagcaggtgatttggaaacatttggtcgtttgatgaatgcgtcacacgtttctctggagcatgattatgaagtaactggtttggaattggatactcttgttcacacagcttgggcacaagaaggagttctcggtgctcgtatgacaggggctggttttggtggctgtgccattgccttggttcaaaaagatactgttgaggcctttaaggaagctgtaggcaaacactacgaggaagtagttggatacgctccaagcttctatatcgctgaagttgcaggtggcactcgcgtccttgactag

SEQ ID NO: 335 - DNA, 1482 bp, Streptococcus pneumoniae
gtgatcttagtagataaatttgtaacacatgtcatttctgaaagttcatttgaggaaatggatcgaatctacctgaccaaccgtgttttggcacgagtgggagaaggtgttttggaagttgagaccaatctggataaattgattgacctcaaggaccagctagttgaggaagccgttcgattagagatgattgaggatagtcagactgcgcgtgaaatccttggtactgaactgatggacttggtgactccttatccgagtcaggtcaatcgtgacttctgggaagcctatgtccactctcctgagcaagcgatagaggatttttatcaactcagtcagaaaaatgactacatcaaactcaaggccattgctaaaaatatcgcttatcgtgttccatctgattatggagaacttgaaattaccatcaatctctctaagcctgaaaaggatccgaaagagattgcggtagccaagttggtgcaagctagtaattatcctcagtgtcaactttgtttagagaatgagggttaccatggtcgggtcaaccacccagctcgcagcaaccaccggattatccgttttgaaatggttggtcaggaatgggggttccagtattcgccctatgcttactttaatgagcattgtatttttttagatggccagcatcgtcccatggccattagtcgtcagagttttgaacgtctgttggctatcgtagagcagtttccaggatattttgctggatctaatgccgacctgccgattgtggggggctctattctaactcacgatcattatcagggaggccgtcacgtatttcctatggaattggctcccttgcaaaagaccttccgatttgctggttttgagcaggtcaaggctggaattatcaagtggccaatgtctgtcctacgcttgacttcggattccaaagaggatttgattaacttagctgataagattttccaggaatggcgtcagtattcagattctagtgtgcagattttagcagagacagacgggacaccgcatcacaccatcacaccaatagcgcgtaagcgtgatggacagtttgagttggacttggtcttgcgagacaatcagacttcagcagagcatcctgatggcatctatcatccccacaaggatgtccaacatatcaagaaggaaaatatcggcttgattgaggtcatgggcttggcaatcttgccaccacgtctgaaagaagaagtggagcaagtcgctagctatcttgtaggagaagctgttacagttgccgattatcatcaggagtgggcagaccaactcaaatcccaacatccagacctaacggataaagaaaaagcccttgcaatcgtcaaggactctgtgggtgctatctttgtgcgtgtacttgaggatgcaggagtctacaagcagacagaacaagggcagacagcctttatgcgctttgtggaacaggtcggaatttcactagactag

SEQ ID NO: 336 - DNA, 405 bp, Streptococcus pneumoniae
atgaaagactttcattttgacgctatatctgcctttgaaaattacgaaattgaaaaaatgagagatggtcacgttgtggtgacgaccaaagtagtgaactcgtcgctcaactactatggcaatgcccatggtggctatctattcacgctatgtgaccaaatcagtggtttggtggttatctcgctgggacttgatggggtgacactccaatcctctatcaactaccttaaggcaggaaaactcgacgatgtattgaccattaaaggagaatgtgtccatcaaggtcgtacaacctgtgtgatggatgtggatatcaccaatcaagagggcagaaatgtctgtaaagcaacctttaccatgtttgtcacaggccaaaggtctgaggaaagacgggtaagtatataa

SEQ ID NO: 337 - DNA, 888 bp, Streptococcus pneumoniae
ttgtgttttaatttctatggtataattaaaagcatgaagataaaagaaataaagaaagttactttacaaccgttcacgaaatggacaggtggtaaaagacaattattgcctgttattagagaattaatacctaaaacctataacaggtatttcgaaccttttgttggaggtggagctttattttttgatttggctcctaaagatgcagttattaatgattttaacgctgaactaataaattgctatcaacaaattaaggacaatcctcaagaattgattgaaattttgaaagttcatcaggaatataattcaaaagaatattatttagatttacgttctgcagatcgtgatgaaagaatagatatgatgtccgaagtacaaagagctgcacgtattctatatatgttgagagtgaactttaatggtctatatcgtgtgaattctaagaaccaatttaatgttccatatggacgttataagaatcctaaaattgttgatgaggaattgatatctgctatttcagtttatctaaataacaatcaactagaaattaaagtgggagattttgaaaaggcaattgtagatgttcgaacaggagattttgtgtattttgaccctccatatattccattgtctgagacgagtgcatttacgtcttatactcatgagggattctcttttgcagatcaagtaagattaagagatgcctttaagagattgagtgatacaggagcttatgttatgttatcaaattcttctagtgctttagtagaggagttgtataaggattttaatatacattatgttgaagctacccgaactaatggagcaaaatcttcaagtcgaggaaaaatttctgaaattatagtcacaaattatgaaaaataa

SEQ ID NO: 338 - DNA, 771 bp, Streptococcus pneumoniae
atgacaaaaccatactacaataaaaataagatgattcttgttcattcagatacgttcaagttcttatcaaaaatgaaaccagaaagtatggatatgatttttgctgatccaccttattttttaagtaatggtggaatatctaattctgggggacaagttgtttctgttgataaaggagattgggataaaatttcttcattcgaagaaaaacatgagtttaatcgtaaatggattcgcctagcaaaagaagttctgaagcctaatgggacggtatggatttcaggtagtttgcacaacatatactcagttggaatggcattagaacaagaaggttttaaaattctgaataatattacttggcagaaaacaaaccctgcccccaatttatcttgtcgttattttacccattctactgaaaccattttatgggccagaaaaaatgataaaaaagctcgtcattactacaattatgatttaatgaaagaattgaatgatggaaaacaaatgaaagatgtctggaccggttctttaacaaagaaagttgaaaaatgggctgggaaacatccaactcaaaaaccagagtatttgttagaacgcattattttagcctctactaaagagggtgactatattctagacccatttgttggtagtggcactacgggtgttgttgcgaagcggttaggtagaagatttataggtatcgatgctgaaaaagaatatttaaaaattgcaaggaagaggttggaggcagaaaatgaaacaaactag

SEQ ID NO: 339 - DNA, 867 bp, Streptococcus pneumoniae
atgaaacaaactagaaattttgatgagtggttgtcaacgatgaccgacacagtagctgactggacttattatacagattttcctaaggtttataaaaatgtatctagtataaaagttgctctaaatattatgaatagtcttattggtagtaaaaatatacaagaggattttttagacttatatcaaaattatccagaaattttgaaagttgtgcctctacttattgctaaacgtttgagagatacgattattgttaaggatccgataaaagatttctattttgattttagtaaacgaaactatagtattgaagaatatactatgtttttggaaaaatcaggtatatttgatttattgcaaaatcatttagtatcaaatttagttgactacgttacaggtgttgaggttggtatggatactaatgggcgcaaaaatcggactggagatgcgatggaaaatattgttcaaagttatcttgaagctgaagggtatattttaggagagaatttatttaaagagattgaacaaaatgaaatagaggaaattttttctgtcgatttatctgctattacgaatgatgggaatactgtgaaacgttttgattttgtcataaaaaatgaacaagtgctttatctgattgaggttaatttttattcaggaagtggttcaaaattaaatgagacggctagatcttacaaaatgattgctgaagaaactaaagctattcctaatgttgagtttatgtggattactgatggacaaggttggtataaggctaagaataatttacgagaaacatttgatattttaccattcttatataatattaacgatttggaacataatattttaaagaatttgaaatag

SEQ ID NO: 340 - DNA, 357 bp, Streptococcus pneumoniae
  unsure (28): n at each above location is unknown.
agactggctaccaatttaataacgcagntggtttcttggttctccttggactctttccttaagtttggcgcccttgcccaaatcattccaagccctgtcctcggtggtgccatgctggtgatgtttgtttttgtatcgattcaagggatgcaaatcctcgcccgtgttgactttgctaacaatgaacacaacttccttatcgcagctgtttcaatcgctgcaggtgtcggactcaataacagtaatctctttgtcagcatgccgacagccttccaaatgttcttctcaaacggaatcgtcgtagccagcctactcgctattgtcctcaatgccgtattaaatcataaaaagaaataa

SEQ ID NO: 341 - DNA, 849 bp, Streptococcus pneumoniae
atgcaaactcaagaaaaacactcgcaagcagccgttcttggcttgcagcacttactagccatgtactcaggatctatcctggttcccatcatgattgcgacagcccttggctattcagctgagcagttgacctacctgatttctacagatatcttcatgtgtggggtggcaaccttcctccaactccaactcaacaaatactttgggattggactcccagtcgttcttggagttgccttccaatcggtcgctcccttaattatgattgggcaaagccatggtagtggcgctatgtttggtgcccttatcgcatctgggatttacgtggttcttgtttcaggcatcttctcaaaagtagccaatcttttcccatctatcgtaacaggatctgttattaccacaattggtttaaccttgatccctgtcgctattggaaatatgggaaataacgttccagagccaactggtcaaagtctcttgctttcagctattactgttctgattatcctcttgatcaacatctttaccaaaggatttattaagtctatctctattttgattggtctggttgttggaactgccattgctgctagcatgggcttggttgacttctctcctgttgcagcagcaccggttgtccatgtcccaactccattctactttgggatgccaacctttgaaatctcatctattgtcatgatgtgtatcatcgcaacggtgtctatggttgagtcaactgggttgtttatctggccttgtctgatatcacaaaggatccaatcgacagcaccgcctgcgcaacggataccgcgcagaaggtttggcctaaatttttggggggatttttaa

SEQ ID NO: 342 - DNA, 582 bp, Streptococcus pneumoniae
atgaaattattagaagatcgcatcctcaaggatgggcatatcttgggtgataacatcctcaaggtagattcctttttaacccaccaagttgactttagcttgatgcgagagattggtaaggtttttgcggaaaaatttgctgctgccggcattaccaaggtcgtaaccattgaagcgtcgggtattgccccagccgtttttacagctgaagccttaaatgttcccatgatttttgccaaaaaggctaaaaacatcaccatgaacgaaggtatcctaactgcccaagtctactcctttaccaagcaagtgaccagcaccgtttctatcgctggaaaattcctctcaccagaggacaaggtcttgattatcgacgatttccttgctaatggccaagctgctaaaggcttgattcaaatcatcgaacaggccggtgccacagtccaagctatcggtatcgtgattgagaaatccttccaagatggtcgtgatttgcttgaaaaagcaggctaccctgtcctatcacttgctcgcttggatcgttttgaaaatggtcaggtcgtatttaaggaggcagatctctaa

SEQ ID NO: 343 - DNA, 174 bp, Streptococcus pneumoniae
atgccttttatgatggaaaaatcttctaatactcttcgaaaatctcttcaagccacgtcaacgtcgccttaccgtaggtatatgatactgactctgtcaattctatccacaacctcaaaacagtgttttgaggttgtggatagcttcctagtttgctctttgattttcatttag

SEQ ID NO: 344 - DNA, 240 bp, Streptococcus pneumoniae
atgttagaggagggaacaaaggatcaactagctgaactgacctacccctttggtcgtggagtcaatctctcctttggcataaaggatgttccaaaactctatcaaaaagtgatggaggcaaactatcctatttatcgtctcttgaccaaaagaaagtttcgtgtcagtgatccctatatctatcctcataaatttgcagttttggatccagatggctattttttaagatttagcgagtag

SEQ ID NO: 345 - DNA, 828 bp, Streptococcus pneumoniae
atgaaacttatctcatggaatattgattccctaaacgctgccctaactagtgactcagctcgtgccaaattgtcccaagaagtcctacaaaccttggtcgctgaaaatgctgatatcattgctatccaagaaaccaagctttctgccaaaggacctacaaagaaacacgtggaaattttagaagaactcttcccaggctacgaaaacacatggcgctcttcccaagagcctgcccgtaaaggctatgctggaaccatgttcctttataagaaagaacttacgcctacgatcagttttccagaaatcggtgccccttctaccatggacttggaaggccgtatcatcactctagaatttgatgcatttttcgtaacccaagtttacactccaaacgctggtgacggtctcaaacgcttggaagaacgccaagtctgggatgttaaatatgctgagtatttggctgaactagacaaagaaaaaccagtccttgcgaccggtgactacaacgtagcccacaatgaaatcgaccttgcaaatcctgctagcaaccgccgttcacctggatttactgacgaggaacgtgctggatttaccaaccttttggcaactggatttacagacaccttccgccatgttcatggcgatgttcctgaacgctacacttggtgggcacaacgcagcaaaacttctaaaatcaacaatacaggctggagaatcgactactggctcacaagtaaccgtatcgctgacaaggtcactaaatctgatatgattgactcaggtgctcgccaagaccatacaccgattgtcttggaaattgacttgtaa

SEQ ID NO: 346 - DNA, 228 bp, Streptococcus pneumoniae
atgaaattctactcttatgactatgtactcagccaaatcggtcagcaaaatggtatcatggttggctttgggattgttctattagctgtgacagttttttttgctttcaaggcataccatgataaaaagggaaccgaatttcgtgagttggtcatgatttcagctctggccttatttagctctgcttttggtcagcatcacgacttatcaaaacaatcaagtttctaa

SEQ ID NO: 347 - DNA, 270 bp, Streptococcus pneumoniae
ttggtcagcatcacgacttatcaaaacaatcaagtttctaacaataaatttcaaacttcacttcatttcatcgaggttgtttccaaagatttgggagtagacaagtcagaagtctatgttaatacttccacaaacacagatggcgcacttatcaaggtgggagatcgctattatcgtgccctaaacggaagtgagccagacaagtacctgttagagaaagtcgaattgtataagacagacgcaattgaactggtggatgtgaacaaatga

SEQ ID NO: 348 - DNA, 531 bp, Streptococcus pneumoniae
atgacacttaattatatcgaaattttaatcaaactggtcttgactctcaaatggctcaacaacaatgttcactttgtgaaacgtttgattgatggtaagccaactctccttatcaaaaatgggaatattgacccagaagcctgtcgttcagttggtttgtctgcatcggatgtagccctcaaacttcgtagccaagggattttccagatgaagcaagtcaaacgagctgtgcaagagcaaaatgggcaacttatcgttgtgcaaatgggagatgaaaatcctaagtatccagttgtgactgacggtgtgattcaagtagatgtcttggaatcgattggtcgtagcgaagagtggttgcttgataacctcagtaaacaagggcatgacaatgtagccaatatctttattgctgaatatgacaagggtgctgttacagtcgtaacttatgaaaaagaaaaacctggggtcttgtactcttcgaaaatctcttcaaaccgcgtcaacgtcgccttgccgtatgtaggttactga

SEQ ID NO: 349 - DNA, 237 bp, Streptococcus pneumoniae
tggggtcttgtactcttcgaaaatctcttcaaaccgcgtcaacgtcgccttgccgtatgtaggttactgacttcgtcagttctatctacaacctcaaagcagtgctttgagcagcctgcggctagtttcctagtttgctctttgattttcattgagtattggcctcaggtttccatttgcaatcagaaagggattttatgtccattattcaaaaactttggtggtttttcaagttag

SEQ ID NO: 350 - DNA, 1746 bp, Streptococcus pneumoniae
atgtccattattcaaaaactttggtggtttttcaagttagaaaaacgccgttatctagtcggaattgtggccctggtcttggtttccgtcctcaatctcattcctcctatggttatggggcgggttattgatgccatcacatcggggcaattaacccagcaggacctccttcttagcctattttacttgctacttgcagcctttggtatgtactatttgcgctatgtgtggcgtatgtatatccttgggacctcttattgcttgggacagatcatgcggtctcgcttgtttaagcatttcacaaaaatgtcgtcagccttttatcaaacctatcggacgggtgatctgatggcacacgcaaccaatgatatcaatgccttgactcgtttagcaggtggcggtgtcatgtctgcggtggatgcctctatcacggctctggtgactttgttgaccatgctctttagcatctcatggcagatgactcttgttgccattctccccctacctttcatggcctatgcgactagtcgcctagggagaaagactcataaggcctttggcgaatcccaagctgctttttctgaactcaataacaaggtacaggagtccgtatcaggtatcaaagtgaccaagtctttcggttatcaggcagacgagttgaagtcttttcaggcagtcaatgaattaaccttccaaaagaacctgcaaaccatgaaatatgatagtctctttgaccctatggttctcttgtttgttggttcgtcctatgttttaacgcttttggttggctccttggtggttcaggaagggcagattacagttgggaatctagtcacctttatcagctatttggatatgctggtctggcctcttatggccatcggcttcctctttaatactactcagcgagggaaggtttcttaccagcggattgaaaatcttttgtctcaggaatctcctgtacaagacccggagtttcctctggatggtattgaaaatgggcgtttggagtatgccattgacagctttgcttttgaaaatgaggaaacactgacggatattcactttagtttggcaaaagggcaaacactgggcttggttgggcagacaggctctgggaaaacgtccttaatcaagctcctcttgcgtgaatacgatgtggataagggcgccatttatctaaacggtcacgatattcgggactatcgtctgacagaccttcgcagtctcatgggctatgttcctcaggaccagtttctttttgcgacttcaatcctagacaatatccgctttggtaatcctaacttgcccctttcagcggtcgaggaagctactaagctagcccgagtttaccaagatattgtagacatgcctcaaggatttgatacgctgattggtgaaaaaggagtcagtctttctggtggtcaaaagcaacggttggctatgagtcgggctatgattttagaccctgatatcttgattttggatgattccttatccgccgtagatgccaagacagagtatgcgattatcgacaacctcaaggagacgcgaaaggacaagacaaccattatcactgcccatcgcctcagtgcagttgtccatgcagatttgattttagtcctgcaaaatggtcaaattatcgaacgaggcaggcacgaagacttgctagctttggatggctggtatgcccaaacctaccagtctcagcagctggaaatgaagggagaagaagatgcagaataa

SEQ ID NO: 351 - DNA, 882 bp, Streptococcus pneumoniae
atgcagaataaacaagaacaatggactgtattgaagcgcttgatgtcctatctcaagccttatggactccttacctttttggcactcagttttctcctagcgacgacggtcattaaaagtgtcattccccttgtggcttcccactttatcgaccagtatctcagcaatcttaaccaactagccgtgaccgttttgctggtctactatggtctctacatcctacaaactgtagttcagtatgtcggcaatcttctctttgcgcgcgtgtcttacagtattgttagggatattcgtcgggatgcctttgccaatatggagaaactgggcatgtcttactttgacaagacgccagcaggttctatcgtttctcgtttgaccaacgataccgagacgattagtgatatgttttctgggattttatccagctttatctcagcagtttttatctttctgacaaccctttataccatgttggtgctggattttcgtttgacagcattagtcttgctctttctccccttgattttccttttggtcaatctctatcgaaaaaagtcagtgaaaatcatcgagaaaaccagaagtctcttgtcagatatcaatagtaagctggcagagaatatcgagggaatcaggattattcaggcttttaatcaagagaagcgcctgcaggcagaatttgatgaaatcaaccaagagcacttggcctatgccaaccgttctgtagccttggatgccctctttttgagacctgccatgagtttgttgaaacttctaggttatgctgtcttgatgacctattttggctatcgtggtctttctatcgggataacggccgggaccatgtatgcttttatccagtacatcaaccgccctctttga

SEQ ID NO: 352 - DNA, 207 bp, Streptococcus pneumoniae
atgcttttatccagtacatcaaccgccctctttgaccctttgattgaggtgacgcaaaacttttcaacactgcaaacgtctatggtttctgcaggccgtgtctttgccttaatcgatgagagcacctatgagccccttcaagaaaatgggcaagccaaagtcaaggagggcaatatcagttttggaacatgtgtgtatctcgtatga

SEQ ID NO: 353 - DNA, 792 bp, Streptococcus pneumoniae
atgagagcacctatgagccccttcaagaaaatgggcaagccaaagtcaaggagggcaatatcagttttggaacatgtgtgtatctcgtatgacggtaaacatccgattctggatgacatttctttctctgttaataagggtgaaaccattgcctttgtaggtcatacaggttcagggaaatcgtctattatcaatgtcctcatgcgcttttatgaattccagtcagggagagttctcttggatgatgtggatatcagggatttcagtcaagaagagctgagaaaaaacatcggtttggttttacaggaacccttcctctatcatggaactattaagtccaatatcgccatgtaccaagaaatcagtgatgagcaggttcaggctgcggcagcctttgtggatgcagattcctttattcaagaacttcctcaggggtacgactcccctgtttccgagcgtggttcgagcttctctactgggcagcgccagctttttgcctttgctagaacagtcgccagccagcctaaaatcctgattttggatgaagcgacagccaatattgactctgaaacagaaagtttggttcaagcttctctggcgaagatgagacagggccgaacaactattgctatcgctcaccgcctttctactattcaagacgccaactgcatctatgtcttggataagggacgcattatcgagagtggaacccatgaggaactcttgactctgggaggaacctatcacaagatgtatagtttgcaggcaggggccatggcctatactctttga

SEQ ID NO: 354 - DNA, 696 bp, Streptococcus pneumoniae
atgctgaaatgggaagacttgcctgtggaaatgaaatcaagcgaggttgagtcttactaccagcttgtctctaaaaggaagggttcgctgattttcaagcgttgcttggactgggttttggccttggtgcttacatgggttctaacttctcccatctttctcatcttgagcatttggatcaagttggatagcaaggggccagtgatttacaagcaagagcgtgtgacccagtacaaccgtcggttcaagatttggaagttccgtaccatggtgacggatgcggataaaaaaggaagtctggtgacttctgctaacgatagccgtattaccaaggttggaaatttcatccgacgtgtccgtttggacgaactgcctcagttggtcaatgtccttaaaggtgagatgtcctttgtcggtacacgacctgaagtgccacgttatacagagcagtatagccctgaaatgatggcaaccttgctcttgcaagcaggaattacctctccagccagcatcaactacaaggatgaggacaccatcatcagtcaaatgacggagaaaggtctgtcagttgatcaggcctatgtggagcatgttcttcctgaaaagatgcgctataacctcgcctatctccgagagtttagtttctttggggacatcaaaatcatgtttcaaaccgtgtttgaggtactaaaataa

SEQ ID NO: 355 - DNA, 1227 bp, Streptococcus pneumoniae
atgccaaattacaatattccattttcaccgcctgatatcacagaagcagaaattgctgaagtagcggataccctgcgttctggttggatcacaacaggtcctaaaacaaaagaactggagcgccgcttgtctctttacacacagacacctaagactgtttgtctcaactctgcgacagccgctctggagttgattttacgcgttttggaagtgggacctggtgatgaagtcatcgttccagccatgacctatacggcttcatgtagtgtcattacgcacgtgggagcaacccctgtcatggtggatatccaagcagatacgtttgagatggactatgacctgcttgagcaagctatcactgagaaaactaaggtgattatcccagtagagctcgcagggattgtttgcgattatgaccgtttgttccaagtcgtggagaaaaaacgtgacttctttaccgcttcaagcaagtggcaaaaggcctttaaccgtattgtcattgtctctgatagtgcccacgctttgggatctacttataaaggacaaccttctggttctatcgctgattttacttccttctcattccatgccgttaagaactttacaacggcagaaggtggaagtgcgacttggaaagccaatccagtgattgatgacgaagagatgtacaaggaattccaaatcctttcccttcacgggcaaactaaggatgctcttgccaagatgcaactggggtcatgggaatacgatatcgttacaccagcctataagtgcaacatgaccgatatcatggcttcacttggtttggtacaattggaccgctatccaagtttgttgcaacgccgtaaggacattgtggaccgctatgatagtggttttgcaggttctcgcatccatcctttggcacacaagactgaaactgtcgaatcttcacgccacctctacatcacccgtgtagaaggagcaagcctagaagaacgcagcctcatcatccaagaattggctaaagcaggaattgcaagtaatgttcactacaaaccgcttcctctcttgacagcctataagaatcttggatttgatatgacgaactatcctaaggcctatgccttctttgagaatgaaattaccctccctcttcatactaaattaagcgatgaagaagtagactatatcattgagactttcaaaacagtttctgaaaaagtgctaactttatcaaaaaaatga

SEQ ID NO: 356 - DNA, 189 bp, Streptococcus pneumoniae
ggcctctttctcctcagagagagaatttttataggattttcctttcttgtgggagtcccgtggtttgaaataagatgtgagcaatttggtgtagcatttagaatccttactagacatcatttagaaaatctagtgtcttgttctagttttcaattcaccctattttttgaaagacgtgagtttccatga

SEQ ID NO: 357 - DNA, 267 bp, Streptococcus pneumoniae
gaaatatattgtagtgttttagtttcaatccgccatatgagcgatattaaggtaaatatccctggcgaatgcttgtatgacaaggtatttgttctttcatttataatttacaacatatcaataaatttaaatatagtaaatgggatattttatattcaagctaagaaagatagcatcacttttgaatggaaggctaaagagcaaactaggaagttggccatagatagctcaaaaccctgctttgaggttgtagatatagtaaaatga

SEQ ID NO: 358 - DNA, 2127 bp, Streptococcus pneumoniae
atgaaatattttgttcctaataaggtattcagtattcgtaaattaaaggtgggaacttgctcggtactattggcaatttcaattttggaaagccaaggtattttatcgaataaagttgttactagttcttcaccgatggctacaaaagagtcttctaatgcaattactaatgatttagataattcaccaactgttaatcagaatcgttctgctgaaatgattgcctctaattcaaccactaatggtttagataattcgttaagtgttaatagtatcagctctaatggtactattcgttccaattcacaattagacaacagaacagttgaatctacagtaacatctactaatgaaaataagagttataaggaagatgttataagtgacagaattatcaaaaaagaatttgaagatactgctttaagtgtaaaagattatggtgcggtaggtgatgggattcatgatgatcgacaagcaattcaagatgcaatagatgctgcagctcaagggctaggtggaggaaatgtatattttcctgaaggaacttatttagtaaaagaaattgtttttttaaaaagtcatacacacttagaattgaatgagaaagctacaattctaaatggtataaatattaagaatcacccttccattgtttttatgacaggtttatttacggatgatggtgcgcaagtagaatggggcccaacagaagatattagttattctggtggtacgattgatatgaacggtgctttgaatgaagaaggaactaaagcaaaaaatctaccacttataaattcttcaggtgcatttgctattgggaattcaaataacgtaactataaaaaatgtaacattcaaggatagttatcaagggcatgctattcaaattgcaggttcgaaaaatgtattagttgataattctcgttttcttgggcaagccttacccaaaacgatgaaggatgggcaaatcataagtaaggagagcattcagattgaaccattaactagaaaaggttttccttatgccttgaatgatgatgggaaaaaatctgaaaatgtgactattcaaaattcctattttggcaaaagtgataaatctggggaattagtaacagcaattggcacacactatcaaacattgtcgacacagaacccctctaatattaaaattttaaataatcattttgataacatgatgtatgcaggtgtacgttttacaggattcactgatgtattaatcaaaggaaatcgctttgataagaaagttaaaggagagagtgtacattatcgagaaagcggagcagctttagtaaatgcttatagctataaaaacactaaagacctattagatttaaataaacaggtggttatcgccgaaaatatatttaatattgccgatcctaaaacaaaagcgatacgagttgcaaaagatagtgcagaatatttaggaaaagtatcagatattactgtaacaaaaaatgtaattaataataattctaaggaaacagaacaaccaaatattgaattattacgagttagtgataatttagtagtctcagagaatagtatattcgggggtaaagaaggaattgttattgaggattcaaagggtaaaataaccgttttaaataaccaattttataatttatccggtaagtatatatcattcatcaaatctaatgcaaatgggaaagaacctgttatacgtgatagcgatggtaatttcaatattgtaacggagaatgggctttacaaaattgtaacaaataatttaagtgataaaaacgaaaaagaaaaaaacaaagaggaaaaacaatataattcaaataatgtaattgatagtaaccagaagaacggagagtttaactcaagtaaagataatagacaaatgaatgacaagatcgacaataaacaagataataagacagaagaagtaaactataaaatagttggagatggcagagaaactgaaaatcatattaataaatctaaagaaatagtagatgtaaaacaaaaattaccaaagagaggttcgtacaagattatggaactatttttaacagtgacaggaattggtttacttttgacactaaaagggttgaagtattatggtaaagataaataa

SEQ ID NO: 359 - DNA, 246 bp, Streptococcus pneumoniae
ggagatattgtaggttcacaaaatcagtatttttggattattggtggagctacagatttatataattctaaagaggagataggttattcagtctcagaagttgtacatattttatcagaaagtttgtcggttaattgtaaagaatcaaaaactcttaaacaaatatttgaaactgctttactcgaggttaaagatgaaatcggtttaaactcatataaattaacagagtatagtaaaatgaaataa

SEQ ID NO: 360 - DNA, 207 bp, Streptococcus pneumoniae
ttgttagaaatcgatttgactgtcctgattgatttgtcctattattatttcattttactatactctgttaatttatatgagtttaaaccgatttcatctttaacctcgagtaaagcagtttcaaatatttgtttaagagtttttgattctttacaattaaccgacaaactttctgataaaatatgtacaacttctgagactgaataa

SEQ ID NO: 361 - DNA, 285 bp, Streptococcus pneumoniae
gacaaatcaatcaggacagtcaaatcgatttctaacaatgttttagaagtagaggtgtactattctagtttcaatatactatattatcgcttaccaatatttgctaaactttcagaaaaaaagttggagtatatgatgctaggtgactgcgtcatgttagtaaacgaaatggaaataactgatcatagagtagataacttatttgaaaaagggaaaaatgagataaaagattcatgtagtagatttagcaataggacatataaaagctttagaaaaagtatctga

SEQ ID NO: 362 - DNA, 288 bp, Streptococcus pneumoniae
aagattcatgtagtagatttagcaataggacatataaaagctttagaaaaagtatctgaaaaaacagatgtttatatctataacctaggctcgggagaaggcactagtgtattacaacttgtaaatacatttgaaagtgttaataagatccctattccttataaaatagttccaagacgttcaggagacgttgcaacttgttatgcaaatgcagacaaagcatataaggaattaaattggaggacaacaaaatcgattgaagacatgtgtagagatacatggaattag

SEQ ID NO: 363 - DNA, 198 bp, Streptococcus pneumoniae
gtttttcatataaagaccttcttttttatatttgacatcggtgtcattatgtttacattatacaatgaaaccgtttcctttgtcaagcgctgtcaaacattttttttaatttatctttcattaaatatgcatttcattaaaaggttaagtaatttttccaaaatacagcactcatatagacagtatcatcaattatag

SEQ ID NO: 364 - DNA, 660 bp, Streptococcus pneumoniae
atgaaaaacttaacaaaaattaagttcaaagagaatggggaatttaatcatttccctgggaatacagttgtagcaaatctttatactaaacaagatttgatggaagttgttgatattattcaatcacgttatagagaattaccatttatcgataagtttactttaactccaaggaattctattcacatgactgtaattgaattgttgtgccatgaaaatcgtgaaacggagttttggagcagtaatcttcctctagatacacctttacaggaaatacatgattactttgctaaacaacttgaaatttttccattgttggatgaagaaattcatatgcgtataactgaaatgggaaaacaaaacatactagttgaacctgcagatgaagcttctgcaaagagattagaagaaattcgtacttatgtctcagaaaaagcaggtgtttgtttccctaatcatgatagatatcaattccatatttcaattgggtatcttcggattcctctaaccgaagaggaggaagaagagtttactaaagtcagagcagaattaactgaaattttattagagaagattccaactattactgtaaaccgtattgactatactgtatttgaagatatgagacaatttgttccatatcacgaaaaatttaaataa

SEQ ID NO: 365 - DNA, 1068 bp, Streptococcus pneumoniae
atgaaaaaaatgaaagtttggtctactgtacttgcaacgggagttgctcttactacacttgctgcttgctctggaggttcaaattctacgactgcttcttcatctgaagaaaaagctgataaaagtcaagaattagttatctattcgaactcagtctcaaatggtcgtggtgattggttaactgctaaagcaaaagaagctggttttaatataaaaatggttgatatcgctggcgctcaattagcagaccgtgttattgctgagaagaataatgcagttgcagatatggtatttggaattggtgctgttgactcaaataaaattagagatcaaaaattactagtacagtacaagcctaaatggttagataaaattgatcaatctttatcagataaagataattattataatcctgtgattgttcaaccattagttttaattggggcgcctgatgtaaaagaaatgcctaaagattggactgaattaggtagtaagtataaaggtaaatattcaatttatggtcttcaaggtggtacaggacgggcaattctagcaagtatcttagttcgttaccttgatgaaaaaggagatttaggcgtatcagaaaaaggatgggaagttgcaaaagaatactttgcaaatgcctatactcttcaaaaaggtgaaagctcagttgttaaagcgttagataaagaaagcccaattcaatacggtatgatctggggttctggagcgttaattggacaaaaagaacaaaatgttgaattcaaagttatgactcctgagattggtgtaccatttgtaactgaacaaactatggttttaagcactagtaaaaaacaagcgttagctaaagaatttattgattggtttggtcaatcagaaattcaagtagaatatagtaaaaaatttggatctattcctgcaaataaagatgccctaaaagagttacctgaagatacgaaaaaatttgttgatcaagtgaaaccacaaaatattgactgggaagctgttggaaagcatttggatgaatgggtagaaaaagctgaattagaatacgtaaaataa

SEQ ID NO: 366 - DNA, 1011 bp, Streptococcus pneumoniae
atgattaaatttgataatattcaaattaaatatggtgattttgttgcaattgataatctgaatttagatatacatgaaggggaattctttacatttcttgggccttcaggatgtggtaaatcaactactttgagagcattggtaggttttttagatccatcatcaggaagtattgaagttaatggaacagatgtcactcatttggaacctgaaaagcgtgggattggtattgtatttcaatcttatgcgctatttccaactatgactgtttttgataatattgcatttggtttaaaagttaagaaggtagctccagatgttattaaagctaaagtatcagcagtggcagcaaaaattaagatctctgatcaacagttacagcgtaatgtatcagaattatctgggggtcaacaacaaagggtagcattggctcgtgctctggttcttgaacctaaaattctttgtctagatgaaccattgtcaaaccttgacgcaaaattacgtgtagatttgagaaaagagttgaaaagacttcaaaaagagttaggtattactactttatatgttactcatgatcaagaggaagccttgactttatctgatagaattgcagtctttaacaatggatacatcgaacaggtcggtacaccagtagagatttatcataattctcaaactgaatttgtatgtgattttattggagatattaatgttttgaccgatgaaacagtccacgaagtattattgaaaaatacaagcgttttcttagaggataaaaaaggatacattcgattagagaaagttcgattcaatcgtgaaactgaacaagattttattctaaaagggacaattattgatgttgagttttctggagttacaattcactatacaataaaagtttctgaaagtcagattcttaatgtaacaagtattgatagtcaggctgctattagatctgtcggagaaagtgtggaattatttatcacaccatcagacgttctgcaattttaa

SEQ ID NO: 367 - DNA, 1692 bp, Streptococcus pneumoniae
atgcgtcataaattaaatttaaaagattggcttattcgtttagggttaatctggttcttagtaacatttattatttatccaaactttgatctagtagtgaatgtatttgtaaaaggaggagaattttcccttgatgctgtacatcgtgttctaaaatctcagagggcacttcagagtattatgaacagttttaagttagcattttcactcattattacagttaatgtcgtaggtattctttgtgttctatttacagagtactttgatattaaaggtgctaaaattttaaaattaggttatatgacctctttaatttatggaggagtggttttagcgactggatataaatttgtctatggtccatatggattgattacaaaatttttacaaaatgttatcccttctttagaccctaactggtttattgggtatggtgcagtcttattcattatgacattttcaggaactgctaatcatacattgtttttaacaaatacaattcgaagcgttgactatcacactattgaggctgctcgaaatatgggagcaaaaccatttactgttttccgaaaagtagtgttaccaaccttaattccaactctatttgcacttactattatggtttttcttagtggtttatctgcagtagcagcacccatgattgttggtggtaaagaatttcaaactataaatccaatgattattacatttgcagggatggggaattctcgtgatttagctgccttacttgcaattattttaggtattgcaactacaattttgcttactatcatgaataagatagaaaaaggaggaaattatatttctatctctaagactaaagcgcctcttaaaaaacaaaaaattgcgtctaagccttggaatatcattgctcacattgtagcatatggattgttcacagttttcatgcttccactaatttttatagtattatactcatttacagatccagttgcaattcaaacaggtaacttaacattatcaaactttactttagaaaattatcgcttattctttagtaatagtgcggcattctctccattcttggtcagctttatttattctattattgctgcgacaacagcaacaattctcgcagttgtatttgctcgtgttgtcagaaaacataaatctcgttttgatttcttatttgaatatggtgctctacttccttggttactaccaagtacacttttagcagtaagtttattatttacttttaatcagccacaatttcttgtcttgaatcagattttggtaggtagtttggtaattctacttattgcatatatagttgtaaaaatcccattttcttatagaatggtacgtgctattttatttagtgttgatgatgagatggaagatgcagcaagaagtatgggtgcttcacctttttatactatgatgaaggttatcattccatttattttaccggttgttctctctgttattgctttaaactttaactctttattaactgacttcgacttatctgtattcctttaccatcccctagctcaaccattaggtattacgattcgatctgcaggtgatgaaacagcaacatctaatgcacaagctctggtatttgtttatacaattgttctgatgattatttctggaacggtattatacttcacacaaagaccggggcgtaaagtaaggaaataa

SEQ ID NO: 368 - DNA, 711 bp, Streptococcus pneumoniae
atgacagccactagtcttgggttatcaaatattgaaatagttgtcaggattgttttatcagtagtcattggtagtataattggtttagagagagggagcaaatcccagcctgcaggcatccgaacttatagtattgtttgtctagctgcatgtttgattatgatgacgaatgaatacgtatcttataaatttgggacaggagatcctacacgattaggagctcaagttatatcaggtgtgggttttctaggcgctggaacgattcttattacagataaaaagaaaattacaggtctgacaactgcagcaggcatttgggcttcggcaggaattggattagctattggagtaggtttttatgagggagctcttttagtagccatttctgtttggggtgtgatatccatgttccaaccactaaaaaaatatctgcaaaatcgttctaaaatgattgaattgtatatagtagttaaatctacagaagcctataatcgtgtattggtttattgtgcagaaaatggtatcagaatgaccgattcaagaacagcgtttggagatgttaattctgacagaattgaatactttgatgttccggacaaaaaaatagcgtcatttattactctggaattatcaggtagatttgaacatcttcgactgatggaagaaattgctaatattgtaggtgttatttatgtcgaagaaattagctga

SEQ ID NO: 369 - DNA, 309 bp, Streptococcus pneumoniae
ttgatacaagtatacaaatttatttctttttatgatatttgtgaaatggtgtttgcctttcatttacctcctgatgagttgataacaaatgttatctttaaagaaaaaattaactctatgttaaaatgttacattgacaggctattatatgtttttataaatcctacacattttactgaaaaagttaatctacaattttatggtagttttttctcatatgaatttatttgtcgtgaagttggaaacattcttaaaaataaaggtgtgaaatgcaatttaaacttttttgaaggggaagaatatttgtaa

SEQ ID NO: 370 - DNA, 1002 bp, Streptococcus pneumoniae
atgaaaaatataaatgggaaaaaggtaactatttatgatattgcacgtttatcaggtttttctccaaaaacagtttcacgagttattaatggtggagtaaatgttaaagaagaaacttatcaagcgattcaaaaagttatagaggaattgtcgtatattccaaatgcgtatgcaaaaaatttaactaaaaaagaagctataaatatattgatttctgtaaaaaaaatcgactcttttcctttaatttggtttcatacgctgttagataaagtgttacggacgtgtaaagaatttggtgttaatgctatagttgagtactttggagaggaggatacaattagtaattcaattatatcaagcacaggtagcctagtagatggtgttattgttttttatgaaagtgtagatgatatcagaattcagtatttaaagaagaaccatatgccttttcttgttttcggtgaatctcaaacgtctggagtagtctatgtatctaataataattttcaagctacttatgatatgatgaaagctgtaactgaagaaaaatttaaaaatatgtggttgcttatgggaggagaatcccatgttaataaggatcgtgaaagaggtgtgcgttcttttctgaatgataaaaattactttatggatttaaaagtcatttatggcttatctacaattgattcagtttattcttatgcaatgcagcacttgactagccaaaattatccggacattatttttgtttcaggagatgaaaaggttcagggcttgattcgtgcgtgctatgagaaaggaattcttattccagatgatatttctatcattggatttgataatattcctatttctcagtattatactccagctttgtctacaattgctcccaattatgttaaattggctaaagaaatgatagagggtgttttagcgattattaaaggggaaagtgtcacatctgttgaagtttctcctaaatttgttaggagacagagtttctag

SEQ ID NO: 371 - DNA, 198 bp, Streptococcus pneumoniae
ggtggcaccgcgttaccaacgccctcacacggaagtatattctgtgtgtgggcttttttctatccgtcgtttgctttatcttttattagggccttaagtcgctttgatgaacttgagttctatctacagctcttgcctcctactaaaagtaaacaaaaaggctggactaatacgaaaaaagctagtaatactcaatga

SEQ ID NO: 372 - DNA, 207 bp, Streptococcus pneumoniae
atgaaaatcaaagagcaaactaggaaactagccgcaggctgctcaaaacactgttttgaggttgcagatagaactgacgaagtcagctcaaaacactgttttgaggttgcagatagaactgacgaagtcagtaaccatacctacgataaggcgacgttgacgcggtttgaagagattttcgaagagtataaaggtgtaccgagatga

SEQ ID NO: 373 - DNA, 1464 bp, Streptococcus pneumoniae
ttgaggtggcaccgcgaatttcgtcctcacgcaagttattttgcgtggggatttttcatacagtcgctacgaactagaattagaactgaaagggaaattacaatggaacgaatcattcatggagatgtcttatcaccaatcttggcttatatgcgcttaaaggggcaacacaaggttatcttagagagtattccgagagacaaggaaacagctcgtttttctatcctagcctataatcctgtttttgagattaagtttgaaaatggagttctttatcaaaatggtcaagtgattgatcgggatcccttggatttcctttatgaagtgattcataagagtcagcaccattcagagctaccttttggtggtggagccattggttttgtgggttacgatatgatttcgctttatgaagaaattggtcaaatccctgaggatacaattgggacgccagacatgcatttctttgtctatgagagctatatagtctttgaccacaagaaggagaagatacatgtcatagaggatgcactttatagtgagcgcagtcaagaggccttggaaaaatccttgaaccaagtgcttgaggaattacgcattcctgctccaaatgaatttgaagacttggatttatcaccacttgacttcaaaccgcatatcgctccacataagtttgagggaatggtagaaacagctcgtgacttgattcgtaacggcgatatgttccaatgtgtactcagccagcgtttctcagcagaagttactggaaatccatttgacttctacagaaatctccgcgtaactaatccttctaattacctttatttctatgattttggggattatcaaatcatcggagctagtccagaaagtttggtttctgtcaaaaatggcatcgtgacaaccaatccgattgcagggacgcgaccaagaggggctacggatgaagaagacaaggccttggcgactgacctcctctctgatgagaaggaaacagcagaacatcgaatgttggtagacttggggcgtaacgatattggccgcatctctgaaacggccagtgtccaagttactaagtatatggaggtggagctcttccgctacgtcatgcatttgaccagtgtggtcaagggacgtttgcttgcagaactcactgccatggatgccttgaaagcaacgcttcctgctggaaccgtttctggagcgccaaagattcgagcgatgagacgtatctatgaactggaaacggaaaaacggggagtatacgctggggcaatcggctacttgtctgcgacgggtgatatggatttggccatcgccatccgaaccatgattctcaaaaatcaaagagcctatgtgcaggctggggcagggattgtctacgactctatcgcccaaaacgaataccaagaaaccattaacaaagcaaaatctatgactagaattggagaactaagaccatga

SEQ ID NO: 374 - DNA, 201 bp, Streptococcus pneumoniae
atgcggccaatatcgttacgccccaagtctaccaacattcgatgttctgctgtttccttctcatcagagaggaggtcagtcgccaaggccttgtcttcttcatccgtagcccctcttggtcgcgtccctgcaatcggattggttgtcacgatgccatttttgacagaaaccaaactttctggactagctccgatgatttga

SEQ ID NO: 375 - DNA, 567 bp, Streptococcus pneumoniae
atgattttattgattgacaactatgattcttttacctataacttggcccaatacattgggaattttgcagaagttcaggttctgagaaatgatgattccaagctgtatgaagaagctgaaaaagcagatggtctggtcttttctcctggtcctggttggccagttgatgctggaaagatggaagacatgattcgtgattttgcaggcaagaagccgattctagggatttgtttgggtcaccaagccattgcagaagtctttggtggtaagctaggtttggctccaaaagtcatgcatgggaaacagagcaatattaactttgaagcgccatctgttttgtatcaaggtattgaggatggccgtgcggtcatgcgttatcacagtattttgattgaggaaatgccagaagactttgaagtgacagctcgttcgactgatgaccaagccatcatggggattcaacataaaaacctaccgatttatggcttccagtaccatccagagagcattggaacgccagacggcttgtcttctattcggaattttatcgagaaggttgtaaagtga

SEQ ID NO: 376 - DNA, 1005 bp, Streptococcus pneumoniae
atgaaagagattattgaaaaactagcaaaatttgaaaatttatcaggtgtggaaatgacggatgtcattgagcgtatcgtaactgggcgtgtaactgaagcgcagattgcttctctcctcttagctcttaagatgaagggggaaacacctgaagaacgcacagccattgcccaagtcatgagaggacatgcccagcatattccaactgagattcatgatgccatggacaactgtggtacaggtggggacaagtctttcagttttaatatttccacaactgcagcctttgtcttggctggtggcggtattcacatggccaagcatggtaatcgctcgatttcttctaaatctggttccgcagatgtcctcgaagccttgggaatcaatcttgacctcaaaccagctgaactaggtaaggtctttgataaaactggaatcgtctttctcttcgctaaaaatatgcacccagctatgaaatacatcatgccagctcgtttggaattgggaattccaacgattatgaacttgactggtccactgattcatccaatggctttagaaacacagcttcttggaattagtcgtccagaactcctagaaagtacagctcaggttttgaaaaatatgggtcgcaaacgtgccatcgtggttgctggaccagaagggttggatgaagctggcttgaacggaacaaccaagattgcacttcttgaaaatggcgaaatcagcttgtcaagctttactccagaggatttgggaatggaaggctatgctatggaagatattcgtggtgggaatgctcaggaaaatgcagaaattttgcttagcgttctgaaaaacgaagcaagtccattcttggaaacgacagtcttgaatgctggtcttggtttctatgctaatggtaagattgatagcatcaaggaaggagttgccttggcccgtcaagtgattgctagaggcaaggcccttgaaaaactcagactgttacaggagtaccaaaaatga

SEQ ID NO: 377 - DNA, 768 bp, Streptococcus pneumoniae
atgagtcaggaatttttagcacgaatcttagagcagaaggcgcgtgaggtggagcagatgaagctggagcaaatccagcctctgcgccagacctatcgcttggcagaatttttgaagaatcatcaggactgcttgcaggtaatcgctgaggtcaagaaagctagccctagtttgggagatatcaatctcgatgtggatattgtgcaacaggcccagacttatgaagaaaacggagcagtgatgatttcggtgttgacagatgaggttttctttaaagggcatttggattatctacgggaaatttccagtcaggtagagattccgacgctcaacaaagactttatcatagatgaaaagcaaatcatccgcgctcgcaatgcaggtgcgacagttatcttgcttattgtggcagccttgtccgaagaacgcctcaaggaactgtatgactacgcgacagagcttggtctggaagtcttagtggagactcacaatctagctgaactagaggtagcccacagacttggtgctgagattatcggggtcaacaaccgcaacttgactacctttgaggtcgacttgcagaccagtgtagatttagccccttactttgaggaaggtcgctattacatttctgaatctgccattttcacagggcaggatgcggaacgactagccccatactttaacggaattttggtagggacagctcttatgcaggcagaaaatgtggcccagagaatcaaggagttgcagattgacaaaggttaa

SEQ ID NO: 378 - DNA, 630 bp, Streptococcus pneumoniae
atgtggcccagagaatcaaggagttgcagattgacaaaggttaaaatttgtggactatcgaccaaagaagcggtggaaacagccgtttcagcaggagccgactatatcggttttgtctttgcacctagtaaaagacaggtgactttagaagaggcagctgagttggcaaagcttattcctgcagatgtgaaaaaggttggagtatttgtttcaccaagtcgggtagaactgctggaagcgattgacaaagttgacttggacttggttcaagttcacggtcaggtggcagatgatttatttgagaatttgccttgtgccagtattcaggctgtgcaggtagatggaaatgggcatgtccccaattctcaggcagattatctactctttgatgcccctgtggcaggaagtggccagtcctttgattggggtcaactggatacgactggactagcacagcccttctttatcgcaggtggccttaatgaagataatgtagtaaaagcaattcaacattttactccctatgcagtagatgtatcgagcggagtggagacagatggacaaaaagatcatgaaaagattagaagatttatagagagggtaaagcatggcatatcaggaaccaaataa

SEQ ID NO: 379 - DNA, 1224 bp, Streptococcus pneumoniae
atggcatatcaggaaccaaataaagatggattttacggaaaattcggcggacgttttgtcccagaaacattgatgacagcagttttggagttggagaaggcctaccgtgaaagtcaggcagacccaagtttccaagaggaattaaaccaacttttgcgccagtacgtgggacgtgaaactcccctttactacgcaaaaaacttgacccagcatatcggcggagccaagatttatctcaaacgggaagaccttaaccatacaggagcccacaagattaacaatgccttaggacaagtttggcttgccaaacgcatgggtaaaaagaaaattatcgcagaaacgggtgctggtcagcacggtgtggcaactgcaactgctgcggccctctttaacatggaatgtaccatctacatgggtgaggaagatgtcaaacgccaagccctcaatgtcttccgtatggagcttttgggagctaaggtcgaggccgtgacagatggttcgcgcgtgctcaaggatgcggtcaatgcagcccttcgttcatgggtggctaatatcgatgatacccactatatccttggttctgccttggggcctcatccatttccagaaattgttcgtgacttccaaagtgtcattggtcgagaggctaaacaacagtaccgtgacttgacaggacaaaatctgccagatgccctagtagcctgtgttggtggtgggtcgaatgccatcggtctcttccatccctttgtagaagatgagtcagtagccatgtatggagctgaagcggctggacttggtgtggatacggagcaccacgcagctaccttgaccaagggtcgtccaggtgtccttcacggttccctcatggatgtgctccaagatgcccatggtcaaattcttgaagccttctctatctcagcaggtttggactatcctggtatcggtccagagcattctcactaccacgatatcaaacgtgccagctatgtccctgtgacagacgaagaagctttggaaggatttcaactcttgtctcgtgtggaagggattatcccagccttggaatctagccatgctatcgcctttgcggtgaaattggccaaagaacttggaccagaaaagtctatgattgtctgcctatcaggtcgtggggacaaggatgtggttcaagtcaaagaccgcttggaagcagatgcagcaaagaagggagaagctcatgcctaa

SEQ ID NO: 380 - DNA, 834 bp, Streptococcus pneumoniae
atgtggttcaagtcaaagaccgcttggaagcagatgcagcaaagaagggagaagctcatgcctaagacactaacagaaaaattgaatgctataaaagcaactggaaaaggaatttttgttccctatatcatggctggtgaccacgagaaaggtttggacggtcttgctgaaacaattcactttttagaagatttgggtgtctctgcaattgaagtgggtattcccttttcagaccctgttgcagatggacctgttatcgaagaagctggcttgcgcagtttagcccacgggacctctacccaggctttagttgaaaccttgaaaaccattgaaacagagattccactggtcatcatgacctacttcaatcccctctttcagtacggtgtggagaactttgtcaaagatctggctgatacagctgtgaagggcttgattatcccagacttgcctcatgaacatgccaactttgtagaaccatttttggcagatacagatatcgccttgattcctttagtaagcttgaccacaggaattgagcgccagaaagagttgattgaaggggcggagggattcatctatgccgttgccatcaatggagtgacagggaaatcaggcaattaccgtgcagatttggacaagcacttggcgcaacttcatcaagtggccgacatcccagtcttgacaggttttggtgtatctagtcaagccgatctggaacgcttcaatgcggtgtcagatggtgttatcgtcggttcaaaaatagtaaaagctctccaccaaggagagccgattcaggattttatcagacaagcagtagcttaccaaaaataa

SEQ ID NO: 381 - DNA, 204 bp, Streptococcus pneumoniae
aatcaattaaaaactgaacaaatttattgggaaattcaaatcactttcttaaaatattttaggaaccgtagtgtaatattccagattcaattcactataaaactagcctttctcctgcaaaagaaaaaggaaagacttcctttcgtgcctttcctcttacttgctacttgtttgattatttttggtaagctactgcttgtctga

SEQ ID NO: 382 - DNA, 732 bp, Streptococcus pneumoniae
atgttgaatcaggatctctttgattcgcttgaggcacaaaaaattgtagatactttgatgaaagggcaaaaagattatgtagatgaacgtctagaaaaaagagagacaatgatagtgtcgaatggttatgcatggacgcgacctaatcatattgatactgcatttgcatcagcagatttgtttgagtataaattacaattagcaggacagacttggggatatttagaatttgaaacaaatacagaaaaatatgggaaagtattgttaattataaagggtaagaagcgacttacgaaccaatttcctttggtacaaaaaaataagagtggctacttatttgaatatgctcagatgaatacactttatcttaatcaacattcttcctacaaaaatgatgaagatagtcattcctttccaattcagatggagttagtttctgatgaaatgattcaagaaattgaacaagctactaaaaattcgaatatcgaaaaatttatgattttaacttatgaggcggactcagaaaacaatattatatctgtagatgttgttatgcctgatgcacgaactggtcagttacacttgattcaagatttgtctgagtatattcaatcaagttcgtaccatttcgaagaagctaaatatcaagatattcctaatttttcagaattatcggaaacagaagattttgaaattattccaagaatagaaaaacaagaaggtcaaaagtag

SEQ ID NO: 383 - DNA, 1152 bp, Streptococcus pneumoniae
atgtttaatggtcgggtattgaaagaattacggctgttaaatggtttaagtagagcagaattagctcagagaattaatttaacggaacaagccatttggcagtttgagtccaacgaaacgaaacctaaattatcaaccaaaatgcatttggccaaccaatttcatgttgatttaacttattttgaacaggaagaagagagcattcgatttgattcttctgtaattgcctttagaaatgcagacctagcaacacggaaaacaatagatattcaaactatgtatttacataaggtagatagtttgattgattattttgaaagttttgtaattatacctaatattataattcatgacctaagtaatgtagtgagtgaatcttatcataagggagaatccattgaggaattggctctttatgccagggaaaaattaggtatttcaaaagataatcatgatttgctttataaattagaacgttcaggcatctatatcgtggaacgattaattaatggccaagctgatgcttatagcgcatggtcaaaattgggaagaccttatattgtgttgggaacgaataaatcatctgtacgtcgaaattttgacttagctcatgagctaggacatattcttttacataaatataaagatatgaatgaagatggcgatcgtttggagcaagaagcaaattattttgcatcatgttttttattgccaaaagaagagtttttagtcaaatttgaagagagggttggcaagcgtgtcagcaatcctgatagttatattttattgaagtcggatttgaatgtttcgatacaggctttagagtatcgagcttttaagttaggattattgactccaaagcaacattcttacttttatcgtcaaattgcgcaaaaaggttacaaaatgattgaacctttggatgatcaaatttttgttaaaaaaccaagcaaagtaaagagtattctggacgtcgttttgagtaatcatctagtcagtctagcgactataatgtctaaacaaagtattcgtttacagtttataagcgaaatattttcagtcgaaatgaaattttttgatcagtatcaagaagatagaagaacagatcgatttgataacatcatccctttgtacaaaagaaataatttataa

SEQ ID NO: 384 - DNA, 660 bp, Streptococcus pneumoniae
atgattgatttttatttttttctcgtcgggagcattctcgcttcctttcttggtttggtcattgaccgttttccagagcaatccattatcagttcagccagtcactgcgattcctgtcagactcgcttgcgtcccttagatttgattccgattctctcacaggtcttcaatcgctttcgctgtcgctactgcaaagttcgctatcctgtctggtatgccctctttgaattagtcttaggactcctctttctgctttactcttgggaattgctttccttggggcaagtcgtcctaatcaccgctggtttgaccttgggtatctacgactttcaccatcaggaatatcccttactggtctggatgactttccacctaatcctaatagcttcctctggctggaatctggtcatggtctccttccttgctcttggaattttggctcattttatcgatatccgcatgggcgcaggagatttcctctttttagcttcttgtgctctagtctttagcgtaacggagttactgatcttgattcagttcgcttctgcgacgggtattctggcctttctcctgcaaaagaaaaaggaaagacttcctttcgtgcctttcctcttacttgctacttgtttgattatttttggtaagctactgcttgtttga

SEQ ID NO: 385 - DNA, 447 bp, Streptococcus pneumoniae
atgacaattcgttttgaagaaaaggtgagtatagaaaacgctcaatttgtatgccagtggtccaactccctaggcaaatcctttcaagaacaatggatgggaccaaggattccttttctactgacccttcaagccttggaaggagtcttttcaatctttgatgaacaagagtttgtgggacttatccagaaaatcaggctagaagacagcaatcttcatatcgggagattttttatcaacccccagaaacaggagcaagacttaggtagccaggctttaaggaaatttgttagtttggcctttgaaaatgaagatatagatagtatttctctaaatgttttcgaggcaaatcaaagagctcagaatctttaccaaaaagaaggatttgaaatcgttcaaatggttgaagcacctgtacgaaaatatagtagattgaaactagaatag

SEQ ID NO: 386 - DNA, 312 bp, Streptococcus pneumoniae
aaagcaaacagccttgaaatcaatgttgactgcgattatgaacctgaatcagcccctcaaaagggactgtatatgaatgaacgttaccagtgtttaaaaactaaagaatatcaggcacttttatcttccaagggtagacaaattttcgctaaacgtaagattgatatgaaatctgtctttgggcagataaaggtttgtttgggttataagagatgtcatctgagaggtaagcgtcaagtgagaattgacatgggattcgtactcatggccaacaacctgctgaaatataataagagaaagaggcaaaattaa

SEQ ID NO: 387 - DNA, 204 bp, Streptococcus pneumoniae
atgtcagtagaagaaaaattaaatcaagctaaaggttctattaaagaaggtgttgggaaagccatcggtgatgaaaaaatggaaaaagaaggagcagctgaaaaagttgtttctaaagtaaaagaagttgccgaagacgctaaagacgctgtagaaggtgctgtagaaggtgttaaaaacatgttgagtggcgacgataaataa

SEQ ID NO: 388 - DNA, 609 bp, Streptococcus pneumoniae
atgtcaaacgaaaaaaacacaaacactaacgtagaaaagaaagatgctactgttgtagctcacgaaatcaaaggggaacttacttacgaagataaagttatccaaaaaatcattggtctttcactagaaaacgtttcaggtcttttgggaatcgatggtggtttcttctcaaatcttaaagaaaaaatcgttaacagcgatgacgtaacaagtggtgttaacgtagaagttggtaaaacacaagttgcagttgacttaaacgttattgttgagtaccaaaaaaatgttccagctttatattcagaaatcagagaaatcgtatcttcagaagttgctaaaatgactgacttggaaattgttgaaatcaacgtaaacgttgtcgacatcaaaactaaagaacagcatgaagcagactcagtaagccttcaagatcgcgtatctgacgttgctgaatcaacaggagaattcacttcagaacaattcgaaaaagctaaatctggtcttggatctggtttctcaactgttcaagaaaaagttagcgaaggtgtagaagctgttaaaggtgcagcaaatggtgtagtatctcacgaaaacactcgtgtaaactaa

SEQ ID NO: 389 - DNA, 573 bp, Streptococcus pneumoniae
ttgtatatgtcaaaagcaaagaaaatatgtttcattattttctgtattttaatcttgacaattttccttcctgttttgatagattatcatcaagttagtgatctaggtattcatctacttagctggagacagaactccgtagttgaattctatcttgctagatatgtcttttgggggacagtggttctatcaactttagttttattatccattttagttgtgatgttttatcctaaacgttacttggaaatccaacttgaaactaaaaacgatacattaaaattaaagaattcggcaatcgaaggttttgttagaagtttggtgagtgatcatagattgatcaagaacccaactgttcatgtaaatttacgaaaaaataaatgtttcgttcatgtagaaggtaaaattcttccttcagacaacatcgctgacagatgccaaataattcaaaatgaaataactaatggattgaagcagttttttggtattgagcgtcaagtaaaacttgaagttgcagtaaaaaattaccaaccaaaacctcaaaacaaaaagactgttagtcgtgtgaagtaa

SEQ ID NO: 390 - DNA, 1539 bp, Streptococcus pneumoniae
ttgtggtataattgcaagaggtttaatccgataatttataaagagagaaagatattcatgagagatttattatctaaaaaaagtcataggcaattagaattattagaattattatttgaacataaacgttggtttcatcgttctgaactagcagagttattaaattgtacagaacgtgcagtcaaagatgatctatcccatgttaaatctgcttttcctgacttgatttttcattcttctactaatggtatacgcattattaataccgatgatagtgatattgaaatggtttaccatcatttctttaaacattcaactcatttttcgattttagaattcatcttctttaatgaaggttgtcaagctgagagtatttgtaaagaattttatatcagttcatcttcgctctatcgtattattagccaaatcaataaagtgattaaaaggcaatttcaatttgaagtcagtctgacccctgttcaaatcattggaaatgagagagacattcgttacttttttgcacaatatttttcagaaaaatattatttcctagaatggccatttgaaaatttttcatcagagccactatctcaattgttagaattggtttataaggaaacaagctttccaatgaatttgtcaacgcatagaatgctaaagttgctcctagttacgaacctatatagaataaagtttggtcattttatggaagtagataaagattcttttaacgaccaaagtttggattttttaatgcaggcagaaggaatagaaggtgttgctcagagttttgaatcagaatacaatatctctttagatgaagaagttgtttgccaattatttgtgtcttactttcaaaaaatgtttttcatagatgaaagtctctttatgaaatgcgtaaaaaaggatagttatgttgaaaaatcttaccatctattgagtgattttattgatcagatttcagtcaagtatcagattgaaatggagaataaggataatctgatttggcatctgcataataccgcacatctgtatcgtcaagagttgtttactgagtttattttatttgatcaaaaagggaatacaatcaggaactttcaaaatatttttccaaaatttgtttcagatataaaaaaagagatttctcactatttagagactcttgaggtttgttctagttcaatgatggtaaatcatctatcttataccttcatcactcataccaaacatttggtgattaatttgctacaaaatcagcctaaactaaaggttttggttatgagtaattttgatcagtatcatgcaaaattcgttgcagagacactttcttattactgtagcaataattttgaactggaagtttggaccgaattagaattatcaaaggaatctttagaagattcaccttatgatatcattatttccaattttattattcctcctattgaaaataagagactcatctattcaaataatataaacacggtctcactcatatatttgttaaatgccatgatgtttattcgattagatgagtaa

SEQ ID NO: 391 - DNA, 1002 bp, Streptococcus pneumoniae
atggtagaacaaagaaaatcaattaccatgaaagatgttgctttagaagcaggagttagtgttggaactgtttcacgtgtaattaataaagaaaaaggcattaaagaagtaactttgaaaaaagtggaacaagcgattaaaactttgaattacattccagattactacgctagaggaatgaaaaaaaatcgaacagaaacgattgcaatcattgtaccaagtatctggcatcccttcttttcagaatttgctatgcatgtggaaaatgaagtctataagagaaataacaaattactcttatgttctatcaatggtacaaatagagagcaagactatctggagatgttgcgtcataataaagttgatggagtggttgccattacctatagtccaattgaacattacttgacgtcaggaattccctttgttagtattgaccgcacatactcagatattgccattccttgtgtttcatcagataatgatgcaggtggaagagaagcagctaaacaattaattagtaaaggatgtcagcatttagcctttgtgggcggacataatacaaccattaatgaaaccaaacgtcgtagaatttcatttgaaaagtatgtccaagagcataaaatacctcttagtatttttgatttggatgagacagttactgactattatggaaagctagagagtttcttggaagaaaattcttctatagatggaatttttacaatcaacgattttacagctttggatgtgattgaaatactagaaaaaaatggtaaacgtattcctcatgatgtccaaattattggatacgatggaattaaaatggctggagatagagattatctactttcaactattgaacaaccattggaagaaatggcaaaagaagcggttcgtattttgtttgatataattgatggaaagactgttaatttgcagacaatcctaccagtaaaatttgttgaaggaaaaacaacaaaaaatgaaaataagtcttga

SEQ ID NO: 392 - DNA, 945 bp, Streptococcus pneumoniae
atgaaacgtttcaaaaaggaggttgctatgaatagcaaagcgaagcaagtttctctttgggaaagaatcaagaaacaaaaactcttgttattgatgactgtccccggtttagttttaacctttatctttaaatacatccctatgtatggggttttaatcgcatttaaagattacaatcctttaaaaggaattttagggagtgattggattggtttttctgagtttacaaaattcatatcctctcccaactttggtatcttgttagccaacacattaaaattaagtatctatggtttattgcttggctttttaccaccaatcattcttgctattatgctcaatcaactcttgagtgaaaaagtcaaaaaacgaattcagctcattttatacgcaccaaactttatctcagtcgttgttattgtcggtatgattttcctcttcttttcagtgggaggaccaatcaacaattttctttctatgtttggaatgaaggctgacttcttgacaaatccagacttctttagacccttatacatctttagtggtatctggcaaggaatgggctgggcttcaacgctctacacggcaacattggtaaatgtagatccagccttagtagaagcagcccgactggatggagccaatatcttccaacgaatctggcacattgatattccagctcttaagcctattatggttatccaatttgttttagctgcaggtggaattatgaatgtcggatatgaaaaagcattcttgatgcagacatcgttaaatttgccaacttctgaaattatctcgacatatgtctataaagttggtcttgtatcaggagactattcttactcaacagcggttggtttgtttaatgcagtgattaacgtagtattgcttgttgcagttaaccaaatcgttaaacgcatgaataatggtgaaggaatttaa

SEQ ID NO: 393 - DNA, 918 bp, Streptococcus pneumoniae
atggtgaaggaatttaaggagggaagtatgaaaaattcgattatggatacaaaatttgatagacgtatcttactcttaaataaaatcattattgtctttatcgttttgatgactttgcttcctttactttatatcgtcgtagcatcctttatggatcctaaggttctggttagtagagggattagctttaatccagccgattggactgtagaaggttatcagcgtgtattcagtgaccaatctattctaagaggttttatcaattctctactatactcttttggatttgcagctttaacagtcttgctatctgtgtttacagcttatcctctttctaagaaagacttggttggacgtcgttggattaactacttcttgattgtaactatgttctttggtggtggtttagtcccaacttacttgctcgtaaaagaattgggaatgctcaatactccatgggcaatcattgttccaggtgctgtcaatgtttggaatattattcttgctagggcctatttccaaggattgcctgaagaattagttgaagctgctgtcattgatggtgcaaatgatttacagattttcttcaaaatcatgcttcctcttgcaaaaccaattatgtttgttctcttcctctatgcttttgtaggacagtggaactcatactttgatgcaatgatttatatcaaggatccaaacttggaaccattgcaacttgtacttcgtaaaattctcattcagagccaaccaggtcaagacatgattggagcacaagcggctatgaatgaaatgaaacgtttagctgaattgattaaatacgcaactattgtcatttccagcttgccattgattgttatgtatccattcttccaaaaatactttgataaaggaattatggctggttcacttaaaggataa

SEQ ID NO: 394 - DNA, 1617 bp, Streptococcus pneumoniae
atgaaattcaaaacattctcaaaatcagcagttttgttgacagctagtttagcagtacttgcagcctgtggctcaaaaaatacagcttcaagtccagattataagttggaaggtgtaacattcccgcttcaagaaaagaaaacattgaagtttatgacagccagttcaccgttatctcctaaagacccaaatgaaaagttaattttacaacgtttggagaaggaaactggcgttcatattgactggaccaactaccaatccgactttgcagaaaaacgtaacttggatatttctagtggtgatttaccagatgctatccacaacgacggagcttcagatgtggacttgatgaactgggctaaaaaaggtgttattattccagttgaagatttgattgataaatacatgccaaatcttaagaaaattttggatgagaaaccagagtacaaggccttgatgacagcacctgatgggcacatttactcattcccatggattgaagagcttggagatggtaaagagtctattcacagcgtcaacgatatggcttggattaacaaagattggcttaagaaacttggtcttgaaatgccaaaaactactgatgatttgattaaagtcctagaagctttcaaaaacggggatccaaatggaaatggagaggctgatgaaattccatttacatttattagtggtaacggaaacgaagattttaaattcctatttgctgcatttggtataggggataacgatgatcatttagtagtaggaaatgatggcaaagttgacttcacagcagataacgataactataaagaaggtgtcaaatttatccgtcaattgcaagaaaaaggcttgattgataaagaagctttcgaacatgattggaatagttacattgctaaaggtcatgatcagaaatttggtgtttactttacatgggataagaataatgttactggaagtaacgaaagttatgatgttttaccagtacttgctggaccaagtggtcaaaaacacgtagctcgtacaaacggtatgggatttgcacgtgacaagatggttattaccagtgtaaacaaaaacctagaattgacagctaaatggattgatgcacaatacgctccactccaatctgtgcaaaataactggggaacttatggagatgacaaacaacaaaacatctttgaattggatcaagcgtcaaatagtctaaaacacttaccactaaacggaactgcaccagcagaacttcgtcaaaagactgaagtaggaggaccactagctattctagattcatactatggtaaagtgacaaccatgccagatgatgccaaatggcgtttggatcttatcaaagaatattatgttccttacatgagcaatgacaataactatccaagagtctttatgacacaggaagatttggacaagattgcccatatcgaggcagatatgaatgactatatctaccgtaaacgtgctgaatggattgtaaatggcaatattgatactgagtgggatgattacaagaaagaacttgaaaaatacggactttctgattacctcgctattaaacaaaaatactacgaccaataccaagcaaacaaaaactag

SEQ ID NO: 395 - DNA, 423 bp, Streptococcus pneumoniae
atgttcttcaggcttatattgagtattaacgagatgtttattttctgctataaaacgattggctttttctactgtgtatttcttatctcccataatcaacctctagtttttgtttgcttggtattggtcgtagtatttttgtttaatagcgaggtaatcagaaagtccgtatttttcaagttctttcttgtaatcatcccactcagtatcaatattgccatttacaatccattcagcacgtttacggtagatatagtcattcatatctgcctcgatatgggcaatcttgtccaaatcttcctgtgtcataaagactcttggatagttattgtcattgctcatgtaaggaacataatattctttgataagatccaaacgccatttggcatcatctggcatggttgtcactttaccatagtatga

SEQ ID NO: 396 - DNA, 1320 bp, Streptococcus pneumoniae
atgggagataagaaatacacagtagaaaaagccaatcgttttatagcagaaaataaacatctcgttaatactcaatataagcctgaagaacatttttcagctgagattggttggatcaatgatccaaatggatttgtctattttcgtggagaataccatctcttttatcaattctatccatatgatagtgtttggggacctatgcactggggacatgctaaaagtaaggacttggtgacttgggagcacttgccagtggcacttgctcctgaccaagattatgaccgaaatggttgtttctcaggctctgccattgtcaaggatgatcgcctctggctcatgtacactgggcatatcgaagaaaaaaccggtgtccgccaagtgcaaaatatggcattttcagatgacgggattcactttgaaaagatttcccaaaatccagttgtaactggaacagacttgccagatgagttgattgctgctgatttccgtgatccaaaactctttgaaaaagatggacgctattactccgtagtagctgtcaaacacatggataatgtgggctgtatcgttctactagggtccgataacctagtagaatggcagttcgaatccatctttttaaaagggggagaacaccaaggctttatgtgggaatgcccagattacttcgagttagatgggaaagattgccttattatgtcacccatgcgttatcagcgtgagggagactcatatcataacatcaactcatcgcttttgttcacgggtaaggtagattggagagaaaaacgttttatcccagaatcagttcaagaaattgatcatggccaagacttctatgcgcctcaaacattgttggacgatcaaaatcgtcgtatcctgattgcttggatgcagacatgggggcgtacccttccaacccatgaccaagaacacaaatgggcatgtgccatgactttacctagaattctaagattggaagatggcaaactaagacaattccctgttaaaaaaggccaatatcaaatccaaatagataaagattgtcattaccacttaggaaatgatatagattatcttgaatttggttatgacagtaatgcgcagcaagtttacattgatcgtagccatcttattcaaaaaattctaggtgaagaagaacaggacactagtcgacggtatgtagatattgaagctaaagaattggaagttgttctagataaaaattccatcgagatttttgtcaatcaaggtgaagcaagcttgactgcaacttattacttaacggtgccagctgagctatcacgaattgattaa

SEQ ID NO: 397 - DNA, 1272 bp, Streptococcus pneumoniae
atgccagacaatctcgcgcttcgcatgcgccctaaaaccatcgaccaggtcatcggtcaggagcatctggtcggacctggaaaaatcatccgccgcatggtggaagccaaccgcctgtcctccatgattctatatggccctcctggaatcggcaaaaccagtattgcctctgccatcgctggaacgaccaagtatgcctttcgaactttcaatgcaacagttgatagtaaaaagcgactgcaagaaatctcggaagaagctaaattttctggtggtctcgtcctattgctagacgaaattcatcgactagataagaccaagcaagacttcctcttgcctctcttggaaagtggactggtcatcatgattggagcaacgactgaaaatcctttcttctctgtcactcctgccattcgtagccgagttcaaattttcgagttggaacctctgtctaaccaagacgtcaaagaggccctgcagatagctctaagtaaccctgaacgtggttttgattttccaatagaactagatgaggatgcgctggatttcatcgcaacctctacaaacggagaccttcgctctgcctttaactcactggacttggctgttctctctacccctgagaatgacgagggcattcgccacatcaccttagacatcatggaaaatagtcttcagagaagctacatcactatggacaaggatggagacggtcactatgatgttctatctgccctgcaaaagtctattcgtggctcagatgtggatgccagtctccactatactgcccgcttgattgaggctggggatctgcctagtctcgctcgtcgcttgactgttatcgcctatgaagatatcggcttagccaatcctgaggcccagattcataccgtgactgctctggatgctgcccagaagattgggttcccagaagcccgcattctcattgccaatgtcgtgattgatttggccctttctccaaaatccaactcagcctatgtagctatggataaggcacttgctgacctcaaaacatcagggcacttgcctattccgcgacacctgcgtgatgggcactacagtggaagcaaggaactggggaatgcccaagactatctctatccacacaactatcctggaaattgggtcaagcaagactatctgccagaaaaaattcgtaatcatcactatttccaagcagaagatactggtaaatatgaacgggctttggctcaaagaaaggaagctatcgaccatttgcgaaaaatctga

SEQ ID NO: 398 - DNA, 222 bp, Streptococcus pneumoniae
atggaaatgatggaactaccaagtcaggaaattttgatttttacaaaacaaattcgtcattggattcttagtgatcaagttatttcagggaaaagaaaacttttcttccgggaagatactccaaaagagattttagatttgtacgaaaacattaaatctaaacttgattttgcttaccaagaagtttattctaataatgggttgaaaaaatatgaaaaatag

SEQ ID NO: 399 - DNA, 180 bp, Streptococcus pneumoniae
ttgaatttgattttcgaagagtatcagtttgtaaaaattggagataaaaaatatagagtacgcagtgttcctatgattcattcaactccgcctcaatctgtcttagatcgagatacttttacaattgactatacagatgatgaattgctcgataaagaagcagtttttactactcattag

SEQ ID NO: 400 - DNA, 252 bp, Streptococcus pneumoniae
aataataagtatcactcctttacaatacgtgtaacacgtgttataatggtgttgtcaggaggtaaaagcgctatgcctatgacacaaaaagagatggttaaactccttacggcccatggttggataaagactagaggcggtaaaggctcccatattaaaatggaaaagcaaggggaaagacctatcacaatccttcatggtaagctgaataagtacactgaaagagggataagaaagcaagctgggttgtaa

SEQ ID NO: 401 - DNA, 453 bp, Streptococcus pneumoniae
atgttagttacgtatccagctttattttattatgacgacacagacggaacagaagcgacttattttgtccatttcccagattttgaatactcagctacacaaggagaggggatttctgaggctttggctatggggtcggagtggctagggataactgttgcagatttgatagagagtgatggagagttccctcagccatcagatatcaatagcttgtctttaattgataatgatccttttaaagatgatgaagatttcgtgtcaacctatgaccttgataaatcttttatttctatggtatctgttgatgtatcagaatacctaggaagtcaggaacccattaaaaagactttgaccataccaaaatgggcagataagttgggacgagaaatgggacttaacttttctcagactttgacagacgctattgcagataagaaagttcaagcctaa

SEQ ID NO: 402 - DNA, 471 bp, Streptococcus pneumoniae
atggcaacatacggatttttagatattttagaggaagagttggacaagaactttccctttgactttgagattagttgggacaagcgtaaccacgcggtagaagtgagttttctattggaagcgcaaaatgctgcaggtgtggagatggtggatgaagacggagaggttttatcagatgacattctttttgaggaagcggtccttttctacaatcctgccaagtcaacagtcaatgaggaagactatttgactgttattccttacctgcctaaaaaaggattttcccgtgaatttttagcttattttgcgcttttccttaaagatactgctgaggttgggctagatgtcctcatggactttttggaagacccagaagcagaggaatttgtcatggaatggaaccaagaagtctttgaagaaggaaaagttggcttggaagagggagaattttacccttatccgagatactag

SEQ ID NO: 403 - DNA, 1089 bp, Streptococcus pneumoniae
atgaagaaaattgggacttatttggtttatgtgctagctgttgtctttattatgctagcttttgcttgtggaacaatcgcatttgcagagttggggtattccgcagttttagcctttacttttggttatgccttcgctcttctaagcatgtatttaatctttattcttcatgagctgggtcatgctttttgtggctacttgacaggctatcggctggtggcttttggattaggacattttattttgaccaaaaagtcaggcaggtttcatcttagtagaacagccattctgaaaaatgttggtgctcaatacattggtttaaaagaggatgaaagcgatcaaagaatcatcctgatgctttcaggaggcttgatggttcatctcggcttgatattattggcgatagtgtttggatttttgacaagaagctggtattttgcagggacttggatttttcttaatttatctttcttcctaaataacattttgtcagtcgacatcaccgatggagcaaaaatttgggaattactacaacaccctgaaaataccaaatacgcctacctggtattgagacattctgctcaaactttgctggctcctcaagaatatgatttgaaagactttgttcaagcagttcctgaggatgcacgagggagttttgcggatggtgtattaggtatgcaaggtgaagtttccattttggaagggaaggaagaagtagctaaacagcagtttcaagcattacttgagaggacaactactccgatgatgcagacagttgcccaactatccctgcttcatatcgccttgttggaaggagattttgagcaagcggagcaatatgctagtattcgacaggtcaaatcgtttctgtctctcaaactgtccaatcttcaagtgatacaagcctggtatcaatttaaggtaaggaaagatgtggttcaaactcacaaggctatgaagattgctagacagaaaatggatagtagtcgaatgttgagggacgagaaacgctattatgaaaacttgttagcagagctggaaaaggaaatgttagaaggaactgaagatggaactagaaatttctga

SEQ ID NO: 404 - DNA, 1035 bp, Streptococcus pneumoniae
atgaaaaaatcagatgttcttgatttaataaagtatcattatgagggcagagagacagaatttagaaatcaatccatagcaattgctcggaacttcaataaacatggtgatacacaaatagcacaatatattatggggttaatgtctcaaagtgatagattcatgccacaaatagaaaatcctagtgagtatttgactcctgctaaactagatattggtcctctcccattgcctctttcaattatgaatgatttaaaaggaataataaacgctgtcaatcatcatattggaataaataaatttttatttgtgggatctacaggtactggaaaaactgaaagtgtaaagcaggtggctagacttattggcaaggaattacttgtagtagatttcagtcacttagtagatagtaagctagggcaaacagtcaaaaacttagcaactctttttaatgaaatcaataatcttcctttcaagcaaaattatatcatcctatttgatgaaattgattccatagtgttggatagggttaatcagaatgatttaagagaaatgggacgagtgacttctgcctttttaaaggagttggataggctgtcaccagaaattgtattaattgcaacaacaaatctttttgaaaatcttgataaagcagttacgagaagattcgatgccataattgactttgaccgttatactgatgaagataaagtagaagtagctactattattttaaatgagttattaaagcaatttaagaatgtagctagagatttaaaattatttaaaaaaattatcaatagtgccaatgtaataccgaatcctggtgatttgagaaactcaataagaacgtcattggcatttagtgatccatcagatccgcatgattaccaaaaacgcctgctaagaagtttgcataatggtagaaatttatctatttctaaattatcgaagctaggttttactgttagagaaattgagattttgacaggtgtttctaagagtagtgtatcacgagagttaagcgaggattaa

SEQ ID NO: 405 - DNA, 2244 bp, Streptococcus pneumoniae
atgaatacattattgacattacgaggtaaaagctttacacaaaaatcaagaaataatggtatgggaccaataactatacccaaaaaaacaataattacattggaacatttgaagtatcttcatttttcattagaagagacgaaaacatattgggagaaaaataacattatcgatggtattttgatcagtatttactataatcgaattgttgccaaaagtaaccgtattaatggctatttcaatgtaggaggagggaatccattccctaatgatactattgtgggagcaaaattcaatgatgagaagacaaaacatattgttactcattatatttctagagatgctcttaataaaacaataaccgttttaagtaagataattgaagtttttgaggaacattttgatagagcgataacatgtgagatgttttctgattcatcaacgtttgcttctataaatttttcggagtatggtatttcaaaaagcaaatttcaacagtatttgagagattcttgctttattgagaattttggagttgagcacactactgtttctgatattcaaaattctatcgtgacattttatgatgtccatacagacatttttagattactgaataaattaaatattgatatttcagaagctaatatcatgaatcagaccacggtcttgcttgatgaaaaaaatattgaattactactatcaaaagcgccctatcttgtctccatgattgtggaagatttttctaagttatctgtagatgatttttctttagataataatgatttaaaaataaatcttccatctccaatgaacgaaccagttgttggcgttattgataccttatttgacaaaagagtttactttaatgagtgggtagaatatcatgattttgtctcacctgatattagcaaagatagccaagattacaagcatgggacagctgtgacttctttaatcgttgatggagccaatttgaaccctaatctggatgatggttgtggaaattttagagtgaggcattttggtgtgtcactacaaagtggatttaattcatttacaatcataaaacagataaaagagattgtttctcagaatgctgatattaaggtttggaatctttctttagggtccaatgatgaaataagagaaaattttatctctgcagagggagcattattagacgaaattcaatttgagaatgatgtaatttttatcatagctgggacaaatgcttcagtaataaatgggaaacgcaaaagaataggtgctcctgctgattcacttaattctataatagtaaattctgttgattttaataatcaatcagtgtcatattcacgagagggtattgttttatcattctttgttaaaccagatgtgtcatattatggaggaggaaatggtgactttataaatgtttgtgaacctctaggattaggtcgtgtagctggaacaagttttgcggcaccttttattgcaaggaaaatggcctatctcattcatattatgggacttagccgagaagaagcgaaggctttgctaattgatgcagcaataccctggaatgataagaaaacattcactgatttatctttgataggaaatggtattgttccaataaaaatggatgatattttatctacacctgatgatgaaattaaatttattgtgtcagatatctctagggcttatgatacctataattatgattttccagtacctatttctagtgagagttatccatatgtagctaaagcaacaatgtgttatttccctaactgctcaagaaaacaaggggttgattatacaaatactgagatgcagcttacttttggtaggttaaagtcagacggtatcaaatcgataaataaagacaaccagcatgccgaagattccccaggatatgtgagagaaaatgctgctagaaatatatttaggaaatgggataatgtcaagcatattggagagtcgtttacttctcgaaagagagctaaagcaattttaaatccatctaatcctcagtgggggatgagtattaaaacaatcgaacgtttgaaaagcggtgatggacaaggagtacgttttggtgtagtagttacattaaaagaattaaatggggttaatcgtattgaagattttattcagcaagctgaattacgcggttggctagttaatagattgcaagtagaagctcaagtagacctctttaatagtttaaatgaagaaattgaatttgaatag

SEQ ID NO: 406 - DNA, 1020 bp, Streptococcus pneumoniae
atgaatattacttatatagttggaaatggtttggatttgcaatatggtttgaaaacaagatatagggatttctacgaattccaaaataaggtttatataagtaggacagagaacgaggaaaaatattcaaatttcatttatgagtctctattttctgataaagtaaatgattatgaaaattggtcagattttgaattgtcaattggtaaattaacaaaagataacgacctcatctcctcaagtatagaaataaaggagaaatttatagatgattttagtgaagtagttgatgatttaagagaatatctacgcatacaacaagaaaaaaatcttgagaaaggtaatgcaattgactttataagcactctagataatatgaggacctctctccctgtaattaatcaacctgctatcgataaaaaatataatgaaaatctatatcaacacgatatcgtgaatatattaactcttaattacacaaatgtaatcgataaattatataatgagtcagcaaaatcatttagcaatcaattacgaactaataattataaatttcacattgcgcctccaattcatgcacatggaacggtagatatttgcacagttttaggagttagtgacgagacacagatttcaaatagttttgatgaagaacaaaaagaatccttaataaaaaatttagttttgaagaactatagagaaaatatggatgttaaaaatagcgatattataaaaaattctgacatcataattctttatggggtttctttgggagagactgatgggtatatctggaatcagattgctgaacaatcaatcagaagttctgttcctgtcataatttaccattatgtacctcattttgatgcaggaaaccccactagagtaaaacgcttatatagaaatgtagaagacaaattcatacaaaatagtggaattgatttagagttagagaagaaattaagagataaccttattgttgttattggaaagactatttttaatctgatggaaaggtaa

SEQ ID NO: 407 - DNA, 951 bp, Streptococcus pneumoniae
atggaaacatggcaagagttaaaagttacagtgaagcgtgagggagaggagttggtttccaatctcttgattgagctgggagcgcaaggtgttgcgattgaagacagtctggactatgtgggaaatgttgaccgcttcggcgagattttcccagaggtcgagcagcaagaagaaatcgtagtgacagcctactaccctgacacggtggatgtgacagtggttgaggcggacttgcaggctcgcatatcagaattgacggattttatggatttgggagagttaaaaataggtacgactgccttggctgaggaagactgggcagataactggaagaaatactatgagccagctcgtatcactcatgatttgaccatcgttccctcttggacagactatgaggcgactgcgggagaaaaaattatcaagctggatcctggcatggcttttggtactggaacccacccaactaccaagatgagcctttttgccttggaacaggttcttcgtggtggcgaaacggtgctagatgtggggactggttcaggggttctctctattgccagctcgcttctgggggctaaagaaattttcgcctatgacctggatgatgtggcggttcgtgtggctcaggaaaatattgagctcaaccctggcatggaaaatatccatgtagcggctggagatttgcttaagggtgtggaaattgaggcagatgtcatcgtggctaatatcttggcggatattctcattcatctgacggaggatgcttatcgcttggtaaaggatgaaggctacctgatcatgagtggcattatcaaggacaagtgggacatggtgcgccagtcggctgagtcagctggatttttcctcgaaactcacatggttcaaggggaatggaatacctgtgtctttaagaaaaccaaggatatctctggtgtgattggaggctag

SEQ ID NO: 408 - DNA, 744 bp, Streptococcus pneumoniae
atgcagcagtattttgtaaaaggcagtgctatctctcctgtcactatcgaggacaaggaaaccagtaagcatatgtttcaggttatgcgcttgaaagaagaggatgaggttaccttagtctttgatgatggcatcaagcgcttggcgcgcgtgctggatatggaaaatcgtcagtttgagttggtccaagaattaaatgacaatgtggaactaccagtccaagtgaccatcgcatctggatttcccaagggagacaagctggagttcatcgctcaaaaagtaaccgaactgggtgctagccaaatctgggcctttcctgcagactggtcagttgccaagtgggatggcaagaaattgggtaaaaaagttgaaaaactagaaaaaattgcccttggagcagccgagcaaagcaagcgtaatattgtaccaagtattaaacttttcgagaaaaaagcagattttctagctcagctggaccagtttgactctatcatagtagcctatgaagaatcagctaaagaaggagaagccgctgcgcttctgcaagcagtcactggtcttgaaacaggagccaaactgctctttatctttggtccagaaggtggtctgtcacctgcagaaatcgaaagttttgaagctaaaggagcagttttggcaggcctaggtcctcgtattttgcgagcagaaacagcaccgctttacgccttatcagcccttagtgttttagtagaattagagaaataa

SEQ ID NO: 409 - DNA, 1797 bp, Streptococcus pneumoniae
atggaacaaaaacaccgttcagaatttccagagaaggaactctgggatttaacagccctataccaagaccgtgaggatttcttgcgtgcaatcgagaaagctcgtgaagacatcaaccagtttagccgtgattacaagggcaatcttcacacttttgaggatttcgagaaggcctttgcggaattggaacagatctacattcagatgagccatattggcaactatgcttttatgcctcagacgacggactatagcaatgacgaatttgccaatattgcccaagctgggatggaatttgaaacagatgccagcgtagccttgaccttctttgacgatgccttggtggtagcagacgaggaagtcttggaccgtttgggtgaattgcctcacttgacggcagctattcgtcaggccaaaatcaaaaaagcccactatctaggggctgatgtggagaaggccttgaccaatctcggtgaagttttctatagtccgcaggacatttatactaagatgcgagctggggattttgaaatggctgactttgaagcccatggcaagacctataaaaacagctttgtcacctatgagaatttctaccaaaatcacgaggatgctgaggttcgtgagaaatccttccgttccttctcagagggacttcgtaagcaccaaaatacggctgcagcagcctatctggctcaggtcaagtctgaaaaactcttggctgatatgaagggatacgactctgtctttgactatcttctagctgaacaagaagtggaccgtgtcatgtttgaccgccagattgacctcatcatgaaggactttgcaccagtcgctcagagatacctcaagcatgttgccaaggtaaatggtcttgaaaagatgacctttgcagactggaaattggacttggacagcgccctcaatcctgaagtgactattgacgatgcctatgatttggtcatgaagtcggtagaacctttggggcaagaatattgtcaggaagttgctcgttatcaagaagagcgctgggtggactttgctgctaacagtggcaaggattccggtggttatgcggcggacccatatcgcgtacacccttatgtactcatgagctggacaggccgtttgagcgatgtctataccttgattcatgaaatcgggcattctggtcaattcatcttttcagacaatcaccaaagctatttcaacgcccacatgtcgacctattatgttgaagcaccgtcgaccttcaatgaattgctactcagtgattacttagagaaccaatctaatgacccacgtcaaaaacgcttcgctctggctcatcgcttgacagacacctacttccataactttatcacccacctcttggaagccgccttccagcgtaaggtgtatacattgattgaagaaggagaaaccttcggagcaagcaaactcaacagcattatgaaggaagttttgacagatttttggggcgatgccattgaaatcgacgacgatgcagctttgacttggatgcgccaagctcactactatatgggcttgtatagttacacttactctgctggtcttgtcatctcgacagctggttaccttcatcttaaaaactcagaaactggagctgaagactggctcaatctcctcaaatcaggtggtagcaagacaccacttgagtcagccatgattatcggtgctgatatttcaacagacaaaccactccgtgataccatccaattcttgtctgacacagttgaccagattatcgcctacagtgctgagttgggggagtaa

SEQ ID NO: 410 - DNA, 678 bp, Streptococcus pneumoniae
atggaaccagatattttcatcatcacaaaactcttatcagacccttctcggatgcacattttagatattctaatggatggaaaagctcacacggttaacgaaattgccagctttaccaaaatcaagcaacatactgtcagctatcacctcaaattacttaccgaagcgcaggtaaccactctacaaacctatggacgttttcattattattctttaaaaagtgctgccattgcagaaatgctggaatttctcagcttctactctcctcagcgtgatgtcaaaagttataaacaacacattcacaaaaaggaattaaaggtcgctcgcacctgctatgaccatattgctggtgagcttggcatttccattaccaattatctcttgcaagaaaatctcctcagcgaatcagaaaaagacttccaactcactgaagctgggaagtcttatttccaaagaaaattacacattgatacggatgaattgaaaaagaaaaaacggaaattttgccctaaatgtttggattggagcgaacgtaaaaatcatgtcggcggagctctcggcaatgctcttttagaatttttcagtgaaaaacaattggtcatccctgcacaaacgccacgttcacttaccattacagagaagggcaaagaattcctcgaaaaggaatgggggatttaa

SEQ ID NO: 411 - DNA, 651 bp, Streptococcus pneumoniae
ttgggtatcttgggaatcaacggtgctggcaaaacatccactttaaagatgatttactcactgacctcaatttcctcaggagagattgatatcttggggcaaaatattgaaaccaatcgtcgtaagagtaaatcttgtctgggtattgtagggcaggaggatatgctggacatgaccttgaatgtttatgataatctttttgctcacggtctatgttatggtatctcatctgtcgaacttaggaagagaatcgattctctcttggattttgttcaactgagcaaacatgcgcaaaagatggtgaatcagctgtcgagtgggatgcgacgacgtcttgtcttggcaagagctctcatcaatcgacctgatattatcattttagatgaaccgacagttggtttagacattcaatcccgcaatattatttgggataaacttttggagttgaaggaattaggtgtttccatcattattacttcccactatatgaatgagattgaatatttgacagatagggtgctgatgctccaccaagggactatcaaagaagaaggaactgtagaagacttgctcatcaagtatgatgctgacaaccttgagacgctttttttggggttgactgggacagagaaggaggacttgcatgtttaa

SEQ ID NO: 412 - DNA, 765 bp, Streptococcus pneumoniae
atgtttaagttatcatttcagtccatcggacacgttgtggtacgcaactacatgagttttagaaatttatttaaaatttcaattgtccccaaccttatcgaccccctcttttatcttttagcaatgggatttggagttggtgcctatttgacgcatgttaacggtatgctctaccgtgattttgtcattacaggtttaattgctgcgactgccatgtctgcggccaccgcagaaacaacggtcaatgcctttatccagtataagattgaaaagacttatgatgctatgttgatgacgccaatcaatacgagtgatattgtggtgggtcaggctatctgggcaggtattcgtgcagtgattttcggtgggattttttggctgatttccatgcttatcacagcgcattttcatgtcttgatgttattgattcctctgattttatttatagtgggttatttgtttggtgttttgggactaatctttacctacttggcgccgtctagggaatttctgaattactacaatgttttggtaatccgtcctctttatatgttttcagataccttctttcccattacttccttgcccccaatacttggtgatttgacttggttttctcccttgtatcatgctactcgcatgattcgtattatatggggaggtgaggtgacaggtttgtatcttcatcttatctggttgatagccttggcgctcttgataacggtgcttcctatgtatatgttacatcgtagatattatagatag

SEQ ID NO: 413 - DNA, 792 bp, Streptococcus pneumoniae
atgtatcaagatttactaagaaaaatagcagaagaaaaaccaaattataaccaggaagaaatccagtggttgtttgatcatttgggaaatccttctccagaaattcgtgatgaccttatttttacaagctttgctaaggggattcaggaagagctatttatacaggagcaatttcatttcattgctgaaggggtttcatctgatgtaggactagataaagagattgataaggtaggcctgccaacactggaacgttcttttagggcacttgtttatgcaaatctcttgtctgcagatgctaaccagcaatcggttttttatcagggattacaatcagaaattcgtgatgatctttcaaatcaaggcttgcactatctttcaaaagaaaaggatacaacaggtttctcaagtcagtatggttgggttcattcttttgcacatggagccgatttactgacagaggtggtttgtcatccagactttcctaaaaacagagttcatgaagtatttgatatacttggccaactatttaaaagaatgtcgattcgctttacagatgatgaggattggcgtttagcaagagtgatctatgaacctattttacaagggaagttggagcaagaacaagtagcttcttggataaaaactgttgattttccgatagaagaaagggaggatttttccaaattttccaactttagatcctgtctggtggaagtctatgtccaacttgaccagagaaatagtttacaagatgagttgaaagaagctatccagtcttttcaatactag

SEQ ID NO: 414 - DNA, 630 bp, Streptococcus pneumoniae
ttgtattcgtcggggacaggagctgttgtttttggaaatggtcttgatggccttggtcaccttggaatcgcctttgcctttggtttggcaatcgtggtggcagcctactcaatcggaactgtttcaggtgctcacttgaacccggctgtttcgattgctatgtttgtaaacaaacgtttgtcatcttcagaacttgtaaactacatccttggtcaggttgttggagctttcatcgcttctggcgctgtcttcttcctcttggctaactcaggtatgtcaactgctagtcttggtgaaaatgccttggcaaacggtgtcactgtctttggtggtttcttgtttgaagtcatcgcaactttcttgtttgtattggttatcatgactgtgacttcagaaagcaagggcaatggcgcgattgctggtttggtaatcggtttgtcattgatggcgatgattcttgtcggattgaagattactggactttcagtaaacccagctcgtagcttggcaccagctgtcttggtaggcggcgcagcccttcaacaagtttggattttcatccttgcaccaatcgctggtggagttcttgcagcccttgttgcaaaaaatttccttggaacagaagaataa

SEQ ID NO: 415 - DNA, 180 bp, Streptococcus pneumoniae
ttgctcaaagcagtgtttgaggttgtcgataaaactgacgaagtcagcttaaaacactgttttgaggttgcagatagaactgacgaagtcagtaaccatacctacgacaaggtgaagctgacgtggtttgaagagattttcgaagagtatcatacgaaaaagccctgttcctcaagatga

SEQ ID NO: 416 - DNA, 573 bp, Streptococcus pneumoniae
ttgcgtgctctgaacatttcccattttggaaggagtactgtgaaacgtcaatcagccttggtcgtctttagtggtggtcaagattcaacaacctgccttttctggggcatgcaacactatgaaacagtcgaagctgtcacctttgcctacggccaacatcatcacctcgaaattcaaattgctagagaaatcgccaaggaacagggcattcgtcaccatatcctcgatatgtctctgctgggacaaatcactgctcaaccagactttgcgacgattcatatttcctacattcctgacaagctctgtgtcgagtcaaaatctctcaaactatatctatttagctaccgaaatcacggagatttccacgaaaactgtatcaacaccatcgggaaagacttggtcaacttgctagaccctcgctatttagaagtctggggaaaattcactccgcgcggtggcatttcaatcgacccctactacaactacggtaagcaaggaactaagtatgagggcttggcagaacaacgcctcttccaacacgacctttatccagagaaaattgacaaccgctaa

SEQ ID NO: 417 - DNA, 315 bp, Streptococcus pneumoniae
atggcaaaagcaattacagatgcaacattcgaacaagaaacaaaagacggtttggtcttagtagacttctgggcaacttggtgtggtccatgtcgtatgcaaggtccaatcttggacaaattgtctgaagaactttcagaagatgtcttgaaaatcgttaaaatggacgttgatgaaaatccaaacacagctcgtgcttttggaatcatgtctattccaactcttctcttcaaaaaagacggccaagttgtcaaacaagttgcaggtgttcacacagcagaacaaatcaaggccatcattgctgaattgagctaa

SEQ ID NO: 418 - DNA, 303 bp, Streptococcus pneumoniae
ttgcgtgcgcaatcatttttcttgacattctcttttataaggagtaaaataaagttagcattaaacaaaggagttttaaatatgattgaaattacctatatagatgccagcaagaacgaaagaactgtgactttcgagtcttatgaagactttgaacgttcacaacaagcttgccttatcggcgtcgcagactactaccctgtccaaaaattaacttacaagggtcataatttggactaccatgggacttatggagatatcttcttctatctcatgaaacaagatttaagccaatataactaa

SEQ ID NO: 419 - DNA, 201 bp, Streptococcus pneumoniae
cttcatctaagcccgagcgcagtttctaggatggtggctcgcttggaagctaaaaattgcggtctactcagtcgcatgtgttgccatcaagatagacgctctagttttatctgcctgacaaatgatgggcaaaagacactggcctcgctacaaaagactgtcgaagaaagcttggaagcaggtttggatttcttgatttaa

SEQ ID NO: 420 - DNA, 225 bp, Streptococcus pneumoniae
atggactttcttctatattatgactctaaaaagaaaggagacactatgacctatttggaaaaatggtttgacttcaatcggcgtcagaaagaaattgaaagtctcttggaagagaccattgcccaacagagcgagcaaagtctgaccttgaaagagttctacctgctctactatctggacttggctgaagaaaaatctctacgccagattgaactggcagattaa

SEQ ID NO: 421 - DNA, 954 bp, Streptococcus pneumoniae
atgtctattagccaacgtacgaccaagctcatcttagctacctgtcttgcctgcctgcttgcttattttctcaatctttcgtcagcagtttcggctggaattatcgctctcttgagcctatctgatacgcgtagaagtactttaaaactggctcgcaatcgtcttttttctatgcttctagctctggctatcggtgttctagcttttcacttgagcggatttcatatctggagtctcggcctctatctggccttctacgttcctttagcctacaagatgggctgggaaattggcatcacaccaagcactgttttggttagccatctcttggttcaagagtcaacctctccagaccttctagtcaatgaattccttctctttgctattggtacaggatttgccttgcttgttaatctctatatgccttcacgagaagaggaaatccagcactaccacacgctggtggaagaaaagttaaaagatatcctccagcgcttcaaatactatttatccagaggagacggacgcaaccgagcacagctggtagcagaattagacacgcttttgaaagaagccctcagactggtctatttggatcactctgaccacctctttcaccagaccgactaccatatccactactttgagatgagacagcgacaaagtcgtatcctgagaaacatggcccaacagattaacacttgtcaccttgccgccagtgaaagcctgatcttagcgcaactcttttcaaaaattgcaggtcaactgagccagaccaatcctgcttctgatttgctagatgaaattgaacgttatctggaagtcttccggaaccgcagtctgcccaaaacaagagaagagtttgaaacccgcgccacccttcttcaactcctacgtgaagccaaaaccttcatccaagtaaaagttgatttttaccaaaaatatagacagtaa

SEQ ID NO: 422 - DNA, 861 bp, Streptococcus pneumoniae
atgatagggactttcgccgctgctcttgtagctgtactagcaagtttcatcgtccctattgaaattaccctaaatagtgccaatactgaaattgcaccaccagatgggattgggcaggtcctcagcaacctcttgctcaaactggttgacagcccagtcaacgccctgcttactgctaactatattggaatcttatcttgggcagtcatttttggaatcgctatgagagaagccagtaaaaatagtaaagaattgctaaaaactatcgctgacgtgacttctaaaattgtcgaatggatcatcaatctggctccatttggaatccttggtcttgtttttaaaaccatttctgacaagggagtcggaagccttgccaactacggtattttattggttccattagtaacgactatgctttttgttgcccctgtggtcaaccctttgattgccttcttttttatgagacgcaatccttaccctctagtttggaactgcctccgtgtcagcggtgtgacagcctttttcactcgtagttctgcgactaacattcctgtcaacatgaaactctgccatgaccttggactcaacccagatacctattctgtttctatcccactcggttctactatcaatatggctggagtagcgattaccattaaccttttgacccttgctgcagttaacactcttggaattcctgttgactttgccacagcctttgtcctcagtgtggtagcagctatctcagcctgtggtgcttcaggtattgccggagttccctccttcttatcccagttgcttgtagccttttcggtatttctaacgatattgccatacaagttgttggggttggttttgtga

SEQ ID NO: 423 - DNA, 225 bp, Streptococcus pneumoniae
ggcaagccttgtcaagcgtatcttgattggtatgctttatggggaatcctaggactgacccttcctaatctctcagggattgggctactcggggatttattcgttggaggtctaaaagctgttgctcctatcctagtctttgccctcgttgccaatgccctttcccaacatcaaaagggacaagatagcaatatgaaaactgttgttttcttgtatatcctatga

SEQ ID NO: 424 - DNA, 420 bp, Streptococcus pneumoniae
atgcaaaaatttattcaggcttatattgaaaagctagatgtgacaaccattatcgagaatattctaaccaaggtcatttctcttttactgcttttgattgtattttatattgctaaaaaaatgcttcataccatggtgcagagaattgtcaaaccttctctaaaaatgtctcgtcatgatgtcggacgccaaaaaaccatctcacgtttactagaaaatgtgtttaattatacgctatatttctttttactctactgcattttgtcgattttaggtttgccagtttctagtttgctggctggagctggtattgctggggtaccgattggtatgggaaccaaggctttctgtctgatgtcatcaatggctttttcatcctctttgaacgtcaactggatgtgggagatgaggtcgttctga

SEQ ID NO: 425 - DNA, 198 bp, Streptococcus pneumoniae
tttgctggctggagctggtattgctggggtaccgattggtatgggaaccaaggctttctgtctgatgtcatcaatggctttttcatcctctttgaacgtcaactggatgtgggagatgaggtcgttctgacaaatggaacgattactgtatcgggtaaaggttgtcagggtgggaattcgtacgacacagcttcgtag

SEQ ID NO: 426 - DNA, 177 bp, Streptococcus pneumoniae
ttgtccctaaccgaaatatcacagttgttagcaatttttcacgcacagactagacctgttattttaagtaatttgtggtacaatagagggagtttaataaggagaaaagatggttttagaaaagcagttgggcaatggttgtacctggatagacctagacctaggaaagttgaataa

SEQ ID NO: 427 - DNA, 909 bp, Streptococcus pneumoniae
atggttttagaaaagcagttgggcaatggttgtacctggatagacctagacctaggaaagttgaataaactagaagacctttctgaaatttacggtttggacaaggaaaccattgaatacgcactggatagaaacgagcgcgcccacatggactaccaccgtgaaagtgggacggttacctttatctataatgtcctagacgtaaaaaaggacaaggcctactatgagacttttcccatgacctttattgtcgagcatcgtcgcctgattaccattagtaataccaagaacgcctatgtcattgaacagatgactcgttatctggagaaccatgacacgctttcgatttataagtttctctttgccagtctggaaatcatcagcaatgcctactatcctgtcattgagcagatggacaagagtagggatgaggtcaatgacctcttgcgccagcgaactaccaagaaaaacctctttgccctgtctgatttggagactggtatggtttatctgacggcagctgccaaacaaaatcggattttgttagagcatattcaaggtcatgccttgtatcgtagttttgatgagattgagagagaacagtttgatgatgccatgattgaggctcatcagctggtatccatgacagacctaatctctcagattttacagcagctttcagcctcttacaacaatattctaaacaataatctgaatgacaatttgacaaccttgactatcatttcagtcttgctagctgttttggcagtcgtgacaggctttttcggaatgaatgttcccttacctttaacagatgagccccatgcttggctctatatcagtttggctagtgcaggtttgtggattgttttatccttgttactaaggaaaattgcgaaaaaaagttaa

SEQ ID NO: 428 - DNA, 528 bp, Streptococcus pneumoniae
atggcgattgaaaattatataccagattttgctgtggaagcagtctatgatctgacagtcccaagcctgcaggcgcagggaatcaaggctgttttggtcgatttggataataccctcattgcttggaacaaccctgatggaacgccagagatgaagcaatggctacatgaccttcgggacgcgggtattggcattatcgtagtgtcaaataacaccaaaaaacgcgttcaacgagcagttgagaaatttgggattgattacgtttactgggccttgaagcccttcacatttggtattgaccgtgctatgaaggaattccactatgacaaaaaggaagtggtcatggttggtgaccagctcatgacagatatacgagcagcccaccgtgcagggattcggtcaattttagtcaaacccttggtccaacatgactcaatcaaaacgcagattaaccgaactcgtgagcgtcgtgttatgagaaaaatcactgaaaagtacggaccgattacatataaaaaaggaatttaa

SEQ ID NO: 429 - DNA, 1107 bp, Streptococcus pneumoniae
atggaagaaattctctgtattggttgtggagcaaccattcagacgacagataaagctggtcttggttttaccccccagtcggcacttgaaaaaggtttggagactggcgaagtctattgccaacgctgtttccgtctccgccactacaatgaaatcacagatgtccagttgacgaacgatgatttcctcaagctcttgcacgaggtgggagacagtgatgctttagtggtcaatgtcattgatatctttgattttaatggatctgtcatcccaggtttaccacgtttcgtctcgggcaatgatgtcctcttggtaggaaataaaaaagatatccttcctaagtcagttaagtctggtaagattagccagtggctcatgaaacgtgcccatgaagaaggtcttcgtccagtcgatgtggtcctaacttcagcacaaaataaacatgccattaaggaagtcattgacaagattgaacactaccgtaagggccgcgatgtctatgtggtcggtgtgaccaacgttggaaaatcaactctaatcaatgctattatccaagaaatcacgggtgatcagaatgtcatcactacttcacgcttcccagggacaaccttggacaaaatagagattccgcttgacgacggatcttatatttacgatacgccgggaattatccaccgccaccagatggctcactacttgacggccaaaaacctcaagtatgtcagtcctaaaaaggaaatcaagcctaagacctatcagcttaatcctgagcaaaccctatttttaggtggtttgggacgctttgactttatagcaggagaaaagcaaggatttactgctttctttgataatgaactcaaactccatcgtagcaagcttgaaggagctagtgctttctacgataagcacctgggaactcttctgacaccaccaaatagcaaggaaaaagaagatttcccaaggctagtccagcatgtctttaccattaaagataagacagacctagtcatctcaggcctaggatggattcgtgtaacaggcacagcaaaagtcgccgtctgggcaccagaaggcgtcgccgtcgtcacacgaaaagcaattatttaa

SEQ ID NO: 430 - DNA, 312 bp, Streptococcus pneumoniae
atgtcattaacatcaaaacaacgtgccttcctcaacagccaggcacacaccctcaaacctatcatccaaatcgggaaaaatggactcaacgaccaaatcaaaaccagcgtccgtcaagctcttgatgcgcgtgaattaatcaaggttactctcttacaaaacacagatgaaaacatccacgaagtagctgaaattttggaagaagaaatcggtgtggatacagtccaaaaaataggacgcatcttgattttgtttaaacaatctagcaagaaagaaaatcgcaagatttctaagaaagtcaaagaaatctaa

SEQ ID NO: 431 - DNA, 615 bp, Streptococcus pneumoniae
ttgactccctttaccaaggtagagttggagccagaaatcaaggagaaaaaacgcaaacaagttgggattttaggggggaattttaaccctgttcacaatgcccatctcattgttgcggatcaagtacggcaacagttgggactggatcaagttctgctcatgcctgaataccaacctcctcacgttgataaaaaggaaaccatccctgaacaccatcgtctcaagatgcttgagttggcaattgagggaattgacggcctagtcattgaaaccattgagttggagcgcaagggtatttcctacacctacgacaccatgaagattttgacagagaagaatccagatacggattattactttatcatcggtgccgacatggttgactatctgcctaagtggtaccgaattgatgaactggttgacatggttcagtttgtgggggttcagcgtccacgctacaaggtagggacttcctatccagttatctgggtggacgtaccgctcatggatatctcgtccagcatggtgcgtgccttccttgcccaaggtcggaaacccaactttctcctacctcagccagtgctagactacatcgagaaggaggggctctactga

SEQ ID NO: 432 - DNA, 594 bp, Streptococcus pneumoniae
atgtcctatcaagactatatcaactgctcccgtgaggctttgttggaaaaaatggcagagcttctacctgagaaacgtctaacccattgtctaggtgtggagcgtgccgctatggaattagctcagcgctttggtgtagatgttgagaaagcaagtctagcaggtcttcttcatgactatgctaaaaagttgtcagatcaggaatttctagacttgattgaccgttaccagctagaccctgacctcaaaaactggggcaataatgtctggcatggtatggtcggaatttacaaaattcaggaagatttggatttgcatgattcagaaatcctgcgagccattgaagtccatacagtcggtgctggtcaaatgacagacctagataaggtcatctacgtcgcagactatatcgagcacaatcgagcctttcctggagtagatgtggcgcgtgagattgcaagtctatcgctcaataaggcggtggcctacgaaacagctcgtaccgtggagtatctagctcatcagggattccccatctatccccaaacccttgaaacctataacgcctttgtgcactatttgaaagaggactaa

SEQ ID NO: 433 - DNA, 501 bp, Streptococcus pneumoniae
atgaagacggcttttataatcattgatgttcagaatgttttagtagaaactgggttccagacaaaaagtctattggaaaaaatttcttatttacaaaaccaggctagaagcaagaatattgaaattatctatgttcaacatattgagaactctgaagctcaaacatcagaagattggcagttatctgcgcttttaaatcgaaaacctgctgaaaaggtctttcagaagaagtataacagtattttcaaagaaactggcttaaaagaatacttggataaacaggggattgaaaaattagttttatgtggtatgcagacagaatattgtgtggatacctctgtcaaggttgcctttgaatatggctatcagcttattgttccagaaggtgctgtcacaacctttgatggggatgacattccagcagaaacgattaatgaattttatgaggacatttgggaggagcgctttgcagatgtcctagattacaaacatattttctaa

SEQ ID NO: 434 - DNA, 354 bp, Streptococcus pneumoniae
atgaacgaaaaagaattactagaactagtcgtgaaagcggctgatgagaaacgtgcggaggatatcctcgcacttgatgtacaagatttgactagtgtgacggactactttgtcatcactagctcaatgaatagccgtcagttggacgctatcgcagctaatatccgtgaaaaagtagctcaagcaggctttaaaggtagccatgtcgaaggcgatgcagctggaggctgggtcttactggacctcggtgctgttgtcgtgcatatcttttcagaagaaatgcgtgcccattataatctagagaagctatggcatgaggcgaattcagtagatatttcagaagctcttgcttag

SEQ ID NO: 435 - DNA, 741 bp, Streptococcus pneumoniae
atggcgacttatgaaacctttgcggcggtctatgatgcggtcatggacgatagtttatacgacaaatggacgaatttttctctgcgtcatttgcctaagaccaaggagagaaagaaactcttggaattggcttgtgggacaggaattcaatcagtgcgcttctctcaggctggttttgatgtgactggacttgacttgagtgcggatatgttgaagattgcggagaagagagcaacttcagccaagcaaaagattgcttttatagaaggtaatatgctgaatttgtccaaggcagggaaatacgattttgtcacgtgttattcggactctatctgctatatgcaggatgaggtggaagtaggggacgtctttaaggacgtgtacaatgcgctgaatgaagagggagttttcatctttgacgtgcactcgacctaccagacagatgaagtattccctggctattcctaccatgaaaatgcggaagattttgccatgctttgggatacatatgaggacgaagctcctcactccatcgtgcatgagctgactttctttatcaaggaggctgacggttcctttagtcgccacgatgaagtacatgaggagaggacctatgagatcttgacctatgatatcttgctggaacaggctggatttaagtccttcaaactctatgcagactttgaggataaggagccaacagaaactagcacccgttggttttttgtggcgcagaagtag

SEQ ID NO: 436 - DNA, 564 bp, Streptococcus pneumoniae
atggccattatgaaaaggattgaactccgcgataatacctgttatggtcatgctaatctcctacttctgcgccacaaaaaaccaacgggtgctagtttctgttggctccttatcctcaaagtctgcatagagtttgaaggacttaaatccagcctgttccagcaagatatcataggtcaagatctcataggtcctctcctcatgtacttcatcgtggcgactaaaggaaccgtcagcctccttgataaagaaagtcagctcatgcacgatggagtgaggagcttcgtcctcatatgtatcccaaagcatggcaaaatcttccgcattttcatggtaggaatagccagggaatacttcatctgtctggtaggtcgagtgcacgtcaaagatgaaaactccctcttcattcagcgcattgtacacgtccttaaagacgtcccctacttccacctcatcctgcatatagcagatagagtccgaataacacgtgacaaaatcgtatttccctgccttggacaaattcagcatattaccttctataaaagcaatcttttgcttggctga

SEQ ID NO: 437 - DNA, 1098 bp, Streptococcus pneumoniae
atgaccataacaggtattatcgcggagttcaatccttttcataatggccataaatacctgctggatcaggcagagggactgaaaattgttgccatgtcagggaatttcatgcagcgtggagagcctgctattgtggataagtggacaaggacccagatggcgctggaaaatggcgcagacttggtagtggaattgccctttttagtcagtgttcaggcagctgatttctttggtcaaggagctatggatatcttggatcgcttgggcattgatagtctagtttttgggacagaggaagttcgagattatcagaaaattgctgacttatacacagagaaaggtgctgagatggagaaatttgtggaaaatctgcctgattccctttcctatccccagaaaacccaagctatgtggaaggaatttgctggtcttgatttttcaggtaatacccccaatcatgttcttgctctggcctatgccaaggcggttgcaggacgaaatatcaagctgcatccgattcagcgtcagggggcaggttaccattctgtgaataaagatgtggactttgcctcggcgacagccctccgtcaacatcagaaggaccaagatttcttagaacgttttatgccttctgttgccctatttgagcaggccagtaaggtgatctgggaagactattttcccttgctccgctatcaaatcttgtcaaatcccgacctaaccaccatctatcaggtcaatcaagaaatggctgtgcgcattaaagaagctattaaaacagcccagtctgtggaagaattggtcgagttagtgactaccaaacgttacaccaaggcgcgtgtcagacgcctattgacctatattttggtgcaggctagagaaaatgtcttgccagaagccattcatgtccttggatttactgaaaaaggcaggcaacatctcaagtctctgaaaggacaggtcaatctagtcagccgaattggcaaagaaccttgggatgctatgactcaaaaggttgaccagatttaccaactaggaaagccaagtatagcagagcaaaattttggcagagtgccgattagaatagaaacaaactaa

SEQ ID NO: 438 - DNA, 189 bp, Streptococcus pneumoniae
ccagttctcttcattataccacaaaataacaagcataaagcggattcaaagataaagattaaggttcatatactaattttctttattgactttttgtcttctgtattagggagtttatcattttccaaaaactttatcttcaatttgttatctaaaatttctacaataaaaaagcctacctttcagtag

SEQ ID NO: 439 - DNA, 2748 bp, Streptococcus pneumoniae
atggaagaaaattataatttatctataactcaaataaagaattctattaaagaaaattccttagttttgtttgttggtgcaggaatatcagctaattctaatctaccaacttggggagaattgattcaatcattaaaaaaagaattgaacataccagaagaaagaacagatagtccactgagaattgctcagtattattatgatacttttgggaaaaatcagtacacaaagaagatagaagaaattttctttaagaagggattgagtaaaccaaatgagttacataaattaatagaaaaaattgcaccaaaacatattattacgacaaactatgattcacttctggagagtcaatttgaaagtggcttgttaaagtacaatgtagtcgctgaggataaagacatcccttatacgagttcggaaagatacttgattaaaatgcatggtgacttcagtaagaaaaatattgttttgaaagaagatgattatttagactatcatttgaacttcccaatgatttctactttaatccagtcattgataatgaatcatactctattgtttgtggggtattctctaagtgattcgacttttaattcaatttttagaatgattcaaaatacatttaaattggatgctaaaaatgcttatttttatactcccgaggaaccgtctatgatcattcgagagtattataagaagcaaggaattttcattatctctaatgaagagaatctaggtcaggagacatcagaaaaacagaacaaattgtattgcaggacaaaagattttttagaggttctatcagaaaaccgaagtcaagatgtaaataatgctgatgatttatggaatcaactggcttttttagatagacttagttttattgatgcgaaagatttttctagatattctgatttaaagaaaagggctttaaactgggatgatgagtattgctggtttggaaatgatcaattaagatttgaaattgatggtcatgaagaattacgaattatggtatctaaaaaatctttattaaatcgctttctagatatggagattggtgagcctagggatttaaaggggaatcgattcttaagtaaggcttttaagttgtatgaagaaaaacaatattctttagcaaaagcaaaatttagagaactagctaatatagcatttcgtcagaaagactattttaatttcttagtttgtgaatttaattttcagcaaattcaaataattgatagatacgaaaaaacacctagttatgcagagccactttatgatggagaattaagcgaattaacagaacaaattcttaactcggttacaggagatgagaaaaagattatagaattttttagagattcaatccttaacttcaattttttatatagaaaattagaaactattaatgaattatttgatgaaattcgtgaagagcatgaaagctatagaagaggaggatggtctgctaataatcatctatttaatgcggagtttacagtaaaaaatctttataactttttaaaattaaattgtttatgtgttgaacattataagatttataaatcaatcattaatagatatttagaaatattattactcagttatgataattcatatgtaaaccctgactcaagtattttcgatagaacatcttcttggcttaaaaatcttgatttggatgatgttaaattaattcttccgaatatagattttaaggttgtaaatttatattttagaaactattcatttggtaaaataaaaattactgaggaagcgaaagactacttgttgaatcgaattacttatcttcaagaaagacttgaaattactgaagatgaaaatcttcgagagcttaaaaatatgctaatttttcttccccttgttgatgatattgacatagaaaaagtaatagaaattttaaataatcaaacactgtattataattggagcgaggaatttaggagaattattaaaattgtcctcgataatatggatgttattgataaagattcattgaaatctaagataattgggattgtaaataaacatttaaatgaaattttggagaaaaatttttctttatataattcagtgtatccgctctattcacagttactagaatactgctcaactgatcaggaaactgcaataatagtactcgaaaaatttaatacagatattttaagaataaaatataaaaatgatgatataaaaaatatcatagaatattctgacttgatatgtcacttatttaagtattttgaaaaggatattaaagatgacattttagatactctaaaagtttatgaagaatcagaaaatattatttaccataaagtaattgatttgatgagttataatgtctatgattttcctcagatacaaaataaaatctaccattatttgattaaaagaattaatgataaaagagttgagggggttaaaactttcccagacccaagagaaaagtctgtatcagatttatacaacttaagtagaaaaggatatttttctgattttgagattttaaaagatattgaagaagatattcgaggactttatcctgaagtagattggacctggttccatgatagaagtgatgatgttatccatcgtctactagaacatagaactcccaataatattaaaacttatttttcaaaaaatgaagaagataataaattgattaatgagtatattttaaaagctttcgatgaggataaattaatacttaagaaataa

SEQ ID NO: 440 - DNA, 1611 bp, Streptococcus pneumoniae
atggaaatcatgtcgcttgcgattgctgtttttgccgtcatcattggtttagtcattggatatgtcagcatctcagctaagatgaaatcatctcaggaagctgcagagttgatgcttttaaatgctgaacaagaagcaactaatttacgtggacaagctgagcgtgaagcggatttacttgttaatgaagccaaacgtgaaagcaagtctcttaaaaaagaagcactattggaggccaaagaagaagccagaaaataccgtgaagaagtggacgctgaattcaaatcagaacgtcaagaactcaaacaaatcgaaagtcgtttgacagagagagctactagccttgaccgtaaggacgacaatttgacgagtaaagaacaaacacttgaacaaaaagaacaaagtatttctgatagagcgaaaaaccttgatgcgcgtgaagagcaattagaggaagtcgaaagacaaaaagaagcagaactagagcgtattggtgctctgtctcaggcagaagcacgagatattatcttggctcagacagaggaaaacttgaccagggagattgccagtcgcattcgcgaagctgagcaagaggtcaaggaacgttctgacaaaatggccaaggacatcttggttcaagctatgcaacgtatcgctggtgaatatgtagcggagtcaacaaactcaacagttcatctgccagacgatactatgaagggacgcattattggtcgtgaaggtcgtaacattcgtacctttgaaagtttgacaggggtcgatgtgattatcgacgatacaccagaagtggtgaccttgtcaggatttgatccgattcgtcgtgagattgcccgtatgactatggaaatgttgctcaaagatggtcgtatacatccagctcgtatcgaagagttggttgagaaaaaccgtcaagagattgacaataagattcgtgaatacggtgaggctgctgcctatgaaattggtgcgccaaaccttcatccagacttgatgaagattatgggacgtttgcagttccgtacttcatatggacaaaatgttttgcgccattcgattgaggttgctaagttggctggtatcatggcgagcgaacttggtgaaaatgcggctcttgcccgtcgtgctggattccttcacgatatcgggaaagccattgaccatgaggttgaaggtagccacgttgaaatcggtatggaattggcccgtaagtacaaggaacccccagttgtggtgaatacgattgctagtcaccacggagatgttgaagctgagagcgtgatagcagttatcgtcgctgcagcagatgccttgagcgcagcccgtccaggtgctcgtagtgagtctcttgaaagctacatcaagcgtctccatgatttggaagaaattgctaacggctttgaaggagtgcaaactagctttgcccttcaagcaggacgtgaaattcgtatcatggtcaatccaggaaaaatcaaggacgacaaagtcacaatcttggctcacaaagttcgtaagaaaattgaaaacaatctcgattatccaggaaatatcaaggtaaccgtgattcgcgagcttcgtgcagtagattatgctaaa

SEQ ID NO: 441 - DNA, 627 bp, Streptococcus pneumoniae
atggcagaccgaggcttactaatcgttttttctggtccttcaggggttggaaaaggaacggttagaagagagatttttgagagttctgaaaaccaatttcaatattctgtatcgatgacgacacgcgcacaacgtcctggagaagtggacggtgttgactatttcttccgtactcgtgaagaatttgaagagctgattcgtcaaggacagatgttggaatacgcagaatatgtcggcaactactatggaactcctctgacctatgtcaatgaaaccttggacaagggaatcgatgttttccttgaaattgaagttcagggtgctcttcaggtcaagaaaaaggttccagatgctgtctttatcttcctgacaccaccagatttggatgaattgcaagatcgcttggtaggtcgtggaacagatagtgcagaagtgattgtccaacgaatcgaaaaggccaaggaagaaattgccctcatgcgtgagtatgattatgcgattgtcaacgatcaggtgcccctagctgctgaacgtgtcaaatgtgtgattgaagcagaacacttctgtgtggatcgtgtcattggtcactatcaggagatgttaccaaaatctccaactacccgataa

SEQ ID NO: 442 - DNA, 315 bp, Streptococcus pneumoniae
atgatgttaaaaccctctattgataccttgctcgacaaggttccttcaaaatattcactcgtaatcttggaagcaaaacgtgcccacgaattggaagcaggtgccccagcaactcaaggtttcaagtctgaaaaatcaactcttcgcgctttagaagaaatcgaatcaggaaacgttacaattcacccagatccagaaggaaaacgtgaagcagtgcgtcgccgtatcgaagaagaaaaacgccgcaaagaagaagaagaaaagaaaatcaaagagcaaattgctaaagaaaaagaagatggtgaaaaaatttaa

SEQ ID NO: 443 - DNA, 2397 bp, Streptococcus pneumoniae
atggccctagctaagattatcgtagatgtgcccttgatgcagacggaccagccctatagttacaggattccggaggaatttgagggaatgctggaagttgggatgcgggttcatgtgccttttggtaagggtaatcgcctgattcaagggattgttcttggtttgaagtcccaatcagatggagaagagatggagcaagatttaaaagatattgcagaggtgctggatttttctcctgttctcacgccagaacaactctggctggctgaggagttacgcaaatctgtcttctcctacaaaatctctatcctcaaggccatgcttccagggtttctgaattctagctatgacaagattctctatcctctggaaggcttgagtcaggaagaacgagtacgcctgtttggttcagaagattcgctagccttttcttcactagaccttgccaagcaagctgaaatgatgcgtttgactagaaaaggcctgcttggtctggaatatcaggcagtcgatcaaaagaaggtcaagacccagtcttggtatgaggttgaccatgcccaattagaaggtgttgagatttctacacgtgccaagaaaaagttggaactgagagattatctgctgtctcatccagagagcgcttccttggctagcttgttagagtcctactcgcgagagcaagtcaacttctttgtggatcaaggtgctgttaccatagtccaaaaggaagttcaacgctcggctgcttattttgaaggaattgaagcaagtagacctttggagttaaatccagaacaaagacaggcgcgtgatgcggttgtgagttctattggcagttctcaacctccctttctacttcaagggattacaggaagtgggaagaccgaggtttacttgcagattatccaaggtgccctggataagggcaagacagctattttgctggtacctgagatttccttgactcctcagatgaccgagcgttttatagcacgttttggggacaaggtagccattcttcactcaggattatccaatggcgaaaagtatgatgaatggcgcaaggtggagcgtggcgatgcccaagttgttgttggtgccagatctgctatctttgctcctctgaaaaatctgggtgtcatgattattgatgaagagcatgaagcggcttataagcaggacagcaatccccgttaccatgccagagaggtagctattttacgggctcagtataatcaagcaactctggtacttggatctgcaacgccgagcttagagagccgggcacgtgctggcaaaggcgtctatcaacacttacgtctaacccaacgtgccaatcctttggctacaatccctgaggttcaagtgattgactttcgagactatatcggacaaaatgagacgtcaaactttacgcctcctttgctagaggctatccaagaccgtctggttaaaaaagagcaggtggttctcatgctcaatcgccgtggttattctagctttgtcatgtgtcgggagtgtgggacggtggatacttgtcccaactgcgatatttctctgaccttgcatatggataccaagactatgaactgccattattgtggtttctcgaaggatattcctcaggtctgtcctaactgtaagagccacagtattcgttactatggaacgggaactcagaaggcttatgatgagctagcagaactctttccccaagctcgcattctgaggatggatgtggatacgactcgaaagaaaggcagtcaccaagccttgcttgaccagtttgggcgaggggaagcggatattttacttggtactcagatgattgcaaagggtttggattttcccaatgttaccctagtcggagttctaaatgcggatacggccttgaatctgcctgatttccgttcttctgagagaaccttccagctcttgactcaggtggcaggtcgatcaggtcgggctgaaaaggcaggtcaagtcttgatacagtcctacaatccgcagcactatgctattcgatttgccaaggatcaagattacgaaggcttttatgcctatgaaatgggaatcagacgacaactcggctatccaccttactatttcacgattggtattaccctttctcacaagaaagaagaagaggttttcaaacgtgcctatgaagtcatgaacattttgcggtcaggcttgtcagagaccagtcccattctggggccaacgccaaaaccgattgcccgtacccacaacctctatcattaccagattttaattaaataccgtttagaagatgagctggggccgaccctcaaccaggttttagccttgactcaagaacgggaaaatagtgagctccgtctcagcattgaccatgagccgcagcaatttttataa

SEQ ID NO: 444 - DNA, 936 bp, Streptococcus pneumoniae
atgacaaaactaatctttatggggacccccgacttttcagcaacagtcttaaaaggacttttgacagatgaccgttacgaaattctagccgttgtgacccagccagaccgtgctgttggtcgtaaaaaagttatccaagaaaccccagtcaagcaggctgccaaggaagcaggactatctatctaccaacctgaaaaattatctggaagtccagagatggaagaacttatgaagctaggagcagatggaattgtgactgctgcttttgggcagtttctcccaagcaaactccttgatagcatggactttgctgtcaacgttcatgcctccctccttcctagacaccgtggtggtgcgcctatccattatgccttgattcaaggggatgaggaagctggtgtgaccatcatggaaatggttaaggaaatggatgcaggagatatgatttttcgtcgcagcattccgatcacagatgaggacaatgttggcaccttgtttgaaaaattggcgctagttggtcgtgatttgcttttggacactctgcctgcctatattgctggtgatatcaaacctgaaccgcaggatacgagtcaggttaccttctctccaaatataaagccagaggaagaaaaactggactgggacaaaaccaatcgtcaactctttaaccaaattggtggaatgaaccctggccctgttgcccatactttccttaagggcgaccgctttaagatttatgaagccctaccagtagaagatcagggaaatccaggtgagattctctctatcggcaagaaagaattgattgtcgcaacggctgaaggggctctatccctcaaacaagtgcagccagctggtaagcctaagatggacattgcttccttcctcaacggagttggacgtacattgactgtaggagaacgatttggtgactaa

SEQ ID NO: 445 - DNA, 528 bp, Streptococcus pneumoniae
ttggtgactaaagtagaaacggctagaagtttagctctagcagtgctagaggatgtttttgtgaatcaagcatattcaaatattgccttaaataaacacctcaaggggagtcagctctctgcagcagacaagggcttagtgaccgagctagtctatggaacggtagcccgtaaactgactctggaatggtacttatcccactttatcgaagacagagaccagttagacagctggctctatgtccttcttctcatgagtgcctaccaactccgctatttggacaagattccagatcatgctgtggtcaatgaagcagtggaattggccaaactccgtaaaaaaggcagtgaaaaattggtcaacgctgtccttcgccgtatcttgcgtgaaggctggccagatattgctagcatcaagcgaaaaaacaagcgtgactccattgcctattctctcccagtttggctagttaccaaactcaaggaagaatacggagaggagagagcaaaagccatctttgaaagcctgtag

SEQ ID NO: 446 - DNA, 417 bp, Streptococcus pneumoniae
ttgaaagcctgtagtctgcgaaacaaagccagtattcgtgtaacagacctaagtcgaaaagaggaaatccaagccttgttggaggcgaatgattcccttttagcaaccactcgtctggttaaggagcaagggcattttgcagggcataatttgtttgcggatggagccattaccatccaagacgagtccagtcagctggttgctccgacgcttgatttacaaggtgatgagcgagtgcttgatcctgtgcggctccaggtggaaaacagcccatatagcctcttatcttacgacaggtcaggttactgctctggacttgtacgaccacaagttggatttaattcaagaaaatgcccaacgtctgggagttgcagatcgggttcaaactcaaaaattggatgccagaaaggtgcatga

SEQ ID NO: 447 - DNA, 699 bp, Streptococcus pneumoniae
caaccactcgtctggttaaggagcaagggcattttgcagggcataatttgtttgcggatggagccattaccatccaagacgagtccagtcagctggttgctccgacgcttgatttacaaggtgatgagcgagtgcttgatcctgtgcggctccaggtggaaaacagcccatatagcctcttatcttacgacaggtcaggttactgctctggacttgtacgaccacaagttggatttaattcaagaaaatgcccaacgtctgggagttgcagatcgggttcaaactcaaaaattggatgccagaaaggtgcatgagttttttgaccaggattcctttgataagattttggtggatgctccttgttcaggaatcggtcttttgcgccgaaaaccagatatcaaatacaataaagaaacggcagatttcgcgtccttgcaggaaattcagttagaaatattaggtagtgtttgtcaaatactaggcaaaggtggtataataacttatagcacctgcactatcgtctcagaggagaattttcaagtcgttaaggcctttttagagagtcatcccgagttcgagcaggtaaaactagaacatgaatgtaaggatatcatgaaagacggctgtatcctcattacacctgaattgtatggaagtgatggattcttcatcagtcaatttcgcaagatatcggattag

SEQ ID NO: 448 - DNA, 741 bp, Streptococcus pneumoniae
atggaaatttcattattaacagatgttggtcagaaacgaacaaataaccaagactatgtcaaccactatgtcaatagagctggacgtaccatgattattttagctgatgggatgggaggtcatcgtgcagggaatatcgctagtgaaatggcggtcacagacctgggtgtagcttgggttgatacccagatcgatacagtcaatgaagtgcgtgaatggttcgcccattacctagaaattgaaaatcaaaagattcaccagcttggtcaggatgaagcttacagaggcatgggaactactttggaagtccttgctattattgataatcaggctatctatgctcatattggtgattcgcgtatcggcttgattcgtggagaagaataccatcagttgacgagcgatcattccttggttaatgaattgctcaaggctggtcaattgacaccagaagaggcagaagctcatccgcaaaaaaatattatcacccagtctattgggcaaaaagatgaaattcagcctgattttgggacagttatccttgagtcaggtgactatctcttgctcaatagtgacggcttgaccaacatgatttcaggcagtgagattcgtgatattgtaaccagtgatattcctttagcagataaaacggagacacttgttcgttttgctaacaatgcaggaggtttagacaacattacggttgcccttgtttctatgaacgaggaggatgaagaatga

SEQ ID NO: 449 - DNA, 1980 bp, Streptococcus pneumoniae
atgatccaaatcggcaagatttttgccggacgctatcggattgtcaaacagattggtcgaggaggcatggcggatgtctacctagccaaagacttaatcttagatggggaagaagtggcagtgaaggttctgaggaccaactaccagacggacccgatagctgtagctcgttttcagcgtgaagcgagagctatggcagatctagaccatcctcatatcgttcggataacagatattggcgaggaagacggtcaacagtatcttgcaatggagtatgttgctggactagacctcaaacgctatatcaaggaacattatcctctttctaatgaagaagcagtccgtatcatgggacaaattctcttggctatgcgcttggcccatactcgaggaattgttcacagggacttgaaacctcaaaatatccttttgacaccagatgggacggccaaggtcacagactttgggattgctgtagcctttgcagagacaagtctgacccagactaactcgatgttgggctcagttcattacttgtcaccagagcaggcgcgtggttcgaaggcgactgtgcagagtgatatctatgccatggggattattttctatgagatgttgacaggccatatcccttatgacggggatagcgcggtgaccattgccctccagcatttccagaaacccctgccgtccgttattgcagaaaatccatctgtacctcaggctttagaaaatgttattatcaaggcaactgctaaaaagttgaccaatcgctaccgctcggtttcagagatgtatgtggacttgtctagtagcttgtcctacaatcgtagaaatgaaagtaagttaatctttgatgaaacgagcaaggcagataccaagaccttgccgaaggtttctcagagtaccttgacatctattcctaaggttcaagcgcagacagaacacaaatcaatcaaaaacccaagccaggctgtgacagaggaaacttaccaaccacaagcaccgaaaaaacatagatttaagatgcgttacctgattttgttggccagccttgtattggtggcagcttctcttatttggatactatccagaactcctgcaaccattgccattccagatgtggcaggtcagacagttgcagaggccaaggcaacgctcaaaaaagccaattttgagattggtgaggagaagacagaggctagtgaaaaggtggaagaagggcggattatccgtacagatcctggcgctggaactggtcgaaaagaaggaacgaaaatcaatctggttgtctcatcaggcaaacaatccttccaaattagtaattatgtcggccggaaatcttctgatgttatcgcggaattaaaagagaaaaaagttccagataatttgattaaaattgaggaagaagagtcgaatgagagtgaggctggaacggtcctgaagcaaagtctaccagaaggtacgacctatgacttgagcaaggcaactcaaattgttttgacagtagctaaaaaagctacgacgattcaattagggaactatattggacggaactctacagaagtaatctcagaactcaagcagaagaaggttcctgagaatttgattaagatagaggaagaagagtccagcgaaagcgaaccaggaacgattatgaaacaaagtccaggtgccggaacgacttatgatgtgagtaaacctactcaaattgtcttgacagtagctaaaaaagttacaagtgttgccatgccgagttacattggttccagcttggagtttactaagaacaatttgattcaaattgttgggattaaggaagctaatatagaagttgtagaagtgacgacagcgcctgcaggtagtgtagaaggcatggttgttgaacaaagtcctagagcaggtgaaaaggtagacctaaataagactagagtcaagatttcaatctacaaacctaaaacaacttcagctactccttaa

SEQ ID NO: 450 - DNA, 204 bp, Streptococcus pneumoniae
atggaagaatcaaaagaattaaatgccgtcattgatgtgattatgctagcggggactattctccttaaaagtggctcagaaatccatcgtgtagaagataccatgattcgaatcgcgattcgcaggggattgtggattgcaatgtccttgccatgcctgccgctatctttttctctattgaaaataccaatatttcgcgcatga

SEQ ID NO: 451 - DNA, 222 bp, Streptococcus pneumoniae
aagtggctcagaaatccatcgtgtagaagataccatgattcgaatcgcgattcgcaggggattgtggattgcaatgtccttgccatgcctgccgctatctttttctctattgaaaataccaatatttcgcgcatgaagcgcgtgacctcctcttcttataacatcgaaaaaagtctgcgatgtgaaccagatttctcgtcagctagttggggggcagattga

SEQ ID NO: 452 - DNA, 510 bp, Streptococcus pneumoniae
gtgaaccagatttctcgtcagctagttggggggcagattgacttagaaacagcctttaagcaattgacggccttgcaagctcaaccccttccctatactaagttgcaggtaactctggctgcgacctttagtgctcctttcttttcagttatgtttagcggaaatatctacgacgcacttggggcaggagtggcgaccttatttggttttgccttttccctctatgtggaaaaatttatccgaattccctttgtgacagcctttgctggagcctttgtctttgggataattgcccagttttgggctcgctacacaggttttccttcaacggcagatttgattatagctggtgcggtcatgccgtttgtaccaggtattgccttgaccaatgcggtccgtgatattatgaccaaccacataaactctggtatgagtaagatgtttgaatccctgctcattaccctcgctttaggggcaggaacttctgtcgccttggtattgatgaactaa

SEQ ID NO: 453 - DNA, 336 bp, Streptococcus pneumoniae
atgactgtctggctaatctatctcttgctcaaggaaccgaccaatgtcattgtagctaccttcattgcagccattattggttcttgtgtcagccagattttaagtattctttataagacacctgctgtggtctttatcttggccattttggcaccgctggttccaggttatctctcctaccgaacaactgccttttttgtgacaggggactataataaagcactggcaagtgggctcttggttgtcatgttggctctggtaatctctattggaatggctagcggatcagtgattctcagactctatcattatataaaaacacatcgagtatcgtag

SEQ ID NO: 454 - DNA, 201 bp, Streptococcus pneumoniae
gtgcgagaatatcgaacttatgaagaaattgcggctgattttggtatccacgaaagcaacttactccgtcggagccaatgggttgaagtaactcttgttcaaagtggtgttacgatttcaaaaactcatcttagtgctgagaatacggtgattgtggatgcaacagaggtaaaaataaatcgtcctaaaaaaatcaactag

SEQ ID NO: 455 - DNA, 390 bp, Streptococcus pneumoniae
atggaacctcaagcgattgtcaccagccaagaaagaattgtttctttgaatattgcggtgaactattgccacgatatgaagttgttcaaaatgagtcgcagaaatatcggacaagctggtaaaatcttggctgacagtggttatcaagggcccatgaagatatatcctcaagcacaaactccacgtaaatccagcaacctcaagccgctaatagctgaagataaagcctataaccatgcgctatctaaggagagaagcaaagttgagaacatctttgccaaagtaaaaacgtttaaaatgttttcaacaacctatcgaaatcatcgtaaacgcttcggattacgaatgaatttgattgttggtattatcaatcatgaactaggattctag

SEQ ID NO: 456 - DNA, 288 bp, Streptococcus pneumoniae
ttgtctgtaagtctactgaccttgttgtttatcccagtcatggtttctagttcgggctcagagtttcaaagtggatggcaagagcatcaattgattgctgagaaggttagtaaaacacttgacaagacatttgataaggatgtcagagaaattccgaccagtcagttttatcaaaaatttgtagatgagatgggaaggacttactcaggaaatttgatcctccaggagctgataactgtgaatggagcttataaagctacttatatcggtgaactctctagcaactaa

SEQ ID NO: 457 - DNA, 1173 bp, Streptococcus pneumoniae
atgacaatcggtattgataagattggttttgcgaccagtcaatatgtcttgaaattacaagacttagcagaagcgaggggaattgaccctgaaaaattaagtaaaggactcttactcaaggaattgagtattgcgcccctaactgaggacatcgtgaccttggcggccagtgctagtgactctattttaactgagcaagaaagacaagaagttgacatggtcattgtggctaccgagtcaggaattgaccagagtaaggctgcggccgtctttgtgcatggcttgctgggcatccagccctttgctcgtagtttcgagattaaagaagcctgctatggggcgacagctgccctccattatgccaaattgcatgtggaaaattctccggagtccaaggtattggtcattgccagtgatattgccaaatatggtattgaaactccgggagaaccaactcaaggtgctggaagtgtagctatgttgattacacaaaatccacgcatgatggcctttaataatgacaatgtagctcagacccgtgacatcatggatttctggcgaccaaattactcgacaactcctcatgtaaatggtgtctattctacccaacaatacttggatagtttgaaaacgacttggcttgaatatcaaaaacgctaccagcttactttggatgattttgctgctgtttgtttccacttgccttatcctaaattagcgctaaaaggcttgaaaaaaatcatggataagagcctgcctcaagagaaaaaagacctcttacaaaagcattttgaccagtctattctctacagtcaaaaggtggggaatatctacacaggttcacttttccttggacttttgtctctcttggaaaatacagatagcttgaaagctggggataaaatcgccctttatagttacggaagtggagctgtggctgagttcttcagtggtgaattggttgaaggatatgaagcttatttggataaagaccgcttgaacaagctcaaccaacgaactgccctatccgttgcagactatgaaaaggtcttttttgaggaagtaaacttggatgaaacaaactctgcccagtttgctggctatgaaaatcaagattttgccttggttgaaattcttgaccaccaacgccgttatagcaaggttgaaaaataa

SEQ ID NO: 458 - DNA, 1275 bp, Streptococcus pneumoniae
atgaagataagttggaatggattttctaaaaaatcataccaagagcgcctcgagctgctaaaagctcaggcgctccttagtcctgagagacaagctagtctggagaaggatgaacagatgagtgtgactgtggcagaccagctgagtgagaatgtggtgggaactttttctctgccttattcgctggttccggaggtacttgtcaacggtcaggaatacaccgttccctatgtgacagaagaaccctctgtggttgcggcggccagctatgccagcaaaatcatcaagcgtgcaggtggttttactgcacaagtccatcagcgccagatgattgggcaggtagccctttatcaaattgctaatcctaaactagcgcaagagaagattgccagcaagaaagcggagctcttggagcttgccaatcaagcctatccttctatcgttaaacgtgggggtggggcgcgtgatctgcatgtcgagcagataaaaggcgaaccagactttctcgttgtttatattcatgtcgatacccaggaagccatgggtgccaatatgctcaacaccatgctggaagccttgaaaccagtcttagaagaactcagtcagggacagagtctcatgggaatcctgtccaactacgcgactgattctctggtgactgcaagctgtcgcatcgcctttcgctacttgagccgccaaaaggatcaaggacgagagattgcggagaaaattgcgttggctagtcagtttgcgcaggctgatccttaccgagctgctactcataataaaggaatttttaatggtattgatgcgattttgattgccactggtaatgactggcgtgccatcgaagctggggcccatgcctttgccagtcgagatggacgctatcaaggtcttagctgctggacgctggaccttgaaagagaagaattggtcggtgagatgaccctgcccatgcctgtagcgactaagggtggctctatcggcctcaacccacgtgtagctctcagtcatgatctactaggaaatccttctgccagagaattagcccagattatcgtgtccatcggtcttgctcaaaattttgcagccctcaaagccttggtaagtacgggcatccagcaaggccacatgaaactacaggccaaatccctagctctcctagctggggctagtgaatctgaagttgctcccctagtagagcgcctcatctcagataaaacctttaacctagagacagcccagcgctatctcgaaaatttaagatcataa

SEQ ID NO: 459 - DNA, 966 bp, Streptococcus pneumoniae
atggtcgcaaaactaactgatgtcgccaaacttgcaggcgtcagtcctactaccgtttctcgggttatcaataaaaaagggtatctatctgagaaaaccatccaaaaagtcaatgaagccatgcgagaattgggctataaacccaacaacctggctcgtagtctgcaaggaaaatcagctaagttaatcggcttgattttccccaatatttccaatgttttctatgcagaattgattgataaattggaacaccaactcttcaaaaatggttacaagaccatcatctgcaacagtgaacatgattctgagaaggaacgtgaatacatcgaaatgttggaagccaatcaggtggacggcatcatttctggtagtcacaacctaggaatcgaagactacaatcgtgtgacagcgccgattatttcctttgaccgaaacctatcgccagacatccctgtcgtctcctctgacaactatgctggtggggttcttgctgcccaaaccttggtcaagacaggtgcccagtctatcatcatgattacagggaatgacaattccaattcgccaaccggactgcgccacgctggttttgcatccgtactcccaaaagctcctattatcaatgtttccagtgacttttctcccgtcagaaaagaaatggaaatcaagaatatcttgacccgggaaaaaccagatgccatttttgcttcggatgatttgacagctattctggtcattaaaatcgctcaagaattgggcatttctgtcccaaaagagctcaaggtcatcggctatgatgggacctactttatcgaaaattactaccctcaattggctactatcaagcaacctttggaagagattgcttgtctcactattgatcttctcttgcaaaagattgaaggcaaggaagtcgccacaactggttacttcttaccagttacgctattaccaggaaaaagtatttaa

SEQ ID NO: 460 - DNA, 1455 bp, Streptococcus pneumoniae
atggaatggacaactgagcgtcgttacagactttatcaagattggacgcaagaagaaattcaacatataaaggaaaatatggcacaatctccatggcatactcattaccatgttgagccaaaaacaggacttctcaacgacccaaatggcttttcttacttcgatggcaagtggatcctcttttaccagaattttccttttggtgcagcccacggtttaaaatcttgggcacagctagaaagtgatgatttggttcactttagagaaactggagtcaaagttttgccagatactccattagatagtcacggtgcctactctggttctgccatgcaatttggcgataacttattcctattttatacaggaaatgttcgcgatgaaaactggatccgtcacccataccaaatcggtgctttgatggacaaggagggtaagattacaaagattgacaagatcttgattgaccagccagcagactctactgaccacttccgcgatccacaaatttttaactttcagggtcaatattatgccattgtcggcggacaagacttggagaaaaaaggtttcgttcgtctctacaaggctgtcaataacgactacacaaactggcaagcagttggcgaccttgactttgctaacgaccgtactgcctacatgatggaatgtcctaatctggtctttgtagaggaacagcctgtccttctctactgtccacaaggattggataagaaagttctagactacgataatatctttccaaatatgtataagattggggcttcctttgaccctaaaaatgccaaaatggtagatgtgtctcaacttcaaaacatggattacggtttcgaagcctatgcaactcaagccttcaacgctcctgatgggcgtgctctagcagttagctggcttggtttgccagatgtttcttacccatctgaccgttttgaccaccaaggaaccttctctttggtcaaggaactcactatcaaagacgacaagctctaccagtatccagtcgctgctattaaggaccttcgtgcttctgaagaagccttctcaaaccgtttccaaaccaagaacacttacgaacttgaactcaacttggaagctaatagccagagcgagattgtcttacttgctgataaagaaggtaagggactttcaatcaactttgaccttgtaaacggtcaagtgacagtggatcgtagccaggctggagaacagtatgcccaagaatttgggacaactcgttcttgccctatcgagaatcaggctactactgctacaatcttcatcgataactctgtctttgaaattttcatcaataaaggagaaaaagtattttctggtcgtgtcttcccacatgcggaccaaaatggtatcctgatcaaatctggaaacccaactggaacttactatgaattagattatggtcgcaaaactaactga

SEQ ID NO: 461 - DNA, 231 bp, Streptococcus pneumoniae
ttggctcaacatggtaatgagtatgccatggagattgtgccatattttcctttatatgttgaatttcttcttgcgtccaatcttgataaagtctgtaacgacgctcagttgtccattccattcattcctccaaaaatcttatcacttttaatagtaactgttttcgataaaaaatgcaagccttttatattaaaaaagagaaaaaactgtcaaacgattatcatgaaataa

SEQ ID NO: 462 - DNA, 198 bp, Streptococcus pneumoniae
atgcaagccttttatattaaaaaagagaaaaaactgtcaaacgattatcatgaaataaatacaggaaatcaatcaaatttttacgaaaatgtgaaagataatgaaataaaatactttttaaccaaggtttcaaacttatttttcaaggaattcctgatgaaacagtcaaaaacaatcaatctaaaacttgcccactaa

SEQ ID NO: 463 - DNA, 1884 bp, Streptococcus pneumoniae
atgaacaatcaggaaattgcaaaaaaagtcatcgatgccttgggcggacgtgaaaatgtcaatagtgttgcccactgtgcgactcgtctacgtgtcatggtcaaagatgaagagaaaatcaataaagaagtgattgagaacttggaaaaagttcaaggtgctttctttaactcagggcaataccaaattatctttggtacaggtacagttaacaaaatgtacgatgaagttgttgtacttggcttaccaacatcatctaaggatgacatgaaagcagaagttgctaaacaagggaactggttccaacgtgctatccgtactttcggtgatgttttcgttccaatcatcccagttatcgtagcgacaggtctcttcatgggtgtgcgtggtcttttcaacgctcttgaaatgccacttccaggtgactttgcaacttacacacaaatcttgacagatacagccttcatcatcttgccaggtttggttgtgtggtcaaccttccgtgtatttggtggaaatcctgccgttggtatcgttcttggtatgatgcttgtctctggctcacttccaaacgcttgggcagttgctcaaggtggtgaagtaacagcgatgaacttctttggtttcatccctgttgttggtttgcaaggttccgttcttccagccttcatcatcggggttgtcggagctaaatttgaaaaagctgtccgcaaggttgttccagatgtcattgacctcttggtaacaccattcgtgacacttttggtcatgtctatccttggactctttgtcattggaccagttttccacgttgttgaaaactacatccttattgctacaaaagcgattcttagcattccatttggtcttggtggtttcttgattggtggggttcaccaattgatcgtcgtgtcaggtgtgcaccacatcttcaacttgcttgaagtgcaattacttgctgctgaccatgctaacccattcaacgctatcatcacagctgctatgacagctcaaggtgctgctactgttgcggttggtgttaaaacaaaaaatccaaaactgaaaacacttgctttcccggctgctctttctgccttcctaggtattacagagcctgctatcttcggggtgaacttgcgcttccgtaaaccattcttcctttcattgattgctggtgcaatcggtggtggattggcttctatccttggacttgctggtactggtaatggtatcaccatcatccctggtacaatgctttatgttggtaacggacaacttccacaataccttcttatggtagctgtatcatttgcccttggttttgctcttacttacatgtttggttacgaagatgaagtagacgcaactgcagctgcaaaacaagctgaagtggctgaagaaaaagaagaagttgcgccagcagctcttcaaaatgaaacacttgtaactcctatcgtcggtgatgttgtcgctcttgctgatgtcaatgacccagtcttctcaagtggagctatgggacaaggtatcgctgtgaaaccaagccaaggcgtggtctatgcaccagctgatgctgaagtttcaattgcctttccaacagggcacgcttttggtttgaaaacaagaaatggtgctgaagttttgattcacgttggtattgacactgtatctatgaacggtgacggttttgaagcaaaagttgctcaaggtaataaggtgaaagctggcgatgttcttggaacatttgactcaaacaaaatcgctgcagctggacttgatgatacaacaatggttatcgttacaaatacagctgactacgcttcagtagctccagtcgcaacaggttcagttgcgaagggggatgctgtgatcgaagtgaaaatctaa

SEQ ID NO: 464 - DNA, 888 bp, Streptococcus pneumoniae
atgacaaaattatatggaagcttggaagcgggcggtacaaagtttgtctgtgctgtcggtgatgaaaactttaacgttgtagaaaaaacacaatttccaacaacaactccaatcgaaacaatcgataaaaccattgagttcttctcaaaattcgataacctttctggtcttgcagttggttcatttgggccgattgatattgacaaaaactcaaaaacttatggctttatcacgacgactccaaaaccaaactgggcaaatgtggacttgcttggtgcctttcgtcgcgccctaaacgtgccaatgtacttcacaacagacgtaaacagctctgcttacggtgaaatggttgcccgtaacaatgctggtggtcgtatcgaaaacttggtttactacacaatcggtacaggtatcggtgcaggcgtcatccaacgtggtgagtttatcggtggtgtgggtcaccctgaaatgggtcattattatgttgctagacacccaatggatattgaaaaagagtttaagggtgtttgtcctttccataagggatgtctagaaggttatgcagctggtccaagtttggaagctcgtacaggtgtacgtggggaaaatattgaactcaacaaccctgtttgggatgttcaagcctactatatcgctcaagctgcggttaatgcgacagtgactttccgcccagacgtgattgtctttggtggaggggtcatggctcaacaacatatgctggaccgtgtccgtgagaaatttacatctcttcttaatggttacctaccagtaccagatgtgcgtgactatatcgtgacgccagcagtcgcaggaaatggttctgccacacttgggaactttgttcttgcaaaagaagtttcaaaataa

SEQ ID NO: 465 - DNA, 213 bp, Streptococcus pneumoniae
gtgtcaaagcatttgccagaaaaagtcaataatataggtcagaccgtaggtataaaccacgagggtaaagggtttggtcagaatgatgatggtcatgtagcgcttgaaactcatcttggtcagggcagccagcatacagagaaagtcagctgggctaatgggccaaatcatcataaaaataaagaagcggtcaaaacgattgcccttatctag

SEQ ID NO: 466 - DNA, 600 bp, Streptococcus pneumoniae
atgaaagctgtttctccccttctgcagcgagttatcaatatctcatcgattgtcggtggggttgggagtttgattttctgtatttgggcttatcaggctgggattttacaatccaaggaaaccctctctgcctttatccagcaggcaggcatctggggtccacctctctttatctttttacagattttacagactgtcgtccctatcattccaggggccttgacctcggtggctggggtctttatctacgggcacatcatcgggactatctacaactatatcggcatcgtgattggctgtgccattatcttttatctagtgcgcctatacggagctgcctttgtccagtctgtcgtcagcaagcgcacctacgacaagtacatcggctggctagataagggcaatcgttttgaccgcttctttatttttatgatgatttggcccattagcccagctgactttctctgtatgctggctgccctgaccaagatgagtttcaagcgctacatgaccatcatcattctgaccaaaccctttaccctcgtggtttatacctacggtctgacctatattattgactttttctggcaaatgctttga

SEQ ID NO: 467 - DNA, 225 bp, Streptococcus pneumoniae
tttcaatctattatatctattatgcacaccactataggatctaataaaaatcacaacaagttcattcatagatggttacctcagggaactaagaaaacgactacaaaggaagtcgcattcatcgaaaagtggattaacaactatcctaaaaaatgcttgaactacaagtcccccagagaagacttctggatgactaacttgaacttgaaatttagcaataattaa

SEQ ID NO: 468 - DNA, 252 bp, Streptococcus pneumoniae
ttgtccatttttagaagactattgctgtgtaaaatatggcctggagcacttttatactcaatgaaaatcaaagagcaaactaggaagctagccgtagactgctcaaagtacagctttgaggttgcagataaaactgacgaagtcagctcaaaacactgttttgaggttgtagatagaactgacgaagtcagtaactatatctacggcaaggcgaagctgacgtggtttgaagagattttcgaagagtattag

SEQ ID NO: 469 - DNA, 228 bp, Streptococcus pneumoniae
ttactgacttcgtcagttctatctacaacctcaaaacagtgttttgagctgacttcgtcagttttatctgcaacctcaaagctgtactttgagcagtctacggctagcttcctagtttgctctttgattttcattgagtataaaagtgctccaggccatattttacacagcaatagtcttctaaaaatggacaaaaaacattgtaaaggctatcaaaaaggagtataa

SEQ ID NO: 470 - DNA, 894 bp, Streptococcus pneumoniae
atgctagaagtaagaagtctagagaaaagttttggatccaagcaagttttgtttggtattgactttcaagcgcgaccaggtcgtattttgggactagtcggaaaaaatggtgctggaaaaacaacgattttccatagtattttaaaattcctagaatatcagggagaaatcggtctggatggtcaggatattcgtcaggagacctatgctcggattggttatctgcctgaagaacgcagtctcatgcctaaattgacagttcttgaacaagttcgctacttggcgactctaaaaggcatggatgccaaagaagtcaaagaaaaactccctcaatggatgaagaggttggaagtaaaaggaaagctgacagataaaatcaagagtctgtcaaaaggaaatcagcagaagattcagctcattattactctgattcatgaaccagacctgattatcttggatgagccttttagtggattggacccagttaatacagaattgctcaaacaagtcatttttcaggaaaaagagcgcggagcaaccattatcttttctgaccatgtcatgaccaatgttgaggaactttgtgacgatattctgatgatccgagatggccgtgtggtcttgcacggaccagttcaggatgtccgcaatcaatacgggaaaacgcgtctctttgtttcaagtgaacgaagcaaggaagaattggaaaatcttcctcatgtcaaacaggtgagcttgaccaaacaaggtagttggaaattgattttggaggatgagagcgctggaagggaactcttcccaatcttgactcaaggtcaatatatcgcaacatttgaccaacaagcgccaactatcgatgaaatctttaaactagaatcaggagtggaagtatga

SEQ ID NO: 471 - DNA, 1200 bp, Streptococcus pneumoniae
atgagaaatatgtgggttgtaatcaaggaaacctatcttcgacatgtcaagtcatggagtttcttctttatggtgatttcgccgttcctctttttaggaatctctgtaggaattgggcatatccaaggttcttctatggctaaaaataataaagtggcagtagtgacaacagtgccatctgtagcagaaggactgaagaatgtaaatggtgttaacttcgactataaagacgaagcaagtgccaaagaagcaattaaagaagaaaaattaaaaggttatttgaccattgatcaagaagatagtgttctaaaggcagtttatcatggcgaaacatcgcttgaaaatggaattaaatttgaggttacaggtacactcaatgaactgcaaaatcagcttaatcgttcaactgcttccttgtctcaagagcaggaaaaacgcttagcgcagacaattcaattcacagaaaagattgatgaagccaaggaaaataaaaagtttattcaaacaattgcagcaggtgccttaggattctttctttatatgattctgattacctatgcgggtgtaacagctcaggaagttgccagtgaaaaaggcaccaaaattatggaagtcgttttttctagcataagggcaagtcactatttctatgcgcggatgatggctctgtttctagtgattttaacgcatattgggatctatgttgtaggtggtctggctgccgttttgctctttaaagatttgccattcttggctcagtctggtattttggttcacttgggagatgctatctcactgaataccctgctctttattttgatcagtcttttcatgtacgtagtcttggcagccttcctaggatctatggcttctcgtcctgaggactcagggaaagcattgtcgcctttgatgattttgattatgggtggtttttttggagtgacagctctaggtgcagctggtgacaatctcctcttgaagattggttcttatattccctttatttcgaccttctttatgccgtttcgaacgattaatgactatgcggggggagcagaagcatggatttcacttgctattacagtgatttttgcggtggtagcaacaggatttatcggacgcatgtatgctagtctcgttcttcaaacggatgatttagggatttggaaaacctttaaacgtgccttatcttataaatag

SEQ ID NO: 472 - DNA, 168 bp, Streptococcus pneumoniae
ttgttctatgagtatgttacatatctaggtaaaaattatttaaagcaaattaaccttatttctcaagatgtagtaggttccgagataaaagatagctatgaatatgagttctttaacaatggctatacctgctcccatatagaaatggtcattgagtcctaccagtga

SEQ ID NO: 473 - DNA, 849 bp, Streptococcus pneumoniae
atgatattcgctacgagtcaggtgaatccattgaccaactcttccgtcaggaatttaaggcctaagcaaaggagattatttatgttttggaatttagttcactacgaatttaaaaatgttaacaagtggtatttagccctctacgcagccgtgctagtcctttctgccctcatcggaatacagacacaaggctttaaaaatctaccttaccaagaaagtcaggctactatgctactttttctagctacagtctttggtggcttgatgcttacacttgcgatttcaaccattttcttgattattaaacgcttcaaaggtagtgtctacgaccgacaaggctatctgactttgaccttgccagtttctgaacaccatatcatcacagccaaactaatcggtgcctttatctggtcattgattagcaccgctgtattggctctaagtgctgttattattctggctttaacagctccagaatggattcctctttcttatgtgattacatttgtagaaacacatctccctcagatctttcttacaggtatatccttcctactaaataccatttcaggaatcctctgcatctacctggctatttccattggacagcttttcaatgaataccgtacagcactcgctgttgcagcctacattggtatccaaatcgtcattggatttattgaacttttcttcaatcttagttctaatttctatgtcaattcactggtaggactcaatgaccatttctatatgggagcaggtatagccattgttaaagaactcatattcatagctatcttttatctcggaacctactacatcttgagaaataaggttaatttgctttaa

SEQ ID NO: 474 - DNA, 723 bp, Streptococcus pneumoniae
gtgattatattaaaggagtttaagcctatgtcattactagcatttgaaaatgtatccaaatcatatggagcaacaccagcccttgaaaatgtttctcttgacattccagctggaaaaattgtcggccttcttgggccaaacggctcaggaaaaacaaccctgattaaactaattaatggcctcttacaaccagatcaaggacgtgtcctcatcaacgacatggacccaagcccagcaaccaaggccgttgtagcttatttgcctgatacgacctatctcaatgagcaaatgaaggtcaaagaagccctaacctacttcaagaccttctataaagatttcaatcttgaacgcgcccatcatctacttgcagacctgggcattgatgaaaatagtcgtctcaagaaactatcaaaaggaaacaaagaaaaggttcaactgattttggttatgagccgtgatgctcgtctctatgttttggatgaacccattggtggggtggatccagcagcccgtgcttatatcctcaataccattatcaacaactactcaccaacttctaccgttttgatttctacccacttgatttctgatatcgagccaatcttggatgaaattgtcttcctaaaagacggaaaagtcgtccgtcaaggaaatgtagatgatattcgctacgagtcaggtgaatccattgaccaactcttccgtcaggaatttaaggcctaa

SEQ ID NO: 475 - DNA, 210 bp, Streptococcus pneumoniae
tctggttgtaagaggccattaattagtttaatcagggttgtttttcctgagccgtttggcccaagaaggccgacaatttttccagctggaatgtcaagagaaacattttcaagggctggtgttgctccatatgatttggatacattttcaaatgctagtaatgacataggcttaaactcctttaatataatcactgactacgcctggtag

SEQ ID NO: 476 - DNA, 366 bp, Streptococcus pneumoniae
atgtcctggacatttgacaacaaaaaacccatctatttacagattatggagaaaatcaagcttcagattgtttcccatacactggaacccaatcaacaacttccaaccgtgagggagctagctagcgaggctggtgtcaatcccaataccatccaaagagccttatcagaccttgaacgagaaggatttgtctacagcaagcgaacaactggacgatttgtgactaaggataaggagctaatcgctcagtcacgcaaacaattatcagaagaagaattggaacacttcgtttcctccatgacccattttggctatgaaaaagaagaactaccaggcgtagtcagtgattatattaaaggagtttaa

SEQ ID NO: 477 - DNA, 474 bp, Streptococcus pneumoniae
atgcgttgtccaaaatgtggggctaccaagtcaagtgttatcgatagtcgccaagcagaagaagggaacaccattcgtagaagacgagagtgcgacgagtgccaacaccgttttacaacctacgaacgagtagaagaaagaaccttagtggttgttaaaaaagatggcacacgggaacaattctccagagataaaatctttaatgggattatccgctcagcccagaaacgtcctgtgtcaagtgatgaaatcaacatggtagtcaatcgtatcgaacagaaactccgtggtcgaaatgaaaatgaaattcaaagtgaggacattggttcactcgtcatggaggagttggctgaattggacgagattacctatgtacgttttgctagtgtctatcgtagttttaaggatgtcagtgagttagagagcttgctccaacaaatcacccagtcctctaaaaagaaaaaggaaagataa

SEQ ID NO: 478 - DNA, 1170 bp, Streptococcus pneumoniae
atgaagccaattgaccgtttttcttatctaaagaataatcgggtgtcgcaagatacctcatctctggtacagtgctacctcccgattatcggtcaggaggcactgagcctttatctttatacgattagtttttgggataatggtagaaaggaatatcttttttcaagtatcctcaatcatctcaactttgggatggatagactgataaaatcattgaaaatcttatctgcttttaatctcttgactctctatcaaaagggggatgtttatcagctagccctccatgctcctctatctagtcaagacttcttggggcatcctgtttatcgcagactcttagagaaaaagattggcgatgtagctgtggaggatttgaaagttgaaagtgctgatggtgaagaaatacctgtctcactcaatcaagtctttccagaattggcagaactaggcagtcaagaataccttggtctcaagaagaaagtggccaacgattttgacttggaccattttcgtcagcttatggctcgagatggacttcgctttgcggatgagcagtccgatgtcttaaacctctttgccattgccgaggagaagaaatggacttggtttgaaacctatcaattggccaagtcaacagctgtttctcaggttatttcaaccaaacgcatgcgtgaaaaaattgctcaaaaaccagtttcctctgactttagtcttaaggaagcgatcattatcaaagaagccaaaagtaaaactgccctgcagttcttggcagaaatcaagcaaacacgcaagggaaccattacccaaacagaaagagaactcttgcaacagatggctggcttgggtttgctggacgaagtcatcaatatcattcttttattgacctttaataaggtcgattcggcaaatatcaatgagaaatatgccatgaaggtagccaatgactatgcctatcaaaagattcattcggcagaagaggcagtcttgcgcatccgtgagcgaggacagaaagcaaaaacacaaaaacagaatcagactgccccagcaaaaaccaatattcctaaatggagtaatcctgaatataaaaatacgtcatccgctgaggaattagaagagatggaacgccaaaccctagaattattagcaaaattagataacggaggtgattag

SEQ ID NO: 479 - DNA, 897 bp, Streptococcus pneumoniae
atggaaagtgtcggagatgtactcaaacgtcaaccaagtcgttttcactatcaagatttagttcagaaaatcatgaaggatcctgatgttgcggcctttgtccagcaagaatccctcaatcaggacgagttgaaccgtagtatttccaagtttaaccaatacatcactgagagagataaattcctccgaggagatacagattatattgccaaaggctacaagcctatattagtcatgaaccatggctatgcggatgtttcttatgaagaaactcctgaactaatcgcagctgaaaaagaagcggctatcaagaaacgtctcaacttaattaattttccatctagcctgaaaaatgtcagttttttagatgtttatcgtgatgatgttcagcgcttaactgttctaaaaagaatgatagaatttgttaacgattaccccaataatttgaaaggtctttacttgtatggagactttggtgtgggtaaaagtttcatggtggctgccctagctcatgatttatcagaaaaacgtggtgtatcatccactctcctccactatcctagctttgtcattgatgtcaaaaatgctatcagtgatggcaatgttaagaccttagtggatgagattaagctttctgaagtcctgattttagatgatattggtgccgagcaatccaccacttgggtgcgtgatgaaatcctgcaggtcattctccaatatcggatgcaggaaaatttaccgacctttttcacctctaacttcaactttgaagatttggagaagcatttcgctaaagggaaaaatggaaatgacgaaacctgggaagccagacgcgtcatggaacgcatccgttatttggctgaggagactcgtttagaaggagtaaaccgtcgatga

SEQ ID NO: 480 - DNA, 714 bp, Streptococcus pneumoniae
atgacagaaaccattaaattgatgaaggctcatacttcagtgcgcagatttaaggagcaagtccttcctcaggaagatttgactgaaatcctgacagcagcccagatggcatcatcttggaagaatttccaatcctactctgtgattgtggtacgaagccaagagaagaaagatgccttgtatgaattggtacctcaagaagccattcgccagtctgctgttttccttctctttgtcggagatttgaaccgagcagaaaagggagcccgacttcataccgacaccttccaaccccaaggtgtggaaggtctcttgattagttcggtcgatgcagctcttgctggacaaaatgccttgttggcagctgaaagcttgggctatggtggtgtgattatcggtttggttcgatacaagtctgaagaagtggcagagctctttaacctacctgactacacctattctgtctttgggatggcactgggtgtgccaaatcaaactcatgatgtgaaaccgagactgccactagataatgtagtctttgaggaagaataccaagaacagtcaactgaggcaatccaagcttatgaccgtgtgcaggctgactatgctggagcgcgtgcgaccacaagctggagtcagcgtctagcagaacagtttggccaagcagaaccaagctcaactagaaaaaatcttaaacagaagaagttattgtag

SEQ ID NO: 481 - DNA, 1311 bp, Streptococcus pneumoniae
atggccctaccaactattgccattgtaggacgtcccaatgttgggaaatcaaccctatttaatcggatcgctggtgagcgaatctccattgtagaagatgtcgaaggagtgacacgtgaccgtatctatgcaacgggtgagtggctcaatcgctcttttagtatgattgatacaggaggaatcgacgatgtagatgctcctttcatggaacaaatcaagcaccaggcagaaattgccatggaagaagcagatgttatcgtttttgtcgtgtctggtaaggaaggaattactgatgcagacgaatacgtagctcgtaagctttataagacccacaaaccagttatcctcgcagtcaacaaggtggacaaccctgagatgagaaatgatatctatgatttctatgctctcggtttgggtgaaccactgcctatctcatctgtccatggaatcggtacaggggatgtactagatgctatcgtagaaaatcttccaaatgaatatgaggaagaaaatccagatgtcattaagtttagcctgattggtcgtccaaacgttggaaaatcaagcttgatcaatgctatcttgggcgaagaccgtgttattgccagtcctgttgctggaacaactcgtgacgctattgatacccactttacagatacagatggtcaagagtttaccatgattgatacggctggtatgcgtaagtctggtaaggtttatgaaaatactgagaagtactctgtcatgcgtgccatgcgtgctattgaccgttcagatgtggtcttaatggtcatcaatgcggaagaggggattcgtgaatacgacaagcgtatcgctggatttgctcatgaagctggtaaagggatgattatcgtggtcaacaagtgggatacgcttgaaaaagataaccacactatgaaaaactgggaagaagatatccgtgagcagttccaatacctgccttacgcaccgattatctttgtatcagctttaaccaagcaacgtctccacaaacttcctgggatgattaagcaaatcagcgaaagtcaaaatacacgtattccatcagctgtcttgaacgatgtcatcatggatgccattgccatcaacccaacaccgacagacaaaggaaaacgtctcaagattttctatgcgacccaagtggcaaccaaaccaccaacctttgttatctttgtcaacgaagaagaactcatgcacttttcttacctacgtttcttggaaaatcaaatccgcaaggcctttgtctttgagggaacaccgattcatctcatcgcaagaaagcgtaaataa

SEQ ID NO: 482 - DNA, 345 bp, Streptococcus pneumoniae
atgtcggtgatggaacatttgtttaaattcttacttttagcaccgtacttttattttgataactggattgaaaaggccaacagaaatagtaagttttttccaattttttattatttttactggatttacatccccttctattctctttttagccttgcttggacagttgtttcagttctgtttttcaataccgtcttgagaaatgtgacagatatcaagttatggggcatttggtttctttttattctgctagctattggtatgaattggttaacttattcctgtttcaaagaaatgtttcgcttgagacaggaactagggaagtctaagggtggaaggcattga

SEQ ID NO: 483 - DNA, 354 bp, Streptococcus pneumoniae
gtgatggaacacttgtttaaaatgataatcttattaccctgtttttactttttcagctggattgacaaggataatagagaaagtaaatttttcccaattttttactatttttactggatttacatcaccctctatgctctttttagccttgcttggacagttttttcagttctgtttttcaatatcgtcttgagaaatttgacagatatcaagttatggggtatttggctattattactacttatcgcttttgctagtgactggttagactatatctgtttcaaaaaaatgcttgacttgagacgggaactagggaagtctaaaggtgtgcataaaggaaggtgtaggaactaa

SEQ ID NO: 484 - DNA, 192 bp, Streptococcus pneumoniae
ttgattcgttcacattctattacaatctactataataaaatgatgagagttattacaaattataggtttgaaaaatcattaatttctttttcgagtattttaactaatgcctcttctttggttagtcgtaataaagttattcctttatcaatcaaatcggagttatgttgtagtattcccaagcgtacttga

SEQ ID NO: 485 - DNA, 852 bp, Streptococcus pneumoniae
atgagatgggattatggacagatttttaaagaaattcgaaagtcaaaaggattgacccaacaagatgtatgtggacaagtcatacatcggacaactctaacaaatattgaacacggtaaagttattcccagttttgaaaacatggtatttcttcttgaacaaattgatatgagcttggcagaattcaagtatatatgcaacgaataccatcctagtaaaaggcgagatattattgtagagagccaaaatccgtctacttttcaagatactagaaaaatggttgaactcactgagaaatgtcaaaaatatcttaagacacatcacgatgttcctattcaaaatatctatcgtcatacaaaaattgtcacagagttacgaactaaaggattcaaaaacaaccacgtcttgaaagatttgtctgaagaaatttgggactatcttgaacctatggatacatggtacattagtgatttgaaattgcttggaaccattctctttttctttccttctgaaaatcttccccttcttattgatagaattatgaaaaccatcgagaaatataaatacttccgagaaacaaaagtatttttatcatcttttttagccaatctctccactgtatattttcaacatcatttattcaaagaatgtgaaacaatcaccctacaacttttggtattagcagaagaattaaaaatatacgatattcttggattctctcaagtacgcttgggaatactacaacataactccgatttgattgataaaggaataactttattacgactaaccaaagaagaggcattagttaaaatactcgaaaaagaaattaatgatttttcaaacctataa

SEQ ID NO: 486 - DNA, 393 bp, Streptococcus pneumoniae
atgaaaactaagaaattattgaaaatggttattcctgttttaatgataagtgctgttggaactactttcgtagaagcaaatcagataggtgcttttagtaattttgttattactaccagttataagagaacaggttatttgactaaagaaaatgaaggtgcggaatatatcatgaacttaaatccttgtagaaatttacatcccatgactgttaagcatcgtatagtaaattctaatggagaagctcgtagtggagaatcgttaacaacctgtggtactcgttcaactcatggtaattgggcaacggttggctatgtttatgcagcagatatggcaagacaaaattggtgggatttatcagctgccatttcaggtagttggtcaccaaattaa

SEQ ID NO: 487 - DNA, 792 bp, Streptococcus pneumoniae
atgaagattcctctcttaacttttgcaaggcataaatttgtttatgtcttgcttactttgctttttcttgctttggtttatcgtgatgttttgatgacttatttcttttttgatattcatgcgcccgatctagctaaattcgatggacaagcaattaaaaatgacttattaaaatcagcattagattttcgtattctccagttcaatctaggtttttatcaatcatttattattccaatcatcattgttttgctaggttttcaatatattgagctgaaaaataaagttttacgattgagtattggaagagaagtgagctatcaagggttaaaaagaaagttgactttgcaagttgcaagtatcccttgtttgatatatttagtgactgtgctgataattgcaattataacctatttccttgggactttttctcctcttggatggaattctctattttctgatggaagtggtttacaaagactcctagatggagagataaaaagctatttgttctttacttgtgtcctactaatcggtattttcatcaatgcaatctattttttacaaatagttgattatgtggggaatgtgactcgttcggcaatcacctatttgatgtttctttggcttggttctatgctgctctatagtgccttgccttactatatggttcctatgacgagtttgatgcaagctagctatggggatgtaagtttgatgaaactctttactccttatatcctttatattgtcccttatatggtgcttgaaaaatatgaagataatgtttaa

SEQ ID NO: 488 - DNA, 678 bp, Streptococcus pneumoniae
ttgtcccttatatggtgcttgaaaaatatgaagataatgtttaagaattttaacaatattttgctaaagagaaagattgttttactacttcgtatagttctgatgatgattttgataaactatctattgtcaacagcggttcaaaagcaggatgctgttatctttttcaagagagaattgatttcaattttttcctataatgactattctgaagcgaatttagaaatccccaaactcttgttaaacctttcgcttttcatggtaggatggctctctgtcattttacttgaaagtgatttggcagaccattaccatcacttgattcgctatcaatcaagctcctttttcgattatacaaggaaacgattggttgtcatttctaaattttttactcaagatttacttgtctggttccttggtttacttccgctaggaattcatttcaaaacagtcgcacttttctttttacttgctcagttaatgatgttgtacttactactgtcttatctgatagcactgattagtgcgggcgctggtttttccttttttctctattttttagcatttgtgggacaagaatggatgatggatcatattgtaacagtgtatttactactcttaagcttattagttatgttgattgttagtcgcttggaagagaaatttaagaaaggataa

SEQ ID NO: 489 - DNA, 633 bp, Streptococcus pneumoniae
atgaaacttgaaattataaatggacagaaaatttatgggaaaagacctattttaaatcagttgaatttggtgtttcaatcaggaaaaatttatggacttaaaggtgataatggatctggcaagacggttcttttaaaggtacttgctggttatattaagcttgacaaaggaaaagttcttcaagatggtaaagtttacgggataaaaaatcattatattcaggatgcaggaattttaattgaaaaagtcgagtttttatctcatttatccctgagagaaaatttggaactgttaaggtatttttcatctaaagttacggaaaaaagaattgcctattggattcaatactatgatttacaggaatttgaagacgttgaataccggcatttatccttgggaacaaagcaaaaaatggccttgattcaagcctttatttcctctccttctatactctttctcgatgaacctatgaatgctttggatgagaagagtgtgaggttaaccaaacaggtcattttatcttacctgaaaaaagaaaatggtctggttatcctgacgtcgcacatatcggaagatatttcagacctttgtacagatgtattagttgtcgaaaatggacatatacaaatgtaa

SEQ ID NO: 490 - DNA, 288 bp, Streptococcus pneumoniae
atggcacatctaaaatcatttattacacgctattccaaggtttatattggtttagttctgctgatctggctgtctttcttctttatcccttgggataaaccacttctggggataaggattgacatcttcatcatacagaaaatcttgctagcttttggaattctgtccattctcatggccttgctgtccaagaaagtcagtctctttgtttttgaactgatttgctgtctttctctttggattaacttatttatcacatttgccattttgccgatttttggcaattaa

SEQ ID NO: 491 - DNA, 2514 bp, Streptococcus pneumoniae
atggctaatattttaaaaacaattatcgaaaatgataaaggagaaatccgtcgtctggaaaagatggctgacaaggttttcaaatacgaagaccaaatggctgctttgactgacgaccaactaaaagcaaaaacagttgaatttaaggaacgttatcaaaatggagaatcactggattcattgctttacgaagcatttgcggttgtccgtgaaggtgccaaacgtgtcctaggtctcttcccttataaggttcaggtcatgggggggattgttcttcaccatggtgacgtgccagagatgcgtacaggggaagggaaaaccttgactgcgaccatgccggtatacctcaatgccctttcaggtaaaggggttcacgtagttacggttaatgaatacctgtcagaacgtgacgcgactgagatgggtgaattgtactcttggcttggtttgtcagtagggattaacttggctaccaaatctccaatggagaaaaaagaagcctatgagtgtgatattacttactcaactaactcagaaatcggatttgactaccttcgtgacaacatggtcgttcgcgctgaaaacatggtacaacgtccgcttaactatgccttggtcgatgaggttgactctatcttgattgacgaggctcgtacacctttgattgtatcaggtgccaatgcggttgaaaccagtcagttgtatcacatggcagaccactatgtaaaatctttgaacaaagatgactacatcatcgatgtgcagtctaagactattggtttgtctgattcagggattgacagggctgaaagctacttcaaacttgaaaacctctatgacatcgaaaacgtggctttgacccactttatcgataacgcccttcgtgccaactacatcatgcttctcgatattgactatgtggtgagcgaagagcaagaaatcttgattgtcgaccaatttacaggtcgtaccatggaaggtcgtcgttattctgatggattgcaccaagctattgaagccaaagaaggtgtgccaatccaggatgaaaccaagacatctgcctcaatcacgtaccaaaaccttttccgtatgtacaaaaaattgtctggtatgacgggtacaggtaagactgaggaagaagaatttcgtgaaatctacaacattcgtgttattccaatcccaacaaaccgtcctgttcaacgtattgaccactcagaccttctttatgcaagtatcgaatctaagtttaaagcggttgtcgaagacgttaaggctcgttaccaaaagggtcaacctgtcttggttggtacagtagcggttgaaactagtgactacatttctaagaaattggttgcagctggtgttcctcacgaagtcttgaatgccaaaaaccactatagagaagcccaaatcatcatgaatgctggtcaacgtggtgccgttaccatcgcaaccaacatggcgggtcgtggtaccgacatcaagcttggtgaaggtgttcgtgaacttggaggactttgtgttattggtacagaacgtcatgaaagtcgtcgtatcgataaccagcttcgtggacgttcaggtcgtcaaggagatccaggtgagtcacaattctacctatctcttgaagatgatttgatgaaacgttttggttctgaacgcttgaagggaatctttgaacgtctcaacatgtctgaagaggcgattgagtctcgcatgttgacgcgtcaggttgaagcagcgcaaaaacgtgtcgaaggaaataactacgatacccgtaaacaagtccttcaatacgacgatgtcatgcgtgaacaacgtgagattatctatactcaacgttatgatgtcattactgcagaccgtgacttggcacctgaaattcaggcaatgatcaaacgcacgattggtcgtgtcgttgacggtcatgcgcgtgctaaacaagatgagaaactagaggcaattttgaacttcgctaagtacaacttgcttcctgaagattctattacgatggaagacttgtcaggcttgtctgataaggccatcaaggaagagcttttccaacgtgccttgaaggtttacgatagtcaggtttcaaaactacgcgatgaagaagcagttaaagaattccaaaaagttttgattctacgagtggtggataacaagtggacagatcatatcgatgcccttgatcaattgcgtaacgcggttggacttcgtggctatgctcagaacaaccctgttgttgagtatcaggcagaaggtttccgtatgtttaatgatatgattggttcgattgagtttgatgtgacacgcttgatgatgaaagcacaaattcatgaacaagaaagaccacaggcagaacgtcatatcagtacaacagcgactcgcaatatcgctgctcaccaagcaagtatgccagaagatttggatttgagccagattggacgcaatgaactttgcccatgtggttctggtaagaaatttaaaaactgtcacggtaaaagacaataa

SEQ ID NO: 492 - DNA, 1032 bp, Streptococcus pneumoniae
atggtatttacagcaaaaagctctaaaataaatatagaagaagttcgtgccttgtcaaaattagaaggtcaggctttggagaggaaatcacagcgagatcaagagctagaagccattatacgtggagaagaccagcgaattctcttggtaatcgggccatgctcatctgacaatgaagaagctgtccttgaatacgctaagcgtttggcagtcctacaagaagaagtggcagatcgtatctttatggttatgcgtgtttatactgccaaaccccgtaccaacggagatggctataagggcttgattcaccagcctaacgcgacagaagcgcctagtcttatcaatggaatcaaagccgttcgccatcttcactatcgtgtcatcacagaaacagggatgacaactgctgatgaaatgctttatcctgaaaaccttccgcttgtagatgatttgatttcttacatggcagttggtgcccgttcagttgaagaccagcaacaccgctttgtggcaagtggggcaggattttctactggttttaaaaatccaacctctggaaatctcaatgtcatgtttaatgggatttatgctgctcaaaacaaacaaagtttccttttcttaggaaaagaagtagaaacaactgggaacccgctttcacacgctattcttcgtggtgctcttaatgagtatggaaaaaatattcccaactactattatgacaatttaattgataccattgcccagtatgagaaaatgggcttggaaaatccttttatcatcattgataccaatcatgacaattctggtaagcagtatattgaacagatccgaattgtccgccagaccttgattaaccgtgcttggaatgaaaaaattaagcagttcgttcgtggttttatgattgagtcttatctggaagatggtcgacaaaatgagccagaagtatttggtaagtctatcacagacccttgcctgggttgggataacacagaagctcttgtcagagaaatttacaaaacgttaggagaataa

SEQ ID NO: 493 - DNA, 645 bp, Streptococcus pneumoniae
atggcatttattgaaaaaggtcaagaaatcgatatggaagtcatcaaggctgaaacccaattgtctgcggaagccttgagactcaaggaaagccgtgacagggaattggcagatattatttcaggggaagatgaccgtattctcttggtgattggtccttgctcttctgataatgaagaggcggtcttggaatatgctcgccgtttatccgccttgcaaaagaaggtagcggataagattttcatggtcatgcgcgtgtatactgctaagcctcgtaccaatggagacggctataaaggattagttcaccagccagatacttctaaggctccaagcctgattaatggcttgcaggctgtgcgccagttgcactaccgcgtgattacagagactggtttgacaacggcagatgagatgctttatccgtcaaatctgatcttggtggatgacttggtcagctaccatgccgttggagctcgttctgtggaagaccaagagcaccgctttgtggcttctgggattgatgcaccagtagggatgaaaaatccaacctcaggaaatttgggtgttatgtttaacgccatctatgctgctcaaaacaagcaaacttcctttatcatgggcaggaagttggaacatcagtaa

SEQ ID NO: 494 - DNA, 333 bp, Streptococcus pneumoniae
  unsure (154): n at each above location is unknown.
gtgttatgtttaacgccatctatgctgctcaaaacaagcaaacttcctttatcatgggcaggaagttggaacatcagtaattctgtggcccatgttatcttccgtggagcattcaacgagtatgccaattatatcccgaattactactatgaanacttactccaagccattgaacgctatgaaaccatgggacttgaaatccttttatcctcattaacacgaaccatgatgactcaggcaagcaatatatggagcagattcgaattgttcgccagaccttgcagaatcgtgattggaatgagaaaattaaaaagacggttcgaggatttatga

SEQ ID NO: 495 - DNA, 267 bp, Streptococcus pneumoniae
aatccttttatcctcattaacacgaaccatgatgactcaggcaagcaatatatggagcagattcgaattgttcgccagaccttgcagaatcgtgattggaatgagaaaattaaaaagacggttcgaggatttatgattgaatcttacctagcagatggtcgtcaaaaccaaccagaggtctttggttgctctattactgacccttgcctaggttgggaaaatacagaggccttggtagaagagatttatgttaccttgacaaaataa

SEQ ID NO: 496 - DNA, 363 bp, Streptococcus pneumoniae
atgatagttggacacggaattgacatcgaagaattggcttcgatagaaagcgcagttacacgacatgaaggatttgctaagcgtgtactgaccgctcaggaaatggagcgcttcaccagtctcaaaggacgcaggcaaatagaatatttagctggtcgctggtcggctaaggaggccttttccaaggctatgggaacgggcattagcaagctcggttttcaggatttggaagtcttgaacaatgaacgtggggcgccttattttagtcaggcaccattttcaggaaagatttggctgtctatcagccacaccgatcagtttgtgacagccagtgtcattttggaggaaaatcatgaaagctag

SEQ ID NO: 497 - DNA, 1104 bp, Streptococcus pneumoniae
atgaaagctagtccacatagaccaaccaaggttctgattcatctgggagctattcgacaaaatattcagcaaatgggggctcatatccctcaaggaacgctcaagtgggctgtggtcaaggccaatgcttatggccatggagctgttgccgttgccaaggcaattcaagatgatgttgatggcttttgcgtttccaatatcgatgaagccattgaactcagacaagctggactcagcaagccaatcctcattttaggagtttctgaaatcgaagctgttgctctagctaaagaatatgacttcaccttgacagtggctggactggagtggattcaagcactcttagataaggaagtggacctaactggattgacagtccacctcaagattgattcagggatgggacggattggttttagagaggccagtgaggttgagcaggctcaagatttgctacaacaacacggtgttcgtgttgaaggaatctttacccactttgctactgctgatgaggaatcagatgactattttaatgcccagttagaacggtttaaaactattttagctagtatgaaggaagttccagagctggttcatgctagcaattctgcaacgactctttggcatgtagagactattttcaatgcggttcgtatgggagatgccatgtatggcctcaatccaagtggagcggtcttggatttgccttatgatttgataccggccttgaccttggagtctgctctggttcatgtcaagacagttccagcaggagcttgcatgggctatggagcaacttatcaagcggatagcgagcaagtcatcgcgaccgtgccaatcgggtatgcagatggatggacaagagacatgcaaaatttctctgtcttggtagatggccaagcttgcccaattgtcggcagggtttcgatggaccaaatcactattcgattgcctaagctttatccgctaggaaccaaggtaaccttgattggctccaatggggataaggaaatcactgcaactcaggtagcgacctaccgcgtaaccattaactatgaggtggtttgcctcctcagcgaccgtattccgagagaatattattag

SEQ ID NO: 498 - DNA, 2016 bp, Streptococcus pneumoniae
atgaatctacatcaacccttgcatgtcttgcctggtgtgggaccaaagtcagcagaaaaatacgccaaactaggaattgaaaacttgcaagatctcttgctctactttcctttccgttatgaagacttcaaaaccaagcaggtgctggagctggaagacggtgagaaggcagttctttctggtcaggtagtgactcctgctagtgtccagtattatggtttcaagcgcaatcgcctgcgttttagtctcaagcagggagaggtcgtttttgcggtgaatttctttaaccagccctatctggctgataaaatagagttgggagcaacccttgctgtctttggaaaatgggaccgcgctaaggctagtctgaatgggatgaaggttctggctcaggtagaagatgacctccagcctgtttatcgtctggctcagggaatcagtcaggccagtctggttaaggtcatcaagacggcttttgatcagggactggacctcttgatagaagaaaatctgccccagtctttactagacaaatacaaactcatgtcccgttgtcaggcagtccgagctatgcattttccaaaggatttggcagaatacaagcaggctcttcgccgtataaagtttgaggaactcttttatttccaaatgcagctgcagatgctcaaatctgaaaatagagttcagggaagtggtctggttctgaattggtctcaggaaaaagtgacagcagttaaagtaagtcttccttttgccctgacccaagctcaggaaaagagtttgcaggaaattttaactgatatgaagtccgaccaccacatgaatcgtctcctacaaggggatgtggggagtggaaaaacggtagtcgctggcttggccatgtttgcggcagtgacagcaggttatcaggctgccctaatggtaccaacagaaatcctcgcagagcaacactttgagagtttacagaacctttttcccaatttgaaactggctctcttgacaggttccttgaaagctgcagaaaagagagaggtcttggagaccattgccaagggtgaggctgatttgattatcggaactcacgctctgatacaagatggggtggagtatgctcgtcttggtttgattattatcgatgagcagcaccgttttggtgtagggcaaaggcgtattttacgggaaaaaggtgacaatccagatgtcctcatgatgacggcgactcccattccacggacgcttgccatcacagcctttggagatatggatgtttccattatcgaccagatgccagcaggtcggaagcctattgtgacgcgctggatcaaacatgagcaactacctcaggtcttgacttggttagagggggaaattcaaaaaggttcccaagcctatgtcatctctcctttgattgaagaatcagaagctctagatttgaaaaatgccattgccttatcagaggagttgacgactcattttgcaggcaaggcagaggtggctcttctacatggtaggatgaagagtgacgaaaaagaccagatcatgcaggatttcaaggagagaaagacggatattctggtttcgacgacggttattgaggttggggtcaacgttcccaatgcgactgtcatgattatcatggatgccgatcgcttcgggctcagccagcttcaccagcttagaggtcgtgtcggtcggggggacaagcagtcctacgctgttctcgttgccaatcccaagacggattctgggaaagaccgcatgcgcatcatgacagaaacgaccaatggatttgtccttgcggaggaagatttgaaaatgcgtggttctggtgagatttttggaaccagacagtcaggacttccagagttccaagtggctgatattatcgaagattttccgattttagaagaagcaagaaaggttgctagctacattagttctatagaaacttggcaagaagatccagagtggcgcatgattgcccttcatctggaaaagaaagaacatctggattaa

SEQ ID NO: 499 - DNA, 267 bp, Streptococcus pneumoniae
ttaatactcttcgaaaatctcttcaaaccacgtcagcgtcgccttaccgtatatatgttactgacttcgtcagttctatctgccacctcaaaacggtgttttgagctgacttcgtcagtttcatctacaacctcaaaaccatgttttgagctgacttcgtcagtttcatccacaacctcaaaacagtgttttgagcaacctgcggttagcttcctagtttgctctttgattttcattgagtataagttttccttagagaaagcttaa

SEQ ID NO: 500 - DNA, 204 bp, Streptococcus pneumoniae
atgaaaatcaaagagcaaactaggaagctaaccgcaggttgctcaaaacactgttttgaggttgtggatgaaactgacgaagtcagctcaaaacatggttttgaggttgtagatgaaactgacgaagtcagctcaaaacaccgttttgaggtggcagatagaactgacgaagtcagtaacatatatacggtaaggcgacgctga

SEQ ID NO: 501 - DNA, 981 bp, Streptococcus pneumoniae
atgaaaaatccagctttgctagaagaaattaagacctatagaggaagggatgaggttccggaagactttgatgctttctgggatggggaagtgaaaaatgtttccacgcttccatcctaccacttggaggaaagagatttccacattcctcaagtcaagtgctatgagttaacatttgaaggaagcaaggaaggaaaggtctatgcacgcattgttcttccaaagagtgaggagaaggttccactaatattccattttcatggttatatgggacgtggctgggactgggccgacatgctgggcttcaccgtagctggttacggtgttgtttccatggatgtgcggggccagtcaggttactcacaagacggcttgcgttctcctttaggaaataccgtgaaggggcatattatccgtggtgctatggaaggtcgggaccacctcttttataaggatgtttatctggatatttaccagttggtcgaaattgttgctagtctgtctcaggttgatgagaagcgtctttctagctatggtgcctcacaaggaggggctctagctctagttgcagcagcgctcaatcctcgaattcagaaaacagttgccatttatcccttcttgtcagacttcagacgggtgattgagattggtaatactagcgaggcttacgacgaacttttccgttatttcaagtttcacgaccccttccatgaaacagaggaggaaatcatggcgacccttgcctatatcgatgtcaaaaatcttgcccatcgtatccaaggtgaggttaagatgattacgggcttggacgacgatgtttgctatcccattacccagtttgcgatttataatcgtctgacctgcgataaaacctatcgcatcatgcctgagtatgctcacgaagccatgaatgtatttgtcaatgaccaagtctacaactggctctgtggaagtgagattccttttaaatatctaaaataa

SEQ ID NO: 502 - DNA, 618 bp, Streptococcus pneumoniae
gtgttaatacttttcaaaaatctcttcaaaccacgtcagcttcgccttgccgtatatatgttactgacttcgtcagttctatctgccacctcaaaacggtgttttgagctgacttcgtcagttctatctgccacctcaaaacggtgttttgagctgacttcgtcagttctatctgccacctcaaaacggtgttttgagctgacttcgtcagttctatctgccacctcaaaacggtgttttgagctgacttcgtcagttctatctgccacctcaaaacggtgttttgagctgacttcgtcagttctatctgccacctcaaaacggtgttttgagctgacttcgtcagttctatctgccacctcaaaacggtgttttgagctgacttcgtcagttctatctgccacctcaaaacggtgttttgagctgacttcgtcagttctatctgccacctcaaaacggtgttttgagctgacttcgtcagttctatctgccacctcaaaacggtgttttgagctgacttcgtcagttctatctgccacctcaaaacggtgttttgagcatcatgcgactagcttcttagtttgctctttgattttcattgagtataaaaacagatga

SEQ ID NO: 503 - DNA, 504 bp, Streptococcus pneumoniae
gtggcagatagaactgacgaagtcagctcaaaacaccgttttgaggtggcagatagaactgacgaagtcagctcaaaacaccgttttgaggtggcagatagaactgacgaagtcagctcaaaacaccgttttgaggtggcagatagaactgacgaagtcagctcaaaacaccgttttgaggtggcagatagaactgacgaagtcagctcaaaacaccgttttgaggtggcagatagaactgacgaagtcagctcaaaacaccgttttgaggtggcagatagaactgacgaagtcagctcaaaacaccgttttgaggtggcagatagaactgacgaagtcagctcaaaacaccgttttgaggtggcagatagaactgacgaagtcagctcaaaacaccgttttgaggtggcagatagaactgacgaagtcagctcaaaacaccgttttgaggtggcagatagaactgacgaagtcagtaacatatatacggcaaggcgaagctga

SEQ ID NO: 504 - DNA, 228 bp, Streptococcus pneumoniae
atgatatttaaggcattcaagacaaaaaagcagagaaaaagacaagttgaactacttttgacagtttttttcgacagttttctgattgatttatttcttcacttatttgggattgtcccctttaagctggataagattctgattgtgagcttgattatatttcccattatttctacaagtatttatgcttatgaaaagctatttgaaaaagtgttcgataaggattga

SEQ ID NO: 505 - DNA, 2814 bp, Streptococcus pneumoniae
atgattgtaggagcagtggtatttggaacgtctcctgttttagctcaagaaggggcaagtgagcaacctctggcaaatgaaactcaactttcgggggagagctcaaccctaactgatacagaaaagagccagccttcttcagagactgaactttctggcaataagcaagaacaagaaaggaaagataagcaagaagaaaaaattccaagagattactatgcacgagatttggaaaatgtcgaaacagtgatagaaaaagaagatgttgaaaccaatgcttcaaatggtcagagagttgatttatcaagtgaactagataaactaaagaaacttgaaaacgcaacagttcacatggagtttaagccagatgccaaggccccagcattctataatctcttttctgtgtcaagtgctactaaaaaagatgagtacttcactatggcagtttacaataatactgctactctagaggggcgtggttcggatgggaaacagttttacggtaattacaacgatgcacccttaaaagttaaaccaggtcagtggaattctgtgactttcacagttgaaaaaccgacaccagaactacctaaaggccgagtgcgcctctacgtaaacggggtattatctcgaacaagtctgaaatctggcaatttcattaaagatatgccagatgtaacgcatgtacaaatcggagcaaccaagcgtgccaacaatacggtttgggggtcaaatctacagattcggaatctcactgtgtataatcgtgctttaacaccagaagaggtacaaaaacgtagtcaactttttaaacgctcagatttagaaaaaaaactacctgaaggagcggttttaacagagaaaacggacatattcgaaagcgggcgtaacggtaaaccaaataaagatggaatcaagagttatcgtattccagcacttctcaagacagataaaggaactttgatcgcaggtgcagatgaacgccgtctccattcgagtgactggggtgatatcggtatggtcatcagacgtagtgaagataatggtaaaacttggggtgaccgagtaaccattaccaacttacgtgacaatccaaaagcttctgacccatcgatcggttcaccagtgaatatcgatatggtgttggttcaagatcctgaaaccaaacgaatcttttctatctatgacatgttcccagaagggaagggaatctttggaatgtcttcacaaaaagaagaagcctacaaaaaaatcgatggaaaaacctatcaaatcctctatcgtgaaggagaaaagggagcttataccattcgagaaaatggtactgtctatacaccagatggtaaggcgacagactatcgcgttgttgtagatcctgttaaaccagcctatagcgacaagggtgatctatacaagggtgaccaattactaggcaatatctacttcacaacaaacaaaacttctccatttagaattgccaaggatagctatctatggatgtcctacagtgatgacgacgggaagacatggtcagcgcctcaagatattactccgatggtcaaagccgattggatgaaattcttgggtgtaggtcctggaacaggaattgtacttcggaatgggcctcacaagggacggattttgataccggtttatacgactaataatgtatctcacttagatggctcgcaatcttctcgtgtcatctattcagatgatcatggaaaaacttggcatgctggagaagcggtcaacgataaccgtcaggtagacggtcaaaagatccactcttctacgatgaacaataaacgtgcgcaaaatacagaatcaacggtggtacaactaaacaatggagatgttaaactctttatgcgtggtttgactggagatcttcaggttgctacaagtaaagacggaggagtgacttgggagaaggatatcaaacgttatccacaggttaaagatgtctatgttcaaatgtctgctatccatacgatgcacgaaggaaaagaatacatcatcctcagtaatgcaggtggaccgaaacgtgaaaatgggatggtccacttggcacgtgtcgaagaaaatggtgagttgacttggctcaaacacaatccaattcaaaaaggagagtttgcctataattcgctccaagaattaggaaatggggagtatggcatcttgtatgaacatactgaaaaaggacaaaatgcctataccctatcatttagaaaatttaattgggaatttttgagcaaaaatctgatttctcctaccgaagcgaaagtgaagcgaactagagagatgggcaaaggagttattggcttggagttcgactcagaagtattggtcaacaaggctccaacccttcaattggcaaatggtaaaacagcgactttcctaacccagtatgatagcaagaccttgttgtttgcagtagataaggaagatatcggacaggaaattattggtatagctaaaggaagcatcgaaagtatgcataatcttcctgtaaatctagcaggtgccagagttcctggcggagtaaatggtagcaaagcagcggtgcatgaagttccagaatttacagggggagttaatggtacagagccagctgttcatgaaatcgcagagtataagggatctgattcgcttgtaactcttactacaaaagaagattatacttacaaagctcctcttgctcagcaggcacttcctgaaacaggaaacaaggagagtgacctcctagcttcactaggactaacagctttcttccttggtctgtttacgctagggaaaaagagagaacaataa

SEQ ID NO: 506 - DNA, 216 bp, Streptococcus pneumoniae
tttgactttcctgatagagttgttcacatcttatttcaatctactatattttatagaacagactactctgaaagtagtttcagacctcttatgatttcgtatcagcttgaatgtcatcaaaaaaagatagcaggcttgaaaacctgctatctccttctatttttacaaaatcaaatgtttagaattcttctcttattgttctctctttttccctag

SEQ ID NO: 507 - DNA, 453 bp, Streptococcus pneumoniae
atgattattacaaaaattagccgtttaggaacttatgtgggagtaaatccacattttgcaacattaatagattttctagaaaaaacaggactagaaaatttaacagaaggttcgattgctatcgatggtaatcgattgtttgggaattgctttacttatctagcagatggtcaagcaggggctttctttgaaacacaccaaaaatatttggatattcatttagttttggaaaacgaagaagccatggctgttacatcgccggaaaatgtaagcgttacccaagaatatgatgaagagaaagatattgaattatacacagggaaagtggaacagttggttcatttgagagctggcgaatgcctcatcacttttccagaagatttacatcaacccaaggttcgtataaatgatgaacctgtgaaaaaagttgtctttaaagttgcgatttcttaa

SEQ ID NO: 508 - DNA, 1338 bp, Streptococcus pneumoniae
atgaaaaaaatgagaaagtttttatgtctagctggaattgcgctagcggctgttgccttggtagcttgttcaggaaaaaaagaagctacaactagtactgaaccaccaacagaattatctggtgagattacaatgtggcactcctttactcaaggaccccgtttagaaagtattcaaaaatcagcagatgctttcatgcaaaagcatccaaaaacgaaaatcaagattgaaacattttcttggaatgacttctatactaaatggactacaggtttagcaaatggaaatgtgccagatatcagtacagctcttcctaaccaagtaatggaaatggtcaactcagatgctttggttccgctaaatgattctatcaagcgtattggacaagataaatttaacgaaactgccttaaatgaagcaaaaatcggagatgattactactctgttcctctttattcacatgcacaagtcatgtgggttagaacagatttgttaaaagaacataatattgaggttcctaaaacttgggatcaactctatgaagcttctaaaaaattgaaagaagctggagtttatggcttgtctgttccgtttggaacaaatgacttaatggcaacacgtttcttgaacttctacgtacgtagtggtggaggaagcctcttaacaaaagatcttaaagcagacttgacaagccaacttgctcaagatggtattaaatactgggttaaattgtataaagaaatctcacctcaagattctttgaactttaatgtccttcaacaagctaccttgttctatcaaggaaaaacagcatttgactttaactctggcttccatatcggaggaattaatgccaacagtcctcaattgattgattcgattgatgcttatcctattccaaaaatcaaagagtctgataaagaccaaggaattgaaacctcaaacattccaatggttgtttggaaaaattcaaaacatccagaagttgctaaagcattcttagaagcactttataatgaagaagactacgttaaattccttgattcaactccagtaggtatgttgccaactattaaggggattagcgattctgcagcctataaagaaaatgaaactcgtaagaagtttaaacatgctgaagaagtaattactgaagctgttaaaaaaggtactgctattggttatgaaaatggaccaagtgtacaagctggtatgttgactaaccaacacattattgaacaaatgttccaagatatcattacaaatggaacagatcctatgaaagcagcaaaagaagcagaaaaacaattaaacgatttatttgaggctgttcagtag

SEQ ID NO: 509 - DNA, 885 bp, Streptococcus pneumoniae
atggttaaagaacgtaatttaactcgctggatatttgttttgccagctatgattatcgtaggattactctttgtttatccgtttttctcgagtattttttatagctttaccaataagcatttgattatgcctaattataaatttgttggtttggctaactataaagctgtgctatcagatcccaacttctttaatgcgttctttaattcaattaagtggaccgttttctcattagttggtcaagttttagtagggtttgtattggctttagctcttcacagagtacgccacttcaagaaattatataggaccttattgattgttccttgggcatttcctaccatcgttattgccttttcttggcagtggattctaaacggggtttatggctacttacctaatctaatcgtaaaattaggtttaatggaacatacacctgcatttttgacagatagtacatgggcattcctatgtttggtgtttatcaacatttggtttggagcaccaatgattatggttaatgtgctttcagctttgcaaacagtaccagaagaacaatttgaggctgctaagatagatggtgcttcaagttggcaggtgttcaagtttatcgtctttccacatattaaagtggttgtaggacttctagttgttttgagaactgtatggatctttaataactttgacattatctacctcattactggtggtggaccagccaatgctacaacgacgcttccaatttttgcttacaacctgggctggggaactaaattgttgggtcgtgcttcagcagttacagtattgctctttatcttcttggtggcgatttgctttatctactttgctatcatcagtaagtgggaaaaggagggtagaaaataa

SEQ ID NO: 510 - DNA, 834 bp, Streptococcus pneumoniae
atgaagaagaaatccagtatttatttagatattctctcacatgtactcttagttggtgcgaccattgttgcaattttcccattggtatggattatcatatcttctgtcaaagggaagggggaattaactcagtatccaacacgattttggcctgaacaatttacattagattatttcactcatgttatcaacgatttgcacttcattgataacattcgaaacagtttaatcattgccttggctacaacccttattgcgattattatttctgctatggcagcctatggtattgttcgattctttcctaaattgggagcaatcatgtcgagactactcgtcattacctacattttcccaccaattttgttagcaattccctattcaattgccattgctaaagttgggttaacaaatagtttatttggcttgatgatggtttatctatcttttagtgttccatatgcagtttggctcttagttggatttttccaaacagttccaattggaattgaagaagcggctagaattgatggtgcaaataaatttgttacgttttataaagttgtgctaccgattgtagcaccaggtattgtagcaacagctatttatacatttatcaatgcttggaatgaattcctgtatgccttgattttgattaacaatacaggaaagatgacagtagcagtagcccttcgttcacttaatggttcagaaatactagactggggagatatgatggcagcgtctgttattgtagttcttccatcaattattttcttctctatcatccaaaataagattgcaagtggattatcagaaggatctgtgaagtag

SEQ ID NO: 511 - DNA, 762 bp, Streptococcus pneumoniae
atgaataaaagaggtctttattcaaaactaggaatttctgttgtaggcattagtcttttaatgggagtccccactttgattcatgcgaatgaattaaactatggtcaactgtccatatctcctatttttcaaggaggttcatatcaactgaacaataagagtatagatatcagccctttgttattagataaattgtctggagagagtcagacagtagtaatgaaatttaaagcagataaaccaaactctcttcaagctttgtttggcctatctaatagtaaagcaggctttaaaaataattacttttcaattttcatgagagattctggtgagataggtgtagaaataagagacgcccaaaagggaataaattatttattttctagaccagcttcattatggggaaagcataaaggacaggcagttgaaaatacactagtatttgtatctgattctaaagataaaacatacacaatgtatgttaatggaatagaagtgttctctgaaacagttgatacatttttgccaatttcaaatataaatggtatagataaggcaacactaggagctgttaatcgtgaaggtaaggaacattacctcgcaaaaggaagtattggtgaaatcagtctatttaacaaagcaattagtgatcaggaagtttcaaatattcccttgtcaaatccatttcagttaattttccaatcaggagattctactcaagctaactattttagaataccgacactattgaaagttctataa

SEQ ID NO: 512 - DNA, 378 bp, Streptococcus pneumoniae
gtgctatacttgttgttcaccacaaacacaaggaaaggcacagagatgcaagaacattataccccaaaagggaaacatttgacaatagataaccgtcgcttgattgagcggtggaagaatgaaaataagtccaatcgtgaaattgcaggcttgttaggaaaggcgcctcaaacgattcataatgaagtcaaaagaggtacaactttacaacaagtgagaaaagggctatacaaaaaggtctattctgccgattacgcacaaactgtttaccaattcaatcgaaaacggtcggtgaaaaagttaattttaacaaaggaaatcagagagaagatcttacactatcataagcacataagcaaaaattttcgcctgaaatga

SEQ ID NO: 513 - DNA, 633 bp, Streptococcus pneumoniae
atgatggttaacaagaagcaagtgaaagttggtatttcaaccatctactactggtttcataatggtcatttaggattgacgaaggccgacatgctttatcccagaaaaaggaaaggtgtcaagaagcaagctagtccgaactttaagccggcaggtaaatctatcgaagaacgtcctgacgttattaatcttcgcttggaaaatggtcattatgaaattgataccgtcctactgactaagataaaaaattattgcctgttagtcttaaccgaccggcggagcagacaccaaattataaggttaattccaaataaaactgctgaatctgtcaatcaggcgcttacgttactattaggggagcatcgtattctgtccattactgcagataatggttcggagttcaaacgattgtctgaggtatttcctgaggaacatatctactacgcacatgcttactcttcatgggagagaggttcaaatgaaaatcataatcgattaattcggagatggttacctaaaggaaccaagaaaacgactccgaaagaagtagcttttatcgaaaattggattaacaactaccctaaaaaatgcttggactacaagtcgccaagtgaatttcttttgggtggctaa

SEQ ID NO: 514 - DNA, 1401 bp, Streptococcus pneumoniae
gtgaatttcttttgggtggctaacttcaacttgaaatttgggataccgacactatatacattaagtagtggaagagttctatcaagtattgatgcacgttatggtgggactcatgattctaaaagtaagattaatattgccacttcttatagtgatgataatgggaaaacgtggagtgagccaatttttgctatgaagtttaatgactatgaggagcagttagtttactggccacgagataataaattaaagaatagtcaaattagtggaagtgcttcattcatagattcatccattgttgaagataaaaaatctgggaaaacgatattactagctgatgttatgcctgcgggtattggaaataataatgcaaataaagccgactcaggttttaaagaaataaatggtcattattatttaaaactaaagaagaatggagataacgatttccgttatacagttagagaaaagggtgtcgtttatgatgaaacaactaataaacctacaaattatactataaatgataagtatgaagttttggagggaggaaagtctttaacagtcgaacaatattcggttgattttgatagtggctctttaagagaaaggcataatggaaaacaggttcctatgaatgttttctacaaagattcgttatttaaagtgactcctactaattatatagcaatgacaactagtcagaatagaggagagagttgggaacaatttaagttgttgcctccgttcttaggagaaaaacataatggaacttacttatgtcccggacaaggtttagcattaaaatcaagtaacagattgatttttgcaacatatactagtggagaactaacctatctcatttctgatgatagtggtcaaacatggaagaaatcctcagcttcaattccgtttgaaaatgcaacagcagaagcacaaatggttgaactgagagatggtgtgattagaacattctttagaaccactacaggtaagatagcttatatgactagtagagattctggagaaacatggtcgaaagtttcgtatattgatggaattcaacaaacttcatatggcacacaagtatctgcaattaaatactctcaattaattgatggaaaagaagcagtaattttgagtacaccaaattctagaagtggccgtaagggaggccaattagttgtcggtttggtcaataaagaagatgatagtattgattggagataccactatgatattgatttgccttcgtatggttatgcctattctgcgattacagaattgccaaatcatcacataggtgtactgtttgaaaaatatgattcgtggtcgagaaatgaattgcatttaagcaatgtagttcagtatatagatttggaaattaatgatttaacaaaataa

SEQ ID NO: 515 - DNA, 1104 bp, Streptococcus pneumoniae
atggttaaatacggtgttgttggagcagggtattttggagctgaattggctcgctatatgcaaaagaatgatggagcagagattactcttctctatgatccagataatgcagaggcgattgcagaagaattgggagcaaaagtagcaagttccttagatgagttggtttctagcgatgaagtagattgtgttatcgtcgcaactccaaataatcttcataaggaaccggttattaaggctgcacagcatggtaaaaatgttttctgtgaaaaaccaattgcgctttcttatcaagattgtcgcgagatggtagatgcgtgtaaagaaaacaatgtaacctttatggcaggacatattatgaatttctttaatggtgttcatcatgcaaaagaactcattaatcaaggagttatcggagacgttctatattgtcatacagctcgtaatggttgggaagaacaacaaccgtcagtatcatggaaaaaaattcgtgaaaaatcaggtggtcacttgtatcaccacatccatgaattggattgcgttcaattccttatggggggcatgcctgaaactgtaaccatgacaggtggaaatgtggcccatgaaggtgaacatttcggtgatgaagatgatatgatttttgtcaatatggaattttctaataagcgttttgccttgttagaatggggttcagcttatcgttggggtgaacattatgtcttaatccaaggaagcaaaggtgccatccgcttagacttattcaactgtaaaggaactcttaagctagatgggcaagaaagctatttcttgattcacgaatcgcaagaagaagatgatgatcggactcgtatctatcatagtacagagatggatggagcaattgcttatggtaaaccaggtaaacgtactccattatggctatcatctgtcattgataaagaaatgcgctatctgcatgagattatggaaggagctccagtatcagaagaatttgcaaaacttttgacaggtgaagctgccctagaagcaattgctactgcagatgcttgtacccagtctatgtttgaagatcgcaaagtaaaattgtcagaaattgtaaaataa

SEQ ID NO: 516 - DNA, 390 bp, Streptococcus pneumoniae
ttgaatttccaaaccatcgtagcgttcacgcttggtacaatccagagcaatcacctcgatgtccagttctgccaattcatcaacttctttcatagtagccgtgatgaagggttcctgaggtggataatcacgtttgataatcccaatgattggaagtttagtgacttccttaatttccttgatatcgcgaacactgtttgctcggataccgactgctccaccttgctcagccgctttgaccagcaagggaatcacccctcccgcttctgtataaagcggttcatgaggaagagcctgacaagaaacgatgattccatctttgatttgctcaatcaaggcttctttgctaatctgtggcatcctctttcctccttttctttatttctatga

SEQ ID NO: 517 - DNA, 699 bp, Streptococcus pneumoniae
atgccacagattagcaaagaagccttgattgagcaaatcaaagatggaatcatcgtttcttgtcaggctcttcctcatgaaccgctttatacagaagcgggaggggtgattcccttgctggtcaaagcggctgagcaaggtggagcagtcggtatccgagcaaacagtgttcgcgatatcaaggaaattaaggaagtcactaaacttccaatcattgggattatcaaacgtgattatccacctcaggaacccttcatcacggctactatgaaagaagttgatgaattggcagaactggacatcgaggtgattgctctggattgtaccaagcgtgaacgctacgatggtttggaaattcaagagttcattcgtcaggttaaggagaaatatcctaatcagcttttgatggctgatactagtatcttcgaagaagggctagcagctgtagaagcaggaattgactttgtcggaacaaccttatcaggctacacatcctacagtccaaaagtagacggtccagattttgaattgattaagaaactctgtgatgccggtgtagatgtcattgcagaaggaaaaattcatacaccagaacaagccaaacaaatccttgaatatggagtgcgaggcatcgttgttggtggcgccattactagaccaaaagagattacagaacgcttcgttgctagtcttaaataa

SEQ ID NO: 518 - DNA, 1518 bp, Streptococcus pneumoniae
atgtttaaagttttacaaaaagttggaaaagcttttatgttacctatagctatacttcctgcagcaggtctacttttggggattggtggtgcactttcaaacccaaccacgatagcaacttatccaatactagacaatagtatttttcaatcaatattccaagtaatgagctctgcaggagaggttgtattcagtaatttgtcactacttctctgtgtgggattatgtattggcttagcgaaacgagataaaggaaccgctgcgttagcaggagtaactggttacttagttatgactgcaacgatcaaagctttagtaaaactttttatggcagaaggatctgcaattgatactggagttattggagcattagttgtcggaatagttgccgtatatttgcacaaccgatataacaatattcaattaccttccgctttaggattctttggaggttcacgcttcgttcctattgttacatcgttctcttctatcttgattggctttgtcttctttgttatttggccacctttccaacaacttcttgtttctacaggtggatatatttctcaggcgggtccaattggaacttttctatatggatttttaatgagactttctggagcagtaggcttacatcatataatttaccctatgttttggtatactgaacttggtggtgttgaaactattgcaggacaaacagtggttggagctcaaaaaatattttttgctcaattagccgatccggcccattctggattatttacagaaggaacaaggttttttgcaggtcgtttctcaacaatgatgttcggtttaccggctgcctgtttagcgatgtaccatagtgttcctaaaaatcgtcgtaaaaaatacgcgggtttgttttttggagttgctttaacatcttttattaccggtattacagaaccaattgaatttatgtttctattcgtcagtccggttctatatgttgttcacgcattccttgatggtgttagcttctttattgcagacgtcttaaatatttcaataggaaacacattttcaggaggtgtaatcgatttcactttatttggaattttgcaggggaacgctaagacgaattgggttcttcagattccaattggacttatttggagtgttttgtattatattatttttagatggttcattactcaattcaacgttctaacgccaggacgaggagaagaagtagattctaaagaaatttctgaatccgcagattcaacttcaaatactgcagattatttaaaacaggatagcctacaaattatcagagcgttgggtggatcaaataatatagaagatgtagatgcttgtgtgacacgtttacgtgtagctgtaaaagaagttaatcaagttgataaagcacttttaaaacaaattggtgcagttgatgtcttagaagtgaagggtggcattcaagcaatctatggagcaaaagcaatcttatataaaaatagtattaatgaaattttaggtgtagatgattaa

SEQ ID NO: 519 - DNA, 1329 bp, Streptococcus pneumoniae
atgaaatttagaaaattagcttgtacagtacttgcgggtgctgcggttcttggtcttgctgcttgtggcaattctggcggaagtaaagatgctgccaaatcaggtggtgacggtgccaaaacagaaatcacttggtgggcattcccagtatttacccaagaaaaaactggtgacggtgttggaacttatgaaaaatcaatcatcgaagcgtttgaaaaagcaaacccagatataaaagtgaaattggaaaccatcgacttcaagtcaggtcctgaaaaaatcacaacagccatcgaagcaggaacagctccagacgtactctttgatgcaccaggacgtatcatccaatacggtaaaaacggtaaattggctgagttgaacgacctcttcacagatgaatttgttaaagatgtcaacaatgaaaacatcgtacaagcaagtaaagctggagacaaggcttatatgtatccgattagttctgccccattctacatggcaatgaacaagaaaatgttagaagatgctggagtagcaaaccttgtaaaagaaggttggacaactgatgattttgaaaaagtattgaaagcacttaaagacaagggttacacaccaggttcattgttcagttctggtcaagggggagaccaaggaacacgtgcctttatctctaacctttatagcggttctgtaacagatgaaaaagttagcaaatatacaactgatgatcctaaattcgtcaaaggtcttgaaaaagcaactagctggattaaagacaatttgatcaataatggttcacaatttgacggtggggcagatatccaaaactttgccaacggtcaaacatcttacacaatcctttgggcaccagctcaaaatggtatccaagctaaacttttagaagcaagtaaggtagaagtggtagaagtaccattcccatcagacgaaggtaagccagctcttgaatatcttgtaaacgggtttgcagtattcaacaataaagacgacaagaaagtcgctgcatctaagaaattcatccagtttatcgcagatgacaaggagtggggacctaaagacgtagttcgtacaggtgctttcccagtccgtacttcatttggaaaactttatgaagacaaacgcatggaaacaatcagtggctggactcaatactactcaccatactacaacactattgatggatttgctgaaatgagaacactttggttcccaatgttgcaatctgtatcaaatggtgacgaaaaaccagcggatgctttgaaagccttcactgaaaaagcaaacgaaacaatcaaaaaagctatgaaacaatag

SEQ ID NO: 520 - DNA, 888 bp, Streptococcus pneumoniae
gtgaaagtcaataaaatccgtatgcgggaaacagtgatttcctacgctttcctagcaccagtattattcttctttgtcatctttgtgttggctccgatggtgatgggcttcattacaagtttctttaactactcaatgactagatttgagtttgtaggcttggataactatatccgtatgtttaaagatcctgtctttacaaaatctctgattaacacagttattttggttattggatctgtaccagttgttgttctattctcactctttgtagcatctcagacctatcatcaaaatgtcattgccagatccttctaccgtttcgtcttcttccttcctgttgtaacgggtagtgttgccgtgacagttgtttggaaatggatttatgacccgctatcagggattctaaactttgtccttaagtcaagccacatcatcagccaaaacatttcttggttgggagataaaaactgggcattgatggcgattatgattattctcttgaccacttcagttggtcagcccatcatcctttatatcgctgccatggggaatattgacaattcactggttgaagcggcgcgtgttgatggtgcaactgagtttcaagttttttggaagattaaatggccaagccttcttccaacaactctttatattgcaatcatcacaacaattaactcattccagtgtttcgccttgattcagcttttgacatctggtggtccaaactactcaacaagtaccttgatgtactacctttacgaaaaagccttccaattgacagaatacggctatgccaacacaattggtgtcttcttggcagtcatgattgctatcgtaagctttgttcaatttaaagtacttggaaacgacgtagaatactaa

SEQ ID NO: 521 - DNA, 840 bp, Streptococcus pneumoniae
atgcaatctacagaaaaaaaaccattaacagcctttactgttatttcaacaatcattttgctcttgttgactgtgctgttcatctttccattctactggattttgacaggggcattcaaatcacaacctgatacaattgttattcctcctcagtggttccctaaaatgccaaccatggaaaacttccaacaactcatggtgcagaaccctgccttgcaatggatgtggaactcagtatttatctcattggtaaccatgttcttagtttgtgcaacctcatctctagcaggttatgtattggctaaaaaacgtttctatggtcaacgcattctatttgctatctttatcgctgctatggcgcttccaaaacaagttgtccttgtaccattggtacgtatcgtcaacttcatgggaatccacgatactctctgggcagttatcttgcctttgattggatggccattcggtgtcttcctcatgaaacaatttagtgaaaatattcctacagagttgcttgaatcagctaaaatcgacggttgtggtgagattcgtaccttctggagtgtagccttcccgattgtgaaaccagggtttgcagcccttgcaatctttaccttcatcaatacttggaatgactacttcatgcaattggtaatgttgacttcacgtaacaatttgaccatctcacttggggttgcgaccatgcaggctgaaatggcaaccaactatggtttgattatggcaggagctgcccttgctgctgttccaatcgtcacagtcttccttgtcttccaaaaatccttcacacagggtattactatgggagcggtcaaaggataa

SEQ ID NO: 522 - DNA, 453 bp, Streptococcus pneumoniae
atgatttttgacgatttgaaaaacatcaccttttacaaagggattcatcctaatttagacaaggctatcgactatctctaccaacatcgtaaggattctttcgaattaggaaagtatgatattgatggagataaagtctttctagttgttcaggaaaatgtcctcaatcaagctgaaaatgatcaatttgagtatcataagaactatgcagatttgcatttgctggtagaaggacatgaatattcgagctacggttcacgtatcaaagacgaggcagtagcattcgacgaagcgagtgacattggctttgttcattgtcatgaacactacccactcttgttgggttatcacaattttgcgattttcttcccaggtgagccacatcagccaaatggttatgcaggcatggaagaaaaggttcgaaaatatctctttaaaattttgattgattaa

SEQ ID NO: 523 - DNA, 354 bp, Streptococcus pneumoniae
ttggtatcttcttgtcagtctgtgtatgctacaagagctagtttcttggatggacagggaattacagttgatgagatggcttggataattaggggcattgtgaatgcattgattggtagatacataaaattaggtacttatgcggctaagtatggtattagtatggcgcgttctatcttaaatagggcagctgcaactgcggcagcaagagtaggattattgactaagatttttggatggattttacgaatagctgtgctcgcagctgatgtatatggtaattttgccaacaatattgctgtagcttgggatgcacatgataaaatccctaacaatggtcgtataaacttttaa

SEQ ID NO: 524 - DNA, 198 bp, Streptococcus pneumoniae
ttgttagggattttatcatgtgcatcccaagctacagcaatattgttggcaaaattaccatatacatcagctgcgagcacagctattcgtaaaatccatccaaaaatcttagtcaataatcctactcttgctgccgcagttgcagctgccctatttaagatagaacgcgccatactaataccatacttagccgcataa

SEQ ID NO: 525 - DNA, 645 bp, Streptococcus pneumoniae
atggcacaaaaaggagtaagccttatcaaggcagcatttgatacagataactttctcatgcgttttagtgagaaagtcttggacatcgtgacagccaatcttctttttgtcgtctcttgtttgcccatcgtgacgattggagtggctaaaatcagcctctacgagaccatgttcgaagttaagaagagcagacgggtgcctgtttttaaaatctatctaagatctttcaagcaaaatctgaaactaggtcttcagctgggtttaatggagttaggaattgtgtttcttaccctttcagatctctatcttttctggggtcaaacagctctgcccttccaattgctgaaagccatttgtttaggtattctgatttttcttactatcgtgatgctggctagttaccctatcgcggcacgttatgacctatcttggaaagaaattcttcaaaaaggattgatgttggctagttttaactttccttggttcttcctcatgttagccattcttgtcctcattgtgatggttctttatctgtccgccttcagtctactcttaggtggctcagtcttcttactttttgggtttggactattggtctttatccagactggattgatggagaaaattttcgcaaaataccaatag

SEQ ID NO: 526 - DNA, 660 bp, Streptococcus pneumoniae
atgtcagatttgaaaaaatacgaaggtgtcattccagccttctacgcatgttatgatgatcaaggagaagtaagcccagaacgtacgcgtgccttggttcaatacttcattgataaaggtgttcaaggtctttatgtcaatggttcttctggtgaatgtatctaccaaagcgttgaagatcgcaagttgattttggaagaagtcatggcggtagccaaaggtaaattgaccattattgctcatgttgcctgcaacaatactaaagacagtatggaacttgctcgccatgctgaaagcttgggagtagatgctattgcaacgattccaccaatttatttccgcttgccagaatactcagttgccaaatactggaacgatatcagttctgcagctccaaacacagactacgtgatttacaacattcctcaattggcaggggttgctttgactccaagcctttacacagaaatgttgaaaaatcctcgtgttatcggtgttaagaactcttctatgccagttcaagatatccaaacctttgtcagccttggtggggaagaccatatcgtctttaatggtcctgatgagcagttcctaggaagacgcctcatgggtgctagggtggtatcggtggtacttatggtgctatgccagaactcttct

SEQ ID NO: 527 - DNA, 300 bp, Streptococcus pneumoniae
ggtggtatcggtggtacttatggtgctatgccagaactcttcttgaaactcaatcagttgattgcggataaggacctaaaaacagcgcgtgaattgcagtatgctatcaacgcaatcattggtaaactcacttctgctcatggaaatatgtacggtgtcattaaagaagtcttgaaaatcaatgaagtcttgaatattggatctgttcgttcaccattgacaccagtgactgaagaagatcgtccagttgtagaagcggctgctgccttgattcgtgaaaccaaggagcgcttcctctaa

SEQ ID NO: 528 - DNA, 885 bp, Streptococcus pneumoniae
atgacatactacgttgcaattgatatcggtggaaccaacatcaagtatggtttggttgatcaagaggggcaacttcttgaatcgcatgaaatgccaactgaggcgcataagggtggacctcatatcttacaaaagaccaaagatatcgtagctagttatttagaaaaaggcccagtagcaggtgttgccatatcttctgctgggatggtggatccggataagggtgagattttctatgctgggcctcaaatccctaactacgcaggcacccagttcaaaaaggaaatcgaagaaagctttactattccttgtgagattgaaaatgatgtcaactgtgcaggtcttgctgaggcagtatctggttcaggcaagggagcaagtgtgacactttgcttgaccattggaaccggtatcggtggttgcttgattatggataggaaagtcttccatggttttagtaattcagcctgtgaagtcgggtatatgcatatgcaggatggagcttttcaggatctcgcttctacaacagctttagtgaaatatgtagctgaagcccatggagaagatgttgatcagtggaatggccgacgtatctttaaggaagctactgaaggaaacaaaatctgcatggaaggtattgaccgtatggttgactatctaggaaaaggtctggcaaatatttgttatgtggccaatccagaagtggttattcttggtggtggtatcatggggcaagaggctatcctcaaacctaagatccgcacagccttgaaagaggcattggtaccaagtttagcagaaaaaacacgattagaatttgcccatcaccaaaatacagcagggatgttgggtgcatattatcattttaagacaaaacaatcctag

SEQ ID NO: 529 - DNA, 849 bp, Streptococcus pneumoniae
atggacaaaccagatatcgcaactatcattgattcacattttgaagaaatgacagacctagagcaagaaatcgctcgctattttttgcaagctgaaacgattacagatgatttatcttctcaacaagtcacccaaaaattacatatttctcaagctgctttgacccgctttgctaaaaagtgtggctttactggctaccgagaatttattttccaataccaacatcaggcagaaaatcaagccaaccaagtctccaagcatagtccactgaccaaacgagtcctcagaagttatagcaatatgagggaacaaacacaagacttgattgacgaaatccaactagagcgaattgcccagctaatcgaagatgctgagcgtatctacttctttggaacagggagttctggcctcgtcgcccgtgaaatgaaattacgttttatgcgactaggtgtggtctgcgaagctttgacagaccaagacggctttgcctggacaaccagcatcatggatgaaaattgtctagtactgggtttctcactttcaggctcaactccttctattttagatagtctattagatgccaaggagatgggggcaaagactgtactctttacaagtgttcccaataaagatagccagacctatacagagactgttcttgtagccacccacagccaaccctcctacatccaacgaatatccgctcaacttcctatgctcttctttatcgatttgatttatgcctactttttggaaatcaatcgcgaaagcaaggaaaaaatctttaatagctactgggaaaataaaaaactcaacggctatcgtagacaaaaacgtgtaagaaaatcc

SEQ ID NO: 530 - DNA, 2043 bp, Streptococcus pneumoniae
atgagaaaatttaacagccattcgattccgattcggcttaatttattgttttcaatcgtcattttactctttatgaccattattggtcgtttgttgtatatgcaggttttgaacaaggatttttacgaaaaaaagctagcctcagctagtcagaccaagattacaagcagttcagcccgtggggaaatttatgatgctagtggaaaacctttggtagaaaatacgttaaagcaggttgtttcctttacgcgtagcaataaaatgacggctacagacttaaaagaaacagctaaaaagttactgacttatgtgagcatcagttctccaaatttgacagaacgccagctggcggattactatttggctgatcctgaaatctataaaaaaacagtggaagctctcccaagtgagaaacgcttggattcagatggcaatcgtctatccgaatcagaactgtataacaatgcggtcgatagtgtccaaacaagtcaactaaactatacagaggatgaaaagaaagaaatctatctttttagtcagttaaatgctgttggaaactttgcgacaggaaccattgctacagatcctctaaatgattctcaggtggctgttattgcctctatttcaaaggagatgcctggcattagtatttctacttcttgggatagaaaggttttggaaacttccctttcttctatagttgggagtgtatccagtgaaaaagctggtctcccagcggaagaagcagaagcctatcttaaaaaaggctattctctaaatgatcgtgtaggaacctcctatttggaaaagcaatatgaagagaccttacaaggaaaacgctcggtaaaagaaatccatctggataaatatggcaatatggaaagcgtggatacaattgaggaaggtagtaagggaaacaatatcaaactgaccattgatttggctttccaagatagcgtggatgctttactgaaaagttatttcaattccgagctagaaaatggtggagccaagtattctgaaggtgtctatgcagtcgcccttaacccaaaaacaggtgcggttttgtctatgtcagggattaaacatgacttgaaaacgggagagttgacgcctgattccttgggaacggtaaccaatgtctttgttccaggttcggttgtcaaggcggcgaccatcagctcaggttgggaaaatggagtcttgtcaggaaaccagaccttgacagaccagtccattgtcttccaaggttcagctcccatcaattcttggtatactcaggcttacggttcattccctatcacagcggtccaagctctggagtattcatcaaatacctatatggtccaaacagccttaggtcttatggggcaaacctatcaacccaatatgtttgtcggcaccagcaatctagagtctgctatggagaaactgcgttcaacctttggcgaatatggcttgggtactgcgacaggaattgacctaccagatgaatctactggatttgttcccaaagagtatagctttgctaattacattactaatgcctttgggcagtttgataactatacgccgatgcagttggctcagtatgtagcaactattgcaaataatggtgttcgtgtggctcctcgtattgttgaaggcatttatggtaataatgataagggaggactgggtgacttgattcagcaactgcaaccgacagagatgaataaggtcaatatatccgactccgatatgagcatcttgcaccaaggtttttatcaggttgcccatggtactagtggattgacaactggacgtgccttttcaaatggcgccttggtatccattagcggaaaaacaggtacagccgaaagctatgtggcagatggtcagcaagcaaccaataccaatgcggtggcctatgccccatctgataatccccaaatcgctgttgcagtggtctttcctcataataccaatctaacaaatggtgtaggaccttccattgcgcgtgacattatcaatctgtatcaaaaataccatccaatgaactag

SEQ ID NO: 531 - DNA, 357 bp, Streptococcus pneumoniae
cttgggaacggtaaccaatgtctttgttccaggttcggttgtcaaggcggcgaccatcagctcaggttgggaaaatggagtcttgtcaggaaaccagaccttgacagaccagtccattgtcttccaaggttcagctcccatcaattcttggtatactcaggcttacggttcattccctatcacagcggtccaagctctggagtattcatcaaatacctatatggtccaaacagccttaggtcttatggggcaaacctatcaacccaatatgtttgtcggcaccagcaatctagagtctgctatggagaaactgcgttcaacctttggcgaatatggcttgggtactgcgacaggaat

SEQ ID NO: 532 - DNA, 513 bp, Streptococcus pneumoniae
ttgacagttattctaagttaccaggtatcgggattaagacggctacgcgtctggccttttatacgattgggatgtctgctgatgatgtcaatgaatttgcaaaaaatctccttttctgctaagagagaattgacatattgttctatttgtggacgtttgacagacgacgatccttgttctatctgtactgatccgactcgtgaccagacaacaattttagttcttgaggatagtagagatgtggcagccatggaaaatatccaagaataccatggactctatcatgtccttcatggcctcatttctcctatgaatggtatcagtccggacgatatcaatctcaagagccttatgactcgtcttatggatagtgaagtttcagaagtgattgtggcgactaatgctacagcggatggtgaagcgacttccatgtatctttcacgtttgctcaagccggctggtatcaaggttacgcgtctagacacgaggtctcgctgtgggagcggacattga

SEQ ID NO: 533 - DNA, 1044 bp, Streptococcus pneumoniae
atgaaacaaacgattattcttttatatggtggacggagtgcggaacgcgaagtctctgtcctttcagctgagagtgtcatgcgtgcggtcaattacgaccgtttcacagtcaagactttctttatcagtcagtcaggtgactttatcaaaacacaggaatttagtcatgctccggggcaagaagaccgtctcatgaccaatgaaaccattgattgggataagaaagttgcaccaagtgctatctacgaagaaggtgcagtggtctttccagtccttcacgggccaatgggagaagatggctctgttcaaggattcttggaagttttgaaaatgccttacgttggttgcaacattttgtcatcaagtcttgccatggataaaatcacgactaagcgtgttctggaatctgctggtattgcccaagttccttatgtggctatcgttgaaggcgatgatgtgactgctaaaatcgctgaagtggaagaaaaattggcttatccagtcttcactaagccgtcaaacatggggtctagtgtcggtatttctaagtctgaaaaccaagaagaactccgtcaagccttaaaacttgccttccgatatgacagccgtgtcttggttgagcaaggagtgaatgcccgtgaaattgaggttggcctcttgggtaactacgatgtcaagagcacgctacctggagaagttgtcaaggacgttgccttttatgactacgatgccaagtatattgataacaagattactatggatattcctgccaaaatcagtgatgatgtggtggctgtcatgcgtcaaaatgcagaaacagccttccgtgccattggtggccttggtctatctcgttgcgatttcttctatacagataagggagagatttttctcaacgagctcaataccatgccaggttttacccagtggtctatgtacccactactttgggacaatatggggatcagctacccagaactaatcgagcgtttggttgaccttgccaaggaaagttttgacaagcgcgaagcgcatttgatataa

SEQ ID NO: 534 - DNA, 1374 bp, Streptococcus pneumoniae
atgaaattaacaatccatgaaattgcccaagttgttggagccaaaaatgatatcagtatctttgaggacacccagttagaaaaagctgagtttgatagtcgtttgattggaactggagatttatttgtgccacttaaaggtgcgcgtgatggccatgactttattaaaacagcctttgaaaatggtgcagcagtaaccttgtctgagaaagaggtctcaaatcatccttacattctagtagatgatgttttgacagcctttcaatccctagcatcctactatcttgaaaaaacgactgttgatgtctttgctgttacaggttcaaatggcaagacaacgactaaggatatgttggcgcatttactgtcaacaagatacaagacctacaaaacacaaggcaattacaataatgagattggccttccttacacagttctccacatgcctgaaggaacagaaaagttggtcttggagatggggcaggaccacttgggagatattcatctcttgtctgaattggctcgtccaaaaacagccatcgtgaccttggttggagaagctcatttggcctttttcaaagatcgttctgagattgctaaaggaaaaatgcaaattgcagacggaatggcttcaggttccttgcttttagcgccggctgaccctatcgtagaggactatttgccaactgataaaaaggtggtccgttttgggcaaggggcagagttggaaatcacagacttggttgagcgcaaagatagtctaaccttcaaggccaatttcttagagcaagcccttgatttgccagtaactggtaagtacaatgctaccaatgctatgattgcatcctatgttgccctacaagaaggagtttcagaggagcaaattcatcaggccttccaaggtcttgaattgacgcgtaatcgtactgagtggaagaaagcagccaatggagcagatatcctgtcagacgtatataatgccaatccaactgctatgaagctgattttagagactttctctgccattccagccaatgaaggtggcaagaaaattgcagtgttggcggatatgaaggagcttggtgaccagtctattcaactccataaccagatgattttgagcctttctccagatgtgcttgataccgttattttctatggagaagacattgctgaattagcccaattggccagtcaaatgttcccaataggccacgtttactacttcaagaaaacagaagaccaagaccaatttgaagacctagtcaagcaggtcaaggaaagcctcagtgccaatgatcaaatcttgctcaagggctctaactctatgaacctagccatgttggtagaaagtttagaaaatgaaaccaagtga

SEQ ID NO: 535 - DNA, 1347 bp, Streptococcus pneumoniae
atgaacagtttaccaaatcatcacttccaaaacaagtctttttaccaactatctttcgatggaggtcatttaacccagtatggtggtcttatcttttttcaggaacttttttcccagttgaaactaaaagagcggatttctaagtatttagtaacgaatgaccaacgccgctactgtcgttattcggattcagatatccttgtccagttcctctttcaactgttaacaggctatggaacggactatgcttgtaaagaattgtcagctgatgcctactttccaaaattgttggaaggagggcagcttgcttcacagccaaccttatcccgttttctttccagaactgacgaggaaacagtccatagtttgcgatgcctcaaccttgaattggtcgaattctttttacagtttcaccagctaaaccaactcattgtagatatcgattctacccatttcacaacttatggcaagcaagaaggtgttgcttataacgctcactatcgtgctcatggctatcatcctctttatgctttcgaggggaagacaggttattgtttcaatgcccagcttcgtcctggtaatcgttattgttctgaagaggcagacagctttatcacacctgttttagaacggtttaatcaacttctctttcgaatggatagtggctttgcgaccccaaaattatacgatttaattgaaaaaacagggcaatactacctcataaaactcaagaaaaatactgttctgagccgtcttggagacctttccctcccttgcccacaggatgaggacttaaccatcttgccccactccgcctactcagaaactctctatcaagcaggatcttggtcgcacaagcgtcgtgtctgccagttctctgaacgaaaagaaggaaacttgttctacgatgttatttctctcgttacaaatatgacgagtggaacaagccaagaccagtttcagctttatcgtggacgtggtcaagccgagaatttcatcaaggagatgaaggagggattttttggcgataaaacggatagttcaaccttaatcaaaaacgaagttcgtatgatgatgagctgtatcgcctacaatctctatctttttttcaaacatctagctggaggtgacttccaaactttaacaatcaaacgcttccgccatctttttcttcacgtggtaggaaaatgtgttcgaacaggacgcaagcagctcctcaaattgtctagtctctatgcctattccgaattgttttcagcactttattctaggattagaaaagtcaacctgaatcttcctgttccttatgaaccacctagaagaaaagcgtcgttaatgatgcattaa

SEQ ID NO: 536 - DNA, 576 bp, Streptococcus pneumoniae
atgattgcccttacagatactggcttaacctttacaaaagatccttttgactgtgagcgctacgaggacttgcgaagtctgttatctgaaatgttgaatcagggatcagacctggatgcagaagaagtagcagaagtcttgaaaccaacttcagcttatgcgactcccttaatggacgtccgtgcttggattgttgaggatgagaagatttgtctggttaggggacaaggagaggatagttgggctttgccaggtggctttggtgaagtcggctattctccaactgaaaatattctcaaggaaattgaagaagaaaccggttttaaagccaaagttgaaagactgctagctgtttttgataccaatcgtttccaactacagagcaaacaatatgcaaagtttgtttttgaatgtaagcttctcgatggacaattccaagaaaatcaagaaatcgctgaccttcaattttttgcaattgaccaactgccgaatttatctgaaaaacgcattaccaaggagcaaatcgagattctttggcaggtttatcaaggtcagagggagcaatatcttgactaa

SEQ ID NO: 537 - DNA, 597 bp, Streptococcus pneumoniae
atgaatttatgggatattttctttacgactcaggcaaccgagccgcccaaatttgaccttttttggtatgttagcctatttacgctcttagccttaaccttttatacagcccatcgctatcgtgaaaagaaggtttaccaacgatttttccaaatcttgcagactgttcagttaatccttctttatggttggtactgggtcaatcatatgccactgtcagaaagcctacccttttaccattgccgtatggctatgtttgtggtactcttgcttcctggtcagtccaaatataaacaatactttgcattattgggaacatttgggacattagcagcctttgtttatccagtgccagatgcttacccttttccacatatcaccattctatcctttatctttggtcatttagcactcttggggaactctctagtttatctattgagacagtataatgcgcgattgctggatgtgaagggaatttttctcatgacctttgccctaaatgccttgatttttgtggtcaatttggtgacaggtggcgattacggatttttgacaacccgcccattggttgggggaacacgttctagtagctaa

SEQ ID NO: 538 - DNA, 261 bp, Streptococcus pneumoniae
atgcctgccttttcttccgcttgggaaatggctgacttgatagcagttgctgctgtatcaatatcaacaataattccatcctttacacctttacttttggcattactcacgccaattacatttaattcaccatttctctgctcggccacaagcaccttgacagagcttgttccaatatctagacctgtaaaaaagccttctctagccattacatcgcttcctctctatcttccaagtttcgcacttcgtattattccataa

SEQ ID NO: 539 - DNA, 1374 bp, Streptococcus pneumoniae
atggctagagaaggcttttttacaggtctagatattggaacaagctctgtcaaggtgcttgtggccgagcagagaaatggtgaattaaatgtaattggcgtgagtaatgccaaaagtaaaggtgtaaaggatggaattattgttgatattgatacagcagcaactgctatcaagtcagccatttcccaagcggaagaaaaggcaggcatttcgattaaatcagtgaatgtcggcttgcctggtaatcttttgcaggtagaaccaactcaggggatgattccagtaacatctgatactaaggaaattacggatcaagatgttgaaaatgttgtcaaatcagctttgacaaagagtatgacacctgaccgtgaagtcattacctttattcctgaagaatttattgtggatggtttccaagggattcgtgacccacgtggtatgatgggggttcgccttgaaatgcgtggtttgctttatacaggacctcgtactatcttgcacaatttgcgtaagacggttgagcgtgcaggtgttcaggttgaaaatgttatcatttcaccactagcaatggttcagtctgttttgaatgaaggggaacgtgaatttggtgctacagtgattgatatgggggcaggtcaaacgactgtcgctacaatccgtaatcaagaactccagttcacacatattctccaagaaggtggagattatgtaactaaagatatctccaaggttttgaaaacctctcgcaaattagcggaaggcttgaaactgaattacggggaagcctatccgcctcttgcaagcaaagaaaccttccaagtagaggttattggagaagtggaagcagtcgaagtgacggaagcctacttgtcagaaattatttctgcacgaatcaagcacatccttgaacaaatcaagcaagaattagatagaaggcgtctattggacctccctggtggtattgtcttaatcggtgggaatgccattttaccaggtatggttgagcttgctcaggaagtctttggcgtccgtgtcaagctttatgttccaaatcaagttggtatccgtaatccagcctttgcgcatgtgattagtttatcagaatttgcgggtcaattaacagaagttaatcttttggctcagggagcgataaaaggtgagaatgacttaagtcatcagccaattagttttggtgggatgctgcaaaaaacagctcagtttgtacaatcaacgcctgttcaaccagctcctgctccagaagtagagccggtggcgcctacagaaccaatggcggatttccaacaagcttcacaaaataaaccgaaattagcagatcgtttccgtggcttgatcggaagcatgtttgacgaataa

SEQ ID NO: 540 - DNA, 1257 bp, Streptococcus pneumoniae
atgacattttcatttgatacagctgctgctcaaggggcagtgattaaagtaattggtgtcggtggaggtggtggcaatgccatcaaccgtatggtcgacgaaggtgttacaggcgtagaatttatcgcagcaaacacagatgtacaagcattgagtagtacaaaagctgagactgttattcagttgggacctaaattgactcgtggtttgggtgcaggaggtcaacctgaggttggtcgtaaagccgctgaagaaagcgaagaaacactgacggaagctattagtggtgccgatatggtcttcatcactgctggtatgggaggaggctctggaactggagctgctcctgttattgctcgtatcgccaaagatttaggtgcgcttacagttggtgttgtaacacgtccctttggttttgaaggaagtaagcgtggacaatttgctgtagaaggaatcaatcaacttcgtgagcatgtagacactctattgattatctcaaacaacaatttgcttgaaattgttgataagaaaacaccgcttttggaggctcttagcgaagcggataacgttcttcgtcaaggtgttcaagggattaccgatttgattaccaatccaggattgattaaccttgactttgccgatgtgaaaacggtaatggcaaacaaagggaatgctcttatgggtattggtatcggtagtggagaagaacgtgtggtagaagcggcacgtaaggcaatctattcaccacttcttgaaacaactattgacggtgctgaggatgttatcgtcaacgttactggtggtcttgacttaaccttgattgaggcagaagaggcttcacaaattgtgaaccaggcagcaggtcaaggagtgaacatctggctcggtacttcaattgatgaaagtatgcgtgatgaaattcgtgtaacagttgtcgcaacgggtgttcgtcaagaccgcgtagaaaaggttgtggctccacaagctagatctgctactaactaccgtgagacagtgaaaccagctcattcacatggctttgatcgtcattttgatatggcagaaacagctgaattgccaaaacaaaatccacgtcgtttggaaccaactcaggcatctgcttttggtgattgggatcttcgccgtgaatcgattgttcgtacaacagattcagtcgtttctccagtcgagcgctttgaagccccaatttcacaagatgaagatgaattggatacacctccatttttcaaaaatcgt

SEQ ID NO: 541 - DNA, 237 bp, Streptococcus pneumoniae
ttgattccttctacagcaaattgtccacgcttacttccttcaaaaccaaagggacgtgttacaacaccaactgtaagcgcacctaaatctttggcgatacgagcaataacaggagcagctccagttccagagcctcctcccataccagcagtgatgaagaccatatcggcaccactaatagcttccgtcagtgtttcttcgctttcttcagcggctttacgaccaacctcaggttga

SEQ ID NO: 542 - DNA, 672 bp, Streptococcus pneumoniae
atgaatgtaaaagaaaatacagaacttgtttttcgagaagttgcagaggctagtctgagtgctaatcgagagagtggttcggtctctgtcattgcagttaccaagtatgtagatgtaccgacagcggaagccttgcttccgctaggtgttcatcatatcggtgaaaatcgtgtagataagtttctggaaaaatatgaagctttaaaagatcgagatgtgacttggcatttgattggtaccttgcaaagacgtaaggtgaaagatgtcattcaatacgttgattatttccatgcattggactcagtaaagctagcaggggaaattcaaaaaagaagtgaccgagtcatcaagtgtttccttcaagtaaatatttctaaagaagaaagcaaacacggtttttcgagagaggaactgctggaaatcttgccagagttagccggactagataagattgaatatgttggtttaatgacgatggcaccttttgaggctagcagtgagcagttgaaagagattttcaaggcggcccaagatttacaaagagaaattcaagagaaacaaattccaaatatacctatgaccgagttaagtatgggaatgagtcgtgattataaagaagcgattcaattcggttccacttttgttcgtataggtacatcattttttaagtag

SEQ ID NO: 543 - DNA, 540 bp, Streptococcus pneumoniae
atgtctttaaaagatagattcgatagatttatagattattttacggaggatgaggattcaagtctcccttatgaaaaaagagatgagcctgtgtttacttcagtaaattcttcacaggaaccggctctcccaatgaatcaaccttcacagtcggctggtacaaaagagaacaatatcaccagacttcatgcaagacaacaggaattggcaaatcagagtcagcgtgcaacggataaggtcattatagatgttcgttatcctagaaaatatgaggatgcaacagaaattgttgatttattggcaggaaacgaaagtatcttgattgattttcagtatatgacagaggtgcaggctcgtcgttgtttggactatttggatggagcttgtcatgttttagctggaaatttgaaaaaggtagcttctaccatgtatttgttaacaccagtgaacgttattgtaaatgttgaagatatccgtttaccagatgaagatcaacagggtgagttcggttttgatatgaagcgaaatagagtacgataa

SEQ ID NO: 544 - DNA, 264 bp, Streptococcus pneumoniae
atgatttttttaattcgtatgatttataatgcagtggatatttactccctgattttgatagccttcgctgtcatgtcttggtttccaggtgcctacgaatccagtttaggtcgttggattgtagcgttggtgaaaccagtgcttgctcccttgcaacgcctgcctttacagatagcgggtcttgatttatctgtttgggttgcgattgttttggttcgatttttaggagaaaacttagtgcgttttctggcgatgataggatga

SEQ ID NO: 545 - DNA, 786 bp, Streptococcus pneumoniae
atgaataaagggatttatcagcatttctccatagaagatcgtccatttcttgacaagggaatggaatggataaagaaggtagaagatagctatgctccttttttaactccttttatcaatcctcatcaggagaagctattaaagattttggcaaaaacctatggtcttgcttgtagcagtagtggggaattcgtctcgagtgagtatgttcgagttttattatacccagattatttccaaccagagttttcagattttgaaatatctcttcaggaaattgtgtattccaataaatttgaacatttaacgcatgctaagattttagggacagtcatcaatcaattagggattgaacggaaactttttggagatatcctagtagatgaagaacgggcgcagattatgattaatcagcagtttcttcttctctttcaagatggactaaagaaaattggtcgtatacctgtttcgctggaggaacgtcctttcaccgagaaaatagataagctagaacagtatcgagaactggatttatctgtgtctagttttcgattagatgttcttttatcaaatgttttgaaactatctaggaatcaagcaaaccagttgattgaaaagaaacttgtccaagtaaattatcatgtggtagacaaatcagattacactgttcaagttggagacttgattagtgtgagaaaatttggtcgcttgagattacttcaagataagggacaaacgaaaaaagagaagaaaaaaataaccgtccagttattattaagtaagtga

SEQ ID NO: 546 - DNA, 789 bp, Streptococcus pneumoniae
atgccaattacatcattagaaataaaggacaagacttttggaactcgattcagaggttttgatccagaagaagtcgatgaatttttagatattgtggttcgtgattacgaagatcttgtgcgtgcgaatcatgataaaaatttgcgtattaagagtttagaagagcgtttgtcttactttgatgaaataaaagattcattgagccagtctgtattgattgctcaggatacagctgagagagtgaaacaggcggcgcatgaacgttcaaacaatatcattcatcaagcagagcaagatgcgcaacgcttgttggaagaagctaaatataaggcaaacgagattcttcgtcaagcaactgataatgctaagaaagtcgctgttgaaacagaagaattgaagaacaagagccgtgtcttccaccaacgtctcaaatctacaattgagagtcagttggctattgttgaatcttcagattgggaagatattctccgtccaacagctacttatcttcaaaccagtgatgaagcctttaaagaagtggttagcgaagtacttggagaaccgattccagctccaattgaagaagaaccaattgatatgacacgtcagttctctcaagcagaaatggcagaattacaagctcgtattgaggtagccgataaagaattgtctgaatttgaagctcagattaaacaggaagtggaagctccaactcctgtagtgagtcctcaagttgaagaagagcctctgctcatccagttggcccaatgtatgaagaaccagaagtag

SEQ ID NO: 547 - DNA, 2793 bp, Streptococcus pneumoniae
atgaaactcaaagacacccttaatcttgggaaaactgaattcccaatgcgtgcaggccttcctaccaaagagccagtttggcaaaaggaatgggaagatgcaaaactttatcaacgtcgtcaagaattgaaccaaggaaaacctcatttcaccttgcatgatggccctccatacgctaacggaaatatccacgttggacatgctatgaacaagatttcaaaagatatcattgttcgttctaagtctatgtcaggattttacgcaccatttattcctggttgggatactcatggtctgccaatcgagcaagtattgtcaaaacaaggtgtcaaacgtaaagaaatggacttggttgagtacttgaaactttgccgtgagtacgctctttctcaagtagataaacaacgtgaagattttaaacgtttgggtgtttctggtgactgggaaaatccatatgtgaccttgactcctgactatgaagcagctcaaattcgtgtatttggtgagatggctaataagggttatatctaccgtggtgccaagccagtttactggtcatggtcatctgagtcagcccttgctgaagcagagattgaataccatgacttggtttcaacttccctttactatgccaacaaggtaaaagatggcaaaggagttctagatacagatacttatatcgttgtctggacaacgactccatttaccatcacagcttctcgtggtttgacggttggtgcagatattgattacgttttggttcaacctgctggtgaagctcgtaagtttgtcgttgctgctgaattattgactagcttgtctgagaaatttggctgggctgatgttcaagttttggaaacttaccgtggccaagaactcaaccacatcgtaacagaacacccatgggatacagctgtagaagagttggtaattcttggtgaccacgttacgactgactctggtacaggtattgtccatacagcccctggttttggtgaggacgattacaatgttggtattgctaataatcttgaagtcgcagtgactgttgatgaacgtggtatcatgatgaagaatgctggtcctgaatttgaaggtcaattctatgaaaaggtagttccaactgttattgaaaaacttggtaacctccttcttgcccaagaagaaatctctcactcatatccatttgactggcgtactaagaaaccaatcatctggcgtgcagttccacaatggtttgcctcagtttctaaattccgtcaagaaatcttggacgaaattgaaaaagtgaaattccactcagaatggggtaaagtccgtctttacaatatgatccgtgaccgtggtgactgggttatctctcgtcaacgtgcttggggtgttccacttcctatcttctacgctgaagatggtacagctatcatggtagctgaaactattgaacacgtagctcaactttttgaagaacatggttcaagcatttggtgggaacgtgatgccaaagacctcttgccagaaggatttactcatccaggttcaccaaacggcgagttcaaaaaagaaactgatatcatggacgtttggtttgactcaggttcatcatggaatggagtggtggtaaaccgtcctgaattgacttacccagccgacctttacctagaaggttctgaccaataccgtggttggtttaactcatcacttatcacatctgttgccaaccatggcgtagcaccttacaaacaaatcttgtcacaaggttttgcccttgatggtaaaggtgagaagatgtctaaatctcttggaaataccattgctccaagcgatgttgaaaaacaattcggtgctgaaatcttgcgtctctgggtaacaagtgttgactcaagcaatgacgtgcgtatctctatggatattttgagccaagtttctgaaacttaccgtaagattcgtaacactcttcgtttcttgattgccaatacatctgactttaacccagctcaagatacagtcgcttacgatgagcttcgttcagttgataagtacatgacgattcgctttaaccagcttgtcaagaccattcgtgatgcctatgcagactttgaattcttgacgatctacaaggccttggtgaactttatcaacgttgacttgtcagccttctaccttgattttgccaaagatgttgtttacattgaaggtgccaaatcactggaacgccgtcaaatgcagactgtcttctatgacattcttgtcaaaatcaccaaactcttgacaccaatccttcctcacactgcggaagaaatttggtcatatcttgagtttgaaacagaagacttcgtccaattgtcagaattaccagaggctcaaacttttgctaaccaagaagaaatcttggatacatgggcagccttcatggacttccgtggacaagcacaaaaagccttggaagaagctcgtaatgcaaaagttatcggtaaatcacttgaagcacacttgacagtttatccaaatgaagtggtgaaaactctactcgaagcagtaaacagcaatgtagctcaacttttgatcgtgtcagacttgaccatcgcagaaggaccagctccggaagctgcccttagcttcgaagatgtagccttcacagttgaacgtgctgctggtgaagtatgtgaccgttgccgtcgtatcgacccaacaacagcagaacgcagctaccaggcagtcatctgtgatcattgtgcaagcatcgtagaagaaaactttgcggacgctgtcgcagaaggatttgaagagaaataa

SEQ ID NO: 548 - DNA, 186 bp, Streptococcus pneumoniae
atgaaattaaaaacacttgctttaattagtggtatcgtcggtcttgtgggaggaattttacttcttattggtccttttgtcttgttgggaacaacggtaaacacagctgctacaactcttaatggaggagctactgcaggggctttttcaggtgttgcctgtactcttgaatgccttgaagattga

SEQ ID NO: 549 - DNA, 261 bp, Streptococcus pneumoniae
atggaggagctactgcaggggctttttcaggtgttgcctgtactcttgaatgccttgaagattgaaaatcttgttcttggtatcattgctattgtttactataaaggagataagcgtgtaggtgcagctccgtctgtactaatgattgtttctggtggagttagtctcattccattcttaggatgggttggggggattcttgctattatcggaggatctctattccttgcaacattgaagaaattcaaatcagaagaataa

SEQ ID NO: 550 - DNA, 189 bp, Streptococcus pneumoniae
atggaaaataatgactcgtttactaaactaaaagagtcaactcaaaaattattcgatgcgcagaaaaaaaggttaaataatgaagatagaatagaaacaaccaaaaacaatgtgattgccaaacattgtcaaacagtcctttcctttttggttttgactagcttttttgtgaaaaattgtgtaaaatag

SEQ ID NO: 551 - DNA, 216 bp, Streptococcus pneumoniae
ctttgttccattcagactcaccgtggcgagcaaaaaccaattttaccattagatggattctcctttaaattttccgaggtttcccctcgtttatctattctattttacacaatttttcacaaaaaagctagtcaaaaccaaaaaggaaaggactgtttgacaatgtttggcaatcacattgtttttggttgtttctattctatcttcattatttaa

SEQ ID NO: 552 - DNA, 693 bp, Streptococcus pneumoniae
atggtaaaattggtttttgctcgccacggtgagtctgaatggaacaaagctaaccttttcactggttgggctgatgttgatttgtctgaaaaaggtacacaacaagcgattgacgctggtaaattgatcaaagaagctggtatcgaatttgaccaagcttacacttcagtattgaaacgtgctatcaaaacaactaacttggctcttgaagcttctgaccaattatgggttccagttgaaaaatcatggcgcttgaacgaacgtcactacggtggtttgactggtaaaaacaaagctgaagctgctgaacaatttggtgatgagcaagttcacatctggcgtcgttcatacgatgtattgcctccaaatatggaccgtgatgatgagcactcagctcacacagaccgtcgttatgcttcacttgacgactcagtaatcccagatgctgaaaacttgaaagtgactttggaacgtgctcttccattctgggaagataaaatcgctccagcttttaaagatggtaaaaacgtattcgtaggagctcacggtaactcaatccgtgcccttgtaaaacacatcaaaggtttgtcagatgatgagatcatggacgtggaaatccctaacttcccaccattggtattcgaattcgatgaaaaattgaacgttgtttctgaatactaccttggaaaataa

SEQ ID NO: 553 - DNA, 2412 bp, Streptococcus pneumoniae
atgataaggaataaaaaacaagattatgtactggcctacaagcaaccagcttcaaccacttacatgggttgggaagaagaagctttaccgataggtaatggttctttaggagcaaaagtatttggccttatagggtctgaacggattcaatttaatgaaaaaagtctctggtctggaggtccacttcctgatagttcagattatcagggtggaaatcttcaggatcagtatgtttttttagctgagattcggcaggctttggagaagagagattacaatctggctaaggaactggctgagcagcacctaattgggccaaaaacgagtcaatatgggacctatctgtcttttggggatattcacattgagttcagccagcaaggtacgactttgtctcaggtgacggactatcagagacagttgaatattagtaaggcacttgcgacgacttcttatgtctataagggaacgcgatttgaacgtgaagcttttgcgagttttccagatgatctcttggttcaatgttttactaaggaagggttggaaactctagattttactatagaactatccttgacctgtgatttggcttctgatggaaagtatgagcaggaaaaatctgattacaaggagtgtaagttggatattactgattctcatatcttgatgaagggaagagttaaggataatgatctgcggtttgctagttatctagcttgggaaacggatggagatattagagtttggtcagatagggttcagatatcaggagccagttatgccaatctcttcttggccgctaagacggattttgcccaaaatcctgctagcaattatcgcaagaaactagatttagagcaacaggtgatagacttggtggacacagctaaagaaaagggctatacccaattgaaatcaaggcatatcgaggactaccaagccttattccagcgtgttcaattggatttggaagctgatgttgacgcatccactacagatgatttgttaaaaaattataagccacaagaagggcaggctttggaggagctgttcttccagtatggacggtatttattgattagttcgtccagagactgcccagatgctctaccagctaacctacagggagtctggaatgcggtcgacaatcctccttggaattcggactatcacttaaatgtcaatctgcagatgaattattggccagcctatgttaccaatctcctagagacggtctttccagtcatcaactatgtagatgatttgcgtgtctatggtcgtctagcggctgtaaagtatgcaggaatcgtctctcagaaaggtgaggaaaatggttggttggttcatactcaagcgactccctttggttggacggcacctggttgggattactattggggttggtcaccagctgccaatgcgtggatgatgcaaaccgtttatgaagcctattcattttatagggaccaagactatcttagggagaaaatttatcccatgttgagggaaacggttcgtttttggaatgcctttttacataaggatcagcaggcgcagcgttgggtgtcttctccgtcttattccccagaacatgggccgatttcgattggcaatacctatgaccaatctctgatttggcagttatttcatgattttattcaggctgctcaggaattgggactggatgaggacttgttgactgaggttaaggagaagtctgatttactaaatcctttgcaaatcactcaatctggtcgaatcagggagtggtatgaggaggaagagcagtattttcaaaatgagaaagtggaggcccagcatcggcacgcttcccatctagtgggactctatcctggcaatctctttagctacaagggacaagagtatattgaagcggcgcgtgctagcctcaatgatcgtggagatggcggcacaggctggtccaaggctaataagatcaatctctgggcgcgtttgggagatggcaatcgagcccataaattattggcagagcagttaaagacatccaccttgcaaaatctttggtgtagccatcctccttttcagatagatggtaattttggtgctactagtggcatggcagaaatgttactccagtctcatgcagcttatctggtacctctagctgccctacctgatgcttggtcaacaggttctgtttcaggcttaatggcacgtggacattttgaagtgagcatgagctgggaagataaaaaactcttacagttgaccattttatcaaggagtggaggagatttgcgagtttcttatccagatattgagaagagtgtgattaaaatgaatcaagaaaaaataaaagcgaaatgcatggggaaagattgtatttcggtggcaacagcagaaggtgatcttgttcaattttatttttaa

SEQ ID NO: 554 - DNA, 711 bp, Streptococcus pneumoniae
gtggatctgatggcttatattgagatgaaacactgttacaagcgttatcaggttggggacacggagattgtggctaatcgtgatgtgaattttgagattgaaaagggggagctggttattatccttggtgcttcaggtgcaggcaagtcaacagttctcaaccttcttgggggaatggataccaatgatgaaggggaaatctggattgatggtgttaatattgcggattatagttcccaccagcgcaccaattaccgtagaaatgatgtggggtttgtttttcagttttataatctagtttctaatctgacagctaaggaaaatgtggaactggcttctgaaattgtgacagatgccttgaatcctgatcaggtcttgacagatgtaggtctggctcatcgtctaaataactttccagcccagctttctggaggggagcaacagcgagtctccattgcacgcgcggtagccaaaaatcctaaaattcttctttgtgatgaacctactggagccttggattatcagacgggcaagcaggttttgaaaattctccaagatatgtctcgtcaaaagggagcgacggtgatcatcgtgactcataatggagctttggcgcccattgctgatcgcgtgattcatatgcacgatgccagtgtcaaggatgtggtgctcaaccagcatcctcaggatattgacagtttggagtactag

SEQ ID NO: 555 - DNA, 2775 bp, Streptococcus pneumoniae
atgccagtgtcaaggatgtggtgctcaaccagcatcctcaggatattgacagtttggagtactagcatgatcaagcgaaaaacttattggaaggacttaattcagtccttcacaggctccaaggggcgttttttatccatcttgatcctgatgatgttgggatctctagccttagtaggcctcaaagtaaccagtcccaacatggaggcgacagctaatgcttatttaacaactgctcaaaccttggatttggcagtcatgtctaactatggcttggatcaagcagaccaagaagaactaaaacagacggagggcgcagaggtcgagtttggctatttgacagatgtgactatggataatgggcaggatgccattcggctgtactccaaaccagagcgaatttcaacctttcagctaagaaagggacgacttcctcagtcagacaaggaaatcgctttggccactcatttgcaagaccaatacagcgtgggacaggagattagttttaaagaaaaagaagagggtcattcctctttaaaagaccatacttataccattactggttttgtggattcggctgaaatcctctcccagcgagatatgggctacgcaggaagtggaagtgggactctggcagcctatggggtgattttacctagtcaatttgatcagaaagtctacaatatagctcgtttgaaatatcaagatttagcaggtttaaatgccttttcatcagcttatgaagaaaaatccaagcaacatcaggaagagcttgaacaaattttatcagataatggcaaggtacgtctgcaacttttgaaaaaagaaggacaagagtctctagacaaggggcaagagacccttgacaaggctcagactaatttgcaggaaggcaagcgtcgtttagcagctgctcaagctcgtatacaggctcaagaaagtcaactagccttgtttcctcaagttcagagagagcaggctagtgctcaacttacccaagccaagcaggaattgggcaaggaagaggccaaactaaagcaagctgaacaaaatctagcccaagaaaaggaaaaattagaaaaacatcagcaagtcttggacgatttggcggagccaaggtatcaggtctataatcgtcagaccatgccaggtggtcagggctatcttatgtatagcaatgcttcatccagtattcgagcagtgggcaatatctttcctgtggtactttatgccgtagcagccatggtgacatttacgaccatgactcgctttgtagacgaagagcgaactcatgcagggatttttaaggccttgggttatcgtagtaaggatattatcgccaagtttctcctttatggactagtagctgggactgtcggaacggctctaggtagtatacttggtcattatttgctagccagtgtaatttcaagtgtcattacaaaaggcatggtggtgggagaaactcagattcagttctattggacctatagcttactagcttttgtcttgagcttgttggcgagtgtgttatcagcctatctggtggcttggagggaacttcatgacgaagcagcccagcttctacttcctaaacctcctgtcaaaggagctaaaatcttattggagcgtatcggttttatctggcgtcgtctcagttttactcataaggtaacagcccgcaacatctttcgttataagcagagaatgttgatgacaatctttggtgtggcaggttctgtagctctgctctttgcaggtttgggaatccaatcttctgtagcaggagttccgtctaaacagtttcaacaaatccaacagtatcagatgcttgtctctgaaaatcctagtgcgaccaatcaggacaaggtagagctagcagaagtgttgaaagggcaggagatactagcctaccagaaaatctattctaaaacgctagacaaggatttcaaaggcaaggctggtcttcaaaacattactcttatgatgatagagaaggaagatttgactccctttatccatcttcaacatcatcagcaggagctgacattaaaagatggcatcgttattacagctaaactcgcccagctggcaggtgtcaaggttgggcagactttagaaattgaaggtaaggaactaaaggtcgctgctattactgagaactacgttggtcactttatttatatgagtcaggctagctatgagcaactttacggacagctaccccaagccaacacttatctggtctcattaagggataccagtgcaactagtatcgaaagtcaggcgggcttgcttatgaatcaatctgcggtgtccagcgttgtccaaaatgcttcagccattcgactcttcgactctatcgctagctcactcaatcagaccatgaccatcttggtcatcgtatcggttctattagctattgtcatcctttacaatctgaccaatatcaacgtagctgagagaatccgtgaactctccactatcaaggttcttggttttcataataatgaagtcaccctctacatttaccgtgagacgattgtgctgtcccttgtgggaatcgtacttggtctgatagctggtttctatttacaccaatttttgattcaaatgatttcgcctgcgactattctcttttatccgcaggtaggctgggaagtctatgtaatcccagtggcagcagtaagcttcattttgaccttgcttggtttcttcgtcaattattatctgagaaaggttgatatgttagaagccctgaaatctgtagagtaa

SEQ ID NO: 556 - DNA, 519 bp, Streptococcus pneumoniae
atggaagaaaaaagattggagtatcctatggtaacttttctcggaaatcctgtgagctttacaggtaaacaactacaagtcggcgacaaggcgcttgatttttctcttactacaacagatctttctaaaaaatctctggctgattttgatggcaagaaaaaagtcttgagtgtcgttccttctatcgatacaggcatctgctcaactcaaacacgtcgttttaatgaagaattggctggactggacaacacggtcgtattgactgtttcaatggacctaccttttgctcaaaaacgttggtgcggtgctgaaggccttgacaatgccattatgctttcagactactttgaccattctttcgggcgcgattatgccctcttgatcaacgaatggcacctattagcacgcgcagtctttgtcctcgatactgacaatacgattcactacgttgaatacgtggataatatcaattctgagccaaacttcgaagccgcaattgcagctgctaaagccctatag

SEQ ID NO: 557 - DNA, 930 bp, Streptococcus pneumoniae
atgaaaaaattaggtacattactcgttctctttctttctgcaatcattcttgtagcatgtgctagcggaaaaaaagcaacaacttctggtcaaaaactaaaagttgttgctacaaactcaatcatcgctgatattactaaaaatattgctggtgacaaaattgaccttcatagtatcgttccgattgggcaagacccacacgaatacgaaccacttcctgaagacgttaagaaaacttctgaggctgatttgattttctataacggtatcaaccttgaaacaggtggcaatgcttggtttacaaaattggtagaaaatgccaagaaaactgaaaacaaagactacttcgcagtcagcgacggcgttgatgttatctaccttgaaggtcaaaatgaaaaaggaaaagaagacccacacgcttggcttaaccttgaaaacggtattatttttgctaaaaatatcgccaaacaattgagcgccaaagaccctaacaataaagaattctatgaaaaaaatctcaaagaatatactgataagttagacaaacttgataaagaaagtaaggataaatttaataagatccctgctgaaaagaaactcattgtaaccagcgaaggagcattcaaatacttctctaaagcctatggtgttccaagtgcctacatctgggaaatcaatactgaagaagaaggaactcctgaacaaatcaagaccttggttgaaaaacttcgccaaacaaaagttccatcactctttgtagaatcaagtgtggatgaccgtccaatgaaaactgtttctcaagacacaaacatcccaatctacgcacaaatctttactgactctatcgcagaacaaggtaaagaaggcgacagctactacagcatgatgaaatacaaccttgacaagattgctgaaggattggcaaaataa

SEQ ID NO: 558 - DNA, 849 bp, Streptococcus pneumoniae
atgattgcagaatttatcgatggattgcaaaaattccatttcctacaaaatgccttgataacagctattgtcgtcgggattgtagctggagccgtgggatgtttcattattctacgcgggatgtcactcatgggagatgccatttcacatgctgtcttaccaggtgtagccctctccttcatcttgggccttgacttctttatcggagccattgtctttggattgctagctgccatcatcattacctacatcaaaggaaactcgattatcaaaagcgataccgccatcggcattaccttttcttctttcttagccctcggtatcatcttgattggtgtcgctaaaagttcaactgaccttttccatatcctttttggtaatatcctggccgtccaagatacggatatgtttattactatgggtgtgggggcagccatcctcttgttaatctggattttcttcaagcaactcttgataacttcctttgatgaactcttggctaaagccatgggaatgcctgtcaatttctatcactaccttctcatggtactcctgactctcgtgtctgtgacagccatgcaaagtgtcggaactatcctgattgtagccatgctgattaccccagctgcaactgcttatctgtatgctaatagtctgaaaagcatgattttcctttcctcaaccttcggagctactgcttcagttttgggactctttattggctatagttttaatgttgcggcaggttctagtatcgtgcttacagctgctagtttctttctcattagcttctttatcgctcccaaacaacgatatttgaaactgaaaaataaacatttgttaaaataa

SEQ ID NO: 559 - DNA, 756 bp, Streptococcus pneumoniae
atgtatattaagagacaggaggaatacaagtttatgatacgtatcgaaaatctcagtgtctcctacaaagaaacgttggcacttaaggatatttcactagtgctccatggaccaacaattaccggcatcattggtccaaacggcgctgggaaatcaacactattaaaaggtatgctgggaattatcccacatcaaggtcaggcatttctcgatgacaaggaagttaaaaaatccttacaccgaattgcctatgtcgaacaaaaaatcaatatcgactacaactttcccatcaaggtcaaggaatgcgtctcgttaggactatttccctctattcctctctttcgaagtttaaaggctaaacattggaagaaagtgcaagaggcccttgaaatcgtcggcctagctgactacgctgaacgtcaaattagtcaactgtctggaggtcaattccagcgggtcttgattgccagatgtttggtgcaggaagccgactatatcctcttggatgaaccctttgctgggattgactctgtcagtgaggaaatcatcatgaatacgctgagagatttgaaaaaagctgggaagacggttctcatcgttcaccacgacctcagcaagattccccactacttcgatcaagtcttacttgtcaatcgagaagtgattgcctttggtccaacaaaagaaacttttaccgaaaccaatctaaaagaagcttacggtaatcaactctttttcaatggaggtgacctatga

SEQ ID NO: 560 - DNA, 1953 bp, Streptococcus pneumoniae
ttgcattccctagtgatttttgttaagataaatgcaaatacaaatgaaagcgagaacaagatgacacgttatcaagatgatttttatgatgctatcaatggagaatggcaacagacagctgaaatcccagcagataagtctcaaacaggaggttttgttgatttagaccaggaaattgaagacctgatgttggcgacaacagacaagtggttagcaggtgaagaagtgcctgaggatgctatcttggaaaactttgtcaaataccaccgcctagttcgtgattttgacaagagagaagctgacggtatcacacctgtcttaccactccttaaagaattccaagaattggaaacttttgcggattttacagctaaactagcagagtttgagcttgcaggaaaaccaaacttccttccttttggtgtatcgccagactttatggatgctagaatcaatgttctatgggctagcgctccaagcacaatcttgccagatacgacctactatgcagaagaacatcctcagcgcgaagagctcttgactctttggaaagaaagcagcgcaaatctcctcaaggcttatgatttctctgatgaagaaattgaagacttgctagaaaaaagacttgaattggaccgccgagttgcggcagtggtgctctctaatgaagaaagttcagaatatgctaaactctatcatccatattcttacgaagatttcaagaaattcgcgcctgccctacctttggatgacttcttcaaagcagttattgggcaattaccagacaaggttattgtagacgaggaacgtttctggcaagcagcagagcaattctacagtgaggaagcctggtctctccttaaagcaaccttgattttgagtgttgtcaatctttcaaccagctatttaacagaggatatccgtgttttgtctggtgcctacagccgtaccctttctggagttccagaggcaaaagataaggtcaaagcagcttatcatctagcacaggaacctttcaagcaagccctgggtctttggtacgcccgtgagaagttctctccagaagccaaggcggatgtggagaaaaaagtggcaaccatgattgatgtctataaggagcgtctgcttaagaatgactggctcactccagaaacctgtaaacaggctatcgtgaagctcaatgtgatcaaaccttatattggctatccagaagaattgcctgcacgttacaaggataaggtagtgaatgaaactgccagtctttttgagaatgctctagcctttgcgcgtgtggaaatcaagcacagttggagtaagtggaaccagcctgtaaactataaggaatggggcatgcctgctcatatggtcaatgcctactacaatcctcagaagaacctgattgtctttccagcggccattttacaggcgcctttctatgacttgcatcagtcatcttctgctaactacggtggtattggggcagtgattgcccatgaaatttcccacgcctttgatactaacggagcttcctttgacgaaaatggtagcctcaaggattggtggacagagagcgactatgctgccttcaaggagaaaacacaaaaagtcattgaccaatttgatggacaggattcttatggagcaaccattaacggtaaattgactgtatcagaaaacgtggctgacttgggaggaatcgcagcagcgcttgaagcagctaagagagaagcagacttctcagcagaagagttcttctacaacttcggtcgcatctggcgcatgaaaggtcgtccagaatttatgaaacttttggctagcgtcgatgtgcacgcaccagccaaactccgtgtcaatgtgcaagtaccaaacttcgacgatttctttacaacctatgatgtcaaagaaggagacggaatgtggcgttcaccagaggagcgcgtgattatttggtaa

SEQ ID NO: 561 - DNA, 630 bp, Streptococcus pneumoniae
atgaaaatccataaaaccgtgaatcctgttgcctatgaaaatacctattatctagaaggcgaaaagcacctcatcgtcgtcgatcctggtagtcattgggaagccattcgtcagacaatcgagaagatcaacaaaccgatctgtgctattctcttgacccacgcccattatgaccatatcatgagtctggacttggttcgcgagacgtttggcaatcctcctgtctatatcgcagagagcgaagccagctggctctacactcctgtcgataatctctccggtctccctcgccacgatgatatggcagatgtggtcacaaaacctgcagaacacacctttgtctttcacgaagaataccaactagaggaatttcgttttaaggttctaccgaccccagggcactctatcggtggtgtttccctagtctttcctgatgctcacctagtcttgacgggagatgctctattccgcgaaactatcggacggaccgaccttccgactggtagcatggagcaactccttcatagtatccagacccaactcttcaccctaccaaactacgatgtctatccaggacatggtccagctactactatcgctcacgaaaaggccttcaatccctttttttag

SEQ ID NO: 562 - DNA, 201 bp, Streptococcus pneumoniae
atggattttcatactagctccaatctcaaagaatgtactaatactcttcgaaaatctcttcaaaccgcgtcaactttatctgcaacttcaaagcagtgctttgaacagcctgcggctagctttctagtttgctctttgattttcattgagtataaattaagtatagcacagttagggagaataggtaaggatttaaaatga

SEQ ID NO: 563 - DNA, 243 bp, Streptococcus pneumoniae
ttggcgcggtttgaagagatttttgaagagtataaaaatcctcaagatactttcttctatcctttagtttataaggagaatacctatgaaaaaactgctatttctatctttgctctcctaatgttaggagtttgctgcctgttcctattcagccagcaaagctataaaaaactcgttcaatactatgctaacgaccagaacctgcccagtaggataacttatagtgaatatagcgacaaatga

SEQ ID NO: 564 - DNA, 2223 bp, Streptococcus pneumoniae
atgccgaaagaagtgaatttaacaggcgaagaagttgtcgctttaaccaaagaatatttaacggaagaggatgttcattttgtccataaggccttggtctatgctgttgaatgccacagtggtcaatatcgcaaatcaggcgagccttatatcattcaccctatccaagtggcaggtattttagctaagctaaagctggatgctgtaacagtagcttgtggattcttgcatgatgtggtggaagatacagatgcgaccttggacgatttggaaagagagtttggtcctgatgtgcgggtgattgttgacggagttaccaagcttggcaaggtcgagtacaaatcgatcgaggagcaattagcggaaaatcatcgcaagatgctcatggccatgtctgaggacatccgcgttattttggtcaaactgtctgaccgcttgcacaatatgcggaccctgaaacatcttcgaaaagacaagcaggagcgtatttccaaagaaaccatggaaatctatgccccacttgcccatcgtttggggatttccagtgtcaaatgggaattagaagacttgtctttccgttatctcaatccaacggagttttacaagattacccatatgatgaaggaaaagcgcagggagcgtgaggccttggtggatgaggtagtcacaaaattagaggagtatacgacagaacgtcacttgaaagggaagatttatggtcgtcccaagcatatttactcaattttccgcaaaatgcaggacaagagaaaacggtttgaggaaatctatgatctgattgctattcgttgtattttagatacccaaagtgatgtttatgccatgcttggttacgtgcatgaattttggaaaccgatgccaggtcgcttcaaagactatattgccaaccgcaaggccaatggttatcagtctatccatacgactgtttatggaccaaaagggccgattgaattccagattcgaaccaaggaaatgcacgaggtggctgagtacggggttgcggctcactgggcttataagaaaggtataaaggggcaagttaacagcaaggaatcagctattggaatgaactggatcaaggagatgatggagctccaagaccaggctgatgatgctaaggaatttgtggactctgttaaggaaaactatctggctgaggagatttacgtttttaccccagatggagctgtccgttcccttcccaaagattcaggaccgattgattttgcctacgaaatccataccaaggtcggtgaaaaagcaactggtgccaaggtcaatggccgcatggttccactgacaaccaagttaaagacaggggatcaggttgaaattatcgccaacccgaactcctttggacctagccgtgactggctcaatatggtcaagactagcaaggcgcgcaataagattcgccagttctttaaaaaccaagataaggaattgtctgtcaacaagggtcgtgagatgctgatggctcagttccaagaaaatggctatgtggcaaataaatttatggacaagcgccacatggatcaagttctgcaaaagaccagttacaagacagaagactccctctttgcggccattggttttggggaaatcggtgcgattaccgtctttaaccgtctgactgaaaaggaacgccgtgaggaagagcgtgccaaggccaaggctgaggcagaggagcttgtcaaaggtggcgaggtcaaggttgaaaataaagaaactctcaaggtcaagcatgaggggggagtggttattgaaggtgcttctggtctcctagtgcggattgctaagtgttgtaaccccgtgcctggtgacgatattgttggctacattaccaagggtcgtggtgtggctattcaccgtgtggactgtatgaacctgcgtgcccaagaaaactacgagcaacgtctccttgatgtggaatgggaagaccagtactctagctcaaataaggagtatctggcccatatcgatatctacggtctcaaccgtacaggactgttgaacgatgtactgcaagttctttcaaatacaaccaagaatatttcaacggtcaatgcccaaccaaccaaggatatgaagtttgctaatatccatgtgtccttcggtattgccaacctctctacactgaccacggttgtcgataaaattaagagtgtgccagaagtttactctgtcaaacggaccaacggctag

SEQ ID NO: 565 - DNA, 243 bp, Streptococcus pneumoniae
ttgcccctttatacctttcttataagcccagtgagccgcaaccccgtactcagccacctcgtgcatttccttggttcgaatctggaattcaatcggcccttttggtccataaacagtcgtatggatagactgataaccattggccttgcggttggcaatatagtctttgaagcgacctggcatcggtttccaaaattcatgcacgtaaccaagcatggcataaacatcactttgggtatctaa

SEQ ID NO: 566 - DNA, 444 bp, Streptococcus pneumoniae
atgaaaatcattatccaacgggttaaaaaagcccaagtgagtatagaaggccagattcagggaaaaatcaatcagggacttttattgctggttggtgttggaccagaggaccaagaggaagatttggactatgctgtgagaaaactggtcaatatgcggattttttcagacgcagaaggcaagatgaacctgtctgtcaaagatattgaaggagaaatcctctctatttctcagtttaccctctttgcggatactaagaaaggcaatcgtccagcctttacaggggcagctaaacctgatatggcatcagacttctatgatgctttcaatcaaaaattagcgcaagaagtgcccgttcagacaggcatctttggagcagatatgcaggttgagctggttaataacggacctgttaccattatcctagatactaaaaagagataa

SEQ ID NO: 567 - DNA, 228 bp, Streptococcus pneumoniae
ctctattcccagattagaccgagattctggcgttttgctttacaaattctcctatgggatagcctgatgattctctccttggtgtctttaagtgatattccacttttccttcagggaactctcctcatcctaggacatctcatcccttcctatcgcatctgccaaagcctgaaaagagacttcccccaagcatatcaagaaccgatttctttttggagtattttatga

SEQ ID NO: 568 - DNA, 423 bp, Streptococcus pneumoniae
gtgcttgtcatgaaaaaactctatagaatccattttatagcaattgcagttattgatttgctactatttgcattttttatcattagactcgagacatcttttgagtggctcttgctctctgatttaattttcttccttactcaaggactcctgctatttctcttgatcgtccgactcaaacatcaattcgctgagatttatcctcaaatcaataaaaagattcgcttctactatttaggggttctcaccattgattttctattttttgttctcttagccttcattagttctcagcgtttttcatctcttatgccaatcatcactgcttgccattctactttttattatatgacagctgactacctaagagaaaactatccagacttttacgacaaacacatctctttatgggagtgtctctaa

SEQ ID NO: 569 - DNA, 708 bp, Streptococcus pneumoniae
atgaaaaaatcactaaaaatttttgctacatctaaatggtttgacctcttcggggttgctttggtcgttgggattgcgattgcatctggttacctcaactcacgcctcgataaatttgtagactggggaccatggacagctcttgtaccctttggattgatttccgtaaccaacgttgggatttccatgttgtccactcgtttcacggggaaattaagcaaatggggaaattactttagtattgttaataccattttgtccggtgctattgattatatccttggaaataaggcggccatcattacctatcccgtcaccttcctcatttatacctttgctataaagaaatggaaagcttcgcaagaaggcagacccaaccaaatgagccaaaaacaggtaaaattggcggtcatcatcatttccatcatcgccttcctctttgcctttgtgaccaactatatcggatatgagggcaagatgaatctccttgcctacgtaacaactattgcctttgcactatccctcattgccaatgctttgaatgcattaaaactaacaactcagtggggcttttggttgatttacaatttcgttcagctgacaaaagctggtattcaaggaaacttcgccaatatcggtaaatacatcttttatatcctcaatgcaatcggagctttatttgtctggaatgatgaagaagttagataa

SEQ ID NO: 570 - DNA, 420 bp, Streptococcus pneumoniae
ttgattgaagtatttctaattcatcatttagactatacaagtgaccagattcacgaggaagctgacgtcttggaacacactgtctctgacctgttcgtggaaagactagataaactgctaggtttccctaaaacctgcccccacggaggaactattcctgccaagggagaactactcgttgaaatcaataacctcccactagctgatatcaaggaagctggcgcctaccgcctgactcgggtgcacgatagttttgacattctccattatctggacaagcactcacttcacatcggtgaccagctccaagtcaagcagtttgatggcttcagcaataccttcactatcctcagtaacgacgaggatttacaagtgaatatggacattgcaaaacaactctatgtcgagaaaatcaactaa

SEQ ID NO: 571 - DNA, 240 bp, Streptococcus pneumoniae
atgaccccaaacaaagaagactatctaaaatgtatttatgaaattggcatagacctgcataagattaccaacaaggaaattgcggctcgcatgcaagtctctccccctgccgtaactgaaatgatcaaacgaatgaaaagtgaaaatctcatcctaaaggacaaggaatgtggctatctactgactgacctcggtctcaaactggtctctgagctctatcgtaagcacacgcttgattga

SEQ ID NO: 572 - DNA, 843 bp, Streptococcus pneumoniae
atgacgaaaatagctcttctttcagatattcatggaaataccaccgccttggaggctgttttggcagatgctcagcagctaggagtggatgaatactggcttttgggagatattctcatgccagggacaggacgtagaaggattttggacttgttggatcaactaccgattacggctagagttttgggaaactgggaagacagtctttggcatggtgtccgtaaggaattggacagtactcgccccagtcaacgctatctcttgcgccagtgccagtatgttttagaggaaatttccctagaagaaattgaagtgctccacaatcaacctcttcaaattcatcgtcagtttggggatttgacggtgggaattagccatcatctgcctgataagaactgggggcgagagttgattcatactggcaaacaagaggagtttgaccgcttggtgactcatcctccctgtgatattgctgtttatggacatattcaccagcagttgcttcgttacgggactggtgggcaattgattgtcaatccgggttcgattggccaacctttctttttggacgctcagctacggaaggacttgcgggcccagtatatgattttggagtttgatgacaaaggcctggtagatatggacttccgacgggtagactacgatgtggcagcggaattgcagctggctaaagacctgagacttccctattttgaggtttactatgaaagtctggtcaatgggatccaccatactcatcatcaggaatttttgagagaattggctcagaaagagggctgcgaccgggagttagacgactggttgaaaagtggtaacgattga

SEQ ID NO: 573 - DNA, 195 bp, Streptococcus pneumoniae
ttggaatttgcatcctcttctcctttttacgaggctaccctgcctctactcttctttttctattattataccctttttagttgtaatgtcaatcgttaccacttttcaaccagtcgtctaactcccggtcgcagccctctttctgagccaattctctcaaaaattcctgatgatgagtatggtggatcccattga

SEQ ID NO: 574 - DNA, 315 bp, Streptococcus pneumoniae
atgcaaattccaagtagatttaccattgcgactcatatgctgataatcattgccctcgaggggaaggaaagcaaggtgaccagtgattttctggctgctagtgtcggggtcaatcctgtcattatcagaaagatcttgtcccagttgaagaaggcagagctgatttcagtagcgcgtggaacgggcggaacagagattgtcaaggaccttaaggatattagtcttttagatgtttatcaaggcgggtcgaatgtcttggtaagacaggtcaactcttcagtttccatgacaatccgaatccaaattgccctgtag

SEQ ID NO: 575 - DNA, 219 bp, Streptococcus pneumoniae
tcttttagatgtttatcaaggcgggtcgaatgtcttggtaagacaggtcaactcttcagtttccatgacaatccgaatccaaattgccctgtaggagctcatattcatgatgttttggatcaaaaattggagagaattcagttgactatggaggcagaacttggtcaaaccagtctagaaaaagtcgtggccgatgcagagagtcagatgaaggattaa

SEQ ID NO: 576 - DNA, 303 bp, Streptococcus pneumoniae
atgtatctcgttataggaattgtattagcctttatagtgtcattttggaaggataatagaagtttgtggaatccagtattatttttattatccctcatttcaagttatttttatctatcctaccttttttataaaaatggatacgagaatgttcagttagctttttatgtatttgcctttgtcttacttccttttttgctttttctaagtggcatctttttaatctataatggggtcattttgttgaagcgagagggacgttccaagccccattatctctcaatgctatttgatttttattga

SEQ ID NO: 577 - DNA, 1074 bp, Streptococcus pneumoniae
atggccaatatttttgactatctgaaagatgtcgcatatgattcttattacgaccttcccttgaatgagttagacattctaaccttaatagaaatcacctacctctcctttgataatctggtctccacacttcctcaacgtcttttagatctagcacctcaggttccaagagatcccaccatgcttactagcaaaaatcgccttcaattattagatgaattggctcaacacaagcgcttcaaaaattgcaaactctcccattttatcaacgacatcgaccctgaactgcaaaagcaatttgcggctatgacttatcgtgtcagcctcgatacctatctgattgtctttcgtgggacagatgacagtatcattggctggaaggaagatttccacctgacctatatgaaggaaattcctgctcaaaagcacgcccttcgctatttaaagaacttttttgcccatcatcctaagcaaaaggttattctagctgggcattccaagggaggaaatctcgctatctatgctgctagccaaattgagcaaagtttgcaaaatcagatcacagcagtttatacatttgatgcacctggtctccatcaagaattgacacagactgcgggttatcaaaggataatggatagaagcaagatattcattccacaaggttccattatcggtatgatgctggaaattcctgctcaccaaatcatcgttcagagtactgccctgggtggcatcgcccagcacgatacctttagttggcagattgaggataagcacttcgtccaactggataagaccaacagtgatagccagcaagtagacacaacctttaaagaatgggtggccacagtccctgacgaagaacttcagctctacttcgacctcttctttggcactattcttgaggctggtattagctctatcaatgacttggcttccttaaaggcgcttgaatacattcatcatctctttgtccaagctcaatccctcactccagaagaaagagaaaccttgggtcgccttacccagttattgattgatactcgttaccaggcatggaaaaatagataa

SEQ ID NO: 578 - DNA, 678 bp, Streptococcus pneumoniae
atgcacaagattttattaatagaagatgatcaggtcattcgtcaacaggtcgggaaaatgctctctgaatggggatttgaagtggtcctggtagaagactttatgaaagttttgagtctatttgttcagtcggaacctcatctggtcctcatggatattggtttgcccttgtttaatggttatcactggtgtcaggaaatccgcaagatttccaaggtacctatcatgtttctttcttcgagagaccaggctatggatattgtcatggcaatcaatatgggggcggatgactttgtgaccaagccttttgaccagcaggttcttttagctaaggttcagggcttgttgcgtcgttcctatgagtttgggcgtgatgagagtttgctggaatatgctggtgttatcctcaataccaaatccatggatttacattatcaagggcaagtcttgaatttgaccaagaatgaattccagattttacgcgtgttatttgagcatgcaggcaacatcgtagcacgtgacgacctgatgcgggaactttggaacagtgactttttcattgatgataataccctctctgtcaatgtggctcgtttgcgtaaaaagttggaggagcagggattggtaggatttatcgagaccaagaaaggaatagggtacggattgaagcatgcttga

SEQ ID NO: 579 - DNA, 975 bp, Streptococcus pneumoniae
atgcttgattggaaacaattttttctagcctatctgcgctcccgtagtcgtctttttatctatctgctttctttggcatttcttgtcttactctttcagtttttatttgccagtctaggaatttacttcctctactttttcttcttgtgttgctttgtaaccatattatttttcacttgggacatattggtggaaacgcaggtctatcgccaggaacttctctatggagagagggaagccaagtctcctttggaaatagctttagcagaaaaattagaagcgcgtgagatggaactctatcagcagaggtcaaaagcagaaagaaaactgacggatttgctggattactataccttgtgggtccatcagataaagacccccattgcagccagtcaactcttagttgcagaagtggtcgaccgccaactgaagcagcagctagaacaggaaattttcaaaatcgactcctataccaacctagttttacagtacctgcgtttagaaagtttccatgatgatttgctcttaaagcaggttcaaattgaggacttggtcaaggaaataattcgtaaatatgctcttttctttattcaaaaaggcttaaatgtcaatctacatgaccttgataaagaaatcgtgacggataaaaagtggctgctagtggttattgagcaaatcatctcaaacagtctcaagtacaccaaggaaggtggtctggagatttatatggatgaccaagagctttgtatcaaagatacgggaatcgggataaaaaacagtgatgtcctccgagtatttgaacgtggcttttcaggatacaatggccgtttgacccagcagtcctctggacttggcctttatctatctaagaaaatttctgaagaactggggcaccagattcgtatcgagtctgaggtcggaaaaggaacgacagtgcggattcagtttgctcaagtgaacttagtccttgagtaa

SEQ ID NO: 580 - DNA, 1983 bp, Streptococcus pneumoniae
atgcttagaaactatgaaataataaaaaaggagaacatcatgattaacattactttcccagatggcgctgttcgtgaattcgaatctggcgtaacaacttttgaaattgcccaatctatcagcaattccctagctaaaaaagccttggctggtaaattcaacggcaaactcatcgacactactcgcgctatcactgaagatggaagcatcgaaattgtgacacctgatcacgaagatgcccttccaatcttgcgtcactcagcagctcacttgttcgcccaagcagctcgtcgtcttttcccagacattcacttgggagttggtccagccatcgaagatggtttctactacgatactgacaacacagctggtcaaatctctaacgaagaccttcctcgtatcgaagaagaaatgcaaaaaatcgtcaaagaaaacttcccatctattcgtgaagaagtgactaaagacgaggcacgtgaaatcttcaaaaatgacccttacaagttggaattgattgaagaacactcagaagacgaaggcggtttgactatctatcgtcagggtgaatatgtagacctctgccgtggacctcacgttccatcaacaggtcgtatccaaatcttccaccttctccatgtagctggtgcgtactggcgtggaaacagcgacaacgctatgatgcaacgtatctacggtacagcttggtttgacaagaaagacttgaaaaactaccttcaaatgcgtgaagaagctaaggaacgtgaccaccgtaaacttggtaaagagcttgacctctttatgatttcacaagaagtgggacaaggtttgccattctggttgccaaatggtgcgactatccgtcgtgaattggaacgctacatcgtaaacaaagagttggcttctggctaccaacacgtctacactccaccacttgcttctgttgagctttacaagacttctggtcactgggatcattaccaagaagacatgttcccaaccatggacatgggtgacggggaagaatttgtccttcgtccaatgaactgtccgcaccacatccaagtttttaaacaccatgttcactcttaccgtgaattgccaatccgtatcgctgaaatcggtatgatgcaccgttacgaaaaatctggtgccctcactggccttcaacgtgtacgtgaaatgtcactcaacgacggtcacctattcgttactccagaacaaatccaagaagaattccaacgtgcccttcagttgattatcgatgtttatgaagacttcaacttgactgactaccgcttccgcctctctcttcgtgaccctcaagatactcataagtactttgataacgatgagatgtgggaaaatgcccaaaccatgcttcgtgcagctcttgatgaaatgggcgtggactactttgaagccgaaggtgaagcagccttctacggaccaaaattggatatccagattaaaactgcccttggaaaagaagaaaccctttctactatccaacttgattttttgttaccagaacgcttcgacctcaaatacatcggagctgatggcgaagatcaccgtccagtcatgatccaccgtggagttatctcaactatggaacgcttcacagctatcttgattgagaactacaagggggccttcccaacatggctggcaccacaccaagtaaccctcatcccagtatctaacgaaaaacacgtggactacgcttgggaagtggccaagaaactccgtgaccgcggtgtccgtgcagacgtagatgagcgcaatgaaaaaatgcagttcaagatccgtgcttcacaaaccagcaagattccttaccaattaattgttggagacaaagaaatggaagacgaaacagtcaacgttcgtcgctacggccaaaaagaaacacaaactgtctcagttgataattttgttcaagctatcctagctgatatcgccaacaaatcacgcgttgagaaataa

SEQ ID NO: 581 - DNA, 390 bp, Streptococcus pneumoniae
atgaaggtggaaccacgttgcgacgtcctttcgaggatgtcgcatttttttattaggatactaattatggagttgcaagaattagtggagcgcagttgggcaatccgacaagcttatcacgaactggaagttaagcatcatgattccaagtggacggtagaagaagacctcttggctttatctaatgatattggaaatttccaacgactggtgatgacaaagcaaggacgctactatgatgaaacaccctacacactggaacaaaaactttcagaaaatatctggtggctattagaactttctcaacgtttggatatagacattctgacggaaatggaaaacttcctctctgataaagaaaagcaattgaacgttaggacttggaagtag

SEQ ID NO: 582 - DNA, 291 bp, Streptococcus pneumoniae
gcttgtcggattgcccaactgcgctccactaattcttgcaactccataattagtatcctaataaaaaaatgcgacatcctcgaaaggacgtcgcaacgtggttccaccttcatttatgtacctcaaaagagagggacacctctgatcggctctaacgtggccaccgttttatgttttcataaaaaactcaagagtagtatcagtttagacttcctatgcgtttccagcaaccacgcactctctagtagaaagggactaagtgacttgtctctatggattattatagcatga

SEQ ID NO: 583 - DNA, 210 bp, Streptococcus pneumoniae
gtgattatcatgcgtagattctattcccatctcccctactatctggtcatattattcttttattggccactttatgagttgttcttactagttgtttctgacccccttacactcaaggaactctatataaacaatcttctcttctttacacctctggtaatcttgattatatcgttactctatagctaccgtttccgtttctcactttga

SEQ ID NO: 584 - DNA, 630 bp, Streptococcus pneumoniae
atgaaactagcagttattgcagcaaatggacaagcggggaaagcaattgttgaagaagcagtcaaacgaggacatgaagtaacggctattgttcgttctgaaaacaaaagtcaagctgagtctattattaaaaaagatttatttgagttgacaaaagatgatcttactggatttgatgctgttatttcagcgtttggtgcttatacaccagatacgctaccgctccacagcaaatcaatcgaactatttaatcagcttcttgctggaacacagacacgttttctagttgtagggggagcaggaagtctttatatagatgaaacaaaaacgacacgacttttagatacgtctgattttcctgaagaatttaagtcactagcaaaagatcaagcggatgaattggatcttcttcgtacaaaaaataatctcaactggacttttgtcagtcctgctgtagattttattcccgatggtgaaaaaacaggaaactacattctagcaggagaaatttttactactaatgaaaaaggaataagccagattagttatgcagattatgctattggattggtagatgaacttgaaaaaggtcatcatataaaagaacgtatctctttacttgaaaaataa

SEQ ID NO: 585 - DNA, 270 bp, Streptococcus pneumoniae
atggcaatctcaaaagagaaaaaaaatgaaatcattgcacaatatgcacgtcacgaaggtgatacaggttcagtagaggttcaagttgctgtccttacttgggaaatcaaccaccttaacgaacacatcaaacaacacaaaaaagaccacgctacttaccgtggattgatgaaaaaaatcggtcgccgtcgtaacttgcttgcatacttgcgtaaaaacgacgttaaccgttaccgtgagttgatcaactctctaggacttcgtcgctaa

SEQ ID NO: 586 - DNA, 225 bp, Streptococcus pneumoniae
tctataaacgatttatctagcaagaatcatgatgctaagggcgtcaaaaatccgtatgaaaatagggaaatgacacagtgttcgatgagcacaaggagtttcatctttttcactaggattttagcccgggctcaaatcagctctctgacttcagagggcttttttattgaggttttatcggtaacaattttggagactacaaaaacctcaaacggtatcagctaa

SEQ ID NO: 587 - DNA, 477 bp, Streptococcus pneumoniae
atgggacagacaatcatatctgctattggtgtttatatttccaccagtatcgattatttaattattttaattattttatttgcacagctatcacagaataaacagaaatggcatatttatgcggggcaatatctaggcacaggcttacttgtaggggcgagtttagttgctgcttatgtcgttaatttcgtgcctgaagaatggatggttggattgcttggtttaatccctatctatttagggattcgctttgcaattgttggagaagatgcggaagaagaagaggaagaaattattgaaagattagaacaaagcaaggcaaatcaactgttttggacagttacattgctgacaattgcgtctggcggagataatttaggtatctatataccttattttgcttcgttagattggtcacagaccctcgtggccttgcttgtgtttgtaatcggcataattatcttttgcgagaattag

SEQ ID NO: 588 - DNA, 750 bp, Streptococcus pneumoniae
atgttttatacttatttgcgtggattagttgtattgctcttatggtccatcaatggcaatgctcactatcataatactgataaaattcctaatcaagatgaaaattatattttagttgcgcctcaccgtacctggtgggatcctgtttatatggcctttgcgaccaagccaaaacagttcatctttatggcaaaaaaagaactctttaccaaccgtatctttggttggtggattcgtatgtgtggcgcctttcccatcgaccgtgaaaatcccagcgcctcagccatcaaatatcctatcaacgttctcaaaaaaagtgaccgctctctcatcatgtttccaagtggtagccgccactcaaacgatgtcaaggggggcgcagcactgattgccaaaatggccaaggtccgtatcatgccggttacctacaccggtcccatgactttgaagggcttgattagccgtgaacgtgtcgatatgaactttggaaatccaatcgatatctcagatatcaagaaaatgaatgatgaaggcattgaaacagtcgccaatcgtattcaaacagaattccaacgtctggacgaagaaacgaaacaatggcacaatgataaaaaaccaaatccactctggtggtttatccgcatccctgccctcatccttgctattatcctcgctatcctaaccatcatctttagctttatcgcaagcttcatctggaacccagataagaaaagagaagaacttgcatag

SEQ ID NO: 589 - DNA, 2337 bp, Streptococcus pneumoniae
atggataaaaataagattatgggattaacccaaagagaagtcaaggaaagacaggctgagggtttggtcaatgactttaccgcatcagccagtaccagcacttggcaaatcgttaaacgaaatgtctttaccctttttaacgctttgaacttagccattgctttggctcttgcctttgtgcaggcttggagcaatctggtcttctttgctgttatctgctttaacgctttttctgggattgtgaccgagctacgagccaaacacatggtggacaagctcaatctcatgaccaaggaaaaggtcaaaaccatccgtgatggtcaggaagttgctcttaatcctgaagaattagtgctaggagatgtcattcgtttgtctgcaggagagcagattcctagtgatgccttggttttggaaggctttgcggaagtcaatgaagccatgttaacgggagaaagtgatttggtgcaaaaggaagttgacggcttacttttgtcaggaagtttcctagccagtgggtcagttttatctcaagttcaccatgtcggtgcagacaactatgctgccaaactcatgcttgaggctaagaccgttaaacccatcaactcccgtatcatgaaatcgctggacaagttggctggttttactgggaagattatcattccctttggtctggctctcttgctggaagccttgcttttaaaaggcctgcctctcaagtcatctgttgtaaactcgtcgacagctcttttgggaatgttgcctaagggaattgcccttttgaccattacttcgctcttgactgcagttatcaagctaggtttgaaaaaggtcttggtgcaggagatgtactctgttgagaccttggcgcgcgtggatatgctctgtctggacaagacgggtaccatcacccaaggaaagatgcaggtggaggctgttcttccgttgacggaaacgtatggtgaagaggctattgccagcatcttgactagctacatggcccatagtgaggataagaatccaactgcccaagccattcgccagcgttttgtgggagatgttgcttatcctatgatttccaatcttcccttctccagcgaccgcaagtggggggctatggagttagaaggcttggggacagttttcttaggggcacctgagatgttgctggattctgaagtcccagaagccagggaggccttggagagaggatcacgtgtcttggtcttagctctcagtcaggagaaattagaccatcacaaaccacagaaaccatctgatattcaggctctagccttgctggaaatcttggaccccattcgagagggagcagcagagacgctggactatctccgttctcaggaggtaggactcaagattatctctggtgacaatccagttacggtgtctagcattgcccagaaggctggttttgcggactatcacagctatgtagattgctcaaaaatcaccgatgaggaattgatggccatggcggaggagacagctattttcggacgtgtttcccctcatcaaaagaaactcatcatccaaacgttgaaaaaagcgggtcatacaacggctatgacaggggacggggttaatgatatcttggcccttcgtgaggcggattgttctatcgtgatggcggagggggatccagcaacccgtcagattgccaatctggttctcttgaactcagactttaatgatgttcctgagattctcttcgagggtcgtcgcgtggtcaataacattgcccacatcgccccgattttcttgataaagaccatctattccttcctgttagcagtcatctgtattgccagtgctttactaggtcggtcagagtggattttgattttccccttcattccgatccagattaccatgattgaccagtttgtggaaggtttcccaccattcgttctgacttttgagcgaaatatcaaacctgttgagcagaatttcctcagaaaatccatgcttcgtgccctaccaagcgctctcatggtcgtcttcagcgtcctgtttgtgaaaatgtttggcgcgagtcaaggttggtctgagttagaaatctcaactctactctattatctcttggggtcaattggtttcttatccgtatttagagcctgcatgccatttaccctatggcgtgtcctcttgattgtttggtcagtaggaggtttcctagccacagctctcttcccaagaattcaaaaactgcttgaaatttcaaccttaacagaacaaacgttgcctgtttatggtgtcatgatgttggtctttaccgtgattttcatcctgaccagtcgttaccaagcgaaaaaataa

SEQ ID NO: 590 - DNA, 231 bp, Streptococcus pneumoniae
tccttactatctcgcaaaaggagcaacaacgtttccatttgttcttgttttctagacacgatacacctcctttatgaatccattatatcgctttcaaaaaataatatacttcgcattttgtcctttgcaatggacatttttgtttttatcaaaaatatgatatcaaatagaacagaacctcactatgccaaaatcattttaccttttcttcataacatctattttagttga

SEQ ID NO: 591 - DNA, 1464 bp, Streptococcus pneumoniae
gtgtctagaaaacaagaacaaatggaaacgttgttgctccttttgcgagatagtaaggattatatatctgctaaagtattgggagaaaaattaaattgctctgataaaacggtttatcgccttgtcaagggaatcaacaaagattgtccggtagaagcattcattttatctgaaaaaggcagaggtttcaaattaaatccaagaagttccctcgtggacgttgatgggaattttacagaggcttttgatcctgaagtaaggcgtgaaaaattactagaacgtctcttgttgactgctcctaagccacattctatttatgatttaggagaggaattctacgtaagcgagtcagtagtactaaaagatcgtcagatattacaagagagtctagcaatttatgggttagatttaaaaatgagacaacgaaagctttttattgatggggatgaggctcaaattcgttcagccattctaaatctactgccaatgtttaatcagttggatttagagcaaattacacagaataaggttcagcctcttgacggagaacttgctcacttttgtttgggattactgattacacttgagagagaattgggggtaaacattccctatccatataatataaatattttctctcacctgtatatttttatcagtaggaatcgtcgtagtactagtattcatgttgtagcaccttcaaaacctactattgttgatgagaaaatttacagtgtctgtcaaaaaattattcaagaaattgaacaatattttaggatgaaggttgatgcagttgagattgactatctttatcaatacgttgtatcttcgagattgcaaaaaccattttcttccgggaagcttcctttttctcagcgagttttagatgtcactcattactattttagccgtatgtgtatggacaatagagagattgaaacgacagatcctgactttgttgacttggcgagtcatatcagtcccttactgaggagattagataatagagtacagattaagaatagtcttttatcacaaattcttttaacctatcctaatctggttaaagagttaacaactatttctaaagaagtgagtctagtatttggttttgcttccttgagtctggacgagattggttttctagtcttatattttgcacggtttcaagaaaagcgagcacgtcctctaaaaacagtagtgatgtgtacatcaggtgtcggaacttcagagcttttacgagcacgattagaaaagcaattttctgaattggatattattgatgtagttgcttatcatcaattagatgagctgataaatctatatccagatttagatttcattgtgacgacggtagctttgcaggaaccagcaagtgtcccgtttgtcctagttagtgtttttctaaccgagggtgataaacaacgtcttcaagcaaaaattcaggagataaactatgaataa

SEQ ID NO: 592 - DNA, 429 bp, Streptococcus pneumoniae
atgaataatctttcgcttgtccttatggatatatctgttcaaaatcgtcaagaagcctacaaagaattagcaaatcaaatcagccttcttgtttctgaagatacagaaaaaatagaagagcttctatattaccgtgagagacagggaagtatagaggttgctaaaggtgttcttctaccacattgtgaaggaaactttcaacatcatgtcttagtgattactagattaaaatcacctatcagagaatggtcgaaggatatccagtgtgttgaccttattatcggtttggccattgcagtatcacaggacaagtcatgtattaaaacattgatgagaagactagcagatgaatcattcataaatcaattaaaacagttaacaaaagaagaattacgggagataatatatggaaatcaaagatattcttaa

SEQ ID NO: 593 - DNA, 453 bp, Streptococcus pneumoniae
tatatggaaatcaaagatattcttaatgtgagtctgatccagacggatttacagatgcagagcaaagaagaggtttttgaggcattagctcaactattggttgagacgggttatgtgtctgatagagaccaatttatcgaaggtctttatcagagagaggcagaaggacagaccggtattgggaattatattgctattccccatagcaagagttctgctgtggagaaggcgggggtagtcatagctataaatcacaatgagattccttgggagaccattgatgggaaaggggtcaaagtaattgtactctttgcagttggtgatgatacagaagctgctagggagcatttgaagaccttatcactctttgctcgaaaacttggtaatgacgaagttgttgccaaattagttcgggctcagacatctgatgatgtgattgcagctttttgttaa

SEQ ID NO: 594 - DNA, 312 bp, Streptococcus pneumoniae
atgaaaattgttggtgttgcagcttgtactgtgggaattgcccacacttatattgcacaggaaaaattagagaatgccgcaaaggtagctggacatgtgattcatgttgagactcaggggacaataggggtagaaaatgaattgagtcaagagcagattgatgcagcggatgtagttattttagcagttgatgttaagatttctggtatggaacgctttgagggtaaaaagattatcaaggttccaacagaagtggcagtcaaatctcccaataaactgattgctaaagctgttgagattgttacgaaataa

SEQ ID NO: 595 - DNA, 1107 bp, Streptococcus pneumoniae
aaatatttaaggagaaaatatatgttgaaacacttaaacttaaaaggtcacttattgacagccatttcctatatgattccaattgtttgtggtgcaggattcttagttgccattggtttagcaatggggggtggtgttcctgacgctcttgtagcaggaaaattcactatctgggatgctttagcaactatgggtggtaaagcccttggtctcttgccagttgttattgctacaggtttgtcttactcgattgctggtaagccagggattgcaccaggttttgttgttggtctaattgccaattctgttggttcagggtttatcggtggtatcttgggaggttatatagctggtttcttggttcaagcgattattaaaaaggtcaaagtaccaaactggattaaaggtttaatgccaaccttgattattccttttgtagcctctttggtaagtagtttgattatgatttatattattggagcgcctatcgcagcctttaccaactggttgacgagcttattacaaagcttgggaagtgcttcaaatggtttgatgggggcagttattggagttctcagtgctgttgactttggtggcccacttaataaaacagtctatgcctttgtgttgactttacaggctgaaggtgtgaaagaaccattgactgctttgcaattggtgaatactgctacaccagttggatttggattggcctattttatcgcgaaattactcaaaaaaaatatctatactcaagaggaaatcgaaacattgaaatcggctgttcctatggggattgtcaatattgttgaaggtgtaattccgattgttatgaataacttggttccaggtctcattgcaacaggtatcggtggtgctgttggtggtgctgtttctttgacaatgggtgctgattctgccgtgccatttggtggagtgcttatgttaccaaccatgactcgtccagtagctggtatttgtgctttgttagccaacattgtagtcacaggacttgtctacgcgattttgagaaaaccaataaaacatacagaaccagttatgactgttgaagaagagattgatttgtcagatattgaaattttgtaa

SEQ ID NO: 596 - DNA, 696 bp, Streptococcus pneumoniae
atgtcaagaattgaattttcaccatctttgatgaccatggatttggacaaattcaaagagcagattacttttttgaatgataaagtagcatcttatcatatcgatattatggatggccattttgttcccaatattaccttgtctccttggttcattcaagaagttcaaaaaattagtgacacacctttatcagttcatctgatggtcacagacccaaccttttgggtagatcaagttctcgatttacaatgtgagtatatttgtattcatgctgaagttctgaatggtcttgcttttcgtttgattgataaaattcatgatgcaggtctaaaggctggtgttgtccttaatcctgaaacacctgtttctacaatctttccctacattgatttacttgacaaagtaactattatgactgtagatccaggttttgcaggacaacgctttttggagtctaccttgtataaaatccaagaactccgtcagcttagagttcagaatggttatcactacatcattgagatggatggttcttcgagtcgtaagactttcaaacaaattgatgtggcaggaccagatatttatgttataggtcgcagtggattatttggtttggatgacgatattgccaaagcctgggatatctgttctagagattacgaagaaatgaccggaaaaacaatgccaatcaaataa

SEQ ID NO: 597 - DNA, 1971 bp, Streptococcus pneumoniae
atgtcactacaatcagttaacgccattcgttttcttggcgtagatgctattaacaaatctaattctggtcacccgggaatcgtcatgggtgctgcgccaatggcttatagcctatttacaaagcaccttagaattacacctgagcagccaaactggattaaccgagatcgctttatcttgtctgcgggtcatggatcaatgctactgtatgctctcttgcatttaacagggtataaggatgtatccatggacgagattaaaaatttccggcaatggggatctaagacacctggtcatcctgaagtgacgcatacgtctggtgtggatgcgacatctggtccgcttggtcaggggatttctactgccgttggtttcgcccaagcagagcgttttttagctgctaagtacaacaaagatggttttcctatttttgaccattatacttatgttatcgctggagacggtgacttcatggaaggagtgtctgcggaggcggcttcttatgcaggtcatcaagctttagataagcttatcgtcctctacgactccaacgatatctgcttggatggtgagaccaaagatactttctctgaaaatgttcgcgcccgttacgatgcttatggttggcatacagttctggtagaagatggaacagatttagcagcaatttctacagcaattgagacggccaagttttctggtaagccgagtttgattgaagtgaaaacggtaattggttacggctcacccaataaaagtggtacaaatgctgttcatggtgcaccactaggagcagaagaaacaggagcaactcgtaagtttttgggatgggattacgatccatttgaagtaccagaggaagtatattctgatttcaagacaaatgtagcggatcgtggtcaggaggcatacgatgcttgggctagtttggtgtctgattacaaggttgcttatcccgaagttgctagtgagattgacgctattgtagctggaaaatcccctgtaaccattactgaaaaagacttccctgtctatgagaatggcttctctcaagcaactcgtaattcgtcccaagatgctattaatacagcagcagcagttttaccaaccttcttaggtggatcggcagacttagctcactccaacatgacctacatcaaggcagatggcttacaagataaatataatccattaaaccgcaatattcagtttggggtacgtgaatttgccatgggaacaatcctcaatggaatggctcttcatggtggtttacgagtttatggcggaaccttctttgttttctctgactacgtcaaagctgctattcggctatcagccattcaggagttgcctgtaacttatgtctttacccatgattcaattgccgttggtgaagatggtccaactcatgaaccagttgaacatttggcaggtttacgctcaatgccaaacttgactgttatccgtccagcggatgcccgtgaaactcaagcggcttggcatcatgccttgaccagtaccaccactccaactgtcattgtcttaacccgtcaaaacttggtagttgaagaagggacagactttggtaaggtcgctaaaggagcctacgtcgtgtatgataccccgggatttgatactattatcattgctacaggatctgaggtcaatctagctatcaaagctgctaaggaattggttttacaaggtggtaaagtacgtgtggtatctatgccctcaaccgaactatttgatgctcaagatgctacctacaaggaagacattttaccatctaagactcgtcgtcgtgtggccattgaaatggcagcgacccaaagttggtacaagtatgttggtttggatggcgcggtcatcggtattgacatcttcggtgcgtctgccccagctcagactgtgattgataattatggatttacggtagagaatatcgttgctcaagttaagtccctatag

SEQ ID NO: 598 - DNA, 573 bp, Streptococcus pneumoniae; identical to SEQ ID NO: 19

SEQ ID NO: 599 - DNA, 573 bp, Streptococcus pneumoniae; identical to SEQ ID NO: 19

SEQ ID NO: 600 - DNA, 834 bp, Streptococcus pneumoniae
atgactgagttttcgttagatcttcttctaaaagccattaaactagctcgttcgacctactactatcacttgaaacagctagataaaacagataaggaccaagagcttaaagctgaaattcaatccatttttatcgaacacaagggaaattatgcttatcatcggatttatttagaactaagaaatcgtggttatctggtaaatcataaaagagttcaaggcttgataaaagtactcaatttacaagctaaaatgcgacaaaaacgaaaatattcttctcataaaggagacgttggtaagaaagcagagaatctcattcaaggccaatttgaaggctctaaaacaatggaaaagtgctacacagatgtgacagaatttgccattccagcaagtactcaaaagctttacttattaccagttttagatggctttaatagcgaaattatcgcctataatctttcaacttcacccaacttagaacaagtacaaacaatgttggaacaggcattcacagagaagcactacgagaatacgattctccatagtgaccaaggctggcaatatcaacacgattcttatcatcggttcctagagagtaagggaattcaagcatctatgtcacgcaagggaaacagcccagacaacggcatgatggaatctttctttggcattttgaaatcggagatgttttatggttatgagaagaactttagatctttagaaaaccttgaacaagctattgtggactacattgattactacaacaacaaacgaattaaggtaaaactaaaaggacttagccttgtgcagtacagaactaaatccttcggataa

SEQ ID NO: 601 - DNA, 531 bp, Streptococcus pneumoniae
ttgctagatgaaaaaaggaagaactatgtagaagataagagacaaaatttccctagtctccctaactggaaaatggatttattttcagaagaagaaaaaaggaattattttcaaaccacatgtgaaatttcaagtaaagactctgcaataaataaatacaaaatggaaaaaattattaagagatcaaataaaggaaatgtttatcgggcaattagaaaatcggacgggcaaaaagtaatcatcaagcagtcaagaccttttgtgaattatgatgctgaaggagaatggacagctcttgatgatataaaaaatgaagctcacatgctaaaaaaattagccgataaaagttatactactaatttaactgatgaattttatatcgtggatgattattttcttgttcaggaacaagttgacgggttaaactttgaagaatttattcgagaaacagaacactccttaaatattagagaaaaaacactgtataacattgtgaatatagtaagtgacatccataaactgggaatataa

SEQ ID NO: 602 - DNA, 417 bp, Streptococcus pneumoniae
atggatttattagagaaagaatgtttaaaatgtgataaaaatttccaacagggtgatatttggaattactattatttatcagataaggtgcctgcacaagggtggaaaatacacataagctcccaaataaaagacgctgtaaatatttttaagattgtgtataaactatcccaactaaataattgtagctttaaagtcgttaaaaatttagaggaattaaaaaaaattaattcccctagggaaatgagccctactgctaacaaatttataactctatatcctaagtcagaatctgaagctaagagtatgatttgtaatcttacgaatagactgtcagaatttaaggctccaaaaatactatctgactatcaatgtggaatgcattctctagttcattatagatatggggctttttaa

SEQ ID NO: 603 - DNA, 678 bp, Streptococcus pneumoniae
atgatttcaaagagattagaattggtagcttcctttgtgtcacagggggctattttactagatgtgggaagtgaccatgcttatctgcctatcgagttggttgagagaggccaaatcaaaagcgctattgcaggtgaggtggtggaaggtccctatcagtctgcggttaaaaatgttgaggctcacggcctaaaggagaaaatccaagtccgtttagccaatggcttggcagcttttgaagagactgaccaagtgtctgtcattaccattgctggcatgggtggtcgtttgattgctaggattttagaagaaggtttggggaagttagctaatgtagagcgtttgatcctccagcccaataatcgtgaagacgacttgcgtatctggctacaggatcatggattccagattgtagcagaaagcatcttagaagaagctggaaagttttatgagattttggtggtggaagcaggacaaatgaagctatcagccagtgatgttcgctttggtcccttcttgtccaaagaagtcagtccagtatttgtccaaaaatggcaaaaagaagctgagaagctagagttcgccctcggacaaatcccagaaaaaaatctggaagaacgtcaagttctagtagataagattcaagctatcaaggaggtgctccatgttagcaagtga

SEQ ID NO: 604 - DNA, 798 bp, Streptococcus pneumoniae
atgttagcaagtgaagtgatccaagcttatgaagccttttgccctcaggaattttctatggagggagacagccgtggtctgcaaattggcactttagacaagggtatccaaagggtcatggttgccctcgatattcgtgaagagacggtggcagaggccattgaaaagggtgtggacttgattatcgtcaagcacgcgcctatctttcgtcctatcaaggacttgcttgccagccgtccgcaaaatcagatttacatcgacctgattaagcatgatatcgcagtttatgtcagccataccaatattgatatcgttgaaaatgggctcaatgactggttttgtcagatgctaggaatcgaggagacgacttatctgcaggaaacaggtccagaacgtggaattggacgtattgggaatattcagcctcagacattttgggaattggcccaacaggtcaagcaagtctttgacctagatagccttcgaatggtgcattatcaagagaatgatttgcagaagcctatttcaagagtagcaatttgtggtggaagcgggcagtctttctataaggatgctttggcaaagggggcagatgtctatatcactggcgacatctactaccatactgctcaggatatgctgtctgatggcttgttagcattggatccaggtcactatatcgaagtgctttttgtggaaaaaatcgcagcactccttactcaatggaaagagaaaaaaggctgggaactagagattttacctagtcaagcatcgaccaatcctttccgtcatatctag

SEQ ID NO: 605 - DNA, 1104 bp, Streptococcus pneumoniae
atgaaaaaagttgccattattggagcaggaattgtgggagcaacagctgcctactacctctcgagagaaagtgacctagaggtgaccgtttttgaccatgagcaaggtcaagccaccaaggccgcagcaggaattatcagtccttggttttccaaacgccgtaataaagcctggtacaagatggcgcgcttgggggctgatttttatgtggatttattagctgatttagagaaatcaggacaaaaaatcgacttttaccagcgttcgggagtctttctcttgaaaaaggatgaatccaagttggaagaactttatcaactggccctccagcgcagagaagaatctcccttgatagggcaattagccattctggaccaagcttcagctaatgaattattccctggtttgcagggatttgaccgcctgctctatgcttctggtggagcgagagtagatggccaactcttggtaactcgtctgctagaagccagtcatgtcaagctggtcaaagaaaaagtgactctgacactcttatcatcaggctaccagattggcgaagaggtgtttgatcaggttattttggcaacgggagcttggttgggggacatgttagagcctttaggttatgaagtggatgtccgtcctcaaaaaggacaactacgagattatcagcttgcccaagacatggaagcttaccctgttgtcatgccagaaggggagtgggatttgattccctttgcaggtgggaaattatccttgggcgctacccatgaaaatgacatgggatttgatttgacggtagatgaacccttgctccaacaaatggaggaggcggccttgcctcattacccagttttagctagagcgacttcaagggctgagcgtgtgggaatccgtgcctataccagtgatttctctcccttctttgggcaggtgccagaattggcaggtgtctatgcaggcagtggactaggttcatcaggcctcacaactggtcctatcattggttaccatctagcccaactgatccaagacaaggagttgaccttggaccctctaaattacccaattgaaaactatgtcaaacgagtaaaaagcgaataa

SEQ ID NO: 606 - DNA, 192 bp, Streptococcus pneumoniae
atgaaaatcaaagaacaaactaggaaactagccgcgggttactcaaagcactgctttgaggttgtggatagaactgacgaagtcagctcaaaacactgttttgaggttgtagatagaactgacgaagtcagtaaccatacccatggcaaggcgacgttgacgtggtttgaattggattttcgaagagtataa

SEQ ID NO: 607 - DNA, 1020 bp, Streptococcus pneumoniae
atgcaagaaaagattttggtaactggtggtgccggttttattggaacccacactgttattgaattgatccaagcaggccatcaagttgttgtggtggataatcttgtcaatagcaatcgtaagagtttagaagttgttgaaagaatcacaggagttgagattcctttctatgaggcagatattcgtgacacagataccctcagagatattttcaagcaggaagaaccgactggtgtcattcactttgctggtttgaaggctgttggcgaatcaacacgtatccctcttgcctactatgacaacaatatcgctggaactgtcagccttttgaaagccatggaagaaaacaactgtaaaaacatcatcttcagttcttctgcgacagtttacggggatccgcacacagtgcccatcttggaagatttcccactttcagtgaccaacccatacggtcgtactaagctcatgctagaggaaattttgactgatatttacaaagcagactcagaatggaatgttgtcttgcttcgttactttaacccaatcggagcccatgagagtggtgatttgggagaaaatccaaacggtattccaaacaatctcttgccatatgtgactcaagtagccgttggaaaattagagcaagtgcaagtgtttggagacgattacgatacggaagatggaacaggtgttcgtgactatatccacgttgtcgatttggctaagggtcacgttgcagctttgaaaaaaatccaaaaaggttcaggactaaacgtttataaccttggaactggtaaaggttactcagttcttgaaattatccaaaacatggaaaaagcggtgggacgtcctattccttaccgcatcgtagaacgtcgcccaggtgatatcgctgcctgctactcagacccagcaaaagctaaagcagaactcggttgggaagcagaactcgacatcacccaaatgtgtgaagacgcatggcgttggcaaagcaagcatccaaatggatttgaagactaa

SEQ ID NO: 608 - DNA, 954 bp, Streptococcus pneumoniae
atgatgatttcaatcatcgtcccttgtttaaacgaagaggaagtacttcctcttttttatcaggctctggaagctttacttccagatttggaaacagaaatcgagtatgtctttgtcgatgatggatcaagtgatgggaccttggaactcttaaaggcctatcgggagcaaaatccggcagtccattatatttctttctctcgaaattttggcaaagaagcagccctttatgcaggcttgcaatatgcgacaggagatttggtggtggtgatggatgcagacctccaagatcctcctagtatgttgtttgagatgaaaaatgtactagacaaaaatgtagacttggactgcgttgggacacggagaactagtcgggagggagaacccttctttcgcagtttctgtgctgttctcttttatcgcctcatgcaaaaaatcagcccagtagctctgccgtcgggtgtccgtgactttcgtatgatgagaaggtctgtggtcgatgccattttaagcttgactgagtccaatcgtttttctaagggactctttgcctgggtcggctttaaaacccactatctggactatccaaatgtcgaaaggcaggctggcaagaccagttggagttttaggcaactctttttttactccattgaagggattgttaatttttcagatttccctttgactatagcctttgtagctggtctcctatcttgttttctttctctgctgatgaccttttttgttgtggttcggaccctcattttgggcaatccgacatctggttggacctctctgatggctgttattctctttcttggaggcattcaactcttgaccattgggattctcggtaagtatatcagtaagatttatttagagactaaaaaaagaccactttatcttatcaaagaaaaaagtgatgataggctaaaaaagatagaatttatctga

SEQ ID NO: 609 - DNA, 666 bp, Streptococcus pneumoniae
atgctaagtaaagaggattatactgaagaaatcgggctaataaagaaacaaaattatgtagaggctgaattgtatcctatagttgctgatataattaagccaactttaaaagatagtttatcaaaaagatatgtcttcggaagacaaagaaggggtttgggacaaatttattatggtctaagtaattttcctgatatagttattttagataagacttatgaaaacaaatctaggaaaagtataaaaattgaagaatggaagaaacttcgaggatgcgtggaagttaagaatttaaattatagtttaattacagaggaaaaaatcaaatcaaccatatcgaacagttttgaacatataactggagagatggaacaactaactggagagatgggacaacttattggagaccttttatggtataaaaaagtaatttatacaaatggaattgaatggagatttctaagtttagatgacaaggaagagatagataatacaattgttgaagtagttaacaaaagaatagaaacagaagaagcgggaaattcttttgattggtggaagaatattaaagatttatcgttcaattatacggatatatgcctatctaaagattgtagacaagagtggaatgaatttgtaaaaagggtaaaggaaatagaatggtag

SEQ ID NO: 610 - DNA, 207 bp, Streptococcus pneumoniae
atgaaaatcacacttatacctgaacgatgtatcgcctgtggactttgccaaacttattctgatttatttgattaccacgataatggaatcgtgcgtttttacgatgaccctgaccaactggaaaaagaaatttctcctagtcaggatgtcttagaggctgttaaaaattgcccaactcgcgccctgattggaaaccaggaagcctaa

SEQ ID NO: 611 - DNA, 477 bp, Streptococcus pneumoniae
atggcaaaagaaccgtggcaagaagatatttatgatcaagaagaatcaagagcagggcgtcggcatcgaaaccacggaggggctgataggatggctaatcgtattttgacgatcctagctagtattttctttgtaattgtggtggtgatggtcatcgttctcatctatctatcatcgggggggagtaatcgcacagcagccttaaaagactttcatgattctgatgcaagtgtagtacaaatctcatcttcaagcagttctcagcctgagcagagttcagagccagaatctacttctagtagttcagaagaagctgctaatcctgaaggaacgattaaagttctcgcaggagaaggggaagcagctattgccgctcgtgcaggaatctccattgctcagttagaggccttgaatcctgggcacatggctacaggatcttggtttgctaatccaggtgatgttataaaaataaaatag

SEQ ID NO: 612 - DNA, 672 bp, Streptococcus pneumoniae
atgaaaacaattcaaattgctattgatggtcctgcttccagcggtaagagtacggtcgcaaagattattgctaaggattttggattcacctaccttgatacaggagctatgtatcgtgcagcgacctatatggctcttaagaaccaattaggagttgaagaagtcgaagcccttctagccttgttggaccagcatccaatcagctttggacgttcagaaactggagaccagcttgtttttgtaggagatgtggatattacccatcctatccgtgaaaatgaagtgaccaatcatgtttctgctattgcagcaattcctcaagtgcgtgagaaactggtttctctccaacaagaaattgcccagcaaggcgggattgtcatggatggtcgcgatattggaactgttgtattgccacaagcagaattgaaaattttcctagtagcttctgttgatgagagagcagagcgtcgttacaaggaaaatattgccaagggaattgaaacagaccttgaaaccctaaaaaaggaaattgctgcgcgtgactacaaggatagtcatcgtgagacttctcctctcaaacaagcagaggatgctgtctaccttgatacaactggtttgaacattcaagaagtagttgaaaaaatcaaagcagaagctgaaaaaagaatgtaa

SEQ ID NO: 613 - DNA, 339 bp, Streptococcus pneumoniae
atgaacaatttaccaaattgtccaaaatgtaactcagaatatgtctacgaagacggtgccctactggtttgcccagagtgtgctcatgagtggaatcctgctgaagttgcagaagtagaagaaggtcttgtcgctatcgatgccaacggaaataaattggctgatggtgatatagtaactctcatcaaggacttgaaagtaaaaggtgcgccaaaagatttgaaacaagggacgcgcgtgaaaaatatccgcatcgtagaaggcgaccacaatatcgactgtaagattgatggttttggtgccatgaaacttaaatcagagtttgtgaggaagatttaa

SEQ ID NO: 614 - DNA, 630 bp, Streptococcus pneumoniae
atgtcaaaacactataaacttgtattttatagccgtatcttcttgtttctagcggcttttacgggagtttatcttgaaattactaggcatggtggttttgggatgcttctctattacacggttctgtccaacctcttggtaactatttttaccctttatcttctaaaggttatgagccgtgtaggtgaaaattggcaaaggccaagtctcttgcgcttaaaaggtggggtcaccatgagtatcatgattacctgtgtgatttaccatttcctcttggcgcccattgcgactaatttctataccctagaaaatttcctttgccactatatcgttcccatctggtttttagcggataccctcttttttgacaaacagggtcaatacaagatttgggatccagcagtgtggaccattttaccctttctgtatatgatgtttgctctttttaatggcttggttctaaaactcaatattccaaatgccaaggataatcctttcccttacttctttttgaatgtgaacaagggttggaatgttgtgtttaagtggtgtctgattatctttgttgcctatatggtagcaggatttattttctactttatcaagcaaatcaagagaaagtcatcctaa

SEQ ID NO: 615 - DNA, 228 bp, Streptococcus pneumoniae
gtggtgtctgattatctttgttgcctatatggtagcaggatttattttctactttatcaagcaaatcaagagaaagtcatcctaatactcttcgaaaatctcttcaaaccacgtcagtttccatctgcaacctcaaaacactgttttgaacaacctgcggctagcttcctagtttgctctttgattttcattgagtataagatacaagggattcattttcgaatttaa

SEQ ID NO: 616 - DNA, 1152 bp, Streptococcus pneumoniae
atgaaacaatttttagaacgggccagcattttggctctctccctcgttttgattacctccttttccatttcgagtgccctaccagccatgtttgactattatcagggttattctaaggaacaaattgagctcttggtgagcttgccttcctttggaatcatgatgatgttactgctaaatggtttcttagaaaaaatatttcctgagcgcttacagattagtttgggcttgctgattttatcattgagcggtacagctcccttctggtaccaagcctatccctttgtctttggaacacggcttctctttggtttgggtcttgggatgatcaatgccaaggccatttctattatcagtgaacgctaccaaggaaaaaggcgaattcagatgttagggctacgcgcttctgcagaggtcgttggagcttctatcattaccttggccgtcggtcagttgttggcttttggttggacagctatctttctagcctatagtgctggatttttggtgctgcccctttatctgctctttgtcccttatggaaaatcaaagaaagaagtcaagaaaagagcgaaggaagcaagtcgtttaactcgagaaatgaaaggcttgatttttaccttagctatcgaagcggcagttgtagtttgtaccaatacagctattaccatccgtattccaagtttgatggtggaaagaggattgggggatgcccagttatctagttttgttcttagtatcatgcagttgatcgggattgtggctggggtgagtttttctttcttgatttctatctttaaagagaaactgctcctctggtctggtattacctttggcttggggcaaatcgtgattgccttgtcttcatccttgtgggtggtagtagcaggaagtgttctggctggatttgcctatagtgtagtcttgacgacggtctttcaacttgtctctgaacgaattccagctaaactcctcaatcaagcaacttcatttgctgtattaggctgtagtttcggagcctttacgaccccattcgttctaggtgcaattggcttactaactcacaatgggatgttggtctttagtatcttaggaggttggttgattgtaatctctatctttgtcatgtacttacttcagaagagagcttag

SEQ ID NO: 617 - DNA, 750 bp, Streptococcus pneumoniae
atgacgagatataaagcaactatttcctatgatggttatgcctttgatggctttcagcgccagcctcatgcgcgtagcgttcaggaagaaattgaaaaaaccttgaccagattaaataaagggcaaaccattactgttcacggtgctggtaggacagatagtggggttcatgccctgggacaggtcattcattttgacctgccttatcagatggatgaggagaaactccgttttgccttggatacccagtctcctgaagatattgatgtgatttcgattgagcttgtggcagatgattttcattgccgttatgccaaacatagcaagacctatgagtttattgtggatagaggacgtcccaaaaatcctatgcgccgtcactatgccacccactttccctacccactcgatgtggaacgaatgcagattgcaatcaaaaagctagagggaacccatgattttaccggttttacagcctctgggactagtgtagaggataaggttcgcaccatcacagaagctagtttaatagtcgatgagacaggacaatttttgacctttaccttttcaggaaatggtttcttgtataaacagattcgcaatatggtggggactcttctcaaaatcggtaacaaccgcatgccagtagagcagattgctctcatcttggagaagaaggacaggcaacttgcaggtcccactgcagcaccaaatggtttgtatttaaaggagattcgttatgaagaataa

SEQ ID NO: 618 - DNA, 774 bp, Streptococcus pneumoniae
atgaagaataatcgtattttagcactttctggaaatgatatttttagtggtggtggactgtcagctgatttggctacctataccttgaacggcttgcatgggtttgtagcagtgacttgtttgacagccttgacagaaaaaggatttgaagtctttccaactgatgataccatttttcaacatgaattagatagcttgcgtgatgtggaatttgggggaattaagattggtcttctccctactgtcagtgtggctgagaaggccttggactttatcaaacaacgcccaggagtacctgtggtgttggatcctgtcttggtctgcaaggaaacgcatgatgtagctgtcagtgagctctgccaagagttgattcgcttcttcccttatgtcagtgtgattacgcctaatctcccagaagcagaattattatccggtcaggaaattaaaaccttggaagacatgaaaactgcagcgcagaaattgcatgatttaggagcgccagcagtcattatcaagggaggcaatcgtcttagtcaggacaaggctgtggatgtcttttatgatggacagacctttactatcctagaaaatccagttatccaaggccaaaatgctggtgcaggttgtacctttgcctctagcattgccagtcacctggttaaaggtgataaatttttgccagcagtagaaagctctaaggctttcgtttatcgtgctattgcacaagcagatcagtatggagtaagacaatatgaagcaaacaaaaacaactaa

SEQ ID NO: 619 - DNA, 462 bp, Streptococcus pneumoniae
atgaagcaaacaaaaacaactaaaatcgcccttgtatccctattaaccgccctttctgtggttctaggttatttcttaaaattcccaacacctacaggaattctaactcttttagatgctggtgtcttctttgcggccttttactttggtagtcgtgaaggagcggtagtcggaggactagcaagtttcttgattgacctcttatcaggctaccctcagtggatgttctttagcttggtcaaccatggcttgcagggatttttcgcaggatttaaaggaaaaagtcagtggttaggccttattttagcaactattgccatggtaggaggctacgccttgggttctactttgatgaatggctgggcagcagccctcccagaaattctaccgaattttatgcaaaatatggtagggatgattgtaggatttattcttagtcaaagtatcaagaagattaagtaa

SEQ ID NO: 620 - DNA, 573 bp, Streptococcus pneumoniae; identical to SEQ ID NO: 19

SEQ ID NO: 621 - DNA, 273 bp, Streptococcus pneumoniae
atgactgagttttcgttagttcttcttctaaaagccattaaactagctcgttcgacctactactatcacttgaaacagctagacaaaacagataaggaccaagagcttaaagctgaaattcaatccatttttatcgaacacaagggaaattatgcttatcgctgtattcatttagaactaagaaatcgtgcttatctggtaaatcataaaagagttcaaggcttgataaaagtactcaatttacaagctaaaatgcgacagaaacgaaaataa

SEQ ID NO: 622 - DNA, 594 bp, Streptococcus pneumoniae
aagtactcaatttacaagctaaaatgcgacagaaacgaaaataaaggagacgttggtaagaaggcagagaatctcattcaaggccaatttgaaggctctaaagcaatggaaaagtgctacacagatgtgacagaatttgccattccagcaagtactcaaaagctttacttatcaccagttttagatggctttaatagcgaaattatcgcctataatctttcaacttcgcccaacttagaacaagtgaagagtatgttagaacaggcctttacagagaagcactacgagaatacgattctccatagtgaccaaggctggcaataccgacacgattcttatcatcggttcctagagagtaagggaattcaagcatccatgtcacgtaagggtaacagcccagacaatggtatgatggagtccttctttgggattctgaaatcggaaatgttttacggttttgagaagtcgtttcagtcgcttaagcaattggaacaagctattatagactatattgattactacaacaataaacgaattaaggtaaaactaaaaggacttatccctgtgcaatacagaactaaatccttcggataa

SEQ ID NO: 623 - DNA, 477 bp, Streptococcus pneumoniae
atgaagtggaccgcgctgcccgtgaggtcatcgaaaaagctggttatggtgagtacttcaaccaccgtctcgggcatggtatcggtatggatgtccatgaattcccatctatcatggaaggaaacgacatggtcatcgaagaaggcatgtgcttctctgttgaaccaggtatctatatccctggtaaagtcggtgttcgtattgaagactgcggtgttgttaccaaggatggcttcgacctctttacaagcaccagcaaagatttgctttattttgattaaactatatagcccctatgctttcctttcaaaatatctaggggctattttattgtcatttttctgctattatgctaaagaaattggctgcaataatctaaccctaagtgtctggaatgataacgagggtgctctccgcttttatcaaagacaagggatgaaaccccaagaaacaacaatggaaatgataattgattaa

SEQ ID NO: 624 - DNA, 1083 bp, Streptococcus pneumoniae
atgtctaaattacaacaaatcctaacatatcttgaatcagaaaaactagacgtcgctgtcgtatctgaccccgtcacaatcaattacctcactgatttttacagtgatccccatgaacgccaaatgttcctctttgtcctagcagatcaggaacctctcctctttgtcccagctcttgaagtagaacgtgcaagtagcaccgtttccttcccagtagtgggctatgtcgattctgaaaatccatggcaaaaaatcaaacatgctcttccacaacttgacttcaaacgtgtcgctgttgagtttgacaatctcatcttgaccaaataccatggtttgaaaacagtttttgagactgctgagtttgacaacctcactcctcgtatccaacgcatgcgcctcatcaaatcagctgatgaagtgcaaaaaatgatggttgcaggtctttatgctgacaaggctgttcatgttggttttgacaatatttctcttgataagactgagacagatatcatcgcacaaattgactttgccatgaaacgtgaaggttacgaaatgagctttgataccatggtcttgactggtgataatgctgcgaatccacacggcattccagcagctaataaggttgaaaatgatgctcttctcctctttgacctgggtgttctggtcaatggctatgcgtcagatatgactcgtacagtcgctgtcggcaaaccagaccaattcaagaaagatatttacaacttgactcttgaagcccaacaagctgctcttgactttatcaagccaggtgtgactgctcatgaagtggaccgcgctgcccgtgaggtcatcgaaaaagctggttatggtgagtacttcaaccaccgtctcgggcatggtatcggtatggatgtccatgaattcccatctatcatggaaggaaacgacatggtcatcgaagaaggcatgtgcttctctgttgaaccaggtatctatatccctggtaaagtcggtgttcgtattgaagactgcggtgttgttaccaaggatggcttcgacctctttacaagcaccagcaaagatttgctttattttgattaa

SEQ ID NO: 625 - DNA, 783 bp, Streptococcus pneumoniae
atggtttatacttcactttcctcaaaagatggcaattacccctatcagctcaacattgcccacctctacggaaatctcatgaatacctacggggacaatggaaacatcctcatgctcaagtatgtggctgaaaaactgggagcccatgtgaccgttgacatcgtttctctccatgatgactttgatgaaaatcactacgacatcgcctttttcggtggtggtcaagactttgaacaaagtatcattgcagacgacctacctgctaaaaaagagagcattgacaactacatccaaaacgacggtgtagttctggctatctgcggtggtttccaactattgggtcaatattatgttgaagcttcaggaaaacgtatcgaagggctaggggtcatgggacactacacgctcaaccagaccaataaccgttttatcggtgacatcaagattcacaatgaagatttcgatgaaacctactatggatttgaaaatcaccaaggtcgtaccttcctctctgatgaccaaaaaccgctgggacaggttgtctatggaaatggaaacaacgaagaaaaggtcggtgaaggggttcattataagaatgtctttggttcctacttccacgggcctatcctctctcgtaatgccaatctggcttatcgcctagttactactgccctcaagaagaaatatggtcaggacatccaactccctgcctatgaggacattctcagccaagaaatcgctgaagagtacagtgacgtcaaaagcaaggctgacttttcttaa

SEQ ID NO: 626 - DNA, 1344 bp, Streptococcus pneumoniae
atgaacttaaaaactactttgggccttcttgctggacgttcttcccacttcgttttaagccgtcttggacgtggaagtacgctcccagggaaagtcgcccttcaatttgataaagatattttacaaaacctagctaagaactacgagattgtcgttgtcactggaacaaatggaaaaaccctgacaactgccctcactgtcggcattttaaaagaggtctatggtcaagttctaaccaatccaagcggtgccaacatgattacagggattgcaacaaccttcctaacagccaaatcttctaaaactgggaaaaatattgccgtcctcgaaattgacgaagccagtctatctcgtatctgtgactatatccagcctagtctttttgtcattactaatatcttccgtgaccagatggaccgtttcggtgaaatctatactacctataacatgatattggatgccattcggaaagttccaactgctactgttctccttaacggagacagtccacttttctacaagccaactattccaaaccctatagagtattttggttttgacttggaaaaaggaccagcccaactggctcactacaataccgaagggattctctgtcctgactgccaaggcatcctcaaatatgagcataatacctatgcaaacttgggtgcctatatctgtgagggttgtggatgtaaacgtcctgatctcgactatcgtttgacaaaactggttgagttgaccaacaatcgctctcgctttgtcatagacggccaagaatacggtatccaaatcggcgggctctataatatctataacgccctagctgctgtggccatcgcccgtttcctcggcgcagattcccaactcatcaaacagggatttgacaagagccgtgctgtctttggacgccaagaaacctttcatatcggtgacaaggaatgtacccttgtcttgattaaaaatccagtcggtgcaacccaagctatcgaaatgatcaaactagcaccttatccatttagcctatctgtcctccttaatgccaactatgcagatggaattgacactagctggatctgggatgcagactttgagcaaatcactgacatggacattcctgaaatcaacgctggcggtgttcgtcattctgaaatcgctcgtcgcctccgagtgactggctatccagctgagaaaatcactgaaacgagtaatctggagcaagttctcaagaccattgagaatcaagactgcaagcatgcctatattctggcaacttatactgccatgctggaatttcgtgaactgctggctagtcgtcagattgttagaaaggagatgaactaa

SEQ ID NO: 627 - DNA, 1317 bp, Streptococcus pneumoniae
atgttaacatacgatttaattgttattggatttggtaaagctggtaaaacactagcaggtaaattggcttcagctggcaaaaaagttgccctcgttgaacgtagcaaagctatgtacggtggaacttgtatcaacatcggttgtatcccaactaaaactttgctggttgctgctgagaaagacttgtcttttgaagaagtcattgctaccaaaaacacgatcactggtcgcctcaacggtaaaaactatacgactgttgctggtactggcgtcaatatctttgatgctgaagctcacttcctttcaaataaagtcatcgaaatccaagctggtgatgaaaaacaagaattgactgctgaaactatcgtcatcaacactggtgctgtttcaaacgtcttgccaatccctggacttgctacaagcaaaaacgtctttgactcaacaggtatccaaagcttggataaattgcctgaaaaacttggagtccttggtggcggaaatatcggtcttgaatttgctggcctttacaataaactaggaagcaaggttacagtcctagatgccttggatacattcctacctcgtgcagaaccttccatcgcagctcttgctaaacaatacctggaagaagacggtattgaattgcttcaaaatatccatactactgaaattaaaaacgacggtgaccaagtgcttgtcgtaactgaagacgaaacttaccgtttcgacgcccttctctacgcaactggacgcaaaccaaatgtagaaccacttcaacttgaaaatacagatattgaactaactgaacgtggcgctattaaagtagataaacactgtcaaacaaacgttcctggtgtctttgcagttggagatgtcaacggtggtcttcaatttacttacatttcacttgatgacttccgtgttgtttacagctaccttgctggagatggcagctacacacttgaggaccgtctcaatgtgccaaatactatgttcatcacacctgcactttcacaagttggtttgactgaaagccaagcagctgatttgaaacttccatacgcagtgaaagaaatccctgttgcagccatgcctcgtggtcacgtaaatggagaccttcgcggagctttcaaagctgttgttaatactgaaacaaaagaaattcttggtgcaagcatcttctcagaaggttctcaagaaatcatcaacatcattactgttgctatggacaacaagattccttacacttacttcacaaaacaaatcttcactcacccaaccttggctgagaacttgaatgacttgtttgcgatttaa

SEQ ID NO: 628 - DNA, 873 bp, Streptococcus pneumoniae
  unsure (697): n at each above location is unknown.
atgaaatcgaatcgttatattattgcccttgctggggtcattttacacttaatgctgggttcgacttatgcttggagtgtttatcgtaaccctattattgaaaaaacgggatgggatcaggcttctgttgccttcgcctttagtctagcaatcttttgtttgggcttatcggctgcatttatggggcgtttggtagaaaaatttggtccgaaagtcatggggagtctatctgcttttctatacgcaggtggaaatatcttaacaggatttgcaatagaccgtcaggaactgtggttgttgtatctagcttatggcattttaggtgggcttggtttgggagcaggttatattacccctgtgtcaacgattataaaatggtttcctgataaacgtggtctcgcaacaggtttagcgattatggggtttggttttgcttctttattgactagtcccatagcgcaacacctcatcgcaggggtatggattgtagaaactttttatattttaggagcaagttactttattatcatgctcctagcttcacaattcattaagcgtccaaatgagcaagagcttgcaattttatcttcttcagggaaagaaaaaacagcctctttgacgcaaggaatggctgcaaatcaggctctaaaaagcaatcggttttatatgctttggattattttctttatcaacatancttgtggtttaggcttaatttcagcggcatcgccaatggcacaggaaatggctggcttgtctacaagtcatgcagcagtaatggtgggtgttttggggattttcaatggatttggtcgcttgctctgggcgagtttgtctgactatatcggtccgcctctaacctttaatatatga

SEQ ID NO: 629 - DNA, 246 bp, Streptococcus pneumoniae
  unsure (97): n at each above location is unknown.
ttgattccagctattctcagtgatattttacgaaccaaggaattggccgctctgcatggttatattttaacagcttggacaatggctggtttagcgngacctattttattagcagagacttataaaatggctcattcgtacacacaaacgttgttcgtatttctcattttatacagtatcgccttggctttgtcttattatctaggtcgttcaatcaaaaaagaaagtcaaaaaccgcttacatga

SEQ ID NO: 630 - DNA, 1575 bp, Streptococcus pneumoniae
gtgaaatttaatgaattaaacttgtctgctgatttgctagcagaaattgaaaaagctggttttgtagaagctagtcctatccaagaacaaactattcctttggcccttgaaggcaaggatgttattggtcaagctcagactggtacaggaaaaactgcagcctttggcttgcctacccttgaaaaaatccgtacagaagaagcgactatccaagctttggtcatcgctccaactcgtgaactagctgtccaaagtcaagaagaactcttccgctttggtcgtagtaagggagtcaaagtccgttcagtatatggcggatcaagcattgaaaaacaaattaaggctcttaaatctggtgcccatatcgtggtgggaactccaggtcgcctcttggacttgattaaacgcaaggccttgaaattacaagacattgaaacccttatccttgacgaagcggatgaaatgcttaacatgggcttccttgaagacatcgaagccattatttcccgtgtacctgagaaccgtcaaactttgcttttctcagcaactatgccagatgccatcaaacgtatcggtgttcagtttatgaaagcccctgaacatgtcaagattgcggctaaggaattgacaacagaattggttgaccagtactatatccgtgttaaggaacaagaaaaatttgacaccatgactcgtctcatggatgtggcacaaccagaactcgctattgtatttggtcgtaccaaacgccgtgtggatgaattgactcgtggtttgaaaattcgtggcttccgtgcagaaggaattcatggcgacctagaccaaaataaacgtcttcgtgtccttcgtgactttaaaaatggcaatcttgatgttttggttgcgacagacgttgcagcgcgtggtttggatatttcaggtgtgacccatgtctacaactacgatattccacaagatcctgagagttatgttcaccgtatcggtcgtacaggtcgtgctggtaagtcaggtcaatctattacttttgttgctccaaacgaaatgggttaccttcaaatcattgaaaacttgactaagaaacgcatgaaaggtctcaaacctgcaagtgtagaagaatccttccaatcaaaaaaacaggtagctctcaagaaaatcgaacgtgattttgcagatgaaaccattcgtgccaactttgagaaatttggtaaggatgctcgcaaattggctgctgagtttactccagaagaattggcaatgtatatcttgagtctgacagtccaagacccagatagccttccagaagtggagattgcacgtgaaaaaccactaccgtttaaaccatcaggtaatggtttcggtggtaaagctaagggaggtcgtggaggccgtcgtggggacgaccgtcgagagcgtgatcgccgtggcaatggtcgccgtgatgagttcaaaaaaggaagtcgtggcaacgatcgttttgataaggaaaaacgttaccgtaaggataataaaaaaccacgcaatactttaagcgaaaagcaaacaggctttgttattcgtaacaagggcgataaataa

SEQ ID NO: 631 - DNA, 789 bp, Streptococcus pneumoniae
atggcacatttattagaaaaaactagaaaaattacatcaattttgaaacgctcagaggagcagttgcaggatgagctcccttacaacgctattacgcgtcagttagcggatattattcattgcaatgcctgcattatcaatagtaagggacgtctgcttggctattttatgcgttataaaacaaatacagatcgcgtaaagcaattcttccaaactaagattttcccagatgactacgttcaaggggctaatatgatttacgaaacagaagcaaacttgcctgttgagcatgatatgagtattttccctgttgagagtagagatgattttccagatggcttgacgactattgcaccgattcatgtatcggggattcgccttggttctttgattatttggcgtaatgataaaaaattcgaagatgaggacttggttcttgttgagattgccagtaccgttgttgggattcagcttcttaacttccaacgtgaagaagatgagaaaaatattcgtcgtcgtactgctgtcaccatggcggtcaataccctttcttactccgaactccgtgctgtttcagcaattttaggggaattaaatggaaatgaagggaagttgactgcgtcagtgattgcagatcgtatcggaatcactcgctctgtgattgtcaatgctcttggtaaacttgagtatgcggggattattgaaagtcgctcacttggaatgaagggaacctatcttaaggtcttgatttcagatatttttgaagaagtgaagaaaagagatcactaa

SEQ ID NO: 632 - DNA, 207 bp, Streptococcus pneumoniae
gattttgttgctgatagtgggaaactaacagcaggtgctccagctcaggcgatttcggatgccatcagcaaggtatctctattagcttttgaacgagaagatcatatcttctttacaattgatgctcatgaagaaatcgattgtttccatccggaaagtaagttatttcctcctcataatctccttgggacgagtggacggaattaa

SEQ ID NO: 633 - DNA, 456 bp, Streptococcus pneumoniae
cttttgaacgagaagatcatatcttctttacaattgatgctcatgaagaaatcgattgtttccatccggaaagtaagttatttcctcctcataatctccttgggacgagtggacggaattaaaatggagatttggggatcttttatcaagagcaatggttcagacagtcgggtcatttggatggataaacgccattactcagctttttcagggactgacctagatattcgtttgagagagcgtagagtgtctaccgttatcttaacaggtgtcttgacggatatctgtgtcctacatacagctatagatgcctataatctaggatatgacatcgagattgttaaaccagctgttgcttccatctggcctgaaaatcatcaatttgccctaggtcatttcaaaaatacactcggagctaagttagtagatgaaaatctaaatgaactttctgagtaa

SEQ ID NO: 634 - DNA, 234 bp, Streptococcus pneumoniae
atggtagaattgaatcttaaaaatatttacaaaaaatatccaaacagcgaacactattcagttgaagatttcaacttgaacatcaaagataaagaatttatcgttttcgtaggaccttcaggatgtggtaaatcaactacactccgtatgattgctggtcttgaagacatcacagaaggtactgcatctatcgatggcgtggttgtcaacgacgtagctccaaaagaccagtga

SEQ ID NO: 635 - DNA, 156 bp, Streptococcus pneumoniae
ttgacaaccacgccatcgatagatgcagtaccttctgtgatgtcttcaagaccagcaatcatacggagtgtagttgatttaccacatcctgaaggtcctacgaaaacgataaattctttatctttgatgttcaagttgaaatcttcaactgaatag

SEQ ID NO: 636 - DNA, 855 bp, Streptococcus pneumoniae
ctgtttatagacaacatggctttcggtttgaaattgcgtaaatacagcaaagaagacattaacaaacgtgttcaagaagcagctgaaatacttggattgaaagaattcttggaacgtaaaccggctgacctttcaggtggtcaacgtcaacgtgttgccatggggcgtgcgattgtccgtgatgcgaaagtattcttgatggacgaacctttgtcaaacttggatgccaaacttcgtgtatcaatgcgtgctgaaatcgctaaaattcaccgtcgtatcggagctacaactatctatgtaactcacgaccaaacagaagcgatgacacttgcagaccgtatcgttattatgtcagctactaagaaccctgctggtacaggtactatcggacgtgtagaacaaatcggtactcctcaagaagtttacaaaaatccagttaacaaattcgttgcaggattcatcggaagcccagctatgaacttcatcaacgtgaaattggttggtagcgaaattgtttctgacggtttccgtttgaaagtgccagaaggagcattgaaagttcttcgtgaaaaaggctacgaaggaaaagaattgatctttggtatccgtccagaagacgtgaatgcagaacctgctttccttgaaacattcccagactgtgttgtaaaagcgactatctctgtatcagaactgcttggttcagaatctcacctttactgccaagttggtaaagacgagtttgttgcaaaagttgatgctcgtgactacttgcaaacaggtgcaacagttgagcttggatttgacttgaacaaagcacacttcttcgatgtagaaactgaaaaaacaatctactaa

SEQ ID NO: 637 - DNA, 759 bp, Streptococcus pneumoniae
atgtcagaagcaggtcataagtttttagcaaaattggggaaaaaacgcttacgtccaggtggaaagcgtgctacagattggttaattgcagaaggaggattgtcaaaagaaaagagaatactagaggttgcgtgtaataggggaactacagcaattgagttggcacagcgttttggttgcaagataactgctgttgatatggatgctcaagctttagaagtggctaaaaaatctgctggaacggcaggtgttgctcatttaatcagttttgaaagagcaaatgcaatgaaacttccttatcaagatgctagttttgatattgttataaatgaagctatgctgactatgcaagccgatcaagctaagaaaaaatgtgtaatggaatatctaagggtattaaaacctggaggtcttcttttgacacatgatgtgcttcttaaggaagctaaagagtctatcagacaggaattatcacaagcaattcatgtaaatgtaggtcctttaactcaagatggttgggaacaggtgatgatagaatcaggttattgtgatgtgaaagtattgactggtgaaatgacattaatgaaattatcgggtatgatttatgacgaaggttggctaggaactttgaaaatttgtgtaaatgcttgtaaaaaggagaatagaaagcagtttttaactatgtataaaatgtttgctaagaataaacagaaattgggctttattgcgatggctagttataaatcgtcaaaacgttag

SEQ ID NO: 638 - DNA, 531 bp, Streptococcus pneumoniae
ttgaaagaaagaaaaaagatgaatttaaaagattacattgcaacaattgaaaattatccaaaggaaggcattaccttccgtgatattagtcctttgatggctgatggaaatgcttatagctacgctgttcgtgaaatcgttcagtatgctactgacaagaaagtcgacatgatcgtgggacctgaagctcgtggatttatcgtgggttgtccagttgcctttgagttgggaattggttttgcgcctgttcgtaagccaggtaaattgccacgtgaagttatttctgctgactatgaaaaagagtacggtgtcgataccttgactatgcacgcggatgccattaagccaggtcaacgtgttcttattgtagatgaccttttggcgacaggtggaactgttaaggcaactatcgagatgattgaaaaacttggtggtgttatggcaggttgtgccttccttgttgaattggatgaattgaacggccgtgaaaaaattggtgactacgactacaaagttcttatgcattattaa

SEQ ID NO: 639 - DNA, 945 bp, Streptococcus pneumoniae
atgccgattcgaattgataaaaaattgccagctgttgagattttacggacagagaatatctttgtcatggatgatcaacgtgctgcccaccaagatatccgtcctttgaagattttaattttaaatctcatgccacagaaaatggtcacagagacccagttgttgcgccacttggctaatacacccctacaactggatattgattttctctatatggagagccaccgttctaaaacaactcgttcagagcacatggagaccttctataaaacttttcctgaagtcaaggatgagtattttgatgggatgatcatcacgggtgctccagttgagcatttaccatttgaggaagtggactattgggaggaatttagacagatgcttgagtggtctaagactcatgtctattcgacccttcatatctgttggggggctcaggctgggctttatctgcgctatggtgtagaaaaataccagatggacagtaagctatcaggtatttatcctcaggacaccctaaaagagggtcaccttctatttagaggctttgatgatagctatgtatcccctcattcacggcacacggagatttctaaggaagaggtcttaaacaagaccaatctcgagattttatcagaaggacctcaggttggggtttctattttggccagtcgtgatttacgagaaatttatagttttggtcatttggagtatgaccgtgataccttggcaaaagagtattttcgagatcgtgatgcaggtttcgacccacatattccagaaaattactttaaagatgatgatgttaatcaggttacttgtctttgttggtcttcatctgcagccctctttttcagtaattgggtaaaccatgcggtctatcaggagacgccttttgattggagaaagatagaagatgatgcatctgcatatgggtatttataa

SEQ ID NO: 640 - DNA, 678 bp, Streptococcus pneumoniae
atgacatatttagacgcttttaaatcaggtaccttggttttaccgagtgccctgctcttgcattttaaggaactatttccttctagcgacgattttctggtttggcaatttttctatttgcaaaatacgacaggcttagaagaaatgtcgccaagccagattgctgaaaggattggcaaggaaatttcggatgtcaaccagtccatttctaatctgacggaaaggggactgctccagtatcgtactatcgaattaaatggcgaaattgaattgctctttgatgctagtttggccttggaacgtttggatgacctgtttggagcagttcattcaagttcagaccagctaacacctcaaaaccagctcaaggatttggtggaaaccttccagcaggagttgggacgattgttgacgccttttgagattgaggatttgaccaagacactaaaggaagatggaaccagtgctgacttgattaaggaggctcttcgtgaagctgttttgaatggaaaaccaaactggaagtacattcaggcgattttgagaaactggcgccatgaaggaatcaagagtgtggctcaaattgaggccaagagagcagaaagagaagcaagcaatcctcagttgacacaggtatctgcagatttcagaaatgccatggatctctggaaggattaa

SEQ ID NO: 641 - DNA, 375 bp, Streptococcus pneumoniae
ttgttcattttccagttaccagcgataaatggtttacgtgacatttcacatacctcttttttcaatttattttctatttattctatcacaattatacacagcttgcaaatcttactcggatttcaagcctacttgcatggattaatccttccagagatccatggcatttctgaaatctgcagatacctgtgtcaactgaggattgcttgcttctctttctgctctcttggcctcaatttgagccacactcttgattccttcatggcgccagtttctcaaaatcgcctgaatgtacttccagtttggttttccattcaaaacagcttcacgaagagcctccttaatcaagtcagcactggttccatcttcctttag

SEQ ID NO: 642 - DNA, 759 bp, Streptococcus pneumoniae
atgtcacgtaaaccatttatcgctggtaactggaaaatgaacaaaaatccagaagaagctaaagcattcgttgaagcagttgcatcaaaacttccttcatcagatcttgttgaagcaggtatcgctgctccagctcttgatttgacaactgttcttgctgttgcaaaaggctcaaaccttaaagttgctgctcaaaactgctactttgaaaatgcaggtgctttcactggtgaaactagcccacaagttttgaaagaaatcggtactgactacgttgttatcggtcactcagaacgccgtgactacttccatgaaactgacgaagatatcaacaaaaaagcaaaagcaatctttgcgaacggtatgcttccaatcatctgttgtggtgaatcacttgaaacttacgaagctggtaaagctgctgaattcgtaggtgctcaagtatctgctgcattggctggattgactgctgaacaagttgctgcctcagttatcgcttatgagccaatctgggctatcggtactggtaaatcagcttcacaagacgatgcacaaaaaatgtgtaaagttgttcgtgacgttgtagctgctgactttggtcaagaagtcgcagacaaagttcgtgttcaatacggtggttctgttaaacctgaaaatgttgcttcatacatggcttgcccagacgttgacggtgcccttgtaggtggtgcgtcacttgaagctgaaagcttcttggctttgcttgactttgtaaaataa

SEQ ID NO: 643 - DNA, 1506 bp, Streptococcus pneumoniae
atgtctgttacattttttataggagagcaaagattgaaaacaaaaattggattagcaagtatctgtttactaggcttggcaactagtcatgtcgctgcaaatgaaactgaagtagcaaaaacttcgcaggatacaacgacagcttcaagtagttcagagcaaaatcagtcttctaataaaacgcaaacgagcgcagaagtacagactaatgctgctgcccactgggatggggattattatgtaaaggatgatggttctaaagctcaaagtgaatggatttttgacaactactataaggcttggttttatattaattcagatggtcgttactcgcagaatgaatggcatgaaaattactacctgaaatcaggtggatatatggcccaaaacgagtggatctatgacagtaattacaagagttggttttatctcaagtcagatggggcttatgctcatcaagaatggcaattgattggaaataagtggtactacttcaagaagtggggttacatggctaaaagccaatggcaaggaagttatttcttgaatggtcaaggagctatgatgcaaaatgaatggctctatgatccagcctattctgcttatttttatctaaaatccgatggaacttatgctaaccaagagtggcaaaaagtgggcggcaaatggtactatttcaagaagtggggctatatggctcggaatgagtggcaaggcaactactatttgactggaagtggtgctatggcgactgacgaagtgattatggatggtgctcgctatatctttgcggcctctggtgagctcaaagaaaagaaagatttgaatgtcggctgggttcacagagatggtaaacgctatttctttaataatagagaagaacaagtgggaaccgaacatgctaagaaaatcattgatattagtgagcacaatggtcgtatcaatgattggaaaaaggttattgatgagaacgaggtggatggtgtcattgttcgtctaggttatagcggtaaagaagacaaggaattggcgcataacattaaggagttaaaccgtctgggaattccttatggtgtctatctctatacctatgctgaaaatgagaccgatgctgagaatgacgctaaacagaccattgaacttataaagaaatacaatatgaacctgtcttaccctatctattatgatgttgagaactgggaatatgtaaataagagcaagagagctccaagtgatacagacacttgggttaaaatcatcaacaagtacatggacacgatgaagcaggcgggttatcaaaatgtgtatgtctatagctatcgtagtttattacagacgcgtttaaaacacccagatattttaaaacatgtaaactgggtagcggcctatacgaatgctttagaatgggaaaacccttattattcaggagaaaaaggttggcaatatacctcttctgaatacatgaaaggaatccaagggcgcgtagatgtcagcgtttggtattaa

SEQ ID NO: 644 - DNA, 519 bp, Streptococcus pneumoniae
atggtagaattgaaaaaagaagcagtaaaagacgtaacatcattgacaaaagcagcgccagtagcattggcaaaaacaaaggaagtcttgaaccaagctgttgctgatttgtatgtagctcacgttgctttgcaccaagtgcactggtatatgcatggtcgtggtttccttgtatggcatccaaaaatggatgagtacatggaagctcttgacggtcaattggatgaaatcagcgaacgcttgattacactcggtggaagcccattctctacattgacagagttccttcaaaatagtgaaatcgaagaagaagctggtgaataccgtaatgttgaagaaagcttggaacgtgttcttgttatctaccgttacttgtcagaacttttccaaaaaggtttggatgtcactgatgaagaaggtgacgatgtgacaaacggtatctttgcaggcgctaaaactgaaacagataaaacaatttggatgcttgcagccgaacttggacaagcacctggtttgtaa

SEQ ID NO: 645 - DNA, 639 bp, Streptococcus pneumoniae
atgaatgtgagtgacaatcacttcatcaaggtaaggttcaaaagcctgaaaaatttgcttcccaccgataatgtagagattcttttcttgagcctgataccagtcaagaacagactggacgtcctgaaaagtagcaaccccatctatcttttcttccggattacgcgtcaaaatcagggtttcccgttttggaagcaagcgacgccccatcccatcaaaggtcacacgccccatcaagatagcatgattcagagttgtttctttaaagtgctgcaattctgctggcaaatgccaaggcagacgattttccttaccaatcacaccctcttcatcctgggcccaaatagctacgattttcttagtcatgcttccatccttttcactgatagtactattttatcaaaaaactcaaaaaaagactggtttggaatagcttacaaaatagaaaaaatctgtaagaaatttcctacagatttatctatgtttccttatttcttacaaaccaggtgcttgtccaagttcggctgcaagcatccaaattgttttatctgtttcagttttagcgcctgcaaagataccgtttgtcacatcgtcaccttcttcatcagtgacatccaaacctttttggaaaagttctga

SEQ ID NO: 646 - DNA, 507 bp, Streptococcus pneumoniae
atgactaagaaaatcgtagctatttgggcccaggatgaagagggtgtgattggtaaggaaaatcgtctgccttggcatttgccagcagaattgcagcactttaaagaaacaactctgaatcatgctatcttgatggggcgtgtgacctttgatgggatggggcgtcgcttgcttccaaaacgggaaaccctgattttgacgcgtaatccggaagaaaagatagatggggttgctacttttcaggacgtccagtctgttcttgactggtatcaggctcaagaaaagaatctctacattatcggtgggaagcaaatttttcaggcttttgaaccttaccttgatgaagtgattgtcactcacattcatgctcgggtggaaggagatacctatttccctgaagaacttgacttgtctctttttgagacagtttcaagcaaattttacgccaaagatgagaagaatccttatgattttaccatccaataccgcaagagaaaggaagtctaa

SEQ ID NO: 647 - DNA, 207 bp, Streptococcus pneumoniae
ttttaccatccaataccgcaagagaaaggaagtctaatggaacggagtttatttggtctattcacggcttttctgtgtttcatctgctttctggcaggagcacaagcttttcgtaaaaagcgttacgggctttctatcctcctttggttaaatgcctttaccaatctggtcaatagtattcatgctttttacatgaccttattttag

SEQ ID NO: 648 - DNA, 1233 bp, Streptococcus pneumoniae
atgtctacaaatagaaaaaatgatatgatggtttattgctcattttgtggcaaaaaccaagaagaagtacaaaaaataattgctggcaacaatgcttttatttgtaatgaatgcgtggagttagctcaggaaatcattcgagaagaattggttgaggaagtcttggcagacttgtctgaggtgccaaaaccaattgaactcctccatatcttgaaccactatgtaattggccaagatcgtgccaagcgtgccttggcagtggcggtttataaccactacaaacgcatcaatttccacgatacacgcgaagagtcagaagatgtggatttgcagaagtcaaacattttgatgattggcccaactggttcagggaaaactttccttgcccagaccttggctaagagcttgaatgtaccttttgctattgcggatgcgacagctctgacggaggctggttatgtgggtgaggatgtggaaaatatcctcctcaaactcttgcaggttgctgactttaacatcgaacgtgcagagcgtggcattatctatgtggatgaaattgacaagattgccaagaagagtgagaatgtgtctatcacacgtgatgtttctggtgaaggggtgcaacaagcccttctcaagattatcgagggaactgttgctagcgtgccgcctcaaggtggacgcaaacatccacaacaagagatgattcaagtggatacaaaaaatatcctcttcatcgtgggtggtgcttttgatggtattgaagaaattgtcaaacaacgtctgggtgaaaaagtcatcggatttggtcaaaacaataaggcgattgatgaaaacagctcatatatgcaagaaatcatcgctgaagacattcaaaaatttggtattatccctgagttgattggacgcttgcctgtttttgcggctcttgagcaattgaccgttgatgacttggttcgcatcttgaaagagccaagaaatgccttggtgaaacaataccaaaccttgctttcttatgatgatgttgagttggaatttgacgacgaagcccttcaagagattgctaataaagcaatcgaacggaagacaggggcgcgtggacttcgctccatcatcgaagaaaccatgctagatgtcatgtttgaggtgccgagtcaggaaaatgtgaaattggttcgcatcactaaagaaactgtcgatggaacggataaaccgatcctagaaacagcctag

SEQ ID NO: 649 - DNA, 588 bp, Streptococcus pneumoniae
atggaacttaatacacacaatgctgaaatcttgctcagtgcagctaataagtcccactatccgcaggatgaactgccagagattgccctagcagggcgttcaaatgttggtaaatccagctttatcaacactatgttgaaccgtaagaatctcgctcgtacatcaggaaaacctggtaaaacccagctcctgaacttttttaacattgatgacaagatgcgctttgtggatgtgcctggttatggctatgctcgtgtttctaaaaaggaacgtgaaaagtgggggtgcatgattgaggagtacttaacgactcgggaaaatctccgtgcggttgtcagtctagttgaccttcgtcatgacccgtcagcagatgatgtgcagatgtacgaatttctcaagtattatgagattccagtcatcattgtggcgaccaaggcggacaagattcctcgtggtaaatggaacaagcatgaatcagcaatcaaaaagaaattaaactttgacccaagtgacgatttcatcctcttttcatctgtcagcaaggcagggatggatgaggcttgggatgcaatcttagaaaaattgtga

SEQ ID NO: 650 - DNA, 381 bp, Streptococcus pneumoniae
atggcaaaaacaattcatacagataaggccccaaaggctatcgggccctatgttcaaggaaaaatcgttggcaaccttttgtttgctagcggtcaagttcccctatcccctgaaactggggaaattgtaggagagaatatccaagaacagacagagcaagtcttgaaaaacatcggtgctattttggcagaagcaggaacagactttgaccatgttgtcaaaacaacttgtttcttgagcgatatgaacgactttgttccttttaatgaggtttaccaaacggccttcaaagaggaattcccagctcgttcagctgtggaggtagctcgtcttcctcgtgatgtaaaagtcgaaattgaagtcatcgcagagattggataa

SEQ ID NO: 651 - DNA, 891 bp, Streptococcus pneumoniae
atgacaaagaaacaacttcacttggtgattgtgacagggatgagtggcgcagggaaaactgtagccattcagtccttcgaggatctaggttatttcaccattgataatatgccgccagctctcttgcctaagtttttgcagctggttgaaattaaggaagacaatcctaagttggccttggtagtggatatgcgtagccgttctttcttttcagagattcaagctgttttggatgagttggaaaatcaagatggtttggatttcaaaatcctctttttggatgcggctgataaggaattggtcgctcgttacaaggaaaccagacggagtcacccactagcagcagacggtcgtattttagatggaatcaagttggaacgtgaactcttggcacctttgaaaaatatgagccaaaatgtggtggatacgactgaactcactccacgtgagctgcgcaaaacccttgcagagcagttttcagaccaagaacaagcccagtctttccgtatcgaagtcatgtctttcggatttaagtatggaatcccgattgatgcggacttggtctttgatgtccgtttcttgccaaatccctattatttaccagaactgagaaaccaaacgggtgtggatgaacctgtttatgattatgtcatgaaccatcctgagtcagaagacttttatcaacatttattggccttgattgagccgattctgccaagttaccaaaaggaaggtaagtccgttttgaccattgccatgggatgtacgggtggacaacaccgtagtgtggcatttgctaaacgcttggtgcaggacttatccaagaattggtctgttaatgaagggcatcgcgacaaagaccgcagaaaggaaacggtaaaccgttcatga

SEQ ID NO: 652 - DNA, 978 bp, Streptococcus pneumoniae
atgagaaaaccaaagataacggtgattggtggagggactggaattcccgtcattctaaaaagtctgcgggaaaaagatgtggaaatcgcagctatcgtgacggtggcagatgatggtggttcttcaggtgaactccgaaaaaatatgcaacagttgacaccgccaggtgatcttcgtaatgtccttgtggccatgtcggatatgcctaagttttatgagaaggtctttcagtatcggttctctgaggatgccggagcctttgctggccatccattgggaaatctcatcattgctggcttgtcagaaatgcagggttcaacctataatgccatgcagttattgagcaaatttttccatacaacagggaaaatttatccttccagtgaccatcctttgacccttcatgcagtctttcaggatgggacagaagtggctggagagagtcatattgtagaccatcgaggcataattgacaatgtctatgtgaccaatgccctaaacgatgatacgcctctggccagccgtcgagtagtgcagaccatccttgaaagtgacatgattgtcctagggccaggttccctctttacctctattttgcccaatatcgtgattaaggaaattgggcgggctcttttggaaaccaaggcagaaattgcctatgtctgcaatatcatgacccaacgtggggagacggaacactttacagatagcgaccacgtggaagtcttgcatcgtcaccttggtcgcccttttatcgacactgtcttggtgaatattgaaaaagtgcctcaggaatacatgaattccaaccgttttgatgaatacttggtgcaagtggaacacgattttgtaggtctttgtaagcaagtttcgcgcgtgatttcatctaacttccttcgtctggaaaatggcggtgccttccacgatggagatttgattgtggacgagttgatgcgcattatacaggtgaaaaaatga

SEQ ID NO: 653 - DNA, 912 bp, Streptococcus pneumoniae
atgagtttcacagtagcagtaaaagaagaaatcctgggccaacaccatctgagctggcatgaattatctgccattatcaaaatgtctggtagcatcggtctctcgacttcgggcttgactttgtcagttgtgacagaaaatgccaaactggcccgtcacctctatgagtcctttctccatttctatgaaatcaaatctgaaattcgtcaccaccaacggagcaatcttcgcaagaatcgcgtctataccgtttttacagatgaaaaggtgcaggatttgttaagtgatttgcacttggcagactctttctttggcctggaaacaggtattgatgaggcgattttatcggatgaggaagcaggtcgtgcctatctctgtggcgctttcttggcaaatgggagcattcgtgaccctgagtcaggcaagtaccagttggaaatcagttctgtttatctggaccacgcgcaaggaattgcctcccttctccaacagtttttactggatgccaaggtgcttgagcgcaagaagggggctgtgacctatctccagcgagcagaagacattatggacttcttgatagtaatcggagccatgcaggcacgtgatgattttgagcgggttaagattttgcgagaaacccgtaacgacctcaatcgggctaataatgccgagacagctaatatcgctcggacagtttctgccagcatgaagaccattaacaatatcagtaaaatcaaagatatcatgggcttagaaaatttgccagtagatttgcaggaagtggcgcaactgaggattcagcacccagactactctatccagcagttagcagatagtctcagcacccctctgaccaaaagtggtgtcaatcacagactcagaaaaatcaataagatagcggatgaattataa

SEQ ID NO: 654 - DNA, 969 bp, Streptococcus pneumoniae
atgtctcaactctatgatattaccattgtgggtggtggtcctgtcgggctttttgcagccttttatgcccacctacgccaagccaaggttcaaatcatcgactctcttccccagctaggtggacaacctgctattctctaccctgaaaaggaaatcctagacgtaccaggcttcccaaacctgactggagaagagttgactaaccgcttgattgaacagctaaatggatttgatacccctattcatctcaatgaaacggttcttgagattgacaaacaagaagaagaatttgccatcacaacttctaaaggaagtcacctgactaaaacagtcatcatcgctatgggtggcggtgccttcaaaccacgtccgctggaacttgaaggtgttgagggctatgaaaatatccactaccacgtttctaacattcagcaatacgctggtaagaaagtgacgattcttggtgggggagactcggctgtggattgggctttggcttttgaaaaaatcgcaccaactacccttgttcaccgcagagataatttccgtgccttggaacacagtgttcaagccttgcaagaatcatctgtaaccatcaagacaccattcgcccctagccaactccttggaaatggaaaaacacttgataaacttgaaatcacaaaagtcaaatctgatgaaactgaaaccattgacctagaccacctctttgtcaactatggtttcaaatcttctgtcggtaaccttaaaaactgggggctcgacctcaaccgtcacaagattatcgtcaacagcaaacaggaatccagccaagcaggtatctatgctatcggtgactgctgctactatgacggaaaaattgatctgattgcgacaggcctcggagaagctccaactgctgtcaacaacgctatcaactacattgaccctgaacaaaaagtacaaccaaaacactctactagtttataa

SEQ ID NO: 655 - DNA, 816 bp, Streptococcus pneumoniae
ttgtttgcaagtccatggacgatagctatcaatctgattgatattttgattgttgcttatattttataccattttacaaaaggtattgcaggaaccaagattatgattttggtacgtggagttttggtatttattttagctcaaatccttgcaaatatgattggtttgactacgatttattggttattcaatcaaattattacttatggggttattgcggcggttgttatcttctctccagagattcggactggtttggaacgtttgggaagagcgacagatttcttttccaatgcccctattagtgctgaggaacagatgattcgtgcctttgttaagtctgttgaatacatgagtcctcgtaaaatcggggccttggttgctattcagcgtgtacgtaccttgcaggagtatatttcgacaggaatccccttggatgctaagatttctgcagaacttctcattaacatttttattcccaacactcccctacatgacggtgcggtgattatcaaagaagaacgtatcgctgtgacgtctgcctatctgcccttgacaaaaaacacaggtatttccaaggaatttgggaccagacaccgggcggctatcggtttatcagaagtctcagatgccttgacttttgtcgtatcagaggaaacgggaggaatttcgataacctataatggaaggtttaagcacaacctaacacttgatgaatttgaaacagaattacgtgaaatcttacttccaaaagaggaagtgggtcttagttttaaagaacgatggctaggaggatggaaacatgaaaaaaaatag

SEQ ID NO: 656 - DNA, 780 bp, Streptococcus pneumoniae
atgaaaaaaaatagtttatatatcatatcctcactcttttttgcttgtgtcttatttgtctatgctacggcgacgaattttcaaaacagtaccagtgctaggcaggtaaaaacggaaacctatactaatacagtaacaaatgtccctattgacatacgctataatagtgataagtattttattagcggttttgcttcagaagtatcagtggtcttgactggtgcaaatcgcctatcgctagctagtgaaatgcaagaaagtacacgtaaattcaaggttactgctgacctaacagatgccggtgttggaacgattgaagttcctttgagcattgaagatttacccaatgggctgaccgctgtggcgactccgcaaaaaattacagtcaagattggtaagaaggctcagaaggataaggtaaagattgtaccagagattgaccctagtcaaattgatagtcgggtacaaattgaaaatgtcatggtgtcagataaagaagtgtcgattacgagtgaccaagagacattggatagaattgataagattatcgctgtcttgccaactagcgaacgtataacaggtaattacagtggttcagtacctttgcaggcaatcgaccgcaatggtgttgtcttaccggcagttatcactccgtttgatacaataatgaaggtgactacaaaaccagtagcaccaagttcaagcacatcaaattcaagtacaagcagttcatcggagacatcttcgtcaacgaaagcaactagttcaaaaacgaattaa

SEQ ID NO: 657 - DNA, 192 bp, Streptococcus pneumoniae
ttcgtttttgaactagttgctttcgttgacgaagatgtctccgatgaactgcttgtacttgaatttgatgtgcttgaacttggtgctactggttttgtagtcaccttcattattgtatcaaacggagtgataactgccggtaagacaacaccattgcggtcgattgcctgcaaaggtactgaaccactgtaa

SEQ ID NO: 658 - DNA, 1353 bp, Streptococcus pneumoniae
atgggtaaatattttgggactgatggagtccgtggagaagctaacctagaactaacaccagaattagcctttaaactaggacgttttggaggctatgttcttagtcaacatgaaacggaagcgccgaaagtctttgtaggacgtgacacacgtatttcaggggaaatgctggaatcggccttggtggcaggtctcctttcagtagggattcacgtatacaaacttggtgtccttgcaacaccagcagtagcttacttggttgaaactgaaggagcaagtgccggtgtcatgatttctgctagccacaacccagcccttgataacggaatcaagttctttggcggtgatggcttcaaactagatgatgaaaaagaagcagaaattgaagccttgctagatgctgaggaagacactcttcctcgtccaagtgcagaaggcttaggaattttggtagattatccagaaggcttgcgtaagtatgaaggataccgtgtgtcaactggaactcctcttgatggaatgaaggttgccttggatacagctaatggagcagcttctaccagtgcccgtcaaatctttgcagaccttggtgcccaattgacggttatcggggaaacaccagacggtcttaacatcaaccttaatgttggttcaacacatccagaagcccttcaagaagtggtcaaagaaagtgggtcagctattggtttggcctttgatggagacagtgaccgcttgattgctgttgatgagaatggtgacatcgtcgatggtgacaagattatgtacatcatcggaaaatacctttctgaaaaaggacaattggctcaaaatacaattgtgacaactgttatgtctaaccttggtttccacaaggccttgaatcgcgaaggtattaacaaggcagttactgcagttggtgaccgctacgttgttgaagaaatgagaaaatcaggctacaaccttggtggtgaacagtctggtcacgttatcttgatggattacaataccacaggtgatggtcaattatcagcagttcaattgactaaaatcatgaaggaaactggtaagagcttatcagagttggcggcagaagtaacgatttatccacaaaaattagttaatatccgagtggaaaacgtcatgaaggaaaaggccatggaagtgccagctatcaaggccatcatcgagaagatggaagaagaaatggcggggaacggccgtatccttgttcgtccaagtggaacagagcccctcttgcgtgttatggcagaagcgcctacaacagaagaagtggactactatgttgataccatcacagatgtagttcgtgctgaaattgggattgactaa

SEQ ID NO: 659 - DNA, 363 bp, Streptococcus pneumoniae
gtgaacaagaatttgttagtcagtatcattttgatgcgcgtatattttgaatgggaaaatgaaaatggagctcctgaaaccaaggtggatgtgaatttccaattgctccaacatgaccaagaaaatcaagtgacttccttgattgtcatcttgagctttatgattgtatttgataagtttgtcattagtggaacaatctcacaagtaaaccatatcgatggccgtattgtcaatgaaccaagtgaattgaaccaagaagaggtggaaaccttggctcgtccatgtttgaacatgctcaatcgtttgacttacgaagtgactgaaattgcattagacttaccaggaattaatttggagttctaa

SEQ ID NO: 660 - DNA, 849 bp, Streptococcus pneumoniae
atgaaattagctgttttcacagattcctctgcttatctcagtgaagagaccttgcaaagagaagacttgtttgtcttggatattcctgtcaatattgatggtgaggaatatgtcgaaggcatcaatctgtctgctgaggaattttaccaaaaaatggctcaggcttctgaattgcctaagaccagtcaaccaagtattgccaagttagatgagatcttaacttcgctcaaagaacaaggctatacacatgccttggggcttttcctatcttctggaatttcaggtttttaccaaaatatccagtatatggtcgatgactatgagggcttaaccattgctttcccagacactttgattacaagtgctcccctaggcatcatggttgaaagcgtctttaattggcgtgatcagggcgatgattttgccagcattcaggataagctagccattcaaatcagccgtacgtcagcctttatcatggtagatgacttggatcatttggtaaaaggtggacgcctttcaaatggggctgccattttgggcaatttgcttagcattaagccaatcctttattttaacgatcaaggtgtgattgaagtttacgaaaaagttcgtactgaaaagaaggccaccaagcgcttaattgaaattatcaaggaaacaacggcttcaggtcaataccgggtcattgtcattcatgggaatgctcctgaaaaggctgaagaattgcgtcagcacttgcttgattttggcttgggttcggatgtttcacttgctacatttggtagtgtcattggaacgcacctaggagcaggaagtattgctctgggttatattccagtgatttag

SEQ ID NO: 661 - DNA, 768 bp, Streptococcus pneumoniae
atgagtattcgagtaattattgccggttttaagggaaagatgggccaggctgcttgtcagatggtattgactgatccagacttggacttggtggcagttttggatccttttgagtctgagtcagaatggcagggtattcctgttttcaaggataaggctgatttagctggttttgaagcggatgtctgggtagattttactactccagctgttgcctacgaaaatacacgttttgctcttgaaaatggctttgctccagtagttggaacgactggtttcacgagtgaagaaattgcagagctaaaagaattttctcgtgcccaagacttgggtggcctgattgcccctaactttgccttgggtgctgtcttactcatgcaatttgcgacgcaggctgccaaatatttcccaaatgtggagattattgagctccatcatgacaagaaaaaggatgctccgagtggaacagccattaaaacagctgagttgatggcagaggttcgagagtcaattcagcaaggtgcagcagatgaggaagagctgattgctggtgctcgtggtgctgactttgatggtatgcgcatccactcagttcgtttgccaggcttggtagctcatcaggaagtcatctttggcaatcagggagaagggttgaccctccgtcatgactcctatgatcgcatctccttcatgacaggagtcaatttgggaattaaagaagttgtcaagcgtcatgagcttgtctatggattagaacacttattatga

SEQ ID NO: 662 - DNA, 1200 bp, Streptococcus pneumoniae
atgagattaacgcaaatgccttctgaatttcagaaggctttaccagtattagaaaaaattaaagaagcaggctttgaggcttattttgttgggggctctgttcgagatgcccttctccatagccctatccacgatgtggatattgcgacgtcttcttatccagaagagaccaagcagatttttccgcgaacagccgatatcggaatcgagcatggaaccgtcttggtcttagatggggatgaggagtatgaggtaacaacctttcggacagaggatgtctatgtggactatcgcagacccagtgcggtttcctttgtacgatcgctagaagaagacctcaaacgccgtgatttcacagtcaacgcctttgccttggatgagacaggagaaatcgttgacttgttccatggtttagaagatttggaaaagcaagtcttgcgagcagttggagtggctagtgagcgtttcaacgaagatgctttacggattatgcgtggtttccgttttcaggctagtcttggttttgcacttgagccagaaacatttaaagctatgaagaccttgacgccgcttttggagaaaatttctgtagagcgtaccttcgtcgagtttgataaactcttgctggctccattttggagaaggggcttggcttccatgattgagagtcaagcttatgactatctccctgatatggcatctagccaggacaagctcaacagactgtttgatttggagactgattttacttttgaatcctctgaacaagcctgggcggctttactatgggctttggagattgaaaatgcgcagtcatttttgaaatcttggaagacctcacgccagtttgccaagcaagttcaggatttgctgattattttggctctgcgtgaaaatggagaattgagcaagcgagattgttatcgctttgacatagatttgcttttacaggctgaaaatcttcgtcaagctcaaggaaaagaagtcaacccacaagccatcacagaaaaataccaaagcttgactatccatgacaagaaagagattcagattaatggcggtattttgatcaaggaatatggctatcagccaggcccagacttgggagagattttaacagagattgagtttgccattgtcgatggagaattggagaataatcgtgaagccatccatgcttacctgagggagaaaaaatga

SEQ ID NO: 663 - DNA, 1872 bp, Streptococcus pneumoniae
atgagtgattttatcgttgaaaaactaagtaaatccgttggtgacaagaccgtttttagggatatttcctttattatccatgacttagacagaattggtttaatcggtgtcaatgggactggcaagaccacccttttggacgtcctttctggtgtttctggatttgatggggatgtcagtcctttttcagctaaaaatgattaccagattggttacttgactcaggatcctgattttgatgatagaaagacagttttggatacggttctatctagtgaactcaaggaaatccagctcattcgtgagtatgaattgattatgctcgactatagtgaggacaagcaggcgcgtttggaacgtgtcatggcagagatggactctctccaagcttgggaaatcgaaagtcaggtcaagaccgttcttagcaaattgggcattcaagacttatctactcctgttggggaattgtcaggtggtctgagaagacgggtacagttggcacaagtcttacttggcaaccacgacctcttgcttttggatgagccgaccaaccatctggatattgcgattattgagtggctgaccctctttttgaaaaattctaagaagaccgtcctttttatcactcacgatcgttatttcttagacgctttgtcaacacggattttcgagttggatcgtgcaggcttgaccgagtaccagggaaattaccaggactatgttcgcctaaaggcggaacaggatgagcgcgacgcggctcttcttcacaaaaaagaacaactctacaaacaagaattggcctggatgcgcagacaaccgcaggcgcgtgcgaccaagcaacaagctcgtatcaatcgtttccatgatctgaaaaaggaagtttcaggcagtagtgctgagacagacttgactatgaactttgaaaccagtcggattgggaagaaagtcatcgagtttcaggctgtttcctttgcctatgaaaataagcccattttgcaaaattttaatctcttagttcaggctaaagaccgtattggaattgttggggacaatggtgttggaaaatcaaccctacttaacctgattgcaggaagtcttgagccgacagcaggacaagttgtgattggggaaactgttcgcatcgcctatttctctcaacaaattgagggtttggatgaaagcaagcgtgtgatcaattacctgcaggaagtggcagaggaggtcaagaccagtggtggttctacgacttccatcgctgagttgctggagcaattcctcttcccacgttcgacgcatgggactttgattgagaaattgtcagggggtgagaaaaaacgtctttatctcctcaaactgcttttggaaaaaccaaatgttcttcttttagacgagccaaccaatgacctagatattgcaactttgacagtcttagagaatttcttgcaaggttttgcaggtcccgttttaacagtcagtcacgaccgctatttcttggataaggtagcgaccaagattctcgcttttgaggatggcaagattcgtcctttctttggtcattacaccgactatcttgatgaaaaagcttttgaaacagatatggccaatcaagtgcaaaaggccgaaaaggaaaaagtggtcaaggttcgagaagacaagaaacgcatgacctaccaagaaaagcaggagtgggcaagtattgaaggtgatattgaaaccttggaaaaacgtatcgctgctattgaagaggaaatgcaggctaacggctctgactttggtaagctggctactctccaaaaagaattggatgagaaaaatgaagcactccttgaaaaatacgaacgctatgagtatctcagtgaatttgatagttaa

SEQ ID NO: 664 - DNA, 432 bp, Streptococcus pneumoniae
ttgcactttgattttcgaatagtcttaactatcaaattcactgagatactcatagcgttcgtatttttcaaggagtgcttcatttttctcatccaattctttttggagagtagccagcttaccaaagtcagagccgttagcctgcatttcctcttcaatagcagcgatacgtttttccaaggtttcaatatcaccttcaatacttgcccactcctgcttttcttggtaggtcatgcgtttcttgtcttctcgaaccttgaccactttttccttttcggccttttgcacttgattggccatatctgtttcaaaagctttttcatcaagatagtcggtgtaatgaccaaagaaaggacgaatcttgccatcctcaaaagcgagaatcttggtcgctaccttatccaagaaatagcggtcgtgactgactgttaa

SEQ ID NO: 665 - DNA, 1182 bp, Streptococcus pneumoniae
atgaagcatctatctaaatctaagttagctgagcgtggagccattatcagtatttcgacctatttgatcttgtctgcagccaaattagcagctggtcatctccttcattcatccagtttggtggccgatggttttaataacgtatcggacatcattggaaatgtggccctcttaatcgggattcggatggcgcgccagcctgcagaccgtgaccaccgttttggtcattggaagattgaagatttggcaagcttgatcacttctatcatcatgttctatgtcggtttcgatgttctaagagataccattcaaaagattctcagtcgggaagaaacggtcattgatcctcttggtgcaactctaggaatcatttctgcagcgattatgtttgtggtctatctctacaatactcgcctcagtaagaaatccaactccaaggcgctgaaggcagctgctaaggacaatctttctgacgctgttacctcacttggaaccgccattgccatcctagctagtagtttcaattatccgattgtggataaactggttgctatcatcatcactttctttatcttgaagactgcctatgatatcttcatcgagtcttcctttagtctttcagatggctttgacgaccgcctgctcgaggactaccaaaaggctatcatggaaattcccaaaatcagcaaggtcaaatcgcaaagaggtcgcacctacggtagcaacatctacctggatattacactagagatgaatcctgacttgtctgtttttgaaagccatgaaatcgcggatcaggtcgagtctatgctggaggagcgttttggcgtctttgataccgatgtccatatcgaaccagcacctatccctgaggatgaaattttagacaatgtctataaaaaattgcttatgcgtgaacaattgattgaccaaggaaaccaactagaagaactcttgactgatgattttgtctatattcgccaagatggagagcagatggataaagaggcttataagaccaaaaaagagttaaattctgctatcaaggacattcaaattacttccatcagtcaaaaaaccaaactcatctgctatgagttagatggtatcatccataccagtatctggcgtcgccacgaaacctggcaaaatatctttcatcaagaaaccaaaaaagaatag

SEQ ID NO: 666 - DNA, 2697 bp, Streptococcus pneumoniae
atgtcaaaagaacaaaaacgccaagcgttttatactcagagccctgaagaggtcttgcaggctgtggatgcgaccgagcaaggtttgtcatcaagtgaggcggaaaagcgccttgccgaatttgggcacaatgaactcgaagaaggcgagaaacgatcaatcttggtcaaattcatcgagcaatttaaggatttgatgattatcatcctagttgcggcagcaatcttgtcagtcgtgacttctggtggggaagatatcgcagatgccattatcatcctagctgtggttatcatcaacgctgcctttggtgtttaccaagaaggaaaagctgaagaagctattgaagccctcaaatccatgtctagtccagttgcccgcgttcttcgtgatggacacatggcagagattgactctaaagaattggtaccaggcgatatcgttgcccttgaagcaggtgacgtggtaccagcggacctacgtttgctagaagccaactctcttaaaattgaagaagcagccttgacgggtgaatctgtaccagtcgaaaaagacttgtcagtcgagcttgcgacagatgctggtattggtgaccgtgtcaacatggccttccaaaactcaaacgtaacctatggtcgtgggatgggtgttgttgtcaatacaggtatgtacactgaagttggtcatattgctggtatgcttcaagatgcggatgagactgatacaccactcaaacaaaacttgaacaacctttctaaggtcttgacctatgctatcttggtcattgcccttgttacttttgtagtgggtgtcttcattcaagggaaaaatccacttggtgagttgttgacttctgttgcccttgctgttgcagccattccagaaggacttcctgctatcgttaccatcgttctttctcttggtactcaagttttggccaaacgacattccatcgttcgtaagttgccagcagttgaaacacttggttcaactgaaatcatcgcttctgataagactggtacgctgactatgaacaagatgacagtcgaaaaagtcttctacgatgcggttctacatgactcagctgatgatattgaactaggtcttgaaatgccactacttcgttcagttgtcttggccaatgatacgaaaatcgatgtggaaggtaacttgattggtgacccaaccgaaacagcctttatccaatatgccttggacaagggctatgatgtcaaaggtttcttagagaaatatcctcgtgtagctgaattgccatttgactctgaccgtaagctcatgtcaacagttcacccattgccagatggtcgtttccttgtagcagtcaagggtgcgccagaccaactcttaaaacgttgtcttcttcgtgataaggctggggatattgctccgattgatgagaaggttacaaatctcattcatacaaacaattctgaaatggctcatcaagccttgcgtgtccttgcaggtgcttataagattatcgatagtattccagaaaatctcacttctgaagagcttgaaaatgatttaatttttactggtttgattgggatgattgatcctgaacgtcctgaagctgctgaggctgttcgtgtggctaaggaagctggaattcgtccaattatgattacaggtgaccaccaagacaccgcagaagctattgccaaacgtttgggaatcattgacgcaaacgatacagaagaccacgttttaactggtgctgagctcaacgaattatctgatgaagactttgaaaaagttgttggtcaatactctgtttatgcccgtgtgtctccagagcacaaggttcgtatcgtcaaggcttggcaaaaacaaggtaaggtcgttgccatgacaggtgacggtgtcaatgatgccccagctctgaaaacagcagacatcggtatcggtatgggaatcactggtacagaggtttctaagggggcttctgatatgattcttgcagatgataactttgcgactattatcgtcgcagtggaagaaggacgtaaggtcttctcaaatattcaaaagactattcagtacctactttctgccaatactgctgaagtattaaccatcttcctatcaaccttgtttggttgggacgtcttgcagccagttcatcttttgtggattaacttggtaacggataccttcccagcaattgcactaggtgttgaacctgcggaacctggtgtcatgaatcataaaccacgtggacgcaaggcaagcttcttctcaggtggtgttttgagttctatcatttatcaaggtgtactccaagcagctcttgttatgagtgtttatggccttgcgattgcttacccagttcatgtgggtgacaatcatgctattcatgcagatgccctaacgatggcctttgcaacccttggtttgattcagctcttccatgcctacaatgtcaagtctgtctaccaatccatcttgacagttggcccattcaagtctaagacctttaactggtccatcttggtatcctttatccttctcatggcaacaatcgttgtagaaccgcttgaaggaatcttccacgtaaccaaactagacttgtcacaatggggaattgttatggctggaagcttctcaatgattatcatcgtcgaaatcgttaagtttattcaacgcaaactcggttttgacaagaatgcgatttaa

SEQ ID NO: 667 - DNA, 291 bp, Streptococcus pneumoniae
atgttgacacggtcaccaataccagcatctgtcgcaagctcgactgacaagtctttttcgactggtacagattcacccgtcaaggctgcttcttcaattttaagagagttggcttctagcaaacgtaggtccgctggtaccacgtcacctgcttcaagggcaacgatatcgcctggtaccaattctttagagtcaatctctgccatgtgtccatcacgaagaacgcgggcaactggactagacatggatttgagggcttcaatagcttcttcagcttttccttcttggtaa

SEQ ID NO: 668 - DNA, 249 bp, Streptococcus pneumoniae
atatttgagaagaccttacgtccttcttccactgcgacgataatagtcgcaaagttatcatctgcaagaatcatatcagaagcccccttagaaacctctgtaccagtgattcccataccgataccgatgtctgctgttttcagagctggggcatcattgacaccgtcacctgtcatggcaacgaccttaccttgtttttgccaagccttgacgatacgaaccttgtgctctggagacacacgggcataa

SEQ ID NO: 669 - DNA, 792 bp, Streptococcus pneumoniae
atgtcagcatatcaattaccgaccgtatggcaggatgaagctagtaatcaaggagcttttacggggctaaacagaccaacagtaggtgcccgtttcgaacaaaacttgccaaaaggagaacaagcttttcagctttattcactgggaacaccaaatggtgtgaaggttactatcttattggaagaattactagaagctggttttaaggaagcggcttacgacttgtataagattgctatcatggatggggatcaattcggatcagactttgtgaagctcaatccaaattccaagattccagccttattggaccagtcaggtactgaagatgtaagagtctttgagtctgctcatattcttctttaccttgctgagaaatttggagcctttttaccaagtaatcctgtggaaaaggtagaagttttgaattggctattctggcaagcaggtgcagcaccttttctaggtgggggatttggacatttcttcaattatgctcctgaaaaattggaatatcctattaaccgttttacaatggaagtgaaacgccagttggatttattggataaggaattggctcagaaaccttatattgcaggcaatgactatacgattgcagatattgctatctggtcttggtatggacagttagttcaaggaaatctttaccaaggttctgcaaaattcttggatgcctcaagttatcaaaatctagtaaaatgggcagaaaaaattgccaatcgtccagctgttaagcgtggcttggaagtaacttatacagaaattaaatag

SEQ ID NO: 670 - DNA, 456 bp, Streptococcus pneumoniae
tatagtaaaaagcaagaggagtgtgaggaagtggaaaagaaaattgtgaaggatatcttatttttatctcaagtgtctcagccggcaagtcaggaggacctttatcttgccagagatttgcaggatacactcttagcaaatcatgatacctgtgttggtctagctgccaatatgattggggtgcagaagcgcgtgattatctttaatcttggcttggttcccgtggtcatgtttaacccagtgcttctgtcctttgaaggatcctatgaggcagaagaaggctgtttgtccttggtaggtgtgagatcaactaagcgttatgaaaccacaaggcttgcctatcgtgacagcaagtggcaggaacagaccattaccttgacaggcttcccagctcagatttgccagcatgagctggatcacttggaaggacgaatcatttaggaggaaagcaaatga

SEQ ID NO: 671 - DNA, 1596 bp, Streptococcus pneumoniae
atgaaacgaatagtctttgaacttatttttatcgcaacgacctggtatatctttttaccgccccttaacctgaccagctgggaatttctcttcttcctctgtgggcatttgttagttgtggcaatcttatttggctttggcaaggggataaaccttgtcaaaacggttcatgtgcgccacggtaaggcggaagctgccttaaatcttgagggtttcaaaatcaatcggttagggaaaattctgttagcttcgattggaggaattcttctcttggcagctttggtttccttggtaacttccagcatgtttcaggctaaaaattatgccaatgtagtcacggttacggaaaaagactttactgaatttcctaggagtgacaccagtaaggttcctatcctagatagaagtactgctgaaaaaattggagaccgctacttgggttccctaaccgataaggtgtcgcaatacgtagcggcagatacctatacccaattgacaattgatgggaaaccttatcgggtcacaccactagaatatgcagaccctatcaaatggtttaacaatcaagccaagggaatcggtgaatatatcaaggtggacatggtaactggaaatgcggatttggtggacttgaagacaccaatcaagtattcagactcggagtattttaaccgtgatgtcaaacgtcacctgcgcttgaagtacccgaccaaaatctttaaaactccatcttttgaggtggacgatgagggcaatcctttctatgtagcaacggtttaccaaaagcaatttggacttgctgttcctcgtcctgcttcagtcattatcttggatgctacaaatggagaaaccaaggaatacagcttatcagatgttccagaatgggtggacaggatctatccagcagaggaaaccattgagcaaatcaactacaacggcaagtacaaggacggtttcttgaatgccatgatttccaagaaaaacgtgacccagactaccaagggctataattacttgtctatcggtaatgacatctatctctacacaggtgtgacgtcggctaatgcggatgagagtaatcttggtttcatccttgaaaatatgcgaacaggagaaatcactaagtatagcttggcttctgcgacagaagaatcagcccgtgaatcagcagaaggtgctgttcaggagaaatcctacaaagcaaccttcccaatcctcatcaacctcaatgacaagcctctctacatcatgggcttgaaggacaatgctggcttggtcaaagagtacgccctggtagacgcagtcgagtaccaaaatgttatcgttgctactacagtggaagagatgctcagcaagtatgccaataaaaacgaccttgaaattgacaatgcaacgacagaaagcatcaatggagtagtagcagacctcaaatcagctgttatcaagggagacactgtctacttctttaaagttgatggcaagatatacaaggtcaaggcttcagtatccgatgaccttccttaccttgaaaatggtaaaaccttcgaaggtcaagtaggaaaagacaattatctcaagacctttaagctacggtaa

SEQ ID NO: 672 - DNA, 180 bp, Streptococcus pneumoniae
atggaggacaaagaaatgggtttttatttgatggttgcttcaatgctactcggactgctcgctttgaagataggtttttctcagttcaaggagaaaaaagataaattcttatctatcttaacaagtttagctggcacacgccttgttctcgtggctgtctggttaggatggcccaaataa

SEQ ID NO: 673 - DNA, 729 bp, Streptococcus pneumoniae
atgaaaattttaatcccaacagcaaaagaaatgaacacagacttgccaagtatcgaggcaatttctttaacaccagaaagtcaggccgtgcttgatgccttggctctctattctgccagtcaattggagagtttctacaaggtatcagctgagaaagcggcggaagaatttcaaaaatatccaagctttgaaaaggcagactactcaccctatccagccttgatactttttgatgggcttatgtaccgcaacattaagagagataagctgaccgaggcggaacaagattatcttgaaaatcatgtcttcattacctcggctttgtacggtgttgttccagccttgtcacccatggctcctcaccgtttggattttttgatgaaattaaaagttgctggtaagactttgaagagccattggaaggcagtctatgatgaagctctgaagatggaagaagtgattttctctctcttgtcatcagagtttgagactgtattttctaaggaaatcagagcaaagatggtgaccttcaatttcatggaggatagagagcggtcactgaagattcactcaactatctccaagaaagcgcgcggggcctttttaacagctttaatagaaaatcaagtacaaactgtgggggaagcacgtcgcttgaactttgctggatttgtttaccgagaagatttgtcacaaccacagggattggtttttgtaaaggaagtatag

SEQ ID NO: 674 - DNA, 630 bp, Streptococcus pneumoniae
ttgcaagttgttttgctttggtgtaatatattttataacaacgagaaaattctcgtaaatttaagaaaaaggagacacatcatgtctaaaaaagtattatttatcgtcggatcactacgccaaggttctttcaaccaccaaatggccctcgaagctgagaaagcacttgctggtaaagcagaagttagctaccttgattattcagcccttcctctcttcagccaagatttggaagttccaactcatccagctgtagcggcagctcgtgaagctgtccttgctgcggatgccatctggatcttctctccagtctacaacttctctatccctggaacagtgaaaaacttgcttgactggctatctcgtgcccttgacttgtctgatacacgcggcgcttctgcccttcaagacaagttcgtcacagtatcatctgtagccaatgcaggtcacgatcaactcttcgctatctacaaagacctcttgccatttatccgtacacaaggcgttggtgatttcactgctgcacgtgttaatgactctgcctgggcagacggaaaattggttcttgaagaaacagtcctaaactcacttgaaaaacaagctcaagacttgatcgaagctatcaagtaa

SEQ ID NO: 675 - DNA, 489 bp, Streptococcus pneumoniae
gtgaaaaaaagacaaaacaaagcaaaaaataatctactgtggcagtatggtctagggatgacgattttgtttgtggttatcagtgcttcctttctgtatatggtttctcttagcatgaaaccctatcaaacagctaaaagtgaaggagaaaaattagctcagcagtatgcaggattagagcaggccgatcaggttgatttatacaatggcttggaatcttattacagcgttcttggtcgtaataaacagcaagaagcacttgctgttctgattggaaaagatgatcataagatttacgtttatcagctaaatcagggtgtttcacaagaaaaagcagaaacggtttctaaggaaaagggagctggcgaaattgacaagattatctttggtcgttatcaagataagccaatctgggaagtcaagtcaggatctgatttttatctagtagattttgaaacaggagcattggtcaacaaggagggcctatga

SEQ ID NO: 676 - DNA, 1188 bp, Streptococcus pneumoniae
atgaaattatccaaccgtgttttagaaatggaagaaagtgtgactttggctgctggagcccgtgccaaagcactgaaggctgagggcagagatattttgtctctaaccttgggtgagccagatttcactactcccaaaaatatccaagatgccgccattgcatcgattcgagatgggcgtgcttctttttatacagtaacctcaggtctgccagagcttaaggcggtggtcaatagctactttgagcgcttttacggctattctgtagcgccaaatcaagtgacagtcgctgcgggagccaaatattctctctataccttctttatggctgtggtcaatccaggtgatgaagtcatcatcccaaccccatactgggttagctatggagatcaggtcaagatggcagaaggcgttcccgtctttgtttctgctaaggaagacaatcactttaaggtgaccgtagagcagttagaagcagctcgcactgacaagaccaaggttttggtgctgaattcgccatctaatcccacaggtatgatttacacccgtgaggaactcttggcaattggaaactgggctgtagaaaatgatattctcatcctagcagatgatatctatggccgcttggtttataatggtcatgagttcacaccgatttctagcctatcggaagcgattcgcaagcaaacagtggtcatcaatggtgtgtctaaaacctatgccatgactggttggcggattggttatgccgttggagaagcagacattatcgctgccatgtccaagattgcaggtcaaacaacttcgaatccgtcagcagtagcccaatatgcagcagttgaggctctatcaggtgagcaagatactgtagaaagcatgcgtcaggcctttgagaaacgtcttaataccatctatcccctccttgcagaggtgccaggatttgaagtggtcaaaccacaaggggctttctatctattcccaaatgtcaaaaaggccatggagatgaaaggctacacggatgtgacagactttacaactgctatattagaagaagccgaagtggccttggtaacaggagctggatttggagcaccagaaaatgtccgcctcagctatgcgacagacctagacacgcttaaagaagcagtcgaacgcttgaaagcatttatgggtagtgagaatgattga

SEQ ID NO: 677 - DNA, 372 bp, Streptococcus pneumoniae
gtgagaatgattgatcattttgagattaaggtaaaggatttacaaatttcagaaggattttataggagttttctcgctcctttggactataaattggcttttaagactagttctctaattagttttctatccccgaacagccctcatcctggtggtgatttttggctgactcagggaacacaagatcctgttcattttgcttttttagcagaaaataaggaagaagttcaggcttgttatgaggctggcatagaggcaggtgggcgagacaatggggttcctggttatcgaagtgagcatccgatttactatgctgcttttatgattgacctggatgggaacaatatagaggtggtttgccataaagaataa

SEQ ID NO: 678 - DNA, 1344 bp, Streptococcus pneumoniae
atgacaaaacgtgtaacgattattgacgtaaaagactatgttggtcaggaagtgacgattggcgcttgggttgccaacaaatcaggaaaaggaaaaatcgctttcttacaattgcgtgatggaacagccttctttcaaggtgtggcttttaaaccaaactttgtcgaaaaatttggtgaagaagtgggacttgagaagtttgatgttatcaaacgcttgagccaagaaacgtctgtttatgtgacaggtattgtcaaagaggacgaacgttctaaatttggctatgagttggacatcacagacatcgaagtgatcggtgaatctcaagactacccaatcacaccaaaagaacacggaacagactttttgatggataaccgtcacttgtggctacgctctcgtaagcaagtagctgtgttgcaaatccgtaacgctattatctatgcaacttatgagttctttgacaagaacggttttatgaagtttgacagcccaattctttcaggaaatgcggcagaagattctacagaactctttgaaactgactacttcggaacgccagcctacttgagccaatcaggtcagctttacctagaagcaggggctatggctcttggtcgtgtctttgactttggtccagttttccgtgctgaaaaatcaaaaacacgccgtcacttgactgagttctggatgatggatgctgagtactcatacttgacacatgatgagtcgcttgacttgcaagaagcttatgtgaaagctcttctacaaggtgttcttgaccgcgcgcctcaagccttggaaaccttggaacgtgatacagaactcttgaaacgctacattgcagagccattcaaacgtatcacttacgatcaagccattgacctcttgcaagagcatgaaaatgatgaagatgctgactacgagcatcttgagcatggtgatgactttgggtcaccacacgaaacttggatttcaaaccactttggtgtgccaacatttgtcatgaactatccagcagccatcaaggccttctacatgaaaccagttcctggaaatccagagcgcgtgctttgtgcagacttgcttgctccagaaggctatggagaaattatcggtgggtctatgcgtgaggaagattacgatgcccttgtcgctaagatggatgaacttggcatggatcgtacagaatatgaattctaccttgaccttcgtaaatacggtacagttccacacggaggatttggtatcggtatcgaacgtatggtaaccttcgcagcaggaacaaaacatatccgtgaagctattccattcccacgtatgttgcaccgtatcaaaccataa

SEQ ID NO: 679 - DNA, 387 bp, Streptococcus pneumoniae
atgggcgttttcctgttcttatggtttgatacggtgcaacatacgtgggaatggaatagcttcacggatatgttttgttcctgctgcgaaggttaccatacgttcgataccgataccaaatcctccgtgtggaactgtaccgtatttacgaaggtcaaggtagaattcatattctgtacgatccatgccaagttcatccatcttagcgacaagggcatcgtaatcttcctcacgcatagacccaccgataatttctccatagccttctggagcaagcaagtctgcacaaagcacgcgctctggatttccaggaactggtttcatgtagaaggccttgatggctgctggatagttcatgacaaatgttggcacaccaaagtggtttga

SEQ ID NO: 680 - DNA, 291 bp, Streptococcus pneumoniae
atggctaaatacgaaattctttatatcattcgtccaaacattgaagaagaagctaaaaacgctttggtagcacgttttgactctattttgactgacaacggtgcaactgttgttgaatcaaaaacttgggaaaaacgtcgtcttgcatacgaaatccaagatttccgtgaaggactttaccacatcgttaacgttgaagcaaatgacgatgcagctcttaaagagtttgaccgtctttcaaaaatcaacgctgacattcttcgtcacatgatcgtcaaaattgacgcgtaa

SEQ ID NO: 681 - DNA, 471 bp, Streptococcus pneumoniae
atgattaacaatgttgtacttgtagggcgtatgacacgtgacgctgagttgcgttataccccatcaaatgtagcagttgcgacttttactcttgcagtaaaccgtacatttaagagtcaaaatggtgaacgtgaggctgattttatcaatgtcgttatgtggcgccaacaggctgaaaatcttgctaactgggctaaaaaaggctcacttatcggggtgacaggtcgtatccagactcgtagttacgataaccagcaaggacaacgtgtctacgtgacagaggtcgtggctgagaatttccaaatgttggaaagccgtagtgtgcgtgagggccacacaggtggagcttactctgcaccaactgcaaactattcagcacctacaaattcagtaccagacttttcacgtaatgaaaatccatttggagcaacaaacccattggatatttcagatgatgatttaccattctaa

SEQ ID NO: 682 - DNA, 261 bp, Streptococcus pneumoniae
acttataaaggagaaaaaacatggctcaacaacgtcgtggcggattcaaacgccgtaaaaaagttgattacatcgcagcaaacaaaattgaatatgttgattacaaagatactgagcttcttagccgtttcgtttcagaacgtgggaaaatccttccctcgtcgtgtaacaggaacttcagctaaaaaccaacgtaaagtaacaacagctatcaaacgcgctcgcgtaatggctttgatgcctttcgtaaacgaagattaa

SEQ ID NO: 683 - DNA, 336 bp, Streptococcus pneumoniae
agtaggcaaatcccctattttcaaaaagtttatcatttttattttaatttcttggatgagaaaaaagacatatttatgaaaaagctccatcgtgcttttaatgtgttctcttgttttcaaactcgtaaaaagggagccactgagcctaactcgctctctcatttcaaagcttgtgaaaaaagacccgttggggtcttaattcgctttcttgttttcaagctcatgaaaaagagacccaaccgggtcttttctttaatcttcgtttacgaaaggcatcaaagccattacgcgagcgcgtttgatagctgttgttactttacgttggtttttagctga

SEQ ID NO: 684 - DNA, 1401 bp, Streptococcus pneumoniae
atggacgcgaaattaagatacaaggcaaagaagatcaagattgtcttttttgatattgatgatacattgcggaattcaaagacagggtttattccaactacaattcccactgtttttaaacagttgcgtgaaaaaggaattttaacaggaatcgcctctggacgtggcatttttggtgttgttccagagattcgtgatctcaagcctgacttttttgtaactttgaatggggcttatatcgaagataaaaaaggtcaggtcatttatcagcatcagattgaaaagtcatatgttgaggagtatatctcttgggctaagcaagaaggaattgagtatggcttggttgggagtcatgatgccaagttgtcgactcgcaccgatatgatgagtgaagctatcaatccaatttatcccgacttagatgtagatcccgatttccatgaaaaagaagatatctatcagatgtggacttttgaagataagggagatgacttgcacttgcctgacagtctctcagacaaacttcgcatggttcgttggcatcaacattcgtctgatattgtgccgatttcaggctccaaagcgacgggggtggaaaaggttgtggaacaccttggcttgaaaccagagaaggtcatggtttttggagatggtctcaacgacttggaactctttgattatgctggaatcagcgttgccatgggaatttctcatgataaaatcaaagaaaaagcagattatattacaaaaacattagaagaagatggcatttttgatgccttagaagtatttggtatggtagaaaaagaattgcattttccacaagtagacattgaaacagtagaaggtcctcttgcgactattaagaccaatcacggagacttacgtatcaagcttttccctgaacatgctcctaaaacagtggctaactttgtatctctttcaaaagatggctactatgatggtgtcattttccaccgtattatcaaggactttatgatccaaggtggagacccaactggaactggtatgggtggcgagtcaatctacggcgaatcttttgaggatgaattctcagaagagctttacaatatccgtggtgctctttccatggcaaatgctggtccaaataccaacggcagccagttctttatcgtgcaaaaccaacacctaccttattctaagaaagaaattactcgtggtggttggccagaaccgattgcagaaatctatgccaatcaaggtgggacacctcacctagaccgccgtcacacggtttttggtcagttagctgatgaagcatcttacgctgtcttggatgtcattgctgctgttgagacaggagctatggacaagccagttgaagatgttgtaattgaaactattgaaatcgaggactaa

SEQ ID NO: 685 - DNA, 252 bp, Streptococcus pneumoniae
atgaaaatcggtgataagctaaaggggcgtattacagggattcagccctacggtgcctttgttgagttagagacgggtgatacggggctgattcacatttcagaaattcggacaggatttattgaaaatattcacgaaaccttgaaagtcgatgaagaagttcaagttcaggtagtggatttagatgaatttacgggggaaagccagtctttctatccgcactttggaggaagaaaagtaccagtttcctag

SEQ ID NO: 686 - DNA, 261 bp, Streptococcus pneumoniae
atggaagaagaacaattattaaaatcaggagagcgcattaaccagctcttttcgacagatatcaaaatcattcaaaatagagaggtttttagctattcggtggatagtgttctcttatcacgatttccacgttttcctaagaaggggttgattgtggatttctgtgctgggaatggagcagtggggctttttgctagcactcgtactcaagcacagatattgtctgttgagatttcaggagcgtttggcggatatggctga

SEQ ID NO: 687 - DNA, 201 bp, Streptococcus pneumoniae
ttgtggatttctgtgctgggaatggagcagtggggctttttgctagcactcgtactcaagcacagatattgtctgttgagatttcaggagcgtttggcggatatggctgaacgctctgtccgtttgaatggattagaggagcaaatgcaggtcatctgcgatgatttgaaaaatatgcctgctcacattcaggggaagtaa

SEQ ID NO: 688 - DNA, 387 bp, Streptococcus pneumoniae
ttgtgtaatccaccctatttcaaggtgaatccttattctaatctgaacgagagtgaacattatctcttggctcgacacgaaatcacgactaatttggaagaaatctgtcgtagtgcccagagtattctcaagtctaatgggcgtttggccatggttcatcgtcctgatcgacttctggatattttggatacgttaaaacgacataatctagcccctaagcgcctgcagtttgtttatccaaaaagagaaaaggaagccaatatgcttttgattgaggcgatcaaggatggctcaacaagtggctttaaggtcttacctcctttgattgtccacaatgatgatggctcttatacgcccgaaatcgaagagatttattatggatcataa

SEQ ID NO: 689 - DNA, 279 bp, Streptococcus pneumoniae
atggatcataaggcttatatgtacgttctggagtgtcgtgatggatcctactatataggctatacgactgatatgagaagacgcctcgctatccacaatagtgggaagggagccaaatatacacgagcacgcttgccagtcaaacttatctatgctcaaggttttgccagtaaggaagaagccatgtcggctgaagctcttctcaagcgtaagaagaggccacagaaggaagaatttttatctgaaaatcaagatagaaatttactccgtttattttga

SEQ ID NO: 690 - DNA, 180 bp, Streptococcus pneumoniae
ttgactgaccacaatgaattccaacaatctgtatcagatatcgctgaagtagaagtttacggtgttgtagaccaccaccgtgtgctaactttgaaactgcaagcccactttacatgcgtttggagccagttggatcagcgtcttcaatcgtttaccgtatgttcaaagaacatggtgtag

SEQ ID NO: 691 - DNA, 666 bp, Streptococcus pneumoniae
agtagaagtttacggtgttgtagaccaccaccgtgtgctaactttgaaactgcaagcccactttacatgcgtttggagccagttggatcagcgtcttcaatcgtttaccgtatgttcaaagaacatggtgtagctgtgcctaaagagattgcaggtttgatgctttcaggtttgatttcagatacccttcttttgaaatcaccaacaacacacccaacagataaaatcattgctcctgaattggctgaattggctggtgtaaacttggaagaatatggtttggcaatgttgaaagctggtaccaacttggctagcaaatctgctgaagaattgattgacatcgatgctaagacttttgaactcaacggaaataatgtccgtgttgcccaagtgaacacagttgacatcgctgaagttttggaacgccaagcagaaattgaagctgcaatgcaagctgccaacgaatcaaacggctactctgactttgtcttgatgattacagatatcgtcaactcaaactcagaaatattggctcttggtgccaatatggacaaggtcgaagcggctttcaatttcaaacttgaaaacaatcatgccttccttgctggtgccgtttcacgtaagaaacaagtggtacctcaattaactgaaagctttaatacgtaa

SEQ ID NO: 692 - DNA, 513 bp, Streptococcus pneumoniae
atgttagaaaatggcgatttgatttttgtgagagatgggtcagacatgggacaggccatccagacttccacaggtaactatagccatgttgccatttatttggatgggatgatttatcatgctagtggacaggctggtgttgtctgtcaagaaccggcagacttctttgagtccaatcatttatacgacctctatgtttacccagaaatggatatccagtcggtgaaggaaagagcttgcagacatcttggagcaccctacaatgcttctttctatccagatgcagctggtttctactgctcccagtatatagcagaaatcctacctatttttgaaactattcctatgaaatttggagatggggaacaggagattagtgatttttggagggagtattacatagaactaggtctgcctgttcctctgaaccaagctgggaccaatcctagtcagttggcagcatcgcctctgttacaatgtaaagaaaggaatcttcatgattcagatttttaa

SEQ ID NO: 693 - DNA, 315 bp, Streptococcus pneumoniae
ttgatccgctatctggaccagtatgaggatgtgattctacgggaaattaaggctcaatttccagatgttgcagttgataaactcatggaagagtatataaaggcaggcttgattctacgtgaaaataagcgctattacctcaattttcctacgcttgaatcacttgatagtcttgaactggatcaagagatttttgtcagagaagctagtccggtctatcaagccttgttggagcagagttttgagacggaattgcgcaatcaaatcaatgcagctattttagttgaaagacggactttgcgcgcattaaaatga

SEQ ID NO: 694 - DNA, 285 bp, Streptococcus pneumoniae
atgaccctgtccaattatttttacaaggtcaaacagcagtatcctttgacagaaaaacagcaggagctctatgacattttaggagatgttaatcctgagtatgccctcaagtatatgacggcttttttgttgaaatttctcaaaaaagaccagcttatgcagaaatgccgtgatatctttgtggacagtttggttgtcttaggctatattgtgcaaaatgaagatagaaagtatgagttggctatcgattttgataaggagagattaactttctacttagcgtga

SEQ ID NO: 695 - DNA, 195 bp, Streptococcus pneumoniae
atgtcacttgaaaacaaattggaacaagcaacaggcgctgtcaaagaaggttttggtaaagttactggagacagcaagacagaacttgaaggagctgttgaaaaaacagttgctaaggcaaaagacgttgtagaagacgcaaaaggtgctgtagaaggtgccgttgaaggtttgaaaaacgtttttactaaataa

SEQ ID NO: 696 - DNA, 939 bp, Streptococcus pneumoniae
catgatgaatcaggctgtgaaaatgaccgtacccacctcatcatggaagtctccagtcaagcctatctagtccatcgagtctatggactgacctttgatgtaggagtctttcttaacatcactcctgaccatatcggcccgattgaacaccctagctttgaagactatttctaccacaagcgtctcttgatggaaaatagccgagcagtcatcattaacagtgacatggaccacttctcagtcttgaaagaacaggttgaagatcaagaccatgatttctatggtagccaatttgataaccaaatcgagaattccaaagcctttagcttttcagctacgggtaaactcgctggagattatgatatccaactcattggcaacttcaaccaagaaaatgcagttgctgctggacttgcttgtctccgtctcggagcaagtcttgaggacatcaaaaaaggcatcgctgcaacccgcgttcctggtcgtatggaagtcctcactcagaaaaatggagccaaggtcttcatcgactatgcccacaatggggatagtctgaaaaaactcatcaatgtggttgaaactcatcaaaccggaaagattgctctggttctgggatcaacaggaaacaagggagaaagtcgtcgtaaggactttggcctcctcctcaatcaacaccctgagattcaagtctttctgactgctgatgaccctaactatgaagacccaatggccattgcagatgaaattagtagctacatcaatcatcctgttgaaaagattgcggatcgccaagaagccatcaaggcggcaatggctatcacaaatcacgaattagatgcagttattattgcgggtaagggagccgattgttaccaaatcatccagggcaagaaagaatcctacccaggagatacagccgtcgcagaaaattatttataa

SEQ ID NO: 697 - DNA, 576 bp, Streptococcus pneumoniae
atgattaagattgaacccgtattagatattttaaagaaagatggcctttttcgcgaaattattgaccaaggtcattaccactacaactacagcaaagttatttttgatagcatcagctacgacagccgaaaagtaacagaagacactcttttttttgcaaaaggcgctgcctttaaaaaagaataccttctttctgctataacacaaggtttagcttggtatgtagctgaaaaggactacgaagtcgatatccctgtcatcattgtgaacgatataaagaaagccatgagtttgattgccatggagttctatggtaatccacaagagaaactcaaactccttgcctttactggtactaagggtaagacaacagcaacctatttcgcctataacatcttatctcaggggcatagacctgctatgttgtcgaccatgaacacaactcttgatggcgagactttctttaagtcagcgttgacaacccctgagagtattgacctctttgacatgatgaatcaggctgtgaaaatgaccgtacccacctcatcatggaagtctccagtcaagcctatctag

SEQ ID NO: 698 - DNA, 1623 bp, Streptococcus pneumoniae
atgtcgcacgaaaacaatcaccagcaggcccagatgttacgggggactgctttgctaacggctagtaactttatcagtcgcctactcggggctgtttacattatcccttggtacatctggatgggggcttatgcagctaaggcaaatggtctctttaccatgggttacactatctatgcttggttcttgttggtttcaacagcggggattccagttgcggtggccaagcaagttgccaagtataataccatgcgagaagaagagcatagctttgccctgattcggagcttcttaggctttatgacaggactaggcctggtttttgctttagtcttgtatgtctttgctccttggctagcagacttgtctggcgtgggcaaagacttgatcccaatcatgcaaagcttggcttggggagtcttgattttcccgtctatgagtgttatccgaggatttttccaagggatgaataacctcaaaccctatgccatgagccaaattgctgagcaggtcattcgtgttatctggatgctcctagcaacctttatcattatgaagctcggttcaggagattatctagcagccgttacccaatcaacctttgctgcctttgtcggtatggtagccagttttgcagtcttgatttatttccttgcccaagaaagttcactcaaaagagtctttgaaacaggagataagattaacagtaagcgtctcttggttgataccattaaggaagccattccttttatcctgacagggtctgccatccagatcttccagattttggatcagctgacctttatcaatagtatgagctggtttaccaactacagcaatgaggacttggttgtcatgttttcttatttctcagccaatcctaataaaatcacgatgattttgatttctgtaggggtttcgattgggagtgttggtttgccacttttgacggaaaactatgtcaagggggacttgaaagcggcttctcgtctcgttcaggacagtctcaccctactctttatgttcttgctaccagcaacggttggagtggttatggtaggagaacctctttatacggtcttctatggtaagccagatagtttggctctgggcttatttgtctttgcagttttgcagtctattattttaggcttgtacatggtcttgtctccaatgcttcaggccatgttccgcaaccgcaaggccgttctctattttatctatggttctattgccaagctagtcttgcaactacctaccatcgccctcttccacagttatggtcctttgatttcaacaaccattgctctcatcattcctaacgtcttgatgtatcgggatatttgtaaagtaactggtgtcaagcgcaaggtgattttgaagcgaaccattttaatcagtttgctgaccctagtcatgtttctgttaataggaaccatccagtggctgttaggatttttcttccaaccaagtggacgtttgtggagcttcttttatgtagctcttgtcggtgccatggggggtggactttatatggttatgagtctgcgtacctatttattagataaggtaataggaaaagcccaagcagatcgcctgcgagcaaaatttaagctttcgtaa

SEQ ID NO: 699 - DNA, 1959 bp, Streptococcus pneumoniae
atgaaaaagtctaagagcaaatatctaaccttggcaggtcttgtcctgggtacaggagttttattgagcgcgtgtggaaattctagcacggcgtcaaaaacctacaactatgtttattcaagtgatccatctagcttgaactatctagcagaaaaccgcgcagcaacatccgatattgttgcaaatttggtagacgggttattagaaaatgaccaatatgggaatattattccatcattagcagaggattggactgtttctcaggacggtttgacctatacctacaaacttcgtaaggatgccaagtggtttacttctgagggagaagaatatgcgcctgtaactgcccaggattttgtgacaggtttgcaatatgcagctgataaaaaatcagaagccttgtatctagtgcaggactctgttgctggtttggatgactatatcactggtaaaacaagcgacttttcaactgtcggtgtcaaggcacttgatgaccaaacggttcaatatactttggttaaaccagaactttactggaattcaaaaacacttgcaacgatactttttcctgttaatgcagatttcctgaaatcaaaaggggatgattttgggaaggcggatccatctagtattttgtacaatggacctttcttgatgaaagcacttgtctcaaaatctgctattgaatataagaaaaaccctaattactgggatgctaagaatgtctttgtagacgatgtgaaattgacctactatgatggtagcgaccaagaatcactggaacgtaattttacagctggtgcttatactacggctcgtctttttcctaacagctccagctatgaagggattaaagaaaaatacaaaaacaatatcatctatagtatgcaaaattcaacttcatatttctttaattttaacctagataggaagtcttacaattatacttctaaaacaagtgacattgaaaagaaatcgactcaggaagcagttctcaataaaaacttccgtcaggctatcaattttgcttttgacagaacatcttatggggctcagtctgaagggaaagaaggtgcaacaaagattttgcgtaacctagtggttcctccaaactttgtcagtatcaagggaaaagactttggtgaagttgtagcctctaagatggtcaactatggtaaggaatggcaaggtatcaactttgcggatggtcaagacccttactacaatcctgagaaagccaaggctaagtttgcggaagctaagaaagaactcgaagcaaagggtgttcaattcccaatccacttggataagactgtggaagtaacagataaagtaggcatacaaggagttagttctatcaaacaatcaattgaatctgttttaggttctgataatgtagtgattgacattcagcaattaacatcagatgagtttgacagttcaggctactttgctcaaacagctgctcagaaagactatgatttatatcatggcggttggggacctgattatcaagacccgtcaacctatctcgatatttttaatactaatagtggaggagttctacaaaatcttggactagagcctggagaagccaatgacaaggctaaggcagttggactggatgtctatactcaaatgttggaagaagctaataaagagcaagatccagccaaacgttatgagaaatatgctgatattcaagcttggttgattgatagttctttagttcttccaagtgtttcgcgtgggggaacaccatcattgagaagaaccgtaccatttgctgctgcctatggtttaaccggtacaaaaggggttgaatcatataaatacctcaaagtacaagataagattgtcacaacagacgaatatgcaaaagccagagaaaaatggttgaaagaaaaagaagaatccaataaaaaagcccaagaagaattggcaaaacatgtcaaataa

SEQ ID NO: 700 - DNA, 555 bp, Streptococcus pneumoniae
ggagtatttatgaaattaaaattattaagagtagatactaaggtgattatggggagtttcttacttgttctgtctagtctacttgctttgttgcttccccttatcttaaagggtttaatagatgggagttctattgaaaatataggttccaaagtatttcaatcgtttttgatttttattggtcaagccttgttttcttctattggttactatctgtttagtcaatcgggtgaaaaaaagatagcaaaaatcaggaaaaaagtgatagaggggttgatttatgcagagaaatccttctttgataagagccaaagtggggagttgacttctgccattgtcaatgacatgagtgtcattcgtgagtttttaattacgactttcccaaatattattctgagtttagttatggtacttggttccattgtagtcttatttagtcttgattggaatctttctctacttttattcatcactcttccttgtatgatgtttattatcttgcccctttccaatatcagtgaaaagtatagtcgtcgtttacaggaggaaatttaa

SEQ ID NO: 701 - DNA, 540 bp, Streptococcus pneumoniae
ttgactgaaaagattcaagaacatgaattaattaagactaaccaagcagagaaaagtgtacaggatgttttggataattgtattgaaagggtacaaaacaattcactgaaatcagatagggttacttcttttgagaccccgtttgctctcttatttatctttgcgactatagctgtgatgctaacctatgggggttatcgggtcagcgcaggatatatatctgtgggaaccttggtttcgtttttgatttacctctttcaattacttaatcctattagtaatatagctaattttgtaactgtttattctaggagcaagggatcttcagttgcactggataacttgcttgcagttcctaaagaaaaatttgagggaggaaaatcggtatcaggacaagggttgaattttaaccatgtctattttggttatgatgaaaatcgacctgtcttaaaggatattacttgttcaattttcaaggggcaaaaattgcttttgttggaccatctggatcaggaaaatcaacgattgtgcgtttgttag

SEQ ID NO: 702 - DNA, 546 bp, Streptococcus pneumoniae
atggagcaatcaagtatatatgattttaacttaaaagaatggagaagtaaaatcgcttgggtttcacaaaataatgcagtcttatctggcagtattcgtgacaatctttgtctcggtttgaatcgcttagtaactgatgatgaattgatgaaagtgctagacttagtatcactaggtgatgagattcgctccatgaaagagggactagatactgaagttggtgaacgcggacgattcttgtcaggggggcaaagccaaagacttcaaatagctagaacctacttaaaagatgctgaaattcttatatttgatgaagctactgctaatcttgatgcggattctgagtatgcgattatcagtagcctctattctgtattaaaggagaagacggttgtgattatagcgcatagtttgtcaacggtaaaagatgtggattgtattttcttcttagaggaggggaaaatcactggctcaggaactcataaggaactactggaaaatcatgagcgttatgctcgttttgtgcaggagcaaatgatagagtga

SEQ ID NO: 703 - DNA, 1095 bp, Streptococcus pneumoniae
atgagcaaggaattacacattaacacaattttggcccaggcgggtattaagtcagatgaagcgacaggtgcattggtgacaccgcttcatttttcaacgacctatcagcatccagagtttggtcgatctactgggtttgactatacgcgcactaaaaatccaactcgtagtaaggctgaggaagtcttggcgactattgagtcagcagactatgccttagcgactagctcagggatgtcagctattgtactggcctttagcggctttccagtaggaagtaaggtcttggcagtgcgtgatctttacggcggttcttttcgctggtttaaccaagtggagcaggaaggtcgtttccattttacctatgccaatacagaagaagagttgattgccgagttagaaaaggatgtggatgttctctatatcgaaaccccaaccaatcccttgatgttggaatttgatatcgaaaaactagcaaaattggctcatgctaagggtgccaaagtggtggtggacaataccttctatagccctatctaccaacgtccgattgaagatggagcagatatcgttctccattcagcaaccaagtatctagcaggccacaatgatgtcttggctggagtggttgtgaccaatagtttagaactatacgagaagcttttttacaatctcaatacaacaggggcagtcttgtctccatttgacagctaccagttgcttcgtggtctcaagaccttgtctcttcgtatggagcgctcaacagctaacgcccaagaagtggttgcctttttgaaggattctccagcagttaaggaagttctctacactggtcgtggaggcatgatttcctttaaagtagccgatgaaacacgcattcctcatattttgaacagtctcaaggtcttctcttttgcggaaagtttgggcggagtggaaagtcttattacttatccaacgactcaaactcatgctgatattccagcagaagtacgccattcttatggtttgacagatgacctcttgcgtttgtctattgggattgaggatgctagagatttgattgcagatttgcgccaagccttagaaggataa

SEQ ID NO: 704 - DNA, 1167 bp, Streptococcus pneumoniae
atgggaaaatatgattttacaagcctgcccaaccgtttagggcaccatacctataaatggaaagaaacagaaacggatagtgaagttctaccagcttggatagcggatatggactttgtggtcttgcctgaaatccgccaagccgtgcaaacttacgcagaccaactggtttatggttatacctatgccagtgaagacttaattaaggaagttcaaaagtgggaagctacacaatacggttacaactttgacaaagaggctcttgtctttatcgagggtgtggtaccagccatctcaacagctattcaaacctttacaaaagaaggcgaggcggttttaattaacacgcctgtctacccaccctttgctcgcagtgtcaagttgaataatcgtagattgattactaattccttagtggaaaaggatggtctgtttgagattgactttgaccaacttgaaaaggatttggtggaagaggaggttaaactctatattctttgcaaccctcacaatcctggtggacgtgtttgggaaaaagaagtgttggagaagattggccaactctgccaaaaacacggtgttttgttagtttcggatgagattcaccaagatttgaccctctttggtcacaaacaccagtctttcaataccatcaatcctgccttcaaaaattttgctatcgtcttgagcagtgccactaaaacatttaatattgctggaacaaaaaattcctatgcagtcattgaaaatcctaagttgagactagctttccagaaacgcctgttggccaataatcagcatgaaatttcaggcttgggttatttggcgacagaagctgcctatcgatacggtaaagattggctagaggaactcaagcaagtctttgaagaccacatcaattatgtggtggatctatttggaaaagagactaaaatcaaggtcatgaaaccgcaaggtacctacttgatttggcttgacttttcagcttatgacctgactgatgaaacattgcaagagttgttgagaaatgaagccaaggttatcctcaaccgtggtttggattttggagaggaaggaagtctccatgcccgcatcaatatagctatgcccaaatctctgttgcaagaagtctgtcagcggattgtggctacttttgccaaacgttaa

SEQ ID NO: 705 - DNA, 3099 bp, Streptococcus pneumoniae
atggctaaattgattccggggaaaattcgtatcgaaggtgttgccctttatgaaactggtaaggttgatatcatcaaggaaaagaacaatcggctctacgctcgcgttgcagaagaagaactgcgctatagtttagaggatgatttggttttttgtgcctgtgatttttttcaaaagaggggttactgtgtgcatttggcagcgctagagcattttctgaaaaatgatgagcgtggtcaggaaatcttgtggagtctggaagaaggtcatgaagaaaaagaggctgttgaaaccaaggtgaccttgggtggcaagtttttggatcgaattttatctccaaaatcagaatgcgcctatgagttatcagctgtgggtcaggtggaagcaggaaccaatcatatcttgtggactctgagaatcggtcaaatcaatagccaaaaatactatgtcattcgggatattccactttttttaaggattgtcgagcagagaaagtcgtatatgattggcaagatttatgaggagtctctttcttgggaagcctttgatgatgccagccaagaacttttgactttcttgcacggactaacggaggaagggctggtttcagacctcttttgccaaaaccaaggtcggcacctctttttccctctgaccttttttgagcagggtgtgaatttactgatggccttgccccattttcaatttgaccatcaagtggatagctaccaaaccctgctttttcaggatatgcatgctgatgccaatctatttgcctttacagtaacagaatactcggactattttgaaatggaaatcagtgagagtcctagggtcaatgtcttttatcagggagcagtacttttccataaaggtcaggtttattttttaacagaccagcagatgcgtcttctcaaggaaattaaagcgttacctgtgggtcaacaaggaaagaaatacctgcaatttgatagcagtgatcgagacaaattggcctcctgtctgactctttttatccagatgggcaccgtttcagctccagaacgtctacaaatcaaaacttttgcgccctctttttactttgacagggaagaagataatcggattcgtttagaaattcagtttgattatggaaatagacaggtatctagccgacaagagctagaagaattaccattttcaagtgacgcggacttagaagaaagaattttccaagtctgtttggctgcgggctttgaagccgattttcaatcttggcgtcaggccttaaaagcggagtctgtctatcatttttttcatgatatcattccagtctttgaaaaactcgggcatgttgacctatcagataaactagaagagctttatagcctagcgagtcctcaggtgcagattgcctccaagggaggtctcttggaaatccagtttgattttcaagatattgcccaggaggaaatcgaccaagccatgcaggccttggttgccaatcaggatttttatattgattcgtctaatcaagtttactttttcgatgaagaaaccaagaaaattcgccaaaatctacaggaactggggcaatttgaattaaaagatgggaccttgcaggctcggaaatccttggcctacagtttagctcatctctttgaagggcgagaccgtgtttctttttcacaagaattccagaatctggcccaggatttgacacatccagaggactttcctcgacaggcaactcaggttcaggctgacttgcgagattatcaggaaaagggaattggctggttgcagatgctccatcattatggttttggtgggattttggctgatgatatgggacttgggaaaacccttcagaccattgcttttttgactagtcaagtgacaaaagaaagtcgggttttgattctcgctccgtcaggtttgatttacaactgggcagatgagtttcagaaatttgccccacagttggatgtggctgttgttcatggtttgaaagcaagtcgtgaggagattcttgccgagagccatcaaatctatgtgactagctatgccaccttccgtcaggacagtgagttttatcaggggatggccttttacttccttttcttagatgaggctcaggtcatgaaaaatgcccagaccaagattgcccagaccttgagacaatttgtggtgccgtcggtctttgccttgtcaggaactccgattgaaaaccatctgggtgagttgtggtctattttccaaatcgtcatgcccggacttttgccaagcaagaaagaatttatgaaattgccagcagagcgagtggctcagtttatcaagcctttcgtgatgcgacgcaagaaagaagaagttctgactgaattgccagacttgattgaggtggtttataaaaatgaactggaagaccagcaaaaggctatttaccttgcccagttacaacagatgcgagaccatctggctcaagtgtcagaacaggaatttcagcgaagtcgtgtggaaattttatctggtttgatgcgcttgcgtcaaatatgtgacactcctgccctgtttatggaagattatcagggagccagcggcaaactagatagtctccgagacctactggtacaggtggcagacggcagacaccgtgtcttgattttctctcagttcaagggaatgttggaaaaaattgaacaagaactgccagacttgggcctgacatcctttaaaattacgggttcaaccccagccaaggaaagacaagacatgaccaaggcctttaaccaaggagaaagagatgcctttctgatttccctcaaggctggtggggtcggtctgaacctgacaggtgcagatacagtgatcttggttgacctttggtggaatcctgcggtggaagcgcaagccattggccgtgcccatcggatgggtcaggaagaaacggttgaggtctatcgcttggtgaccaagggaaccattgaagaaaaaattcaggaactccaagaacaaaagaaacatctggtgtcacaagtattggatggcacagagtcacgtggtagtctgaccctagcagaaattagagaaattttgggaatttctgaagccaacacttga

SEQ ID NO: 706 - DNA, 618 bp, Streptococcus pneumoniae
atgaaacaagaacgatttccattggtgtcagatgacgaggtcatgttgactgaaatgccagtcatgaatctctatgatgagtctgatctgatcagtaatatcaagggtgagtatcgagataaaaattatttagaatgggctcctattactgaagaaaaaccagtaaaaccgattgaaaagcaagtcgaaaaacctaaaaaggctcctttaggggttaaaaaagaaggaaagagctatgcggaggtggcgcgtgaagaagcgcgtgcggacttgaaaaagaaacgctctgctaactacctaactcaggatttcagtcttgcgagacgtcattctcagcccagtctagttagacagggcaatcaaccgacagctcctttccaaaaggaaaatcctggtgaatttgtcaaatatagccaaaaattgacccagtctcattatatcttggcggaagaagttcattctatccctaccaagaatgaagaagtgtcagcacctgctccaaagaaaaacaattatgattttctaaagaagagccaaatctacaataaaaaaagtaaacaaacagaacaagaacgtcgggttgcccaagagttgaatctgaccagaatgacagaatag

SEQ ID NO: 707 - DNA, 1335 bp, Streptococcus pneumoniae
atgtcaaagacatatcattttatcggaattaagggatcagggatgagtgccttggccttgatgttgcaccagatggggcacaaggttcagggatcagatgttgaaaagtactactttacccaacgcggtcttgagcaggcaggaattaccattcttccttttgatgaaaagaatctagacggtgatatggaaattatcgctggaaatgcctttcgtccagataacaacgtcgaaattgcctatgcggaccaaaatggtatcagctacaaacgttaccatgagtttctaggtagctttatgcgtgactttgttagcatgggagtagcaggagcacatggaaaaacttcaacgacaggtatgttgtctcatgtcttgtctcacattacagataccagcttcttgattggagatgggacaggtcgtggttcggctaatgccaaatattttgtctttgaatctgacgaatatgagcgtcacttcatgccttaccacccagaatactctattatcaccaacattgactttgaccatccagattatttcacaagtctcgaggatgttttcaatgcctttaacgactatgccaaacaaattaccaagggtctttttgtctatggtgaagatgctgaattgcgtaagattacgtctgatgcaccaatttattattatggttttgaagctgaaggcaatgactttgtagctagtgatcttcttcgttcaacaactggttcaaccttcaccgttcatttccgtggacaaaacttggggcaattccacattccaacctttggtcgtcacaatatcatgaatgcgacagccgttattggtcttctttacacagcaggatttgatttgaacttggtgcgtgagcacttgaaaacatttgccggtgttaaacgtcgtttcactgagaaaattgtcaatgatacagtgattatcgatgactttgcccaccatccaacagaaattattgcgaccttggatgcggctcgtcagaaatacccaagcaaggaaattgtagcagtctttcaaccgcatacctttacaagaaccattgccttgttggacgactttgcccatgctttaaaccaagcagatgctgtttatctagcgcaaatttatggctcggctcgtgaagtagatcatggtgacgttaaggtagaagacctagccaataaaatcaacaaaaaacaccaagtgattactgttgaaaatgtttctccactcctagaccatgacaatgctgtttacgtctttatgggagcaggagacatccaaacctatgaatactcatttgagcgtctcttgtctaacttgacaagcaatgttcaatag

SEQ ID NO: 708 - DNA, 465 bp, Streptococcus pneumoniae
atggaaattccaattaagatcattcaggcaagcaagtctgatttgcctgagataggggcacttcagacctcgtcttttccagctgaaaagcagcaactttcccatattttagaagaaagtatccgtaagtgtgcggatacctttcttctagctagggatgaaaatcaacttttaggctatattttatcaagtccccagtcagacaatccgcaatgtctaaaagtacattctttagtcatcgagtctgaccatcagagacagggcttgggaacacttcttcttgcagccttgaaagaggtggcagttgagctggattacaaagggattcgtttggagagtcctgatgagctgctttcctattttgaaatgaacggttttgttgatgaagaagcaactttgctctatgcaactagccagggctatagtatgatttggtttaatcccttttatctggaggaacaatga

SEQ ID NO: 709 - DNA, 357 bp, Streptococcus pneumoniae
atgaaaatcagacaagcaagattagaagatttggatcggattgttgaacttgaatttgaaaatttttcggtcgaagaagccattcctccttctgtctttgaagcacatttgagagaaattcagacctcttttctggttgctgaaaaagaaggaagaatcatgggttatatcgaaggaccagttggcctgcaccgccatctgcaagaccagtcttttacagaagaaataaaagactctcgtcatgaacctggtggttatatctctgtgacctggctgtctattgccaaggaggcacagggactcggactgggtcagaaattgctgacagccttgaaagaagttgctcttgaagaataa

SEQ ID NO: 710 - DNA, 213 bp, Streptococcus pneumoniae
gttaggaaaggtatcataatttgcttttttggaacttttaagataaaaaataatggaattatccacaaggaggaaaaacttttgagtgaaaagtcaagaaaaaaagagaaattaagctttaaagagcagattttgagagatttagaaaaagtaaaaggttatgatgaagttctgaaagaagataaggcagtaggttcgcactcctgcaaatga

SEQ ID NO: 711 - DNA, 1506 bp, Streptococcus pneumoniae
atggctgattccttgtcaccggtagagaagattatgagaaaagctcctaccgtgcctactcacccaagtcaaggtgtaccagcttctccagcagatgagattcaaagagaaactcctggtgttccaagtcatccaagtcaagatgtaccttcttctccagcggaagaaagtggatcaagaccaggtccaggtcctgttagacttaagaaacttgaaagagaatacaatgaaaccccaacaagggtagctgtttcctatacgacggcagagaaaaaagcagaacaagcaggtccagaaacacctacgcctgctacagaaacagtggatatcatcagagatacatcacgtcgtagccgtagagaaggagcaaaacccgttaagcctaagaaagagaagaagtcacatgtgaaagcttttgtgatttcattccttgtattccttgccttgctctcagcaggtggttactttggttaccagtacgtgctagattccttattacctatcgatgctaattctaagaaatatgtgacggttggaattccagaaggttcaaacgttcaagaaatcggtacgacgcttgaaaaagctggtttggtaaagcatggtctgatttttagtttttatgccaagtataaaaattataccgacttgaaagcaggttactacaatttgcaaaagagtatgagtacagaagacttactcaaagagttgcaaaaaggtggaacagatgaaccgcaagaacctgtacttgcgactttgacaattccagaaggttataccttggatcagattgctcaaactgtgggtcaattgcaaggtgacttcaaagagtctttgacagcggaggctttcttggctaaagttcaagatgagacgtttatcagtcaagcagtagcgaaatatcctactttactggaaagtttgcctgtaaaagacagcggtgcgcgttatcgtttggaaggataccttttcccagctacatactctatcaaggaaagcacaactattgagagcttgattgatgagatgttagctgctatggataagaacctatctccttactatagtactatcaaatctaaaaacttgactgtcaatgagttgttgaccattgcttccttggtcgaaaaagaaggtgccaagacagaagatcgtaagctcattgcaggtgtattctacaatcgtttgaatcgtgatatgccacttcaaagtaatattgcaatcttgtatgcccaaggaaaactggggcaaaatatcagtctagctgaggatgttgcgattgataccaacattgattcaccttataatgtttataaaaatgtaggtctcatgcctggtccagtcgatagtccaagtctggatgcgattgagtcaagcatcaatcaaactaagagcgataacctctactttgtagcagatgtcacagaaggcaaggtctactatgctaacaatcaagaagaccacgaccgcaatgtcgctgaacatgtcaacagcaaattaaactaa

SEQ ID NO: 712 - DNA, 483 bp, Streptococcus pneumoniae
atggcagaaaaaacatatcctatgacccttgaggaaaaggaaaaacttgaaaaagaattagaagaattgaaattggttcgtcgaccagaagtggtagaacgcattaagattgcccgttcatacggtgacctttcagaaaacagtgagtacgaagcagctaaggatgaacaagcctttgtcgaaggacaaatctctagcttagaaacaaaaatccgctatgctgaaatcgtcaatagcgacgcagttgcccaggacgaagtagcgattggtaaaacagtcaccatccaagaaattggtgaggacgaagaagaagtttatattatcgtaggttcagctggtgcggatgcctttgcaggtaaggtttcaaatgaaagcccaattgggcaggccttgattggcaagaaaacaggtgatacagcaaccattgaaacgcctgttggtagctatgatgtaaaaatcttgaaggttgaaaaaacagcctaa

SEQ ID NO: 713 - DNA, 183 bp, Streptococcus pneumoniae
gtgcttcactcactcctttttccattttgctactcttcgaaaatctcttcaaaccacgtcagcgtcgccttgccgtatgtatggttactgacttcgtcagtttcatctacaacctcaaaacagtgttttgagcaacctgcggctagtttcctagttttctctttgatttttattgagtattag

SEQ ID NO: 714 - DNA, 489 bp, Streptococcus pneumoniae
ttgatttctaagacattgttagaaattagattaaattccttaatcgatttgcgcatgttttatttcatttcactatactttagattggaaaataaggaatcacataaatcgcaagaaatagggaatctgattcgtgtttataaccgttcaaaaagagaagaggctgaaagtgagccacttaatctttatgtcgaagatgaaaagggcaatctcctggcaggtttgatagcagagacttttggaaattggctagaactagaaatcgagtatttgtttgtaaaagaggaactgcgaggacaaggaatcggttcaaaactattgcaacaggcagaaagtgaagctaagaatcgaaattgttgttttgcctttgtcaatacttaccagttccaggcaccggacttttatcagaaacatggctacaaggaagttttttctttgcaagactatctctacattaggcaaagatattattaccaaaagaatctgtaa

SEQ ID NO: 715 - DNA, 198 bp, Streptococcus pneumoniae
ttgattcctaattttggggctacgattatattgtcctcaatatcgtctagaaagacacaatttctaggttataactggtatttatcgatagttactcatatacatcagtccacctccatacttatgtgcgagcctctctttgtattatacctccatactcaccttacagattcttttggtaataatatctttgcctaa

SEQ ID NO: 716 - DNA, 210 bp, Streptococcus pneumoniae
cctagaaattgtgtctttctagacgatattgaggacaatataatcgtagccccaaaattaggaatcaagacttatcaggttaagaaaagaagtgatgttgttgatattttaaacaatttatttaaactaaaaactctctatctattaatccgagattcccctctcggattttgtgttgctttcattaaatttacaggtaagacttgctag

SEQ ID NO: 717 - DNA, 444 bp, Streptococcus pneumoniae
gtgttatacttgttgttcaaccacaaacacaagaaaggcacagaaatgcaagacaattatactacaaaaggtaaacatttgacaatcgatagccgtcgcttaatcgaaagatggaaaaaagaaggaaaatcaaatagagaaattgcctctctacttggaaaagctcctcaaactatccacactaaaatcaagcgtaggacagtccgaaaatgtcttggaaaagggcgcttcaaagaggtttattctgccgactatgctcaacagtcttatgaaaataatcgcaagcactcggtcaagagatcaagcgtgaccaaggaactaaaggaaaagattctccactatcataaccaaaaatttttgcctgaaatgatggttatggctaaaggggttaacgtgggaatttcaaccatttactattggattcatcatggaaaattggggtaa

SEQ ID NO: 718 - DNA, 492 bp, Streptococcus pneumoniae
ttggagaatgggcattatgagattgatacggttctacttacgagagcgaaaaactactgcttgcttgtcttgacggatcgaaaaagtagacatcagatcatccgattgattccaaataaaagtgctgaggtggtcaatcaggctctaaaactcatcttaaacaacacaagattctttccatccgggcaaataatggaccggaattcaatcgcttgtctaatgtatttcttgaggagcacaatttattatgcacatccctatgcctcttgggaaaggggaactaatgagaatcacaacaggctcattcgtagatggttacctaagggaaccaagaaaatgactcccaaagaagtcgcattcatcgaaaagtggattaacaactatcctaaaaaatgcttggactacaagtcacccagagaagacttctggatggctaacttgaacttgaaatttagcaaaatggaaataatttttattaaacgcttccaatag

SEQ ID NO: 719 - DNA, 201 bp, Streptococcus pneumoniae
atgaatttaacatttttaggcttatgtattgcctgtatgggcgtatctgtcggtgaaggtttattgatgaatggactgtttaaatcagtagcacgccaaccagatatgctttctgagtttcgtagtttgatgtttttaggtgttgcctttattgaaggaactttctttgtaactcttgtcttctcatttattatcaaataa

SEQ ID NO: 720 - DNA, 717 bp, Streptococcus pneumoniae
atggaagaaagtattaatccaatcatctctattggtcctgttatcttcaatctgactatgttagccatgactttgttgattgtgggagttatttttgtctttatttattgggcaagccgcaatatgaccttgaaacccaaaggaaagcaaaatgtacttgagtatgtctatgactttgttattggatttacagaacctaacattggttcgcgctacatgaaagattactcactctttttcctttgtttattccttttcatggtgattgccaataaccttggcttaatgacaaagcttcaaacgatcgatgggactaactggtggagttcgccaaccgctaatttaccgtatgacttaaccttatcttttcttgtcattttgttgacacatatagaaagcgttcgtcgtcgtggatttaaaaaaagtataaaatcttttatgagtcctgtttttgtcataccgatgaatatcttggaagaatttacaaacttcttatctttggctttgcggatttttgggaatatctttgcaggagaggtcatgacgagtttgttacttcttctttcccaccaagctatttattggtatccagtagcctttggagctaatttggcttggactgcattttctgtctttatttcctgcatccaagcttatgtttttactcttttgacatctgtgtatttagggaataagattaatattgaagaggaatag

SEQ ID NO: 721 - DNA, 495 bp, Streptococcus pneumoniae
atgcacgtaacagtaggtgaattaattggtaattttattttaatcactggctcttttattcttttgctagtcttgattaaaaaatttgcatggtctaatattacaggcattttcgaagaaagagctgaaaaaattgcttcagatattgacagagctgaagaagcccgtcaaaaagcagaagtattggctcaaaaacgcgaagatgaattggctggtagccgtaaagaagctaagacaatcattgaaaatgcaaaggaaacagctgagcaaagtaaggctaatatcttagcagatgctaaactagaagcaggacacttaaaagaaaaagccaatcaagaaattgctcaaaataaagtagaagctttacagagtgttaagggtgaggtcgcagatttgaccatcagcttagctggtaaaatcatctcacaaaaccttgacagtcatgcccataaagcactcattgatcagtatatcgatcagctaggagaagcttaa

SEQ ID NO: 722 - DNA, 537 bp, Streptococcus pneumoniae
atggacaagaaaacagtaaaggtaattgaaaaatacagcatgccttttgtccaattggtacttgaaaaaggagaagaagaccgtatcttttcagacttgactcaaatcaagcaagttgttgaaaaaacaggtctgccttcttttttaaaacaagtggcagtagacgagtcggataaggaaaaaacaattgcttttttccaagattctgtgtcacctttattacaaaactttatccaggttctggcctacaatcacagagcaaatcttttttatgatgtgcttgtagattgcttgaaccgacttgaaaaagaaacaaatcgatttgaagtgacgattacgtctgctcatcctctaactgatgaacagaagactcgtttgctccctttgattgagaaaaaaatgtctctgaaagtaaggagtgtaaaagaacaaatcgatgaaagtctcattggtggttttgtcatttttgccaatcacaagacaattgatgtgagtattaaacaacaacttaaagttgttaaagaaaatttgaaatag

SEQ ID NO: 723 - DNA, 1506 bp, Streptococcus pneumoniae
ttggcaattaacgcacaagaaatcagcgctttaattaagcaacaaattgaaaatttcaaacccaattttgatgtgactgaaacaggtgttgtaacctatatcggggatggtatcgcgcgtgctcacggccttgaaaatgccatgagtggagagttgttgaattttgaaaacggctcttatggtatggctcaaaacttggagtcaacagacgttggtattatcatcctaggtgactttacagatatccgtgaaggcgatacaatccgccgtacagggaaaatcatggaagtccctgtaggtgaaagtctgattggtcgtgttgtggatccgcttggtcgtccagttgacggtcttggagaaatccacactgataaaactcgtccagttgaggcaccagctcctggtgttatgcaacgtaagtctgtttcagaaccattgcaaactggtttgaaagctattgacgcccttgtaccgattggtcgtggtcaacgtgagttgattatcggtgaccgtcagacagggaaaacaaccattgcgattgatacaatcttgaaccaaaaagatcaagatatgatctgtatctacgtcgcgattggacaaaaagaatcaacagttcgtacgcaagtagaaacacttcgtcagtacggtgccttggactacacaatcgttgtgacagcctctgcttcacaaccatctccattgctcttcctagctccttatgctggggttgctatggcggaagaatttatgtatcaaggtaagcatgttttgattgtatatgatgatctatcaaaacaagcggtagcttatcgtgaactgtcgctcttgcttcgtcgtcctccaggtcgtgaagccttcccaggggatgttttctatctccacagccgtttgcttgagcgctcagctaaagtttctgatgaacttggtggtggatcaattacagccctaccatttatcgagacacaagcaggagatatctcagcctatatcgcaaccaacgtgatttctatcactgatggacaaatcttccttggcgatggcctcttcaatgcaggtattcgtccagccatcgatgcgggttcatctgtatctcgtgtaggtggttctgcacaaatcaaagccatgaagaaggttgctggtacacttcgtatcgaccttgcttcataccgtgagttggaagcctttactaagtttggttctgacttggacgcagcaacacaggctaagttgaaccgtggacgtcgtaccgttgaggtcttgaaacaacctgttcacaaaccattacctgttgagaaacaagtaaccattctttatgctttgacacatggtttcttggatactgttccagtagatgatattgttcgtttcgaggaagagttccatgccttctttgatgctcaacatccagagattttggaaaccattcgtgatacaaaagacttgccagaagaagcagtcttggatgctgcgattacagagtttctcaatcaatctagcttccaataa

SEQ ID NO: 724 - DNA, 879 bp, Streptococcus pneumoniae
atggcagtgtctctaaatgatattaaaacaaaaatcgcctcaacaaaaaatacgagtcaaatcactaatgccatgcaaatggtatcggctgctaagctaggtcgctctgaagaagctgctcgcaacttccaagtttacgctcagaaagtgcgtaaacttttgacagatatccttcatggtaatggagctggtgcttcaactaatccgatgttgattagccgttctgtgaagaagacaggctatatcgttatcacttcagaccgcggtttggttggaggttataattcctctattttgaaagctgttatggagttgaaagaagaataccacccagacggtaaaggttttgaaatgatctgtatcggtgggatgggagctgatttctttaaggctcgcggtattcaaccactttatgaattacgtggcttggcagaccaacctagctttgatcaagttcgtaagattatttcaaaaactgttgaaatgtaccaaaatgaactctttgatgagctttatgtttgctacaaccaccatgtcaatacgctaaccagtcaaatgcgtgtggaacaaatgcttccgattgttgacttggatccaaatgaagcggatgaagagtacagcttgacttttgaattggaaaccagccgagaagaaattctggagcagttgttgcctcagtttgcagaaagtatgatttacggtgccattatcgatgccaagacagctgagaatgctgcgggtatgacagccatgcaaacagcgacagataatgctaagaaagtcatcaatgatttgacaattcagtataaccgtgccagacaggcggctattacacaagaaattacagaaatcgtagcaggtgctagtgccttagaatag

SEQ ID NO: 725 - DNA, 1407 bp, Streptococcus pneumoniae
atgagttcaggtaaaattgctcaggttatcggtcccgttgtagacgttttgtttgcagcaggggaaaaacttcctgagattaataatgcacttgtcgtctacaaaaatgacgaaagaaaaacaaaaatcgtccttgaagtagccttggagttaggagatggtatggttcgtactatcgccatggaatcaacagatgggttgactcgtggaatggaagtattggacacaggtcgtccaatctctgtaccagtaggtaaagaaactttgggacgtgtcttcaacgttttgggagataccattgacttggaagctccttttacagaagacgcagagcgtcagccaattcataaaaaagctccaacttttgatgagttgtctacctcttctgaaatccttgaaacagggatcaaggttattgaccttcttgccccttaccttaaaggtggtaaagttggacttttcggtggtgccggagttggtaaaactgtcttaatccaagaattgattcacaacattgcccaagagcacggtggtatttcagtatttgctggtgttggggaacgtactcgtgaggggaatgacctttactgggaaatgaaagaatcaggcgttatcgagaaaacagccatggtctttggtcagatgaatgagccaccaggagcacgtatgcgtgttgcccttactggtttgacaatcgctgaatacttccgtgatgtggaaggccaagacgtgcttctctttatcgataatatcttccgtttcactcaggctggttcagaagtatctgcccttttgggtcgtatgccatcagccgttggttaccaaccaacacttgctacggaaatgggtcaattgcaagaacgtatcacatcaaccaagaagggttctgtaacctctatccaggctatctatgtgccagcggatgactatactgacccagcgccagcaacagccttcgctcacttagattcaacaacaaacttggaacgtaagttggtacaattgggtatctacccagccgttgacccacttgcttcaagctcacgtgccttggcacctgaaatcgttggagaagagcactatgcagttgctgctgaagtaaaacgtgttcttcaacgttaccatgaattgcaagatatcattgctatccttggtatggatgagctttctgatgaagaaaagaccttggttgctcgcgcccgtcgtatccagttcttcttgtcacaaaacttcaacgttgcggaacaatttactggtcagccaggttcttatgttccagttgctgaaactgtacgtggctttaaggaaatccttgatggtaaatacgaccacttgccagaagatgccttccgtggtgtaggttctatcgaagatgtgattgcaaaagctgaaaaaatgggattttaa

SEQ ID NO: 726 - DNA, 420 bp, Streptococcus pneumoniae
atggctcagttaactgtccagatcgtgacaccagatggtctcgtctatgatcaccatgccagctatgtatcggttcgaactctggatggtgagatggggatcttgccacgacatgaaaatatgattgcggttttagcagttgatgaagtaaaggtaaaacgtatcgatgataaagatcacgtgaactggattgcagtaaacggtggcgttattgaaattgccaatgatatgatcacaatcgtcgctgactctgcagaacgtgctcgtgatatcgatatcagtcgtgcagaacgtgccaaacttcgtgcagaacgtgcaattgaagaagcacaagacaaacatttgattgaccaagaacgtcgtgctaagattgctttgcaacgtgccattaaccgtattaatgtcggaaatagactataa

SEQ ID NO: 727 - DNA, 753 bp, Streptococcus pneumoniae
atggatagaggctatgaaagttacaatctcatggctcattttcaagaaaaaggttggctttatatcatccgtattcgagatggaaaacaatccatgccttcctccttcaacttgccaaatacggagtgttttgatcaaaaagtttctctaaaattatcacgaaagcaaactaatcagctcaaaaaactttatcgtgattttcccaatgactatcattttattccacacaattctatttttgattttcttccagaaacaagtcgaaaacaagatcctgtaacactctatgaactcctttttcgtatggtgcgtttagaagtggagaaaggaaaatacgaaactttagtgacgaatacagactattcagtccaagaattaaaaaatctctacgccagtagatggggcatagagactagttttcgtgacctgaaatacagtattggcttggtcaattttcacgccaaaaagaagggagggattctccaagaaatctttgctcgctttacaaattttaacttttgtcgttgggtaacctcgcaagttgccatcgacagtagtcacaaaaaacaaagatataaagtgtgtttctcagatgcggcttatgcctgccgtttgttttttaacggttccctttcttccctccagttgaaaaactacctcaagaaacagttatctattattcgaccgaatcgaaaatattcaagaaagataaaagctcaatcggtagttgatttcatctatagagtaacataa

SEQ ID NO: 728 - DNA, 195 bp, Streptococcus pneumoniae
ttgttttttgtgactactgtcgatggcaacttgcgaggttacccaacgacaaaagttaaaatttgtaaagcgagcaaagatttcttggagaatccctcccttctttttggcgtgaaaattgaccaagccaatactgtatttcaggtcacgaaaactagtctctatgccccatctactggcgtagagattttttaa

SEQ ID NO: 729 - DNA, 546 bp, Streptococcus pneumoniae
atgataaaacagataaaagcccacttgaataagagtattcagagtatcattggccaaaaagttgagttcgtcaaacaagatgaacaggcctttactcgtaaaagaaggttatcactagaaactatgattcgtacaattctgggcatgggaggaaaatcactatcaaaagaattactagatgccagactgacagtttcaaattcagcctttgttcaaagacgctatcagataaaacctgaagctttctatgctctatttaaagaatttacagcacctattccacttaatactgattttccaatattcgctgcagatgggagtgatatctgtattcctcgaaatcccatggatacagaaacctctatccaaacccaaacggatgttaaatcctataatctcatacacataaatgccctatacgacttgacgactggagtgtatagagatgtctctattcaagacaaacatgcacaacatgagcgcttagctctgattcagatgatggaggcttctccctttcgagaaagctcttgttatcatggatag

SEQ ID NO: 730 - DNA, 1014 bp, Streptococcus pneumoniae
atgaaagaaactgtttattttggaacttatacacgtcgtacttctcaagggatttacaaggcagactttgatacagaaactggtcagctttcaaatctagaactttttgcagctgagccaagtccaacctaccttgcctttgaccagcaccaacatttatacactgttggtagccaagacgataaggggggaattgcagcctatcaaactgacgggactgtgttaaatcatgttgttgaagaaggagctccccactgttatgttgctgtcgatgaaaagcgtgatttggtttacgcagctaactatcacaagggacaagtccttgtttataaacgccaggaagatggtagtcttctacttagtgatatggatcaacacagtggccaaggtccacatgaaaatcaagcttccccccatgttcactatacagatttaacacctgaccactatctagtgacctgcgacttgggaactgaccaagtcatcacctatgacctcgatcaagaaggaaaattatctaagctctatacctatcacagcaagccaggagcaggctcacgccatatcattttccataaccactataaaatcgcttatctcatttgtgaactcaatagtactatcgaagttttaatctacgatggcgttggcgaatttgaacgtatgcaggtcatttcaactttaccggaagcttacgaaggctttaatggaaccgctgctattcatctctctaaagacggtaaatacctctacgcttctaaccgtggccatgattctatcgcagtatataccatccttgcggacggtagcttagagttattagaaatcgttccaacgcatggtcagactccacgtgattttgatttgacacccgaccaaaaatttctcattgttgtccatcaagactctgacaatgcaactgtctttaaacgtaattgtgacaatggtcgtctagcagaactctccaacgacttccatgttcccgaagcagtctgcatccgttttgctccttaa

SEQ ID NO: 731 - DNA, 234 bp, Streptococcus pneumoniae
atgactggcaacatcacaactgctaaaaagtctaaaacaggtgaaaatagaaaactaatcttacttaaaataaaaagattcagtcccaataataaggttactaaaaataccgtaattgccttgttatctaaaaaccacttgaaaaaccaagataggctaaaatgtttctctttttgctccataaatacttcctttctattgttctctcattataccatttttgaaacaaaataa

SEQ ID NO: 732 - DNA, 1167 bp, Streptococcus pneumoniae
atggagcaaaaagagaaacattttagcctatcttggtttttcaagtggtttttagataacaaggcaattacggtatttttagtaaccttattattgggactgaatctttttattttaagtaagattagttttctattttcacctgttttagactttttagcagttgtgatgttgccagtcattttgtctggtttgttatattatttgttgaatcctattgttgattggatggagaagcataaggttaatcgtgttatagctatcactattgtctttgttatcatcgctctctttatcatttggggcttggcagtcgccattccaaatctgcaacgtcaggttttgacctttgcaagaaacgttcctgtttacttagaagatatagataggattgttaatggattggtagcccagcacctgccagatgatttcagacctcaattagagcaagttttgaccaatttttctagccaggctacagttttggcaagtaaggtttcatctcaggcagtcaactgggtgagtgcctttattagcggggcttctcaagtgattgttgccttgattatcgttcctttcatgctcttttatctcttgcgtgatgggaaaggcttgcgtaactatttgacccaattcattccaagaaaattgaaggaacctgttggacaagttttatcagatgtgaatcaacagttgtccaactatgttcgagggcaagtgacagtggctattattgtagcagtaatgtttatcatcttcttcaagattattggtctacgctatgcggttacgctgggggttactgctggtattttaaatctggtcccttatcttggtagctttctagccatgcttcctgctctagtattgggtttgattgctggtccagtcatgcttttgaaagtagtgattgtctttatcgtagaacaaactattgaaggccgttttgtctctccattgattttgggaagtcaattaaacatccaccctattaatgttctctttgttttgttaacttcaggatctatgtttggtatctggggagttttacttggtattccggtttatgcctctgctaaggttgtcatttcagccattttcgaatggtataaggtagtcagtggtctatatgaattagagggtgaggaagtcaagagtgaacaatag

SEQ ID NO: 733 - DNA, 1230 bp, Streptococcus pneumoniae
gtgaacaatagtcaacagatgttacaggctttggaggagcaagatttaactaaggctgagcattatttcgccaaagctttagaaaatgattcaagtgatcttctgtatgaattggcaacttatcttgaagggattggtttctatcctcaggccaaggaaatttacctgaaaattgtagaggattttccagaggttcatcttaatctagctgcaattgctagcgaggatggtcaaatagaagaagcctttacctatcttgaggaaatccaagctgacagtgactggtatgtctcgtctttggctctgaaggcagacctttaccagctggaaggtttgacagatgtggcacgtgagaaattattggaggccttgacctactcagaggattctctcttgatattgggtttggcagagttggatagtgagttggaaaattaccaagcggctattcaagcctatgcccagttagataatcgctcgatttatgagcaaacgggcatttccacctatcaacgaattggctttgcctatgctcagttagggaaatttgaaacggctactgagtttttagaaaaagccctggagttagaatacgatgacttaacagcttttgagttggccagtctttattttgatcaagaagaatatcaaaaagccaccctctactttaagcagcttgataccatttctcctgactttgaaggctatgagtatgggtacagtcaggctttacataaggaacatcaagttcaagaagccctgcgtatcgctaagcaaggattagagaaaaatccctttgaaactcgcctcttgctagctgcttcacaattttcttatgaattgcatgatgctagtggtgcagaaaattatctccttactgcaaaagaagacgctgaggatacagaagaaatcttgcttcgtttagccactatttatctggagcaggagcgttatgaggatattctagaattgcagagtgaggagccagaaaatcttttgaccaagtggatgattgctcgttcttatcaagaaatggacgatttggatactgcttatgagtattatcaagagttgacaggagatttgaaggacaatccagaatttctggaacactatatctatctcttgcgtgaattgggacattttgaagaagcaaaagtccatgctcacacttacttaaaactggttccagatgatgtgcaaatgcaagaactgtttgagagattgtaa

SEQ ID NO: 734 - DNA, 642 bp, Streptococcus pneumoniae
atgtcttatttatttgagatattaccgagtttactgaatggtgcgagcacgactgtacaggtctttgcactggtcttgctattttcgattcccttgggcgttttgattgcctttgccttgcaagtccattggaagcccctccattatctgattaacatttacatctgggttatgcgaggaacccccttactcttgcaactgatttttatctattatgtgctcccaagtattgggattcgtttagaccgccttcctgcagctattattgcctttgttctcaactatgcagcttactttgcagaaattttccgtgggggaattgacactattccaagaggacagtatgaggccgccaaggtcttgaagtttagcccttttgacagagtgcgctatattatcttgccccaagtgaccaagatcgttcttcctagtgtctttaatgaagttatgagtttggtcaaggatacttctttggtctatgctctcggaatttcagaccttatcttggctagtcgaacagctgctaaccgcgatgctagtctagttcctatgttcttggcaggagccatttatttgattttgattgggattgtgacaattatttccaaaaaagttgagaagaagtatagttattatagatag

SEQ ID NO: 735 - DNA, 630 bp, Streptococcus pneumoniae
atgttagaattacgaaatatcaataaagtctttggagacaaacaaatcctgtctaatttcagtctaagtattcctgaaaagcaaatcctggctatcgttggaccttctggtggaggtaagacaactcttttacgtatgcttgcaggtcttgaaaccattgattcagggcaaatcttttataatggacaacctttagagctggatgaattgcagaagcgcaatctactgggatttgtcttccaagattttcaactatttcctcatctatcagttctggaaaatttgactttatcgcctgtgaagaccatgggaatgaagcaggaagaggctgagaagaaggcgagtggactcttggaacagttaggactaggaggacacgcagaggcctatcctttctcactatctggtgggcaaaagcagcgggtggctttggcgcgtgctatgatgattgacccagaaatcattggctacgatgaaccaacttctgccctggatccagaattacgtttggaagtggagaagctaatcttgcaaaatagggaacttgggatgacccagattgtggttacccatgatttgcagtttgctgaaaatatcgcagatgtattattgaaagtagaacctaaatag

SEQ ID NO: 736 - DNA, 837 bp, Streptococcus pneumoniae
atgaaaaaatggatgcttgtattagtcagtctgatgactgctttgttcttagtagcttgtgggaaaaattctagcgaaactagtggagataattggtcaaagtaccagtctaacaagtctattactattggatttgatagtacttttgttccaatgggatttgctcagaaagatggttcttatgcaggatttgatattgatttagctacagctgtttttgaaaaatacggaatcacggtaaattggcaaccgattgattgggatttgaaagaagctgaattgacaaaaggaacgattgatctgatttggaatggctattccgctacagacgaacgccgtgaaaaggtggctttcagtaactcatatatgaagaatgagcaggtattggttacgaagaaatcatctggtatcacgactgcaaaggatatgactggaaagacattaggagctcaagctggttcatctggttatgcggactttgaagcaaatccagaaattttgaagaatattgtcgctaataaggaagcgaatcaataccaaacctttaatgaagccttgattgatttgaaaaacgatcgaattgatggtctattgattgaccgtgtctatgcaaactattatttagaagcagaaggtgttttaaacgattataatgtctttacagttggactagaaacagaagcttttgcggttggagcccgtaaggaagatacaaacttggttaagaagataaatgaagctttttctagtctttacaaggacggcaagttccaagaaatcagccaaaaatggtttggagaagatgtagcaaccaaagaagtaaaagaaggacagtaa

SEQ ID NO: 737 - DNA, 348 bp, Streptococcus pneumoniae
atggaacaatttttagataacatcaaagaccttgaagtcactacagttgtgcgtgcgcaagaagctcttgataaaaaagaaactgcaaccttctttatcggtcgcaaaacttgcccttactgccgtaaatttgcaggtacattgtcaggtgtcgtagctgaaaccaaagctcacatttacttcatcaatagtgaagaaccaagccaactcaatgatttgcaagcattccgctcacgctatggaatcccaactgtaccaggttttgttcatattacagatggacaaatcaacgtccgttgcgactcttcaatgtcagcacaagaaatcaaagatttcgcaggattgtaa

SEQ ID NO: 738 - DNA, 1719 bp, Streptococcus pneumoniae
atgtcttaccaagaaaattaccagaaatgggttgattttgtggagcttcctgactaccttcgtcaagatttggaaaatatggacgaaaaaactaaggaagatgccttctatacaaatcttgaatttggtactgcaggtatgcgtggcttggttggtgctggtacaaaccgtatcaacatctacgttgttcgccaagctactgaaggattggctcgtttgattgagtcaaaaggtggaaacgagaaagaacgcggtgtagcaattgcctacgatagccgtcacttctcacctgagtttgcctttgaatctgcggcagttcttgctaaacacggcatcaaatcttacgtatttgaaagccttcgtccgactccagaactatcatttgcagttcgtcatctcaactgtttcgcaggtatcatggtcacagccagccacaaccctgctccatttaacggttacaaggtttacggtgaagacggtggacaaatgcctccacacgatgcggacgctttgactacttatatccgtgcaatcgaaaacccatttgcagttgaagttgctgatgtggaaactgaaaaagcttctggcttgattgaagttatcggcgaagctgttgacgtagaataccttaaagaggttaaggacgtaaacatcaacccagccttgattgaagaatttggtaaagacatgaagattgtctacacaccacttcatggtactggtgaaatgttggctcgtcgtgctcttgcccaagcaggatttgactctgttcaagttgttgaagcgcaagcaactgctgacccagacttctcaactgtaacatctccaaacccagaaagccaagcagcctttgcccttgctgaagaacttggtcgtcaagttggtgcagatgttcttgtcgcaactgacccagacgctgaccgtgttggtgttgaagttcttcaaaaagatggtagctacctcaacctttcaggtaaccaaatcggtgctatcatggctaaatacatcttggaagctcacaaaaacgctggaactcttcctgaaaatgccgctctctgcaaatctatcgtttcaactgacttggtaacgaagattgctgaaagctacggcgcaactatgttcaacgtcttgacaggtttcaaatttatcgctgaaaaaatccaagaattcgaagaaaaacacaaccacacttacatgatgggatttgaagaaagcttcggttacttgattaaaccatttgtacgtgataaagatgccatccaagccgttcttgtcgttgctgaacttgctgcctactaccgttctcgtggtttgacacttgctgacggtatcgaagaaatctataaagaatatggctactacgcagaaaaaacaatctctgttactctttcaggtgtcgatggtgctgaacaaatcaaagcgattatggctaaattccgcaacaatgctccaaaagaatggaacgcaacagctatcactgtcgtagaagacttcaaggcacaaactgctactgttgctgacggtactgttacaaacttgacaactcctccaagtgatgtgttgaaatacacacttgctgacggttcatggattgccgttcgcccttcaggtacagaaccaaaaatcaagttctacattgcagttgtaggggaaaccaacgaagaatcacaagctaagattgctaacatcgaagcagaaatcaatgcatttgtaaaataa

SEQ ID NO: 739 - DNA, 327 bp, Streptococcus pneumoniae
atggcatataatactgattttaaacaaggagcattagattccatcaaaggagggcacagacatgtcgaggcggccaaagttttttggtgttggcgtcagaactctcttcacgtgggaaaagaaagacgtgaacaaaggaacttagagcggaaaaagcgagtcgtcaaaaagcgtaagatccctttagaagaattgaaagcctttgtagaggctcatccagatgcttttttacgggaaattgcggcacattttgattgtgctgttccttcagtatgggcagctttaaagcagattaaggtcactttaaaaaaagatgacgatctttaa

SEQ ID NO: 740 - DNA, 300 bp, Streptococcus pneumoniae
atgatttacaagaaaagcatgacaagcgatttctttgtggagtggttcaaaacgcaactcctacctgctttgaagacacctcatgttattgtcatgggcaatgctagttttcatcccaagaacattttggatgaactctgcatccaagataaacactttttcttacctctaccaccttattcaccagatttgaatcctattgagcaagcttgggctatcttgaaaaagaaagtgacggatgtattaagggaagtttcaactatttttgaatgtttggaatgcttttttaaaactagatga

SEQ ID NO: 741 - DNA, 285 bp, Streptococcus pneumoniae
gagaagacggtatacgatcaaaccattcaccgtgtagccgaaatcgttcagaatgaagacttgtataagaaaggtttgaatgttgaacttgcgcaccaacaaattaagggattttttgaagcagagtttaaaaatcgtattaatggagttcttaatactaaaataaaaaatagtacattaaatcgtgtaaataaaaaaactatacaccagagcaacaaaaactccatgatcaatttgaagcagaagcaacggaagatgctaaaaaacaaggcgatattgtgttga

SEQ ID NO: 742 - DNA, 255 bp, Streptococcus pneumoniae
gtgttgaatgttgaccaggatttcatgagcatatctaagtctaataaaagtggttcagactggaagaaaactttcacagtgaggacaaccaataggctagcaaatgacttgaataatgtcttgaaacaggctgataaagatactcctaataccccaacttggctaaactcagctgcttctaaagctaaagatgatgacagagcatataaactactgaagactcttataccaggagaaaattacctatcatgttaa

SEQ ID NO: 743 - DNA, 213 bp, Streptococcus pneumoniae
agactcttataccaggagaaaattacctatcatgttaaggataatcagctagaagtagaaacagataaatacacatatactgccgctagaaatggtagtaaggaagttggtattcaagagtcagatatagcagcaactctaagtgccgatgaatataattctaatcgccaaacttttgagagagaatacaaatacaaaagcaaatgcccttaa

SEQ ID NO: 744 - DNA, 1113 bp, Streptococcus pneumoniae
gtgccgatgaatataattctaatcgccaaacttttgagagagaatacaaatacaaaagcaaatgcccttaataatggttgggctagatctggttctgaagagttcaaaaagttctcccactttgtaggggtagacaaagggattgtgcgaacgaatgtactgactggtaaaaaactatctgataagattaggaaagaagtgggctctggagatagcaaactaggaaaaggcggctatttctctactggggatgttctattaggaaaagatgttgtttcttataccgtacaagtattttcagagaataatgaaagagtaggagtaaacactcaaagtcaccgtgttcagtataatctcccaattctagctgacttttcagtcatccaagatactgtggaaccatcacgaaccgttgttgaaaaaatcattccaaaactaaatattcccgaagaagagaaagggaaaataaccgaagaaatcaagaaaaagaaaaaaacctcagaattggcagaactaatctcagaaaatgtgaaagttcgctatgttgatgaacaagggcgtttgctatcattgaaaaatgatactggaattggagaaaaagaaagtgacggaacctacattaccaataaaaaacaactgattggtaccagctacaatgtcacagataaaaaactcagtagcatgactactactgacggaaaatattatacttttaaagaagcagatacaaattctgcaagtttaactgggaatattgtaagcgaaggtagaacagtgaccttagtttatagagaaagcgaagcgccaaccactgctacagtaacagccaattactataaagaaggtagccaagagaagttggcagagtctgttataaaagctgatttagcgataggttctgagtataccacagaatcaaaaactattgaagggaaaacaacaactgaggacaaagaagaccgagttatcacaaggaaaacaacatacaccttggtagcaactcctgcaaatgcgtaccagaagacggtgcaacagttgactattactaccgtgagaatgttgaggaaacagtggttcccaaaacagcaacctctactgagacgaagactataa

SEQ ID NO: 745 - DNA, 522 bp, Streptococcus pneumoniae
gtggttcccaaaacagcaacctctactgagacgaagactataacgcgtatcattcattacgttgataaagttacgaaccaaaatgtaaaagaagatgttgttcaacctgtaaccttaagccgtacaaaaactgagaacaaggtcacgggagttgtaacctacggtgaatggacaacaggaaactgggacgaggttgtatctggtaagattgacaagtacaaagatccagatattccaacagttgaatcacaagaagttacgtcagactctagtgataaagaaataacggtaaggtatgaccgtttatcaacaccagataaaccaactccagacccaggtactccaaaaactgaaactccagtgaatccagacccagaagttccgacttatgagacaggtaagagagaggaattgccaaacacaggtacagaagctaatgctaccttggctagtgctggtatcatgaccttgttagctagtctaggattaggattcttcaagaaaaaagaagatgaaaaataa

SEQ ID NO: 746 - DNA, 870 bp, Streptococcus pneumoniae
atggatttcacatgggcactgaagtatgccactgaatttttgggaactgccattttgatcattcttgggaatggtgcagttgccaacgttgaacttaaaggtacgaaaggtcaccaaagtggctggatcgtcatcgctgttggttatggtatgggggttatgatccctgccttgatgtttggtaacgtatctgggaatcacatcaaccctgctttcactctagggcttgcagttagcggtcttttcccttgggcacaagtggtaccttatattatcgcgcaagtcttgggggctatctttggccaagccttagttgtggcaacataccgtccattctacttgaaaactgaaaacccaaataacatcttgggaactttctcaactatttcaagtattgaccatggtacaaaagaaagtcgctatgcagcaactgtcaatggtttgattaatgagtttgttggttcatttgttttgttctttgcagctcttggtttgactaaaaacttctttggtgctgaagtgcttcaattcatgaaacaaaaggcaatagaagcaggacaaacagttgatttttctgacttggctattaaagcacaggtggctccacacactgcttcaggactttctgtggctcacttggcacttggattcctcgttatggctttggtaacatcacttggaggacctacaggacctgccttgaacccagcccgtgacttgggaccacgtctccttcatgctttccttccaaaatcagttcttggtgagcataaaggcgattcaaaatggtggtattcttgggtaccagtagtagcacctatcgcagcagcaattgcggcagtagctgtattcaaattcctttatctctaa

SEQ ID NO: 747 - DNA, 1197 bp, Streptococcus pneumoniae
atggcaaaagaaaaatacgatcgtagtaaaccacacgttaacattggtactatcggacacgttgaccacggtaaaactaccctaactgcagctatcacaactgttttggcacgtcgcttgccttcatcagttaaccaacctaaagactatgcgtctatcgatgctgctccagaagaacgcgaacgcggtatcactatcaacactgcgcacgttgagtacgaaactgaaaaacgtcactacgctcacatcgacgctccaggacacgcggactacgttaaaaacatgatcactggtgctgctcaaatggacggagctatccttgtagtagcttcaactgacggaccaatgccacaaactcgtgagcacatccttctttcacgtcaggttggtgttaaacaccttatcgtcttcatgaacaaagttgacttggttgacgacgaagaattgcttgaattggttgaaatggaaatccgtgacctattgtcagaatacgacttcccaggtgacgatcttccagttatccaaggttcagcacttaaagctcttgaaggtgactctaaatacgaagacatcgttatggaattgatgaacacagttgatgagtatatcccagaaccagaacgtgacactgacaaaccattgcttcttccagtcgaggacgtattctcaatcactggacgtggtacagttgcttcaggacgtatcgaccgtggtatcgttaaagtcaacgacgaaatcgaaattgttggtatcaaagaagaaactcaaaaagcagttgttactggtgttgaaatgttccgtaaacaacttgacgaaggtcttgctggagataacgtaggtgtccttcttcgtggtgttcaacgtgatgaaatcgaacgtggacaagttatcgctaaaccaggttcaatcaacccacacactaaattcaaaggtgaagtctacatccttactaaagaagaaggtggacgtcacactccattcttcaacaactaccgtccacaattctacttccgtactactgacgttacaggttcaatcgaacttccagcaggtactgaaatggtaatgcctggtgataacgtgacaatcgacgttgagttgattcacccaatcgccgtagaacaaggtactacattctctatccgtgagggtggacgtactgttggttcaggtatggttacagaaatcgaagcttaa

SEQ ID NO: 748 - DNA, 384 bp, Streptococcus pneumoniae
gtttcttctttgataccaacaatttcgatttcgtcgttgactttaacgataccacggtcgatacgtcctgaagcaactgtaccacgtccagtgattgagaatacgtcctcgactggaagaagcaatggtttgtcagtgtcacgttctggttctgggatatactcatcaactgtgttcatcaattccataacgatgtcttcgtatttagagtcaccttcaagagctttaagtgctgaaccttggataactggaagatcgtcacctgggaagtcgtattctgacaataggtcacggatttccatttcaaccaattcaagcaattcttcgtcgtcaaccaagtcaactttgttcatgaagacgataaggtgtttaacaccaacctga

SEQ ID NO: 749 - DNA, 414 bp, Streptococcus pneumoniae
ttgaagagattttcgaagagtataatactagactcaaatcaaaaagcattatacaatagtaatatgaaatcaactaaagaagaaatccaaaccatcaaaacacttttaaaagactctcgtacagctaaatatcataaacgccttcaaatcgttctatttcgtctgatgggcaaatcttataaagagattatagagcttttagactgtaatcaaacaacgatttggcgaaatgtaaaaaaatatgaggagttcggactcgactctctccttcaagaaacacgtggtggtcgtaaccatgcatatatgacagttgaggaagagaaagcctttcttgcccgccatttgaaggctacagaggcaggagaatttgttacaataccttatttcaggcttatatcgttcctacacacgtga

SEQ ID NO: 750 - DNA, 186 bp, Streptococcus pneumoniae
ttgttacaataccttatttcaggcttatatcgttcctacacacgtgatgccttctatcaactgttgaagcgccatggttggcgaaatattatgccacgtccagaacatcctaagaaagcagacgctcaaaccattgtcgcgtctaaaaataaaatctcaattcaagaagaaaagaaagcgctttaa

SEQ ID NO: 751 - DNA, 654 bp, Streptococcus pneumoniae
atggttggcgaaatattatgccacgtccagaacatcctaagaaagcagacgctcaaaccattgtcgcgtctaaaaataaaatctcaattcaagaagaaaagaaagcgctttaaaaccagtagacgttttcataaggttcgctcgatgtaccaagatgaggctggtttcggtagaatcagtaaactgggatcttgttggtctccaataggagtaggtccacatgtccatagtcactatatacgagaatttcgctattgttatggagctgttgatgcccatacaggcgaatcatttttcttaagagctggtggatgtaatactgagtggatgaacgcctttttagaagagctttcacaagcttatccagatgattatcttttactcgttatggacaatgctatatggcataaatcaagtaccttaaaaattccgactaatattggctttgcatttattcctccatacacaccagagataaaccccgttgaacaagtgtggaaagagattcgtaaacgtggatttaagaataaagcctttcgaactttggaagatgtcatgaatcaacttcaagatatcatacaaggactggagaaggaggtgataaagcccatcgttaatcggagatggactagaatgctttttgaaagcagatga

SEQ ID NO: 752 - DNA, 1083 bp, Streptococcus pneumoniae
atgaaaaccaaactaccgactgaatggcaagaactgagtgaccaactcggtttccaagaattcacccccattcaaactcaactatttgatccccttcttactggagaaaacctcctaggagtgagccaaaccggaactggtaagaccctagcgtatctcctaccaagtcttctcagactacaaaagaaaaaagcccaacaactcttgattctagcaccaaacacggaacttgctggacagatttttgatgtatgtaaaacgtgggcagaagctatcggattgactgctcaactcttcctttcaggttcaagtcagaaacgacaaattgaacgccttaaaaaggggccagaaattctgattggaactcctggccgtatctttgaactcattaaacttaaaaaaatcaagatgatgaatgtggaaaccatcatcctggatgaatttgaccaattactagatgattctcagattcactttgtagaaaaaatcactcactacgcacctcgtgaccaccaactggtctacatgagtgccacgaccaagtttgatcaagaaaagattgtgccgaatacacgcactattgatctctctaatcaaaaattggacaatatccagcatttctacatgcaggtagaccaacgtcatcgagtggatatactacgaaaactggctcatgtagaggatttccgtggtctagtcttcttcaatagcctgtcagaccttgggaatgccgaggaaaaactacagtatcgtgatatattggctgtttccctcgctagtgatgttaatgttaaatttagaaaagtcatcttagaaaagtttaaagataaccaactaaccctgcttcttgcaactgaccttttggctcgtggaattgatatcgatagcctagaatgtgtcgtaaactttgatattcctagagatagcgaaacctacacacaccgtgctggccgtactggccgtatgggcaaggaaggatatgttattactctcgtcactcatccagaagaaatcaaaaaacttaaaaagtttgcaagtatccgagaaattgtcctaaaaaaccaagaactctatatcaaataa

SEQ ID NO: 753 - DNA, 1062 bp, Streptococcus pneumoniae
ttgaaattttctcctctctgttggatagtcccgtctatctatgttataatgaaagaaggatttaaaatcggaaaaggagtatttatgctaaaattaggtgtcatcggaactggcgctatcagccatcatttcatagaagcagcccataccagtggagaataccaactggtcgcaatctattctagaaaactagaaactgcagcaacctttgcttctcgctatcagaatatccaactattcgatcaattagaagtcttcttcaaatcttcttttgatttagtctatatcgccagtccaaactccttacattttgctcaggcaaaagctgccttgtctgctggtaaacatgttattctcgaaaaaccagctgtcactcaaccacaagaatggtttgatttgattcaaacagctgaaaaaaataactgttttatctttgaagcagctcgtaattaccacgagaaagcctttactactatcaaaaactttttagcagataagcaagtgttaggagcagatttcaactatgccaaatactcttccaagatgcctgacttgttgactggacaaacaccaaatgtcttttcagaccgttttgctggtggagccctcatggatttggggatttatcccctctatgctgctgttcgtctttttggaaaagccaatgacgcgacttaccatgctcaacagcttgacaatagcattgacctaaatggagatggtatcctcttctacccagactatcaagttcacatcaaggctggaaaaaacatcacttccaatcttccttgcgagatttatacaacagatggaaccttgactctcaacacgattgagcatattcgctcagctatttttaccgaccaccaaggaaatcaagtccagcttcctatccaacagactcatcatacgatgactgaggaagtcgctgcatttgcacacatgatccagcaaccagatctgaatctctaccaaacttggctggatgatgcaggctctgttcatgagctactatataccatgcgccagactgctggtattagatttgaggcagaaaaatga

SEQ ID NO: 754 - DNA, 186 bp, Streptococcus pneumoniae
gaatcctccttttcctccttctattatagcacatttttaaatctaggtttgctagattctatgcttctatctatttattcggaaaagaaggcttttcttcagaagaaagctaatagcttatttgaaattttctcctctctgttggatagtcccgtctatctatgttataatgaaagaaggatttaa

SEQ ID NO: 755 - DNA, 378 bp, Streptococcus pneumoniae
atgatttgtcaatttatccgcgatatgctggacttgccagcaaaaaatgtgacgattttggagggaagtaacattcacgtcttgccttccatgccctactcagcgcaggatttctatactagtatagacgtcttggcggagttagataatggaatccaagttatcatcgaaattcaggttcatcatcagaattttttcatcaatcgcctatgggcttatctgtgcagtcaggttaatcaaaacctagaaaaaattcgccaacgtgaaggtgatacccaccagagctacaaacaaatcgcaccagtatacgctatcgcaattgtcgatagtaattacttctcagatgacctagcttttcatagttttatagtaaaatga

SEQ ID NO: 756 - DNA, 1443 bp, Streptococcus pneumoniae
ttgccaaattgtatcattgaaattattgctcaaatttgttatgatataaatatgaataaaagtagactaggacgtggcagacacgggaaaacgagacatgtattattggctttgattggtattttagcaatttctatttgcctattaggcggatttattgcttttaagatctaccagcaaaaaagttttgagcaaaagattgaatcgctcaaaaaagagaaagatgatcaattgagtgagggaaatcagaaggagcattttcgtcaggggcaagccgaagtgattgcctattatcctctccaaggggagaaagtgatttcctctgttagggagttgataaatcaagatgttaaggacaagctagaaagtaaggacaatcttgttttctactatacagagcaagaagagtcaggtttaaagggagtcgttaatcgtaatgtgaccaaacaaatctatgatttagttgcttttaaggttgaagagactgaaaagaccagtctaggaaaggttcacttaacagaagatgggcaaccttttacacttgaccaactgttttcagatgctagtaaggctaaggaacagctgataaaagagttgacctccttcatagaggataaaaaaatagagcaagaccagagtgagcagattgtaaaaaacttctctgaccaagacttgtctgcatggaattttgattacaaggatagtcagattatcctttatccaagtcctgtggttgaaaatttagaagagatagccttgccagtatctgctttctttgatgttatccaatcttcgtacttactcgaaaaagatgcggccttgtaccaatcttactttgataagaaatatcaaaaagttgtcgctctaacctttgatgatggtccaaatccagcaacgaccccgcaggtattagagaccctagctaaatatgatattaaagcgactttctttgtgcttgggaaaaatgtttctgggaatgaggacttggtgaagaggataaaatctgaaggtcatgttgttggaaaccatagttggagccatccgattctctcgcaactctctcttgatgaagctaaaaagcagattactgatactgaggatgtgctaactaaagtgctgggttctagttctaaactcatgcgtccaccttatggtgctattacagatgatattcgcaatagcttggatttgagctttatcatgtgggatgtggatagtctggactggaagagtaaaaatgaagcatctattttgacagaaattcagcatcaagtagctaacggctctatcgttttgatgcatgatattcacagtccgacagtcaatgccttgccaagggtcattgagtatttgaaaaatcaaggttatacctttgtgaccataccagagatgctcaatactcgcctaaaagctcatgagctgtactatagtcgtgatgaataa

SEQ ID NO: 757 - DNA, 768 bp, Streptococcus pneumoniae
atgaatacctatcaattaaataatggagtagaaattccagtattgggatttggaacttttaaggctaaggatggagaagaagcctatcgtgcagtgttagaagccttgaaggctggttatcgtcatattgatacggcggcgatttatcagaatgaagaaagtgttggtcaagcaatcaaagatagcggagttccacgtgaagaaatgttcgtaactaccaagctttggaatagtcagcaaacctatgagcaaactcgtcaagctttggaaaaatctatagaaaaactgggcttggattatttggatttgtatttgattcattggccgaacccaaaaccgctcagagaaaatgacgcatggaaaactcgcaatgcggaagtttggagagcgatggaagacctctatcaagaagggaaaatccgtgctatcggcgttagcaattttcttccccatcatttggatgccttgcttgaaactgcaactatcgttcctgcggtcaatcaagttcgcttggcgccaggtgtgtatcaagatcaattcgtagcttactgtcgtgaaaagggaattttattggaagcttgggggccttttggtcagggagaactatttgatagcaagcaagtgcaagaaatcgcagcaaatcacggaaaatcgattgctcagatagccttggcctggagcttggcagcaagggatttttaccacttccaaaatctgtcacaacctctcgtattcaagctaatcttgattgctttggaattgaactga

SEQ ID NO: 758 - DNA, 231 bp, Streptococcus pneumoniae
caagcaagtgcaagaaatcgcagcaaatcacggaaaatcgattgctcagatagccttggcctggagcttggcagcaagggatttttaccacttccaaaatctgtcacaacctctcgtattcaagctaatcttgattgctttggaattgaactgagtcatgaggagagagaaaccttaaaaacgattgctgttcaatcgggtgctccacgagttgatgatgtggatttctag

SEQ ID NO: 759 - DNA, 762 bp, Streptococcus pneumoniae
gtggacaacctttatcttgtaaaagacgatagtcaactagctgcatttcgtgattttgtagtaagaaatactgaaaagttgaaagattatcaatcttttttaaagaatgaacttgcagtctgtgatttaccgcaagccgttatttggtcaagttttaatgctgctacacagattattagggaaagcgctgttccagcctatacaaataatagacgaatggttatgacgcctgatttagctgtatggaaagagttgtatttgtatcagttgatggactacgagtgttctcagcaaactcaagcaatagaaagccattatcattctttatctgaaaatttcctcttacagattgtaggacatgagttagctcattggtcggagtattttttagatgattttgatggttacgactcttacatctggtttgaagaggggatggttgaatatattagtcgcaagtatttcttgacagaagaggaatttcaagcggaaaaaatttgtaatcagtctcttgtagaactttttcagaagaagtatggttggcattcattgaatgattttggttcttcgacttatgataagaattatgcaagtattttttacgaatactggcgtagttttttgacaatagataagttggtagaaaatctaggtagtgtacaagcggtcttcgattcttatcatttatgggcaaatacagataaaactcttcccttgttaaattggtttgttcagcagaaattaattgaaaaagagatataa

SEQ ID NO: 760 - DNA, 918 bp, Streptococcus pneumoniae
atgtctaagaaattaacatttcaagaaattattttgactttgcaacaattttggaatgaccaaggttgtatgcttatgcaggcttatgataatgaaaaaggtgcgggaacaatgagtccttacactttccttcgtgctatcggacctgagccatggaatgcagcttatgtagagccatcacgtcgtcctgctgacggtcgttatggggaaaaccctaaccgtctctaccaacaccaccaattccaggtggtcatgaagccttctccatcaaatatccaagaactttaccttgagtctttggaaaaattgggaatcaatcctttggagcacgatattcgttttgttgaggacaactgggaaaacccatcaactggttcagctggtcttggttgggaagtttggcttgacggaatggaaatcactcagttcacttatttccaacaagtcggtggattggcaactggccctgtgactgcggaagttacctatggtttggagcgcttggcttcttacattcaagaagtagactctgtctatgatatcgagtgggctaatggtgtaaaatacggagaaatctttatccagcctgagtatgagcactcaaaatattcatttgaaatttcggaccaagaaatgttgcttgaaaactttgataagtttgaaaaagaagctggtcgtgcattagaagaaggcttggtacaccctgcctatgactatgttctcaaatgttcacatacctttaatctgcttgacgcgcgtggtgccgtatctgtaacagagcgtgcaggctatatcgctcgtatccgtaacttggcccgtgttgtagccaaaacctttgttgcagaacgcaaacgcctaggttacccacttttggatgaagaaacacgagttaaacttttagcagaagacgcagaatag

SEQ ID NO: 761 - DNA, 2037 bp, Streptococcus pneumoniae
atgacaaaaaacttattagtagaactcggtcttgaagaattaccagcctatgttgtcacaccaagtgaaaaacaactaggcgaaaaaatggcagccttcctcaaggaaaaccgcctgtcttttgaagccattcaaaccttctcaacaccacgtcgtttggctgttcgtgtgactggtttatcagacaaacagtctgatttgacagaagatttcaagggaccagcaaagaaaattgccttggatagtgatggaaacttcaccaaagcagctcaaggatttgtccgtgggaaaggtttgactgttgaagatatcgaattccgtgaaatcaagggtgaagaatatgtctatgtcactaaggaagaagttggtcaatcagttgaagccattgttcctggtgttgtagatgtcttgaagtcattgactttccctgtcagcatgcactgggctggaaatagctttgaatacatccgccctgtccacactttaactgttctcttggatgagcaagagtttgacttggatttccttgatatcaagggaagtcgtgtgagccgtggccatcgtttcttggggaaagaaaccaaaattcagtcagcattgagctatgaagaagaccttcgtaagcagtttgtaatcgcagatccatgtgaacgtgagcaaatgattgttgaccaaatcaaggaaattgaggcaaaacatggtgtacgtatcgaaattgatgcggatttgctgaatgaagtcttgaatttggttgaatacccaactgccttcatgggaagttttgatgctaaataccttgaagttccagaagaagtcttggtgacttctatgaaggaacaccagcgttactttgttgttcgtgatcaagatggaaaactcttgccaaacttcatttctgttcgtaacggaaacgcagagcgtttgaaaaatgtcatcaaaggaaatgaaaaagtcttggtagcccgcttggaagacggagaattcttctggcgtgaagaccaaaaattggtgatttcagatcttgttgaaaaattaaacaatgtcaccttccatgagaagattggttcccttcgtgaacacatgattcgtacgggtcaaatcactgtacttttggcagaaaaagctggtttgtcagtggatgaaacagttgaccttgctcgtgcagcagccatttacaagtttgacttgttgacaggtatggttggtgaatttgacgaactccaaggaattatgggtgaaaaatacacccttcttgctggtgaaactccagcggtggcagctgctattcgtgaacactacatgcctacatcagctgaaggagaacttccagagagcaaggtcggcgcagttctagccattgcagacaaattggatacgattttgagtttcttctcagtaggattgattccatcaggttctaatgacccttatgcccttcgtcgtgcaactcaaggtgtggttcgtatcttggatgcctttggttggcacattgctatggatgagctgattgatagcctttatgcattgaaatttgacagtttgacttatgaaaataaagcagaggttatggactttatcaaggctcgtgttgataagatgatgggctctactccaaaagatatcaaagaagcagttcttgcaggttcaaactttgttgtggcagatatgttggaagcagcaagtgctctcgtagaagtaagcaaggaagaagattttaaaccatctgttgaatcactttctcgtgcctttaacctggctgagaaggcagaaggggttgctacggttgattcagcactatttgagaatgaccaagaaaaagctttggcagaagcagtagaaacactcgttttatcaggacctgcaagtcagcaattgaaacaactctttgcgcttagcccagtcattgatgctttctttgaaaatactatggtaatggctgaagatcaggctgtccgtcaaaatcgtttggcaatcttgtcacaactaaccaagaaagcagctaagtttgcttgttttaaccaaattaacactaaataa

SEQ ID NO: 762 - DNA, 258 bp, Streptococcus pneumoniae
atggatccgaaaaaaattgctcgtatcaatgagcttgctaaaaagaaaaaaacagaaggcttaacaccagaagaaaaagtggaacaagccaaactacgtgaggagtacatcgaaggttatcgccgcgctgttcgtcaccacattgaaggaatcaaaattgtggacgaagaaggaaacgatgttacaccagaaaaactacgccaagtacaacgtgaaaaaggattacatggccgtagtcttgatgatccaaattcataa

SEQ ID NO: 763 - DNA, 1245 bp, Streptococcus pneumoniae
atgaaatttgttggacttgttggatcaaactacgatcaatcatataaccgcaaactcttggaatttatccgtcgcaatttcaaattcaaatttgaattagaagtacttgaaatcgacgaagttccaatgtttaaccaagacgaaaaatgggacgaaagcttccaattgcgtttcttgtataacaagattacacgtgctgatggtgtcattatcgccactcctgagcacaaccacactatctcagcttcactcaaatctgtacttgaatggctttcatacgaagttcatccatttgaaaacaagcctgttatgattgtgggtgcatcatactatgaccaaggaacatcacgtgctcaagttcaccttcgtaaaatccttgatgctccaggtgttaatgcctacacgcttccaggtaacgaattccttcttggtaaagctaaggaagcttttgataacaacggaaatatcaccaacgaaggcactgttaaattccttgaaacttgcttagataactttgttaaatacgtaggagtcgtttcgaaattgaaaaaaccaaaaccaatcgaatcagaagacttggattgtggaaaaccaatcgctacaaccatcacagaagttgaccctgacgatccagaatgggtagaaaaagttgcagcaatcactggtgctgtttctggtgatacctatgtcaaattggaccacggtatcctaacagttaaccaaattgatatgttcttgaaagctatgccatttgaattgacatacgctgacgacaacaaccaattcctctactacaacaacgctcaccaagatccagacactatgttcgctaaacgtgtaccacctcaatcaggtagccgtatgtcgactgttcatggttctcttccaccagcacgtatgaagaacgtagagtgggttatcggaacacttcgcaacggaaaccaagaatacgtccgtacgatcgttccaggttctcctgcaggtgttatcaacactcacaactaccaagcaatgtactatcctgatggatcatacgctggtatcaatgaaatcgtctttaacttccaaccatggcttgactggtacctaaaagagactggtcaacgtttggtgggtggtagcggaccatttgctcctgctgccggaggtcatggagacgccgatgctacttctggcgcttctgattcaggggatgttggaggccacggtggtgacgcagacgctacagccggtgcaagttactaa

SEQ ID NO: 764 - DNA, 237 bp, Streptococcus pneumoniae
atgattgatcgtagtttgatccaacaagtccaacaaatttcattctttcggtctcctatcttacaaattttcccagtcaaagtcttcagcatctttgcgaagcaattcttgcgcattgcgcaatttctcagtaatcttcacgaagatacggaagtcatcaaagatggcatccaatttcttgataacatcaaggtcaaccaagtcgccacttgggttaaatgcttgaagagagtgtga

SEQ ID NO: 765 - DNA, 606 bp, Streptococcus pneumoniae
atgttaaaacttattgctattgttggaacaaattcaaaacgttctacaaaccgtcaattgcttcaatacatgcaaaaacactttgctgacaaagctgaaattgaacttgttgaaatcaaggccattcctgtcttcaacaaaccagctgacaagcaagtacctgctgaaatattggaaattgctgctaaaatcgaagaggcagatggcgttattatcggtactcctgagtatgatcactctattccagctgttttgatgagcgctcttgcttggttgtcttatggtatttacccacttttgaacaaaccaatcatgattacaggtgcttcttacggtacgcttggttcatctcgtgcccaattgcaacttcgtcaaatcttgaatgctcctgaaatcaaggcaaatgttcttccagatgaattcttgctctcacactctcttcaagcatttaacccaagtggcgacttggttgaccttgatgttatcaagaaattggatgccatctttgatgacttccgtatcttcgtgaagattactgagaaattgcgcaatgcgcaagaattgcttcgcaaagatgctgaagactttgactgggaaaatttgtaa

SEQ ID NO: 766 - DNA, 924 bp, Streptococcus pneumoniae
ttgactcttcgttcacattctgaacggctaatggggactactatcactatttcattagtggatgagcaagccgatatctttctccaaaaatcctttgacttgctcaaagagcttgaataccgcttcaacgccaatagtcaagaatctgagttgatggaaatcaattatcaagcaggagtatcccccgtcacggttcatccagacctgtttgagctgatttcacttgggttagagcatagcctagcgctctctagccacctcaatatcagcattggtcccttaattcaaacctggcgtatcggtttttcagatgccaaggtcgcccagcctcaagaaattgaatcggtgctgcctctaatcaatcctcatggtatcgagttagattcttctacttctactgtgtttttaaaacagaaaggaatgaagatcgatctaggttgtttagccaaaggatacagtgcggataaggttgcccaatttcttaggaaagagggggtgacttctgccttgatcaatctgggagggaatatcctgaccattggaaaaaatcaggcaagaggggataacccatggcaaatcgggattcaagacccagccaatcctaggggaaatcatttaatgaccatccctgttgtcaataaatctgtcgtgacttcaggcatttatgaacgtcacctgaccgtcgatggacaagattaccatcacatttttgacagtcaaacaggatatcctgttgaaacggaactagcgagtctaacaatcatctctgataaatcagtcgatggcgaaatctggacgactcgactctttggagaaagacctgcttctatcctctggcaagtcgaaagtttggagggcatcgaagtcatcctcatcgataaagaaggccacctaagctgttcttcaggaattcctactctatag

SEQ ID NO: 767 - DNA, 273 bp, Streptococcus pneumoniae
atttaccttactagtataccatttaccgttagcgtttacaaggggggtactattatttcagcattttttatcaaaaataattccccatttatcctgttttcaagcctcatgaattttatgagcatatttcttgactttttccaaattttgtttgtgaaaattctaactttatggtattctaataacatgaaaataaaatgtaagggcttcaatttagataattatttgatattacaacttattttctataagagaaaggagttggtagcttga

SEQ ID NO: 768 - DNA, 1380 bp, Streptococcus pneumoniae
atgagtaaaatcgttgtagtcggtgctaaccacgctggtacagcatgtatcaataccatgttggataattttggaaatgagaacgaaattgttgtatttgaccaaaactctaacatctctttcctaggatgtggaatggctctttggattggtgaacaaattgacggtgctgaaggcttgttctattctgataaagacaaattagaagctaaaggtgctaaggtttatatgaattcaccagttctttcaatcgactatgataacaaagtggttacagcagaagttgaaggaaaagaacacaaagaatcatacgagaaattgattttcgctacaggttctacaccaatcttgccaccaatcgaaggtgttgaaattgttaaaggaaaccgcgaatttaaagcaactcttgaaaacgtacaattcgtgaaattgtaccaaaatgctgaagaagttatcaataaactttctgacaagagccaacatctcgaccgtatcgccgttgttggtggtggttacatcggtgttgaacttgctgaagcctttgaacgtcttggaaaagaagttgtccttgttgatatcgttgatactgtcttgaacggttactatgacaaagacttcacacaaatgatggcgaagaacttggaagatcacaacatccgcttggctctaggtcaaactgttaaagcaatcgaaggtgatggtaaagttgaacgcttgattactgacaaagaaagctttgacgtggatatggttatccttgcagttggtttccgtccaaacacagcccttgctgatggtaagatcgaactcttccgcaacggtgccttccttgtagacaagaaacaagaaacatctatcccaggcgtttacgctgttggtgactgtgcgactgtttatgacaatgctcgtaaagatacaagctatatcgctcttgcttcaaatgctgttcgcactggtatcgttggtgcctacaatgcttgtggacatgaattggaaggaatcggtgttcaaggttcaaatggtatctcaatctacggtcttcacatggtttcaactggtttgactcttgaaaaagctaaagctgctggttacaacgcaactgaaacaggctttaacgatcttcaaaaaccagaattcatgaaacatgacaaccatgaagtagcaattaagattgtctttgacaaagatagccgtgaaattcttggtgcccaaatggtttcacatgatattgcaattagcatgggaatccacatgttctcacttgctatccaagagcatgtgacaattgataaattggcattgacagacctcttcttcttgccacacttcaataaaccatacaactacatcacaatggctgcccttacggctgaaaaataa

SEQ ID NO: 769 - DNA, 894 bp, Streptococcus pneumoniae
atgatgaggataaaacaaatgactgaaaatcgttatgaactaaataaaaacttggcacagatgctcaagggtggtgttattatggatgtgcagaatcctgaacaggctcgtatcgcagaagctgctggtgcggcagctgtgatggccttggaacgaattccggctgatattcgtgcagctggaggagtttcccgcatgagcgacccaaagatgattaaggaaatccaagaagcggttagtattccagtaatggctaaggtcagaatcgggcattttgttgaagctcagattttagaggctattgaaattgattatatcgacgagagtgaagttctatctccagctgatgaccgtttccatgtggataagaaagaattccaagttccttttgtctgtggtgctaaggatttaggtgaagccttgcgtcgtatcgctgaaggtgcttccatgattcgtaccaaaggagaaccagggacaggggatatcgtccaagctgttcgtcatatgcgtatgatgaatcaggaaattcgccgcattcaaaacttacgtgaggacgagctttatgttgctgccaaggatttgcaagtccctgtagaattggtccaatatgttcatgaacatggaaaattgccagttgtaaatttcgctgctggaggtgttgcaacgccagcagatgctgcgttaatgatgcaattaggggcagagggggtctttgtcggttcaggtattttcaagtcaggagatcctgttaaacgagcgagtgccattgttaaggctgtgactaacttccgtaatcctcaaatcctagctcaaatctctgaagatttaggagaagccatggttggtattaatgaaaatgaaatccaaattctcatggctgaacgaggaaaatag

SEQ ID NO: 770 - DNA, 234 bp, Streptococcus pneumoniae
atgcccgattctgaccttagccattactggaatactaaccgcttcttggatttccttaatcatctttgggtcgctcatgcgggaaactcctccagctgcacgaatatcagccggaattcgttccaaggccatcacagctgccgcaccagcagcttctgcgatacgagcctgttcaggattctgcacatccataataacaccacccttgagcatctgtgccaagtttttatttag

SEQ ID NO: 771 - DNA, 189 bp, Streptococcus pneumoniae
cgaacagcttggacgatatcccctgtccctggttctcctttggtacgaatcatggaagcaccttcagcgatacgacgcaaggcttcacctaaatccttagcaccacagacaaaaggaacttggaattctttcttatccacatggaaacggtcatcagctggagatagaacttcactctcgtcgatataa

SEQ ID NO: 772 - DNA, 156 bp, Streptococcus pneumoniae
atggcactcgctcgtttaacaggatctcctgacttgaaaatacctgaaccgacaaagaccccctctgcccctaattgcatcattaacgcagcatctgctggcgttgcaacacctccagcagcgaaatttacaactggcaattttccatgttcatga

SEQ ID NO: 773 - DNA, 582 bp, Streptococcus pneumoniae
atgaaaatcggaatattggccttgcaaggggcctttgcagaacatgcaaaagtgctagatcaattaggtgtcgagagtgtagaactcagaaatctagatgattttcagcaagatcagagtgacttgtcgggtttgattttgcctggtggtgagtctacaaccatgggcaagctcttacgtgaccagaacatgctacttcccatccgagaagccattctatctggcttaccagtgtttgggacctgtgcgggcttaattttgctggctaaggaaatcacttctcagaaagagagtcatctaggaactatggatatggtggtcgagcgtaatgcttatgggcgccaattaggaagtttctacacggaagcagaatgtaagggagttggcaagattccaatgacctttatccgtggtccgattatcagtagtgttggtgagggtgtagaaattctagcaacagtgaacaatcaaattgttgcagcccaagaaaaaaatatgttggtaagttcttttcatccagaattgactgatgatgtgcgcttgcaccagtactttatcaatatgtgtaaagaaaaaagttga

SEQ ID NO: 774 - DNA, 648 bp, Streptococcus pneumoniae
atgaacactagtcttaaactcagcaaacaactcagttttggagaggagattgctaatagcgtgacccatgctgtgggtgcagtcatcatgcttatcttgctgcctatttcatccatctatagttatgaagcacacggatttttatcctctatcggcgtttccattttcgtcatcagtctctttctcatgttcctatcatccaccatttatcactctatggcctatggttcgacccacaaatatgttttgcgaatcattgaccattctatgatttacgttgccattgccggctcatacacgcccgttgtcttgaccttgatgaataactggtttggctatctgattattgtcatccaatggggaacgaccatctttggtattctctataaaatctttgctaaaaaggtcaatgagaaatttagccttgctctttacctgattatgggctggttggttctggctatcattcctgccattatcaatcaaacgacacccgttttctggagtctcatggtaactggcggactctgttatacagttggagctggattttatgccaagaaaaaaccttatttccacatgatttggcatctctttatcctagctgcgtccgtactccaatacatcgctattgtttattacatgtaa

SEQ ID NO: 775 - DNA, 453 bp, Streptococcus pneumoniae
ttgaaaatgaaaactaccttttcctacccaaaatgggcagaaattccaaacattgacctctatctggaccaggttttgctctatgtcaatcaggtctgcgcccctatctctcctaataaagacaagggcctaacagcatctatggtcaacaattatgtgaaaaatggttacctgacaaagcctgacaaaaaaaaataccaacgccaacagattgcccgtttgattgctatcacaaccctcaagtctgtattttctattcaagaaatagcccagacacttaatactctacaaactcaagcaagttcagaccaactctacgatgcttttgtggactacatgaaccaaggaattgacccagctaaccctattatccaaaccagctgccaaaccgttaaactctatcatcaaactctagacttaatcgatcatactcaagaggaggtaatccaatga

SEQ ID NO: 776 - DNA, 495 bp, Streptococcus pneumoniae
atggaaattcgtttagcttttccaaatgaagtagatgccatcatgcaggtgatggaggatgccaaaaaatgtttagcagatgctggtagtgaccagtggcaaaatggctatccaaatgcagatgttattatcgatgatatcatctcagggcaagcctacgtagccttggaagagggagaactgctagcctatgctgctgtgaccaaaagtccagaggaggcctatgaagctatttatgagggaaactggcaagctggagagtcagagtatctagtctttcaccgtattgctgtggcagcagatgtgcagggaaaaggagttgctcaaaccttcttagagggcttgattgaaggttttgattatcttgattttcgctcagatactcatgctgaaaacaaggttatgcaacatatttttgaaaaacttggttttaaacaagttggtaaggtgccagtagatggcgaacgcttggcctatcaaaaattaaagaaataa

SEQ ID NO: 777 - DNA, 531 bp, Streptococcus pneumoniae
atgcaaaagaagtatgtaaaaatcctctactcctcaccaataggtattctatcacttgtagctgatgaccattatttgtatggaatttgggttcaggagcagaagcattttgagaggggactaggagatgaaacgatagaagaagttgttagtcatcctattttagacccagttattgcttgcttagatgattactttaaaggcaagcctcaggatttatccaacttgctcttggcgccaatcggaacgaattttgaaaagagagtttgggactatttacagggcattccttatggtcagacagtgacctatggacaaattgctcaagacctgcaagtggcttctgctcaagcaattggtggagcagtgggacgcaatccttggtctatcctagtaccttgtcatcgtgtgttgggagcaggcaagcgtctgacaggttatgctgcaggagtggaaaagaaagcttggctcttggagcatgaaggagtagattttaaagatagaaacaatagaaggagaagcacatgttag

SEQ ID NO: 778 - DNA, 357 bp, Streptococcus pneumoniae
atgttagaatttatcgaataccccaaatgttcaacttgtaaaaaagcaaaacaagaattaaatcaattaggtgtggactataaagccgtccatatcgtggaagaaacacctagccaagaagtcattttgaattggctagaaacctcaggatttgaattgaagcaatttttcaacaccagtggtatcaaataccgtgaattagggctaaaagataaggtaggaagtttgtcaaaccaagaagcggctgagttgctagcaagtgacggtatgttgttaaaacggcccattttagtagaaaatggaactgttaagcaaatcggttatcgaaaatcttatgaagaactgggactgaaatag

SEQ ID NO: 779 - DNA, 378 bp, Streptococcus pneumoniae
atgagttgcaccaaaatcggtgtcccttttaagaaactaacaaagaaggcctgcaagggatataaaatcttgacacgattgatcttcacaatggcaaaaagaagcgccaaaaccaagccaaaaagggcaccgccaattgtcaacataattgttgttggaagttgttggacaattctagggattccatcaaagaccgaacgtaggctaaacagcttgccatccggaatcaattgcatcaagttttggtaccaatctgatgctaaaatcgttgtaacattcataaaaacatcctcttctgataatgattcattctaccatgcttctgccgtcaatgaaattatttgctacggtcagatacagactttgtctacctactag

SEQ ID NO: 780 - DNA, 801 bp, Streptococcus pneumoniae
atgaatgttacaacgattttagcatcagattggtaccaaaacttgatgcaattgattccggatggcaagctgtttagcctacgttcggtctttgatggaatccctagaattgtccaacaacttccaacaacaattatgttgacaattggcggtgccctttttggcttggttttggcgcttctttttgccattgtgaagatcaatcgtgtcaagattttatatcccttgcaggccttctttgttagtttcttaaaagggacaccgattttggtgcaactcatgttgacctactacggaattcctttggctttgaaagccctcaatcagcaatggggaactggtctcaatatcaatgcgattccagctgcagcttttgcgattgtcgcctttgcctttaatgaggcagcttatgctagtgaaaccattcgtgcagccattctctcagttaatcctggtgagattgaggcggcacgcagtctgggtatgacccgagcgcaagtttatcgacgagtgattattcctaatgcagcggtggtagctactccaaccttgattaattccctcatcggtttgaccaagggaacatctctagcttttagtgcgggtgttgtggaagtctttgcccaagctcagattctaggtggagctgattatcgctattttgaacgcttcatctccgttgcccttgtttattgggtagtcaatatcggaattgaaagcctcggtcgtttcatcgagagaaaaatggctatttctgcacctgatacagtgcaaacagatgtgaaaggagaccttcgttaa

SEQ ID NO: 781 - DNA, 744 bp, Streptococcus pneumoniae
atgattaagatttcgaatttaagcaaatccttttcaggacagactgtcttggatcatctgaacttggatattcaaaaaggggaagttgtagccttgattggttcttcaggagctggaaaatcaacctttcttcgcagtctcaattatcttgaaacacctgacagtggctctattcagattgatggtttttcagttgatttttctaaaatcactcaagaagaaatccttgccctacgctgtaagttgtctatggttttccaacagtttaatttatttgaacgccgaacagcacttgataatgtgaaagaaggcttggttgttgtcaagaaattatctgaccaagaagcgactaagattgccaaggaagagttggctaaggttgggctttcggaccgtgaaaaccattatcctcgccatttatcaggtggacagaagcaacgggttgccctagcgcgtgcgcttgctatgaaaccagatgttttgctcttagacgaaccaacttcagcccttgacccagaattggttggtgaagtagaaaagtctattgcagatgctgctaagtcaggtcaaaccatgattttggttagtcatgacatgtcctttgtagcccaagtggctgataagattctcttcttagataaggggaaaatcatcgagtctggaacaccggatgagattatccacacccctaaagaagagcggacaaaagaattcttcgctagttacaaacggacttatatttga

SEQ ID NO: 782 - DNA, 237 bp, Streptococcus pneumoniae
atgagagaaatcatgctactgcaactattttctttatatttcgagagtttgatcttgaccaccatccttgttctgatttttttagggatttggattggtctgagagccatgtcgggagttgataagacagccaaggctcgccaagcccatctctatgatatgattatgattggagtcttggttgtcccagtattatcctttgcggttatgagtttaattcttgttttcaaggcataa

SEQ ID NO: 783 - DNA, 222 bp, Streptococcus pneumoniae
attgcttcgagcagcatacaaggccgcagtcatccctgcaggtccagcaccgataataatagtatcgaacatatagattccttctttcttgttgtaactatctttattctaactctttcttgtcaatcacgcaaggattatgccttgaaaacaagaattaaactcataaccgcaaaggataatactgggacaaccaagactccaatcataatcatatcatag

SEQ ID NO: 784 - DNA, 798 bp, Streptococcus pneumoniae
atgaataatacatctgatatcgaaaattacccaggatacgctaatattagtggacctgaattggctgaaaagatgtttgaaccacttgaaaatcttggtgttgagcacatttatggttatgttgaaaatgtcgaagaccatggtgattttaagaaagtgatgactgatgaccaaacatatgaaacacgtacagttatcgtagcaactggttctaaacaccgtcctttgggagtacctggagaagaagaactgaacagtcgtggtgtttcttactgtgctgtgtgtgatggtgctttcttccgtgaccaagatttattggtagttggtggtggagattcagctgttgaagaagccctcttcttgactcgttttgctaagactgttaccattgttcaccgtcgtgaccaacttcgtgcccaaaaggttttacaagatcgcgcctttgcgaatgaaaaaatcagctttatctgggattctgtagtaagggaaatcaagggtgaaaaccgagtagaatcagtcgtatttgaaaatgtgaaaacaggtcaagtgacagaacaagtcttcggtggtgtctttatctatgttggattggaccctcttagcgattttgttaaagaattgaatatccaagatcaggcaggatggattgtgacagataaccacatgaaaactgcagtcgacggtatctttgcagttggagatgttcgcttgaaagaccttcgccaagtaacaacagcggttggagatggagctatcgctggtcaagaagcctataaattcattacagaacatagttaa

SEQ ID NO: 785 - DNA, 762 bp, Streptococcus pneumoniae
ttgcaagacggggttttgtgttataatagagacatgaaaacaaatgatattgtctatggtgtccacgccgttaccgaagccctccttgcaaatacaggaaacaaactctacctccaagaagatctccgaggtaagaatgttgagaaagtcaaggaactagctacagaaaagaaggtgtccatttcttggacatcaaaaaaatctctctctgagatgactgaaggtgctgttcatcaaggttttgttctacgagtgtctgaatttgcctatagcgagctagattacatccttgcaaaaacacgccaagaagaaaatccacttctattgattctagatggtctaaccgatccccataatctgggttctatcttgcgaacagccgatgcgaccaatgtttcaggtgtcatcattcccaagcaccgtgctgtcggagtaactcctgtcgttgccaaaacagccacaggtgctattgaacacgttccaattgcccgagtgacaaacctcaatcaaaccttatataaactcaaggatgaaggcttctggacctttggaacggatatgaacggtactccttgccacaagtggaatacaaaagggaaaatcgccctcatcattggaaatgaaggaaaaggtatctctagcaacatcaaaaaacaagtcgatgagatgattaccattccgatgaatggacatgttcaaagccttaatgccagtgttgctgcggccattctcatgtacgaagttttccgaaatagactataa

SEQ ID NO: 786 - DNA, 612 bp, Streptococcus pneumoniae
atgtctgcaatagaacgtattacaaaagctgctcacttaattgatatgaacgatattatccgtgaagggaatcctactctacgcgcgattgctgaggaagtcactttccccctatctgaccaggaaatcatcctaggcgaaaagatgatgcaattccttaaacattcccaagatcctgtcatggctgaaaaaatgggactccgcggtggtgttggactggctgctccccagttagatatctcaaaacgcattatcgctgttttggtacctaatattgttgaagaaggcgaaactccacaggaagcctacgatttggaagccattatgtacaatccaaaaatcgtctctcactctgttcaagatgctgctcttggcgaaggagaaggttgcctgtctgttgaccgtaacgtgcctggctatgttgttcgccatgcccgcgttactgttgactactttgacaaagatggagaaaaacaccgtatcaaactcaaaggctacaactccattgttgttcagcatgaaattgaccacattaacggtatcatgttttacgatcgcatcaatgaaaaagacccatttgcagttaaagatggtttactgattcttgaataa

SEQ ID NO: 787 - DNA, 252 bp, Streptococcus pneumoniae
gtgaaagaaatacttatctgtgatataataaaaagaaaaggcttgcataagaaagtagggagaacgaagactacaaagaagacaaaatcgaaatcagggtggtttagcttttcgttttatgaagggcttggtaaactttttaggagttatcgcaagtggagcaataagggatttgtggcgatactcttgctagcagttggtttatcaatgggcttggtcttgttgtttgaaagcttccaaggaatcccttga

SEQ ID NO: 788 - DNA, 483 bp, Streptococcus pneumoniae
gtgctggatttagctcataatcatattttggattcgcaaattgagggagttatttcaacggccgatattattgagaaagctggaatcactccaatcggagtttatacgcacgaaccacgtgatcaggctccgctggtcattaaggaagtgaatgctatcaaggttgcattgttagcctattcctatggtttcaatggaattgagcagtatatttttcaggaagactataatcgttatctttcagatttaaacgaagataagataaaggctgaagttgaacgggcagagaaggaagcagatatcaccattatcatgcctcagatgggtgttgagtatcgattggaaccaactgaagaacaaaaagctctttatcacaagatgatcgattggggagcggatattatctttggagggcatcctcacgttgttgaaccatctgaaacggttgaaaaagatggagataagaaactcattatctattaa

SEQ ID NO: 789 - DNA, 378 bp, Streptococcus pneumoniae
atgagctttagctgttccgatagttgtttttccatccttcttcttgatggtgacatccatgagaacaccacgttcagtccacttagcattctcttcatctcccatagattcaatccgttgattggaaatgaagttccccatttaatagataatgagtttcttatctccatctttttcaaccgtttcagatggttcaacaacgtgaggatgccctccaaagataatatccgctccccaatcgatcatcttgtgataaagagctttttgttcttcagttggttccaatcgatactcaacacccatctgaggcatgataatggtgatatctgcttccttctctgcccgttcaacttcagcctttatcttatcttcgtttaa

SEQ ID NO: 790 - DNA, 828 bp, Streptococcus pneumoniae
atgatgattaaggtaattgcgacagatatggatgggaccttgctggatgctagaggtcagcttgatctcccacgattggaaaagattttagatcagttggatcaaaggggcattcgttttgtcattgcgacgggcaatgaaattcaccgcatgagacaactactgagtcccttggtggatcgagtggttctggttgttgctaatggcgctcgtatttttgaaaacaatgaattgattcaggctcagacatgggatgacgccattgtcaacaaggctttggctcatttcaagggtcgagcgtgtcagaaccagtttgttgtaacggggatgaagggtgattttgtcaaggaaggtacgatttttacagatcttgaaagttttatgactccagaaatgattgaaaaattctaccaacggatgcaatttgtggatgaattaacatctgacctctttggtggtgtgctcaagatgagcatggttgttggtgaggaacgtttgagttcggttttggaagaaatcaatgctctctttgatggccgtgtccgagctgtatccagtggctatggttgcattgatatcctccaagctgggattcataaagcatggggcttggaggaattactcaagcgctgggacttgaaatcccaagaaatcatggcttttggtgatagtgaaaatgatgttgaaatgcttgaaatggctggaattgcctatgcgatggaaaatgctgatgagaaagccaaagctgtggcgactgctctagcaccagccaacagccaaggaggagtttatcaagtcttggaaaactggttagaaaaaggagaatga

SEQ ID NO: 791 - DNA, 636 bp, Streptococcus pneumoniae
gtggtagtacagttattagaaaattggctcctaaaggaacaagaaaaaattcaaaccaaatatcgtcacctaaatcacatttctgttgtagaaccaaacattctttttattggggattccattgtcgagtattatcctctacaggagctatttgggacttcaaagacgattgtcaatcgaggaattcgtggctatcagacaggactgttactagagaaccttgatgctcatctatatggtggagcagtagataaaatttttcttctgattgggacaaatgatatcggaaaggatgttcctgtgaatgaggttctcaataatctcgaagctatcattcaatccgttgctcgcgattatccattgacagagattaaattgctttccattttgcctgtcaatgagggagagaagtaccagcaggcagtctatatccgctcgaatgaaaaaattcagaattggaatcaagcctatcaagagcttgcatctgcctatatgcaggtggaatttgtgccagtatttgattgtttgacagaccaagcaggccaactcaaaaaagaatatacaactgatggactgcacctcagtattgctggttatcaggctttgtcaaaatccttgaaagactatctttactaa

SEQ ID NO: 792 - DNA, 726 bp, Streptococcus pneumoniae
atgaatgtaaatcagattgtacggattattcctactttaaaagctaataatagaaaattaaatgaaacattttatattgaaacccttggaatgaaggccttgttagaagaatcggcctttctgtcactaggtgaccaaacgggtcttgaaaagctggttttagaagaagctcccagtatgcgtactcgtaaggtagagggaagaaaaaaactagctagattgattgtcaaggtggaaaatcccttagaaattgaaggaatcttatctaaaacagattcgattcatcgattatataaaggtcaaaatggctacgcttttgaaattttctcaccagaagatgatttgattttgattcatgcggaagatgacatagcaagtctagtagaagtaggagaaaagcctgaatttcaaacagatttggcatcaatttctttaagtaaatttgagatttctatggaattacatctcccaactgatatcgaaagtttcttggaatcatctgaaattggggcatcccttgattttattccagctcaggggcaggatttgactgtggacaatacggttacctgggacttatctatgctcaagttcttggtcaatgaattagacatagcaagtcttcgccagaagtttgagtctactgaatattttattcctaagtctgaaaaattcttcctttgtaaagatagaaataatgttgaattgtggtttgaagaagtatga

SEQ ID NO: 793 - DNA, 936 bp, Streptococcus pneumoniae
atgaagtggaccaagattattaaaaaaatagaagaacaaatcgaggcaggaatttatcccggagcctcttttgcgtattttaaggacaatcaatggacagagttctatttaggccagagtgacccagagcatggcttgcagactgaggcaggactagtttatgacctagctagtgtcagcaaggttgttggggttggcacagtttgtaccttcttgtgggaaataggtcaattagatattgatagactggtaatagattttttacctgagagtgattatccagacatcactattcgccagctcttgactcatgcaacagaccttgatccttttattcctaatcgtgatcttttaacagcccctgaattaaaggaagcgatgtttcatctcaacagacgaagtcagccagcctttctttattcggatgtccattttttgctgttgggctttattttggaaagaatttttaatcaagatttggatgtgattttaaaggatcaagtctggaaaccttggggaatgacggaaaccaagtttgggccagttgagcttgctgttccaacagttagaggtgtagaggcaggcatagtgcatgatcccaaggctcgtctcctgggtagacatgctgggagtgctggtttattttcgactataaaggatttacaaatctttttagaacactatttagcagatgattttgcaagagacttaaatcaaaatttttctcctttggatgacaaggaacgttctttagcatggaatttggaaggagattggctagaccatacgggctatacaggtacctttatcatgtggaatcgtcagaagcaagaagccactattttcctatcgaatcgtacctatgaaaaggacgagagagctcaatggatattagaccgcaatcaagtgatgaacttgattcgtaaagaagagtaa

SEQ ID NO: 794 - DNA, 897 bp, Streptococcus pneumoniae
atgtcaaatagtttaaaagggactttactaacagttgtggctggtattgcttggggggtgtcaggaacgagtggccaatacctaatggcacacggaatttcggctctggtcttgaccaacttgcgtcttttaatcgctggtggaattctcatgatcttggcttatgctactgcaaaggataaaatactggtctttttaaaggatagaaagagtttgctgtctcttcttatttttgctctgattggtctttttctcaaccaattcgcctatctgtctgctattcaggagaccaatgcgggaacagcgacggtgcttcagtatgtttgtcctgtcggaattttaatttatagctgtatcaaggatagggtggcaccgacactgggagagatagtttccatcatattcgccatcggaggaaccttcctgattgcaacacatgggcagttggaccagttatccatgacacctgctggcctgttctggggtctcttttctgccttgacttatgctctatatatcattttacccatagccttgattaaaaagtgggggagcagcttggtcattggtgtgggaatggttatagcaggtttggtcgcccttccttttacaggggttctacaggccaatatcccgactagtcttgattttctccttgcgtttgcaggtattatccttatcgggactgtctttgcctatacagctttccttaaaggagccagtctgataggaccggtcaagtcaagcttgttggcttcaattgagccaatatcggcggttttctttgccttcttaataatgaatgaacaattttatcccattgattttcttggtatggcaatgatattgtttgctgtaactttgatttctttgaaagatttattcttagaaaaataa

SEQ ID NO: 795 - DNA, 699 bp, Streptococcus pneumoniae
atgctacctgcttatatgaaaatccatgatcagataaaaaaggatattgacgagcaccgttgggctattggtgagaggcttcccagtgaaagagatttagctgagcagtttgcggtcagtcgcatgaccctccgccaagccgtatctctattagtcgaagaaggcgtcttagagcgccgtgtaggaagcggcacctttgtttccagtactcgagtacaagaaaagatgcgagggacaaccagttttactgaaattgtcaaatcccaaggtaaagttccctctagccagctcatttcctacaaaaaaaccattcccaatgagcaagaagttgccaagctaggaatttttccaacggacaatattatccgaatggagcgggtccgctatgccgaccaagttcccctagtttatgaagttgcttctattcctgaaaaattcattaaggactttaaaaaagaagaaatcaccagtcatttcttccaaaccttgcaaaaacatggctatcgtatcggcaaatctcaacagaccatctatgctcgccttgctaaagaaaagattgcccactatttggaagttgaaaaaggacatgctattcttggattgacacaggtttcctacctagaagatggtactgcttttgaatacgtaaaaagtcaatatgtaggcgaacgctttgaattttatcttgaaaataattag

SEQ ID NO: 796 - DNA, 1563 bp, Streptococcus pneumoniae
atgagcaacatttcaactgatttgcaagatgtagaaaaaatcatcgtattggactatggtagccagtacaaccagctgatttcacgccgtatccgtgagattggtgttttttcagaactaaaaagccataaaatttcagctgctgaagttcgtgaagtcaatcctgtaggaattattctatcaggtggtccaaattctgtatatgaagatggttcatttgatattgacccagaaatcttcgaactcggaattccaattttgggaatctgttatggtatgcagttattgacccataaacttggaggaaaagttgttcctgcaggtgatgctggaaatcgtgaatacggtcaatcaaccctaactcacacaccatcagcgctttttgaatcaacacctgatgaacagactgttttgatgagccatggtgatgcggttactgagattcctgctgactttgttcgtacaggtacatcagctgactgcccatacgcagccatcgaaaacccagataaacacatttacggtatccaattccacccagaagttcgtcattctgtatacggaaatgatatccttcgtaactttgcccttaacatttgtaaggctaaaggtgactggtcaatggataatttcattgacatgcagatcaaaaaaattcgtgaaaccgtcggtgataaacgtgtccttcttggtctatcaggtggtgttgactcatctgtcgttggggttcttctccaaaaagcgattggcgatcaattgatctgtatcttcgtagaccacggtcttcttcgtaaaggcgaagctgatcaagttatggacatgctcggtggtaagtttggtttgaatatcgtcaaagcagacgctgctaaacgtttccttgacaaacttgctggcgtttctgatcctgaacaaaaacgtaaaatcatcggtaacgagtttgtctatgtattcgatgacgaagcaagcaagctcaaagatgtgaaattccttgctcaaggtactttatatacagatgttatcgagtctggtacggatacagctcaaactatcaagtcacaccacaacgtgggtggtcttccagaagatatgcagtttgaattgattgaaccactcaatactctttacaaggatgaagttcgtgctcttggtacagagcttggtatgccagaccatatcgtatggcgccaaccattcccaggaccaggacttgctatccgtgtcatgggtgaaatcactgaagagaaacttgaaaccgttcgtgaatcagacgctattcttcgtgaagaaatcgctaaagctggacttgaccgcgatatttggcaatacttcactgttaacacaggcgttcgttcagtcggtgttatgggtgacggtcgtacgtatgactacacgattgcaatccgtgctatcacttctatcgatggtatgactgctgattttgccaaaattccatgggaagtacttcaaaaaatctcagtacgtatcgtaaatgaagtggatcatgttaaccgtatcgtctacgatattacaagtaaaccacctgcaacagttgagtgggagtaa

SEQ ID NO: 797 - DNA, 186 bp, Streptococcus pneumoniae
atgccacaacctattgttcctgtagagattccacaatctcgtctttttgattctaaaaagagaaatgatattctgcttaaaattcgtattggcaagcttgaagtaagtttttttcaatctctcaatctcgaaatggtagaacagcttttggataaggtgttgctctatgacaattcatctatctag

SEQ ID NO: 798 - DNA, 288 bp, Streptococcus pneumoniae
atgacaattcatctatctagcctaggacaggtctatctcgtatgtgggaaaacggatatgaggcaaggcattgattcactggcttatctggttaaaacccactttgaattagatcctttctcaggtcaagtttttctcttttgtggtggacgtaaagaccgctttaaagccctttactgggatggtcaaggattttggctactatataaacgctttgagaacggcagactgacttggctaagtacagaaaaggatgtcaaagctctcgcacctgaacaagtagactag

SEQ ID NO: 799 - DNA, 195 bp, Streptococcus pneumoniae
ttgaaaatcattcaacaacagagtgctacaattgatagtctcaccaatgaacttgcccttctgcgtgaacaagtggcttatctgactcaaaagctctatggaaaatcctctgagaaaagtgtttgcccctctggacaactcaacctttttgaggaagagtctccatctgaggaagatggagatgttcccagttga

SEQ ID NO: 800 - DNA, 390 bp, Streptococcus pneumoniae
atggaaaatcctctgagaaaagtgtttgcccctctggacaactcaacctttttgaggaagagtctccatctgaggaagatggagatgttcccagttgaaacagaggaaattacctacaaacgtaagaaatctaaagggaaacgccaagctcttcttgcccaatttgattcagaagaagttcatcatcaagtagaagagaggatttgccctgattgtcagggagatctaaaagagattggagggagtcttcaaggacaagaattggtctttattcctgcgcaattaaaacgcatagatcatatccaacacgcttacaaatgccaagcatgcagtgataaaaatccgagtgataaaatcgtgaaagctcctattcctaaagcccctttataa

SEQ ID NO: 801 - DNA, 429 bp, Streptococcus pneumoniae
ttggtgctgatctctttggcgcatagctttggctcagtttctattatcgctcacaccatccatcagaagtttaatttgaaggtacccaattatcgccaagaagaagattgggctaggatgggtttaccaatcacacgtaaggaaatctctaattggcatatcaaggcaagtcaatactatttagagtccctttataaccttttacgagaaaagttgttagaacaacctcttcttcatgcggatgaaacctcttatcgggtgctagagagtgatagccatctgacctactattggacctttttgtctgggaaagctgagaatcaagcaatcacgctgtaccatcatgatcagcgtcggagtggtttagtagtacaagaattcctaggagattattctggctatgtgcattgtgatatgttgcggcagtaa

SEQ ID NO: 802 - DNA, 450 bp, Streptococcus pneumoniae
ttggtaaactgcgagccgctagaagcttatcgtcaactggaagaagctgcacttgttggatgttgggcgcatgtgagaaggaagttttttgaagcgacccccaagcaagcagataaatcatctttaggagctaaaggattagcctattgtgatcagttattttccttggaaagagactgggaggctttgccagctgatgaacgactacagaaacgtcaagaagagctccaacccctaatagaagacttctttgcttggtgccgccgtcagtcagttttagcaggttcaaaactaggaagggcaattgaatacagcctcaagtatgaagaaacctttaagaccattttgaaagacggacatctggtcctttccaataatctagctgaatgcgccattaaatcattggttatgggacggagtaaaagagtccagtggactcttttagcctaa

SEQ ID NO: 803 - DNA, 234 bp, Streptococcus pneumoniae
cctaagctcagtttaaaaaagcgagggtggttattttctcaaagttttgaaggagctaaagcaagagctattattatgagtttgttggaaacagctaaacgtcatcaactaaatagtgagaaatatctatcctatcttctagaatgtcttccaaacgaggaaactctcgtaaacaaagaggttttagaggcctatttaccatggactaaagttgtacaagaaaagtgcaaatga

SEQ ID NO: 804 - DNA, 1365 bp, Streptococcus pneumoniae
atggttgaaataaaaaatttaagtcttgattatggtgaagagcatatattagatgatatatcactatccatagccgagggagagtgcgtgctatttacaggaaaaagtggaaatggtaagtcatctttaataaattcaatcaatggactagctgtaaggtatgataacgcaaagacaaagggcgaaataattattgatggtaagaatataaaaaatttggaactttatcaaatctcaatgcttgtttcaactgtttttcaaaatcctaagacatatttttttaatgtcaatacgacattagaattattattttatttggaaaatatcggtcttgcaagagaagagatggacaggcgtttgaaggatatacttgagatattcccgataaaaaatcttttaaacagaaatatatttaatctatccggcggtgaaaaacaaattctttgcattgcagcttcttatatagcaggtacaaagattatagttatggatgagccttcatcgaatttagatattaaaagcataagtgttttggcaaagatgctaaagatattaaaagagaaaggcataagcataattgttgcagagcatagaatttattatttgatggacatagttgaccgtgtatttttaatagataaaggaaagcttaaaaaaacttatactagaagtgaatttttaaagctagataaaaatgaattaaatgctttaagtttaagagataaagaattaagtaaattaaaagttccttatttaaaagaaggtggagagtatcagataaaaaatcttagctacaaatttactgatgatgagtgtttaagcttaaaagatatttcattcaagcttgggaaaatttatggcataataggatccaacggacgaggaaaatcaacgcttttaagatgtttaataggtcttgagaaaaaatcaaaagaagaaatttattttaagggagagaagctatctaaaaaagaaagactcaaaaactcttcacttgttatgcaagatgtaaatcatcaattattcacagatgaagtattcaacgagcttagattaggagtaaagaattttgatgaagaaaaggcgaaaatcattttaaaagatttatgcctggacgaatttattgaaaggcatccgatgagtttatcaggagggcaaaagcaaaggcttgcaatagcatctgttatgtgcaagaattctccatttgtcttttttgacgaaccttcaagtggtatggattattccaatatgataaaaatatctgaactgattaataagtataaaaccatggataaaataatttttattgtttcccatgatatagaatttttaaatgaagtggcagatgaaatttttgaattgtaa

SEQ ID NO: 805 - DNA, 222 bp, Streptococcus pneumoniae
tccataccacttgaaggttcgtcaaaaaagacaaatggagaattcttgcacataacagatgctattgcaagcctttgcttttgccctcctgataaactcatcggatgcctttcaataaattcgtccaggcataaatcttttaaaatgattttcgccttttcttcatcaaaattctttactcctaatctaagctcgttgaatacttcatctgtgaataattga

SEQ ID NO: 806 - DNA, 696 bp, Streptococcus pneumoniae
atgcctactttttcttcaaatgctccctttaatcccaatccgatctctaagatattagtcgtatttatcacaggcttaactgttatgcatagcataaacatccgttttgagctggcaattgtttgtcttattggtattttgctttatttgaatggatacaaaaaaacacttttcaaatggattatattgtgtgggatactttactccttgcctaattttatggtgttatctgaattaaaccctatagttaagatgtttttgagtatacctattgttattagaatgtttattttaccatttatggcagcaagctttatgataaagacctcggatgtaggcgcaataatttcatcgatggataagcttaagatttcaaagaatgtatccatacctattgcggttatgtttagattcttcccatcttttaaggaggagaagaaaaacatcaaaatggctatgagagtaagagggataaattttaaaaacccagtcaaatatcttgaatatgtttctgtgccactactcattatatcatctaatatatcagatgacattgcaaaagcggcagaaacaaaggcaatagaaaatccaattgccaagaccagatacattcgcgtaaagatacagctaattgattttgtttatgttttagcggttgctggacttattgtgggaggcttaatatggttgaaataa

SEQ ID NO: 807 - DNA, 585 bp, Streptococcus pneumoniae
atggataataaaaaattaaaagtaaaagatttagtaagcatcggtgtttttggcgtaatttattttgccttcatgtttggagttggtatgatgggcttgattccaatattgttcttaatatacccgacagtattagccatagttgcaggaactgttgttatgttatttatggctaaggttcaaaagccatgggcactatttatatttggtatgatatcaccacttgtgatgtttgcagctggtcatacctacgtagttgtggttttatcacttatagtaatgataatagcagaattaattagaaagattggtaattataattcatttaaatacaatatgctttcttatgcaatcttcagcacatggatatgtagctctttaatgcaaatgcttttagcaaaagaaaaatatatggagtggtctttgatgactatgggaaaagattatgttgatgtattagaaaagttaataacttatcctcacatggctttagtagccttaggtgctttcttaggaggaattcttggagcatatataggcaaggctctattgaaaaaacactttgaaaaagcaggcatcgtataa

SEQ ID NO: 808 - DNA, 1746 bp, Streptococcus pneumoniae
ttgcgaatgaatggagggtttcaaatgaaagagttttataaaaaaagatttgctcttacagatggaggagcaagaaatttaagtaaagcaacactggcttcatttttcgtttattgtataaacatgcttcctgccatattacttatgatttttgctcaggaagttttggaaaatatgggcaaaagcaatggcttttatatagtattctcagttttgattttgatagcaatgtatattttgctttctatcgaatacgataaattatataacacaacctatcaagaaagtgcagatttaagaataaggacagcggagaatttatcaaaattacctctatcttacttttctaaacatgacatttccgacatttcacaaacaatcatggctgatattgaaggcatagagcatgcaatgagccactcaataccaaaggtgggcggcatggtactgtttttcccattaatatctgtaatgatgctagcgggcaatgtcaagatgggtttagctgtaattattccatctattttaagctttatatttatacctttatctaaaaaatatcaggttaatggacagaatagatattatgatgtcttaagaaaaaactcagaaagctttcaagaaaatatcgaaatgcaaatggagattaaagcatataatttatcgaaggatattaaagatgacttatataaaaaaatggaagatagtgagaaagtacacttaaaggcggaagtaactacaattttaactttgtctatatcttcaatatttagctttatatctcttgctgttgtgatatttgtcggcgtaaatctaattattaataaagagataaattctctctaccttataggatatttactagctgctatgaagataaaagactctttagatgcatctaaagagggcttgatggaaatattttatttatcgcccaaaatagaaagattaaaagaaattcaaaatcaagatttacaagaaggcgatgactatagcttaaaaaaatttgatattgatctaaaagatgttgagtttgcctacaataaagacgaaaaagttttaaatggtgtaagttttaaagctaagcagggagaggtcactgctttggtaggtgcaagtggctgcggtaaaacaactatcttgaaacttatatcaagactttatgattatgacaagggacaaatcttaatcgatggcaaagatataaaggaaatatcaacagaatccctttttgataaggtgtctattgttttccaagatgtggttctctttaatcaaagcgttatggaaaatattagaatcggtaagcaagatgcaagtgacgaagaggttaaaagagcagcaaaacttgcaaattgcacagattttatagaaaaaatggataaaggtttcgatacagttattggtgaaaacggagctgagctatcaggaggagaaagacaaagattatcaatagccagagccttcttaaaagatgcgccgatattgatcttagatgagataacagcaagccttgatgttaacaacgagaaaaagattcaagagtctttaaataatttagttaaagataaaactgttgtaatcatttcacatagaatgaaatccatagaaaatgcagacaagatagtagttcttcaaaacggaagagtagaaagcgaaggtaagcatgaagagcttttacaaaaatcaaaaatttacaaaaatttaatagaaaagacaaaaatggcagaagaatttatttattag

SEQ ID NO: 809 - DNA, 1761 bp, Streptococcus pneumoniae
atgcttatgaagatttacaaaaaactatttgcttatgtccaagataagaaatatcttggggttttggccataattttttctgctatatctgctgcacttacagtatatggatattatttaatctacaaatttctagataagttaataattaattcaaacttatccggtgcagagagtatagcattaaaatctgttattacactaacaagtggagcgatattttattttgtctcaggaatgttttcacatatcttgggattcaggcttgaaacaaatttaagaaaaaggggaatcgatggtctggaaaaagcaagttttaggttctttgacttaaatccatctggtcaaataagaaagattatagatgacaatgctgcacaaactcatcaggtggtagcacacatgattcccgatagttctcaggcaataatcacacccgtacttgtacttgcacttggctttatagtaagtataagagttggcataattttgcttgctcttactataattggtggcttaattttaggggcaatgatgggcgagcaagaatttatgaagatataccaagaatccctatctaaactaagtgctgaaactgttgagtacgtgagaggaatgcaagttgtaaaaatatttaaagcaaatgtagagtcttttaaaagcttttataaggcgataaaagattactcaaagtatgcttatgattattccctatcttgtaaaaggccttatgttttgtatcaatggttattttttggactgattgcaattttaattattcctatagtttattttatgactagcttagctagcgcaaaggtgattttacttgagcttatcatgattttatttttatcaggagttctctttgtttcattcatgagaatgatgtggtactccatgtatatttctcaaggaaattatgcagtagatactttagaggcgctttacgaagatatgcaaaaagacaaattagtgcatggtaatgtcaataattttaaaaactataatatagaatttgagaatgttagctttgcttataatgataaagctgtcattgaaaatttatcctttaatttagaagaaggaaagtcctacgcacttgtcggttcatctggatcaggcaaatcaacagtagcaaaacttatatcaggtttttacaatgttaataaaggaagcataaagataggcgggatagcaataagtgaatattctgacgaagccttaattaaagccatttcctttgtttttcaagattcaaaattattcaagaagagcatttatgataatgtagcgttagctaataaagatgcgacgaaagatgacgttatgagagccttaaaattagcaggatgcgatttaatattagacaaattcccagaaagagaaaatacaatcataggctcaaaaggtgtttatttatccggtggagaaaaacaaagaattgcaattgctagagcaattttaaaggattccaaaattattattatggatgaagcatcagcatctattgacccagataacgagtttgaattgcaaaaagcttttaaaaatcttatgaaggataaaacagttatcatgattgcacacaggctatctacaattaaagaccttgatgaaattattgtcatggatagtggaaaaattatagaaagagggtctgacaaagaattaatgtcaaaagatacaaggtataagagcctgcaagagatgtttaacattgcgaatgaatggagggtttcaaatgaaagagttttataa

SEQ ID NO: 810 - DNA, 477 bp, Streptococcus pneumoniae
atattaaattgtaagatggacgctcctgccgctgattttttctttaaagcaaaggcaaatgaatggataagtatagtaattgacacatacttaaatagaaaaaaatataaaattgaaattgatgatgataaagcacttgaagatgtagcaagattcttagatgatcattttgcaacgaatgtaaatcaaggcacgcttgaaaaaatatctaaaatgagtggtactaaattaaaaaatttatttaaggaaaaatattgtcaaagcattacagagtacactcaaagaaaaagaatgaatgtagctgaaactcttcttttaaacactgaactacctataaaagagatagcagaatctgttggatattcatctgccagcaaattttctatctattataaaagatacaagggaaaacttccaagtgaagtccgtaatttagcttgcaaacatcacaattttaaatgcgattattgtgattaa

SEQ ID NO: 811 - DNA, 207 bp, Streptococcus pneumoniae
tcatctaagaatcttgctacatcttcaagtgctttatcatcatcaatttcaattttatatttttttctatttaagtatgtgtcaattactatacttatccattcatttgcctttgctttaaagaaaaaatcagcggcaggagcgtccatcttacaatttaatatttccattgccactctttctaaggcctttgtaagtattatttga

SEQ ID NO: 812 - DNA, 1191 bp, Streptococcus pneumoniae
atgacagtattaaaaggagataacttagaaatattaaaaactattgaatcctcaagtattgatttaatctatatggaccctcctttctttacacagaaaacccaaaaattatctaataacaaaaatattatgtattcattcgaagatacgtggacttcgattgaggattacaaagaatttttgtctgtaagattagaagaatgcaaaagagtgctaaaaaatagtggcagtattttcgttcattgtgataaaattgcaaatcatcatattagattaattttagataatatctttggagcagatatgtttcaaagcgaaattatatggaactataagcggtggtctaattcaaaaaagggattattgaacaatcatcaaaacatttacttttattcaaagtcaaaagattttaaatttaatacaatttttacagagtattcttctactacaaatatcgaccaaatactagtggaacgaaaacgagatggaaactctaaaactatatataaagttgataataatggtaactatattctagcaaaagagaaaaatggagttcccctttcagatgtttggaatataccatttcttaatccaaaagctaaagaaagagtaggttatcctacacaaaaacctattctgttattagaacaaattataaagattgctactgataaaaatgatatagttttagacccgttctgtggaagtggaactactttagtagcctccaagattttgaatagaaattatatggggattgatttatctgaggaagctatcaatataactcagcaacgtctggaaaatgttataaaaacaagttcaaatttattgaataaaggaatcgaagcatatagaaccaaaactgaggaagaggaaaacattcttaaattattacaggcaaaaattgttcaaagaaataaaggaattgatggttttttacctaaacattttcaaaaaaaaccgatacctataaaaattcaaaaaaataatgaatgtctgaatgagagtatctctttattacagaatgctataaactccaaaaaacttgattttggagtagttataaaaactcattcagataatttattatttgattttgatacgattcctgaaaatataatagtagttgaccattttgaacttacaatcgaaaaatggttaagtaaaagtcaacagttactatag

SEQ ID NO: 813 - DNA, 189 bp, Streptococcus pneumoniae
atgttctactatccaaatagaactcaagctataaaaattcagcaaactttagaaacattgtataacggtattggagggaaatattatggagattctgcctgggaacatttaagagcagtgaccggtattgatttacttagtattctaacagatattgcaaataaaaaaacaggggtaaaatcaaaatga

SEQ ID NO: 814 - DNA, 183 bp, Streptococcus pneumoniae
atggcaaatgataataagagccattatttgatatacagagttttaggtatttcatttgaagaaggagaaaatatcgatttgtatcaaaataaaggtcgttttttatacaaatatgctggttcatttttagaagaagctgcagtactatcctttaacgaaaaatttggtacagaaaatacttaa

SEQ ID NO: 815 - DNA, 213 bp, Streptococcus pneumoniae
atgaatagagacgtagctaataagttgaataacatatttggaaaaatgagaaatagcaatattactagaacttttagaaacaatcaatatttaaaaagaaaaaagctcaaagaatttattaaaccatgttataatagatatagctataattttatttataacaagaggatagaaatgaccgaattagaaagaaaaaatcgaaaaattagctaa

SEQ ID NO: 816 - DNA, 1287 bp, Streptococcus pneumoniae
atgacaaaaacattaaaacgtcctgaggttttatcacctgcagggactttagagaagctaaaggtagctgttcagtatggagcagatgctgtctttatcggtggtcaggcctatggtcttcgtagccgtgccggaaactttactttcgaacagatggaagaaggcgtgcagtttgcggccaagtatggtgccaaggtctatgtagcggctaatatggttatgcacgaaggaaatgaagctggtgctggtgagtggttccgtaaactgcgtgatatcgggattgcagcagttatcgtatctgacccagccttgattatgattgcagctactgaagcaccaggccttgaaatccacctttctacccaagccagtgccactaactatgaaacccttgagttctggaaagagctaggcttgactcgtgtcgttttagcgcgtgaggtttcaatggaagaattagctgaaatccgcaaacgtacagatgttgaaattgaagcctttgtccatggagctatgtgtatttcatactctggacgttgtactctttcaaaccacatgagtatgcgtgatgccaaccgtggtggatgttctcagtcatgccgttggaaatacgacctttacgatatgccatttgggaaagaacgtaagagtttgcagggtgagattccagaagaattttcaatgtcagccgttgacatgtctatgattgaccacattccagatatgattgaaaatggtgtggacagtctaaaaatcgaaggacgtatgaagtctattcactacgtatcaacagtaaccaactgctacaaggcggctgtggatgcctatcttgaaagtcctgaaaagtttgaagctatcaaacaagacttggtggacgagatgtggaaggttgcccaacgtgaattggcaacaggtttctactacggtataccatctgaaaatgagcagttgtttggtgctcgccgtaaaattcctgagtacaagtttgtcgctgaagtggtttcttatgatgatgcggtacaaacagcaactattcgtcaacgaaacgtcattaacgaaggggaccaagttgagttttatggtccaggtttccgtcattttgaaacctatattgaagatttgcatgatgccaaaggcaataaaatcgaccgcgctccaaatccaatggaactattgactattaaagtcccacaacccgttcaatcaggagacatggttcgtgcattaaaagaaggactcatcaatttttataaggaagatggaaccagcgtcacagttcgagcttaa

SEQ ID NO: 817 - DNA, 729 bp, Streptococcus pneumoniae
agtatgcgtgatgccaaccgtggtggatgctctcagtcatgccgttggaagtacgacctttacgatatgccatttgggaaagaacgtaagagtttgcagggtgagattccagaagaattttcaatgtcagccgttgacatgtctatgattgaccacattccagatatgattgaaaatggtgtggacagtctaaaaatcgaaggacgtatggagtctattcactatgtattaacagtaaccaactgctacaaggcggctgtggatgcctatcttgaaagtcctgaaaagtttgaagctatcaaacaagacttggtggacgagatgtggaaggttgcccaacgtgaactggctacaggattttactatggtacaccatctgaaaatgagcagttgtttggtgctcgtcgtaaaattcctgagtacaagtttgtcgctgaagtggtttcttatgatgatgcggcacaaacagcaactattcgtcaacgaaatgtcattaacgaaggggaccaagttgagttttatggtccaggtttccgtcattttgaaacctatattgaagatttgcatgatgccaaaggcaataaaatcgaccgcgctccaaatccaatggaactattgactattaaggtgcctcaacccgttcaatcaggagacatggttcgtgcattaaaagaaggactcatcaatctttataaggaagatggaaccagcgtcacagttcgtgcttaa

SEQ ID NO: 818 - DNA, 723 bp, Streptococcus pneumoniae
ttgatgaaaattcttgttcagaataatcaaccgacttcaggtaatattataagcagtgataatattgggtatttaatcgaagaaccaaaattatttttatctaaaacaggtttagagaatttaaaatatttgtcaaatttatatggtgttgactacaatcaagaaagatttagaagtttgatccaagagttagatttgactcagtctattaataaaaaagtaaagacctattctttgggtacaaaacaaaaattagctttgcttctaactctcgttacgaaacctgatatattgattttagatgaaccgactaatggtttagatattgaatcatcacaaatagttttagcggttctaaaaaaattagctttaaatgaaaacgtgggaattttaatatcgagtcataaattagaagacattgaagaaatttgtgagagggttcttttcttggagagcgggcttttgacatttcaaaaagtaggaaaagatagtcataatttcttgtttgagatagctttttcatcagctacagatagagacattttcattaccaaacaagaatttggggatattgttcaggaagagggactgagaattactatgtctgggaatattcaaagtagtgagctttttaaattttttaacgaaaactctattaaagtagttgattttgaaactaaaaaagagacgcttaaagatatttacttaaatcgttcaaaataa

SEQ ID NO: 819 - DNA, 729 bp, Streptococcus pneumoniae
atgaaattaaataaattgaattttcttaaggaaaatataagaaatttatattcatcaggcgtaatatatctcagtttgcttatctcgtttataccgccgatattgcttacattctttattctaaagactcaagggacatcgcttggtattaagcatatttcaaacttttatgctatgctcggtatgttaatggctgttatacatgctaatcgagttattagtagagatttttcccacaatacggtaagtttgttttataatcaacagaagaatcggatgatttacgtcttgtctaattttctatatgccatctcagtttccattatttatgctttgaatggcattgtgttactagtcatagtaagtaaattgggtattccaggtgatttaggattagattttatagtagctattgtagtcaatacaattttgttagtcctgttttattttctattatcttacattttctatttatacaaattgaaaagtggcttggtatttggtattttagtagctttactactctttatccctaatatattaaatacgatgatgatgaatactagtaatgatttgtttatcaaagcaattgaacttcttcctttttattctttacctgtatttgtggcttcaaatacgatgtctattagtcagtatcttgtgctaatcactacaatcattttattgtactttttcactctcaagaaaagcaagaagtattcattttag

SEQ ID NO: 820 - DNA, 240 bp, Streptococcus pneumoniae
atgaatattaaaattataaggaggacgaaggtggttaaaaatttaaaattaaaattagctcgggtagagcttgatttaactcaaggtcaactagcagatgctgtcggggtgacgcgccagactattggtttgatagaggcggggaaatacaatcccagtctctcgctctgccagtccatttgcagatgtttagggaaaaccctagaccaactattttgggaggaagaagatgaaaaatag

SEQ ID NO: 821 - DNA, 489 bp, Streptococcus pneumoniae
atgaaaaatagattttattattatcaattactagacgaaagagaagaacaactgttcaataaagcgggctctgaaagtttctatatctgcatcgctttgtcgctcctatcttatatcatttcagtattagcaccaagcctttttaattctaatatgctgctaatcgttatcatcatagggacattttactttttcaatcgtgcccgttatctgggagtgacctactatagtcgttttcattttacgattttgggttgttttttcctaaccttggctattacggctcttttgatgttgcagaattatcaattcaacatagaaatttatcagcacaatcctttgaattttaaatacctgtctgcttgggtcattacttatgtcatttaccttccgtgggtctttattggcaatcttggtcttaagagctatggcgaatgggctcagaaaaaatttgaacaagatatggatgaattggagagtggagaatag

SEQ ID NO: 822 - DNA, 1461 bp, Streptococcus pneumoniae
atgtatccagatgatagtttgacattgcacacggacttgtaccagatcaacatgatgcaggtttactttgaccaagggattcacaataagaaggcggtctttgaggtgtatttccgccaacagccttttaagaacggctatgcggtttttgcaggtttggaaagaattgtgaactatcttgaagacttgcgtttttcagatagtgatatagcctatttggagtcgcttggttatcatggggcgttcttggattaccttcgcaatttcaagttggagttgaccgttcgttctgcccaagaaggggatttggtttttgctaatgaaccgattgtgcaggtggaaggacctctagcccaatgtcagttggtcgaaacggctcttttgaacatcgtcaactaccagaccttggtggcgacgaaggcagctcgtattcgttcggttatcgaagatgaacccttgatggagtttgggacacgtcgggctcaagaaatggatgcggccatctggggaacacgcgcagcggtgattggtggcgccaatggaaccagcaacgtgcgtgcgggtaagctctttgacattcctgttttgggaacccatgcccatgccttggtacaggtttatggcaatgactatgaggctttcaaggcttacgctgcgacccacaaaaattgtgtctttcttgtggatacctatgatacccttcgcatcggtgtaccagctgccattcaggtggcgcgtgagctgggtgatcagattaactttatgggtgtgcggattgactctggggatattgcctacatttctaagaaagtccgtcagcaactggacgaggctggatttacagaggctaagatttatgcttctaatgatttggacgaaaatactatcctcaatctcaagatgcaaaaggccaagattgatgtctggggtgtgggtaccaagctgattacagcctatgaccagccggctcttggggcggtttacaagattgttgcaatcgaagatgaaactggtcagatgcgcaatacgattaagctgtctaataatgcggaaaaagtgtcgacgccaggtaagaagcaggtgtggcgcattaccagtcgtgaaaaaggtaagtcagaaggtgattacatcacttatgatggtgtggatattagcgacatgacagaaatcaagatgttccatccgacctatacatacatcaagaagacggttcgtaattttgatgccgttcctctcttggtggatatcttcaaagaaggaatattagtttacaacttgcctagtttgactgacattcaggattatgcccgtaaagaatttgacaagttgtgggatgagtataagcgtgtgctcaatccgcagcactatccagtggatttggcgcgtgatgtatggcaagataagatggacttgattgataagatgcgcaaggaagcccttggtgaaggagaagaagaatga

SEQ ID NO: 823 - DNA, 825 bp, Streptococcus pneumoniae
atgagtttgcaagaaacgattatccaagagctgggtgtcaaaccagtgattgatgcccaggaagaaatccgtcgttctattgatttcttaaaaagatatctgaaaaaacatcccttcctaaaaacctttgtactagggatttctgggggacaagactcaaccttggcagggcgtttggcgcaattagctatggaagaactgcgagctgaaacgggagacgatagctacaaatttatcgctgtccgcctgccatacggagtgcaagctgatgaagcagatgctcaaaaagccctagccttcatccagccagatgtcagcttggttgtgaatatcaaggaatcagctgatgccatgacagctgcagttgaagcgacaggtagtcctgtttcagacttcaacaaggggaatatcaaggcacgttgccgtatgattgctcagtatgcccttgctggttcccatagcggagcggtcattggaacagaccacgccgcggaaaatatcacaggtttctttaccaagtttggtgacggcggtgcggatattctccctctttaccgcctcaataaacgccaaggaaaacagctcttgcagaaacttggcgcagagccagccctttatgaaaaaatcccaacggcagacctagaagaagataaaccaggcctagctgacgaagtcgcacttggagtcacctacgcagagattgacgactacctagaaggcaaaacaatcagcccagaaactcaagcgaccattgaaaactggtggcacaaaggccaacacaaacgccacttacccatcaccgtatttgatgacttttgggagtaa

SEQ ID NO: 824 - DNA, 198 bp, Streptococcus pneumoniae
aaggcaaaacaatcagcccagaaactcaagcgaccattgaaaactggtggcacaaaggccaacacaaacgccacttacccatcaccgtatttgatgacttttgggagtaaaaaggtccgggggacctttttagcttcttgccctgaaattaaaaagcaagaaaaacctccactggaggttttcagcctctcatcttga

SEQ ID NO: 825 - DNA, 552 bp, Streptococcus pneumoniae
atgaaatctattggtacgcaaatattacagacagaacgtttgattttaagaagatttgtggagagtgatgcagaagccatgtttcaaaattgggcttcatccgctgagaatctgacctatgttacctggaatccccatcctgatgtcgaaatcactcgaaactcgattcgcaattgggttgcttcctatactaatctcaactattacaaatgggccatttgtctaaaagaaaacccagagcaagtgataggagatatcagcatcgttaagatagacgaggctgatttaagctgtgaaatcggctatgtgctaggcaaggcttactggggacatggtatgatgacagaggccttgaaagctgtcttggacttttgttttactcaagcaggttttcaaaaggtcagagcacgttatgccagtctcaacccagcttcaggtcgtgtcatggaaaaggctggaatgtcctatctacaaaccattgttaatggtgtagagagaaaaggctatcttgcggatcttatttattatggtataagtagggaagaatgttga

SEQ ID NO: 826 - DNA, 750 bp, Streptococcus pneumoniae
actcggaaagatttttggttctgcggtaatcgggctaactttatttttaggaggaatctgaatacaagttttgttcatgctgctgatgggattcaatatgtcagagatgatactagagataaagaagagggaatagagtatgatgacgctgacaatggggatattattgtaaaagtagcgactaaacctaaggtagtaaccaagaaaatttcaagtacgcgaattcgttatgaaaaagatgaaacaaaagaccgtagtgaaaatcctgttacaattgatggagaggatggctatgtaactacgacaaggacctacgatgttaatccagagactggtcatgttaccgaacaggttactgttgatagaaaagaagccacggatacagttatcaaagttccagctaaaagcaaggttgaagaagtttttgttccatttgctactaaatatgaagcagacaatgacctttctgcaggacaggagcaagagattactctaggaaagaatgggaaaacagttacaacgataacttatgatgtagatggaaagagtggacaagtaactgagagtactttaagtcaaaaagaagactctcaaacaagagttgttaaaaaaggaaccaagccccaagttcttgtccaagaaattccaatcgaaacagaatatctcgatggcccaactcttgataaaagtcaagaagtagaagaagtaggagaaattggtaaattactcttactacaatctatactgtag

SEQ ID NO: 827 - DNA, 390 bp, Streptococcus pneumoniae
atggtaaaaagacgtataaggagagggacgagagaacctgaaaaagttgttgttcctgagcaatcatctattccttcgtatcctgtatctgttacatctaaccaaggaacagatgtagcagtagaaccagctaaagcagttgctccaacaacaggctggaaacaagaaaatggtatgtggtatttttataatactgatggttccatggcaacaggttgggtacaagttaatggttcatggtactatctcaacagcaacggttctatgaaagtcaatcaatggttccaagttggtggtaaatggtattatgtaaatgcatcgggtgagttagcggtcaatacaagtatagatggctatagagttaatgataatggtgaatgggtgcgttaa

SEQ ID NO: 828 - DNA, 1041 bp, Streptococcus pneumoniae
atgaacaaatatatgaatacagctgattttgatttccacttgccagaggaattgattgcccaaacgccccttgaaaaacgtgatgcctccaaactcctcatcgtcaaccgtgagacaggagaaatgcaagataaacatttccactctattattgatatgctggaacctggtgatgcccttgtcatgaacgacacccgagttctccctgcccgcctctatggtcaaaaagtggagacaggaggtcatgtggaacttctcctccttaagaacactagtggagacgagtgggaagttctggctaaacctgccaaacgcctcaaggtcggtactcgtatcagctttggtgatggccgcctcagcgctgtcgttacagaagaattgacccacgggggacgcattgtccgctttgaataccaaggaattttcctagaagtcttggaaagtctgggagaaatgcctctgccaccttatatccacgaaaaattagatgaccgtgaacgttatcaaaccgtctacgccaaggaaagcggctctgctgcagcaccgactgctggtcttcacttcaccaaagaactgctggcagaaatccaagctaagggtgttcatctagtctatctgactctccatgtcggactcggaacctttagacctgtttctgtggataatctggacgaacacgaaatgcactcagagttctatcaactttctgaggaagctgctgccacccttcgctctgtcaaagaaaatggtggtcgtgtcatcgctgtcggaaccacttctatccgtaccttggaaactattggttccaagtttgatgggcaaatccaagcagattctggttggaccaatatctttatcaaacctgggtatgagtggaaggtcgtggatgccttctcaaccaacttccatctgccaaaatcaactctggtcatgttggtttctgcctttgcaggccgtgaattagtcttagatgcctaccaccatgccatccaagaacactaccgcttcttcagttttggtgacgccatgtttatttattga

SEQ ID NO: 829 - DNA, 708 bp, Streptococcus pneumoniae
atgaaagttattaaagttgaaaaccaagttcaaggtggaaaagttgcttttgagattttgaaggaaaaattggctaatggagctcaaactctaggacttgcgacaggaagtagcccacttgaattttacaaggaaattgttgagagtgaccttgatttttcaaatctaaccagtgtcaaccttgatgagtatgtgggccttgatggggacaatccacagtcttatcgttacttcatgcaagaaaacttgttcaaccaaaaaccatttaaagaaagtttcttgcctcgtggtgttaaggacaatgctgaagctgaagttgaacgctacaaccaaattttggctgaccatccagttgacctccaaatcttgggaatcggtcgcaatgggcatatcggctttaatgagcctggtactccatttgacagtcaaacgcatctagtagaacttgaccagtctactatcgaagccaatgctcgcttctttgccaagattgaagacgtcccaacccaagctatttcaatggggattaaaaacattttggatgccaagtctattattctttttgcttatggtgagtcgaaagcagaagccattgccggaacagtatctggcccagtgactgagaacctacctgcaagtagcctccaaaatcaccctgatgtaaccatcatcgcagatgctgaagcgcttagcttactcgaaaaataa

SEQ ID NO: 830 - DNA, 201 bp, Streptococcus pneumoniae
ttgaacttgaagggagtgaaaaaaatgtctaaaacagtagtacgtaagaatgaatctcttgacgacgcacttcgccgtttcaaacgtgcggttactaaagctggtactcttcaagaaacacgcaaacgtgaattctatgaaaaaccttctgtaaaacgtaaacgtaaatcagaagtagctcgtaaacgtaaaaaattctaa

SEQ ID NO: 831 - DNA, 939 bp, Streptococcus pneumoniae
atgatgtcggttttagtaaaagaagtgattgaaaagcttagactagatattgtctatggtgaaccagaattgcttgaaaaggaaatcaatacagcggatattacgcgacctggtcttgaaatgacaggctattttgactactatacaccagagcggattcaacttttggggatgaaggagtggtcttatctgatcagcatgccttccaacagccgttatgaagttttgaaaaaaatgtttctacctgagacaccagcagtcattgttgcccgtggtttggtggttccagaggagatgttaaaggctgctagagaatgtaagattgctattttaaccagccgtgcagctaccagtcgtttatctggagagttatctagctatctggattctcgtttggcagaacgtaccagtgtgcacggtgtcttgatggatatttatgggatgggcgtcttgattcagggagatagtggaattggtaagagcgagacaggtcttgagcttgtcaaacgtggtcaccgtttggtagccgatgaccgtgtcgatatctttgccaaggatgagattactctctggggtgaaccagctgaaattttgaaacacttgattgaaattcgtggggttggtattatcgatgttatgagtctctacggtgcgagtgctgtcaaggattcttcacaggttcagcttgctgtctatttggaaaattacgatacgcataagacctttgatcgtcttggaaacaatgcagaggaacttgaagtttctggcgtagccattcctcgtattcgtattccagttaaaacaggtcgtaatatctctgttgtgattgaggcagctgccatgaattatcgtgccaaggaaatgggctttgatgctaccggttggttcgacgaccgactgccaagtctcatagctcgaaatgaggtgcaaaatgcttga

SEQ ID NO: 832 - DNA, 576 bp, Streptococcus pneumoniae
tactatagtcagaatttaggagagatttttgccatttggaatggtggtttggccatttacggtggtttgataactggggctcttgtgctctatatctttgctgaccgtaaactcatcaatacttgggattttctagatattgcggcgcctagcgttatgattgctcaaagtttggggcgttggggtaatttctttaaccaagaagcttatggtgcaacagtggataatctggattatctacctggctttatccgtgaccagatgtatattgaggggagctaccatcaaccgactttcctttatgagtctctatggaatctgcttggctttgccttgattctgatttttagacggaaatggaagagtctcagacgaggtcatatcacggccttttacttgatttggtatggtttcggtcgtatggtcatcgaaggtatgcgaacagatagtctcatgttcttcggccttcgagtgtcccaatggctgtcagttgtctttatcggtctcggtataatgatcgttatttatcaaaatcgaaagaaggccccttactatattacagaggaggaaaactaa

SEQ ID NO: 833 - DNA, 384 bp, Streptococcus pneumoniae
atgttagaagttgcatatattcttgttgccctagctgtgattgtctttttggtctatctgatcattactgtacaaaagcttggtcgtgtcatcgatgaaacagaaaagacgattaaaaccttgacttcagatgtggatgtgaccttgcatcacaccaatgagttgttggctaaggtcaatgtcttggcagatgatatcaatgtcaaggtggctacgattgatccactcttcagtgctgttgcagatttatctctatctgtttcagacctcaatgaccatgcgcgtgtcttgagcaagaaagcttcatcagctggttcaaaaacactcaagactggtgcaagtctgtcagctcttcgtcttgcaagtaaatttttcaaaaaataa

SEQ ID NO: 834 - DNA, 330 bp, Streptococcus pneumoniae
ttgcccttatcacttgttaaaaacaaggcaagagctgcacctgaaacggttcctaaaaggattgaggataatttacccataaggattctccttttttattttttgaaaaatttacttgcaagacgaagagctgacagacttgcaccagtcttgagtgtttttgaaccagctgatgaagctttcttgctcaagacacgcgcatggtcattgaggtctgaaacagatagagataaatctgcaacagcactgaagagtggatcaatcgtagccaccttgacattgatatcatctgccaagacattgaccttagccaacaactcattggtgtga

SEQ ID NO: 835 - DNA, 390 bp, Streptococcus pneumoniae
atgggtaaattatcctcaatccttttaggaaccgtttcaggtgcagctcttgccttgtttttaacaagtgataagggcaaacaagtttgcagtcaggctcaagattttctagatgatttgagagaagatccggagtatgccaaggagcaagtctgtgaaaaactgacagaagttaaggagcaggctacagattttgttctgaaaacaaaagaacaggttgagtcaggtgaaatcactgtggacagtatacttgctcaagctaaatcctatgcttttcaagcgacagaagcatcaaaaaatcaattaaataatctcaaggaacaatggcaagaaaaagccgaagctcttgatgactcagaagagattgtgattgatataacagaagaataa

SEQ ID NO: 836 - DNA, 1131 bp, Streptococcus pneumoniae
atgcagaaaaaaccaacgtcagcctatgtgcacatcccattttgtacccagatttgttattattgtgatttttcaaaggtcttcatcaaaaatcagccagtcgacagctatttagagcatctgctggaagagtttcgttcttatgatattgaaaagttgtcaaccctttatatcggtggtggaacaccgacagccctgtcggctccgcaactggaggtgttactgaatggcttgactaaaaacttggatttgtctgtcttggaagagttgaccattgaagccaatccaggcgatttggatgcggataagatagctgttttgaaaaattcggctgtcaatcgtgtttcgctaggtgtccagacctttgatgataagatgttgaaaaagattgggcgcagtcatttggagaaggatatttatgaaaatatcgatcgcctgaaactggctggttttgacaacatctccattgatttgatttatgctctgcctggtcagaccatggagcaagtaaaggaaaatgtggctaaagccattggattggatattccccacatgagtttgtatagtttgattttagaaaaccatacggtctttatgaaccggatgcgacgtgggaaattgcctctgcctaaggaggaactagaagcggagatgtttgagtacatcattgcagagctggagcgagcgggttttgagcattatgagatttctaatttctccaaacccggctttgaaagtcgtcataatctcatgtactgggacaatgctgaatactatggtattggtgcaggggcatctggttatgtcaatggagtacgctataaaaatcatggtcccattcgtcattatctcagtgcggttgaggaaggcaatgcttgtattacagaagatcacctgagtcaaaaggagcaaatggaagaagaaatgttcttgggactccgcaagaaatccggggtttccatggcgcgatttgaggaaaaatttggacagtcttttgctggactttatggagaaattgtcagagatttggttcaacaaggcctcatgcagattgagggtgaccacgttcgcatgacaaagagaggtctctttttgggagatactgtagcagaacgatttattttggagtag

SEQ ID NO: 837 - DNA, 498 bp, Streptococcus pneumoniae
atgatcctactccaaaataaatcgttctgctacagtatctcccaaaaagagacctctctttgtcatgcgaacgtggtcaccctcaatctgcatgaggccttgttgaaccaaatctctgacaatttctccataaagtccagcaaaagactgtccaaatttttcctcaaatcgcgccatggaaaccccggatttcttgcggagtcccaagaacatttcttcttccatttgctccttttgactcaggtgatcttctgtaatacaagcattgccttcctcaaccgcactgagataatgacgaatgggaccatgatttttatagcgtactccattgacataaccagatgcccctgcaccaataccatagtattcagcattgtcccagtacatgagattatgacgactttcaaagccgggtttggagaaattagaaatctcataatgctcaaaacccgctcgctccagctctgcaatgatgtactcaaacatctccgcttctag

SEQ ID NO: 838 - DNA, 738 bp, Streptococcus pneumoniae
atgggcttaacttatcaaatgaaaatgaaaattccttttgatatggctgatatgaacggtcatatcaaacttccagatgtgattttgctgtcactgcaagtttcagggatgcagtcgattgaactgggagttagtgataaggccattttggaagaatataatctggtctggattatcgtagaatatgatattgaggtgtttcgtttgcctcgttttgcggaagaaattaccatcgaaacggaagccttgagctacaatcgacttttttgctaccgtcgctttactatttataatgaagcggagcaggagctcatccacatgatggcgacctttgttctcatggaccgcgacagtcgaaaagtccatgttgttgaacctgagattgtggctccttaccagtctgattttgataaaaaacttatccgtggaccgaagtatgagtccttggaagaaccgatcagcaaggattaccatgttcgtttttacgacttggatatgaatggtcatgtcaataacagtaaatacttggactggatttttgaggtcatgggagcggattttttgacccactatattcccaagaaaatcaacctcaagtatgtcaaggaagttcgaccaggtggggtgattacatcggctgttgaacggactggactggaaagcaagcatgaaattacaagtgatggggttatcaatgcccaagcaatcattacttggcaagaaataaaaaaggcttag

SEQ ID NO: 839 - DNA, 609 bp, Streptococcus pneumoniae
  unsure (31): n at each above location is unknown.
ttggctcagaattttaatatcgatacgcccntatcgactgtctacacagcgactttggcaaccatcgactatatgaatgatttggggcttgaaaagaccgtctatgtcgtcggagaagcaggactcaaggaagccatcaaggcggctggttatgtggaagacaaggaaaaacctgcctacgtggtagttggtctggattggcaagtcgactatgaaaaatttgccacagcaactcttgctattcaaaagggtgcccattttatcggaaccaatcctgacctcaacatcccgacggaacgcggtcttttgccaggtgctggctcactgattacgctgcttgaagtagcgacacgagtgaagccggtttatatcggaaaaccaaatgccatcattatggacaaggcggttgagcacttaggtttggaacgtgaagagttaatcatggttggggacaattatttgactgatattcgggctgggattgacaatggcattccaacgctcttggtgacgacaggttttactaaggcagaagaagtagctggcctgccaatcgcaccgacacatgtggtttctagcattgcggagtgggattttgatgaaaactaa

SEQ ID NO: 840 - DNA, 651 bp, Streptococcus pneumoniae
atgtggtttctagcattgcggagtgggattttgatgaaaactaaattgatcttttggggctctatgctctttctcctctccctctccatccttctgaccatttatctggcttggattttctatcctatggagattcagtggctaaacttaacgaatcgagtctatctaaaaccagaaaccattcaatacaattttcatatcttgatgaattatctgaccaatccttttagtcaggtcttacagatgcctgattttcgttcgtcagcagctggtctgcaccatttcgcagtggtcaagaatctctttcatttggttcagctagtagctctagtgacactgccaagtttctatgtctttgtcaataggattgtgaaaaaggactttttgtctctttatcgaaaaagtctcctggctctagtagttttacctgtaatgattggacttgggggagttttgattggttttgaccaattctttactcttttccatcaaattctctttgtgggagatgatacctggctttttgatccagccaaggatcctgttattatgattttgccagagaccttctttcttcatgccttcctcctcttttttgccctctatgaaaacttctttggctatctgtgtctgaaaagtcgtaggaagtga

SEQ ID NO: 841 - DNA, 324 bp, Streptococcus pneumoniae
ttgacacaattggatttggttaattcactcttaacgatggttttaaacgatatatatatatatatttatatatgtaaattaaaaacatctttcctttcacttcctacgacttttcagacacagatagccaaagaagttttcatagagggcaaaaaagaggaggaaggcatgaagaaagaaggtctctggcaaaatcataataacaggatccttggctggatcaaaaagccaggtatcatctcccacaaagagaatttgatggaaaagagtaaagaattggtcaaaaccaatcaaaactcccccaagtccaatcattacaggtaa

SEQ ID NO: 842 - DNA, 402 bp, Streptococcus pneumoniae
atgattacactatttctatcaccgagctgtacatcatgtcgtaaggctaaggcctggttagaaaaacataaggttccctttgtggaacacaatattatgaccagtcctttaacaagaaaagaattgcaacacatcctttccttgaccgaaaatggtactgatgacatcatttcaactcgttcaaaaatttttcaaaaattgaatattgatgtagagagtatttcggtatcggaattgcttcatttgattgagcagtatcctagtcttttgcgtcgtccaattattattgatgccaagcgtatgcaaatcggttttaatgaagatgagattcgtgcttttctccctcgtagttatcgtaagcaagaactaaaagaagcaagaatgagagctggtattagttaa

SEQ ID NO: 843 - DNA, 279 bp, Streptococcus pneumoniae
atgaacaaacagtatagttacccactagatttgtcgtggagcactgaagaacttgtttcagtgctttctttttttaatgatgttgaagctgcctatgaaggcaaagtagaggctaaaaagttactggactcctataagggattcaaagcggtcgtgccaagcaagagcgaagagaaacgtttgggacgagaatttgaaacggttagtggctattcactttaccgagcagttcaggctgccaaagaaaaaggggaaggaaagatttctcttggaaagtaa

SEQ ID NO: 844 - DNA, 849 bp, Streptococcus pneumoniae
ttgaaacggttagtggctattcactttaccgagcagttcaggctgccaaagaaaaaggggaaggaaagatttctcttggaaagtaaatttgaatttgctaaagagcttgttaagaaagcaggtcagtacattcttgaccatatgcaggaagacttgcgtgttgaaaccaagtcctctccaacagatttggtgaccagactggacaaagaagttcaggaactcttggttggtgagattttgtcccgttatcctgaggataagatttgtgctgaagaaggttgtctgcgagcctcggttcaagagggcaaggtttgggtcattgatcccattgatggtaccaataattttgtagcccagcaggaagattttgctgttatgatggcttattttgaaaatggtcagggacagtttggtctgatttatgatgtggtcaaaggggattgttaccacggtggtggggaatttccagtttgtctaaatgataggtccctagctccttttaaaactaaaccacttggagattttctcattgcagggaatagtggtatgctggaaaccaatgaatgggggctggctgatttgagccgatcggttcttggtgttcgtgtctatggaagtgcggccattagttttgccaagattttgtcagggcgtttgttgacctatctcacttatctgcaaccatgggattatgccgcagctagtattttaggggaaagtctgggctatcgggttgtgaccctttttggtgaagctcctgattttcaaaccagacagccggtcatgatggtgcctcttgagatgcaggaggaaattcagtcctatatttacgaaaggaaaagaacttaa

SEQ ID NO: 845 - DNA, 339 bp, Streptococcus pneumoniae
  unsure (118),(191),(201),(223): n at each above location is unknown.
atgcaatttccagaaggatttgttgaaaaatataaagagatactaggagatgaggcaagagattttcttgcctcttttgaggaagaagcggtttcggcctttcgggtcaatcccttanaagaagaacaactttccttttctgatgccattactcaaaccccttggggccactatgggaaagtttcaggganatcgcctgancatgctacaggtttagtttatncgcaagaaactgctgctcaaatggtggctcaagtagcccaacccagtcctggtatgaaggtcttggactggctgctgcaccggggggcaaatcaactcaactggcagcctatctag

SEQ ID NO: 846 - DNA, 915 bp, Streptococcus pneumoniae
ttggttgaaaacatggagcgttttggagcgacaaatgtcgtggtgaccaatgaatctgccgaccgcttggtcaaggtctttaaaggctattttgacttaatcgttcttgatgccccttgctctggtgaaggaatgtttcgtaagcaacctgatgctatggactattggagcttagattatccgagtcaatgtgctagcttgcaaagagaaattctctgggaggatgcagtgaccatgttagctgaaggtggtcatctggtttattcgacctgtacctgggcacccgaggaaaacgaagagattgtcaattggttgctggaagagtatgattttgacttgttgccagtagagcatatcaatggaatggtagctggtattgacctgccagaaacggctcggatgtatcctcatcagtttaagggagagggtcagtttgttgcccatctacagtttaagggtaacaatccagctcctaaatttaaggcaagtaagagtaacctcagccgtgaacaagttgccttgtggcaggaatttgcccaaaaccatttgaaggtcaatctaccgggtatcttgcagacttttggagaccagctttatctcttgccagaacttttgccagatttagggaagctcaagattgctcgcaatggactgcatctgggcacttttaagaagaaacgctttgagcccagtttcgctcttggtttagccttgaaaccgagtcaggtcgaacagtcggttgaaattggccaagaagcgtttgtcaagtatgcggctggagaaatcgttcagctggcagaaagtctgccaaatggttggtaccaagttttggttaaaggcaatggcttgggctttgcaaaggttactggaaatgttttgaaaaattattttccaaaaggcctcagattcaaatga

SEQ ID NO: 847 - DNA, 228 bp, Streptococcus pneumoniae
gctatattactctttcctaacctccttttttcatatgtggataaaatctcttgtctatcccttcccccattgtcacccattatagtcatttcgtgtctctttttcccctttttaatgcaagggaaattactctccttagatgataatccaaaagctagaaaggtatctcaaacctctctactctcccagactagtttacaactaaaaggaaaagattctattttatga

SEQ ID NO: 848 - DNA, 168 bp, Streptococcus pneumoniae
ttgcgcagaaatttggtaagaattcatgcgtcaactcataaagaactacttaaaaaattcacagtattcataattattttcgaggagaaaaacagtgaaaaaaagaaaaaagcttgctctgtctcttatcgctttttggctgacggcttgtttagtaggctgtgctag

SEQ ID NO: 849 - DNA, 234 bp, Streptococcus pneumoniae
ttgaccgtttttccaacatggatcgtgccaaattcatctgccgctacttcaaccaagggttgcaaggcagttgagccaacagccgttatggattctccacgatcaatccagctagcacagcctactaaacaagccgtcagccaaaaagcgataagagacagagcaagcttttttctttttttcactgtttttctcctcgaaaataattatgaatactgtgaattttttaagtag

SEQ ID NO: 850 - DNA, 879 bp, Streptococcus pneumoniae
gtgaaaaaaagaaaaaagcttgctctgtctcttatcgctttttggctgacggcttgtttagtaggctgtgctagctggattgatcgtggagaatccataacggctgttggctcaactgccttgcaacccttggttgaagtagcggcagatgaatttggcacgatccatgttggaaaaacggtcaatgtccaagggggaggttctggtacaggcttgtcccaggttcagtctggggcagttgatataggaaactcagatgtatttgctgaggaaaaagacggaattgatgcttctgctcttgttgaccacaaggtcgcggtacgtggcttggctctgattgtcaataaggaggttgatgttgataacctaacgacagagcaacttcgtcaaatcttcataggtgaggtaaccaattggaaagaggttggtggtaaggacttacccatctctgttatcaatcgggcagccggctctggttctcgtgctacctttgatactgtcattatggaaggtcagtctgccatgcaaagtcaggagcaggattcaaatggagcggtaaaatcaatcgtatcaaaaagtccaggagctatctcttatttatctcttacctatatagatgattcggtcaaaagcatgaagttgaatggctatgacttaagtccagaaaatataagtagcaataattggcccttgtggtcttatgagcatatgtatacattggggcagcccaatgagttggctgcagaatttctcaattttgttctctcggatgagacccaagaagggattgtcaaaggattgaagtatattccgattaaggaaatgaaggttgaaaaagatgctgccggaactgtgacagtgttggaagggagacaataa

SEQ ID NO: 851 - DNA, 918 bp, Streptococcus pneumoniae
atgaatcaagaagaattagctaagaaaatgttgcttccatcaaagaattctcgtctggagaaattaggaaaaggtttgacctttgcctgtctttctttgatagtcatccttgtggccatgattttggttttcgtagcgcaaaaaggcttgtcgaccttctttgtcaatggtgtgaatatctttgactttcttttgggaggaacttggaatccttctagtaaagaatttggtgcccttcctatgattttgggttcctttatcgttaccattctctcagcccttatcgcaacaccctttgctattggtgcagcagtttttatgaccgaagtatcaccaaaaggggcgaagattttgcaaccagctattgaactcctggttgggattccttcagtagtgtatggatttattggcttgcaagtcgtcgttccctttgttcgcagtgtctttggtgggactggttttgggattttgtcagggatttccgtcctctttgtcatgattttgccgaccgtaacctttatgacaacggatagcttgcgtgcggttcctcgttattatcgtgaagccagtttcgctatgggagccactcgctggcagactatctggcgtgtgatcttgaaggcggcccgttctggtattttcactgcagtggtctttgggatggcgcgtgcctttggtgaggctttagctatccagatggttgtcggaaactcagctgttatcccaacttccttgaccacaccagctgcaactttaacttctatattaactatgggaattgggaacactgtcatgggaactgtaaataataatgttctctggtcactggccttggtactgctcttgatgagtttagtttttaacagtgtgattaaattgattacgaaagaaagaggaaagaaaaattatgcgcgctaa

SEQ ID NO: 852 - DNA, 885 bp, Streptococcus pneumoniae
atgcgcgctaagaaattagataaacttgcaacagctgtcctctatacgattgctagcatcattgtgacaatcttggcttccttgattctctatatcttggttcggggcttgccccatatctcttggtctttcttgactggaaggtcttctgcttttcaagcaggtggtgggattggcattcagctttacaattcctttttcctattggtcattaccttgattatttctgtacctctttctatgggagctgggatttacttggctgaatatgctaaaaaaggtcctgttaccaactttgtgcggacttgtattgaaatcttgtcctctttaccatcagtggtggtgggtctctttggttacttgatctttgtagtccagtttgagtatggattttcaatcatttcaggtgccttggccttgacagtctttaacttgcctcagatgacgcgtaatgtagaggatagtttgaaacacgttcaccatacccaacgtgaggctggtctggctcttgggatttctcgctgggagacagtggttcatgttgttattccagaagcgcttccaggtattgtaacgggtgtcgtcttggcatctggtcgtatctttggcgaagctgcagctctgatctatacagcagggcaatcggcgccagctcttgactggtctaactggaatatcctcagtgtgactagccccatctctatcttccgtcaagcagaaaccttggctgtccatatctggaaagtcaatagtgaaggcactattccagatggaaccattgtatcagcaggttctgccgctgtgctcctgatctttatcctgatttttaactttggagctcgtaagttcggaagctatctacacaagaaattaaccgctgcctaa

SEQ ID NO: 853 - DNA, 804 bp, Streptococcus pneumoniae
atgtcaacatataactgggatgagaagcatatccttacctttcctgaagaaaaagtagccctttctactaaggatgtccatgtttactatggtaaaaatgaatccattaaggggattgatatgcaatttgaaagaaataaaattacagctttgattggtccgtcgggatcggggaaatctacctacttacgcagtctcaatcgcatgaatgataccattgatattgctaaagtaactgggcagattctctatcgtggaattgatgtcaaccgtccagaaatcaacgtttatgaaatgcgtaaacacattggaatggtttttcaacgccccaatccatttgctaagtcaatttaccgtaatattacctttgcgcatgaacgtgctggagttaaggataagcaagtcctagatgaaatcgtagaaacctcccttcgtcaggctgccctctgggatcaggttaaagacgatctccacaagtcagccttgaccttatcaggtggtcagcaacaacgtctctgtatcgctcgtgccatctctgttaagccagatatcctcttaatggatgagccagcctcagccttggatccgattgcgaccatgcaactagaagagaccatgtttgagctcaagaaaaactttaccatcatcattgtaacgcataatatgcagcaggctgctcgtgcaagtgactatacaggcttcttttacttgggtgatttgattgagtatgacaagactgcaactattttccaaaatgccaagctacagtccaccaatgactatgtatctggtcactttggttag

SEQ ID NO: 854 - DNA, 759 bp, Streptococcus pneumoniae
atgacagatgcgattttacaggtatcagacctgtccgtttattataataaaaagaaggctttgaatagtgtttccctatctttccaacctaaggaaattacagccttgattggtccatctggatcagggaagtcaaccctcctcaagtctctcaaccgcatgggagatctcaatccagaggtgaccacaactggatccgtggtgtacaatggccacaacatctacagtccgcgtacagatacggttgaattacgtaaggaaatcggaatggttttccaacaacctaatcctttccctatgactatctatgagaatgttgtctacgggcttcgtatcaatggaattaaggataagcaggttctggatgaagccgtagaaaaagccttgcaaggtgcctctatctgggatgaggtcaaggatcgtctatatgattcagctattggattgtcaggtggtcaacagcagcgtgtctgcgtggcccgtgtcttggcaactagtcctaaaatcatcctcttggatgagccaacttcggctttggatccgatttcagctggtaaaattgaggaaaccttgtatggtctaaaagacaagtacaccatgcttctggtaacccgttccatgcagcaagcttcacgtatctctgataagacaggatttttcctagatggagatttgattgaatttaatgataccaagcagatgttccttgatccccaacacaaggaaacggaagactatattacaggaaaatttggataa

SEQ ID NO: 855 - DNA, 654 bp, Streptococcus pneumoniae
atgttacgatctcaatttgaagaagatttagagaaattacataaccagttctacgctatgggacaagaagtgctctcacaaatcaatcgtacggtacgtgcttttgtcacgcatgaccgtgacctggcaaaagaggtcatcgaagatgatgcagaagtaaatgaatacgaagtgaaactggaaaagaaatcatttgaaatgatcgcactccaacaaccagtctctcaagatttgcgtacagtcttgactgtccttaaggctgtatcagatgtggagcgtatgggggatcacgctgtagccattgcccaggcaaccatccgtatgaagggggaagaacgcatcccagctgtagaggaagaaattaaaaaaatgggacgtgaagttaaaagcgttgttgaagcagcacttgatctttatcttaatggttctgttgacgacgcataccgggtggcctccatggatgagcaaattaaccactattttgaaactatccgtgaccttgcgactgaagagattaagaaaaatccagaagccattgttacgggtcgtgattatttccaagttatttcctacttggagcgtatcggtgactatgctaaaaatatctgtgaatgggttgtctactttgaaacaggtaagattgtcgaactataa

SEQ ID NO: 856 - DNA, 816 bp, Streptococcus pneumoniae
atgaaatcaaaaaaatggatatttgttttatgtaattttcttgcaagtttcttcttagtagcttgccagtcaggttctaatggttctcagtcagctgttgaggccattaagcaaaaggggaaattagttgtggcaaccagtcctgactatgcaccctttgaatttcaatcattggttgatggaaagaaccaggtagtcggtgcagacatcgacatggctcaggctatcgctgatgaacttggggttaagttggaaatctcaagcatgagttttgacaatgttttgaccagtcttcaaactggtaaggctgacctagcagttgcaggaattagtgctactgacgagagaaaagaagtctttgatttttcaatcccatactatgaaaacaagattagtttcttggttcgtaaggctgatgtggaaaaatacaaggatttaactagcctagaaagtgctaatattgcagcccaaaaagggactgttccagaatcaatggtcaaggaacaattgccaaaagctcaattaacttccctaactaatatgggtgaagcagtcaatgaattgcaggctggaaaagtagatgctgttcatatggatgagcctgttgcacttagttatgctgctaaaaacgctggcttagctgtcgcaactgtcagcttgaagatgaaggacggcgacgccaatgccgttgctcttagaaaaaatagtgatgatttgaaagaagtggtagacaaggtcatccaaaaacttaaggatgaaggaatttaccaaagctatcttgaaaaagcagcaagtctaactgaagttgaagaataa

SEQ ID NO: 857 - DNA, 1272 bp, Streptococcus pneumoniae
atgaagaaacaaagcaagtacaaagaggtcgtttcctatctgaaaaatggtatcgagtctggacgatttccgacgggtagtcgcctgccttctatccgtcaactgagccttgactttcactgcagcaaggacaccattcaacgagccctgctggaattacggcacgaacaatacctctatgccaagcctcagagtggctactatgtattagaacaagggcaacatcaagacctagaaatcgaggttaccgacgaacatgccagtgcctatgacgatttccgactctgtgtcaatgaaaccttgattggccgagaaaactacctcttcaactactatgacaatcaagaaggattagaagacctaagacagtccattcacaaactcctctttgagcaagctctctactgcaaggctaaccaactagtactgacttctggaacccaacaagccttatttatcctctctcaaatatcctttcctagacaagccaaggaaatcttggtggaacagccaacctaccatcggatgaatcgcctcttgattgcacaggggctggactatcaaacgattgaacgaggcattgatgggattgacttggaggagctggaaggccacttcaaaacaggaaaaattaaatttttctacaccattccccgatttcactatcctctgggacattcctattctgagcaagacaaacgatctattcttaacttagctgccaagtatgatgtctatatcgtagaggacgattatctgggtgatttggactccaagaagggccaaaccttccactatcttgatacagaggagcatgtcatttatatcaagtccttctcgaccagcctttttcctgcccttcgtattacagcactcattcttccaaatgctatcaaagaagcatttgtggcctacaaaaatatcctagactacgacagcaacctcattatgcaaaaggccctgtcactctatattgacagtcaattgtttgaaaaaaatcgtttggctcgcttgaccaatcatgaatcttaccaaaaacaaatcgaggaaaggataactaaaacaccttgtccccttcctcattatcccctacacgatggtttattgctagacctgagacagtatcctaaaatcgccagtctcaaacacagtcaactgggcttggacttctttgaagaggcctatttaagcacctgtccttatcaatttgccaaggtgtccctagacaatctggaaaatgttttaaactatttaaaagcagaattggaatga

SEQ ID NO: 858 - DNA, 171 bp, Streptococcus pneumoniae
ttgcccctagatgtgaacgagagaaacgttctagacattgccaagaaggaaaaaaaagggtacaatgtaacaaaatcaagggaggtctggaatgaagaaacaaagcaagtacaaagaggtcgtttcctatctgaaaaatggtatcgagtctggacgatttccgacgggtag

SEQ ID NO: 859 - DNA, 513 bp, Streptococcus pneumoniae
atggataagaacgtgcaggaaccagtgaaattatttcaatacaatactcttggagccttgatggctggcctttatggtggtactatgacagtaggagaattgctagaacatggtgaccttggtttgggaaccttggattccattgatggggaattgattgtcttggatggcaaggcttatcaggccaaagggtcaggagaccagccagaaattgtggaagtgtcaccagatgcccttattccttacgctgcagtggtaccgcatcaggcagaggtcattttccgccagcgctttgagatgacagacaaggaattgaaagaacgaattgagtcttattatgatggggaaaatcttttccgctctatcaagattcggggggaatttttacatatgcatgtgcgtatgattcctaagtcaacacccgataccaagtttgctgatgtcgcaacccatcaaccggaatatagtcgtgacaatgttgcggggactattgttggtttcctggacgcctga

SEQ ID NO: 860 - DNA, 201 bp, Streptococcus pneumoniae
gtggcaggctaccatctgcacttcatatcaaatgattttaccttcgggggacatgtcatgattttgttcatcaaggaaggcattatcgagttgggagcagttgaccagtgggaccaacgttttccagtccaagaccgtcaatacttgtttgttaagttcaatgttgccgagatgaaaaaagatattgaaaaggcagaatag

SEQ ID NO: 861 - DNA, 729 bp, Streptococcus pneumoniae
atgttgctgttgctagcttttctgataggaagcatttggtttgccaaaaagaaataccagattaatctagctgtcttgggcttgggtgcagtcgctttctttgtctcttcgcagattttggaaaaactggtgcatatcttgattttgcatcctcaaaaagacggtagtattgccctcttgcaagatcatccgcttatctatattatctatggcctagccatggcagcattttttgaggaaacggctcgtcttgttttcttcaaatggttggagaaaaagagaagtttggaaaaggcagatgccttggcctatggcctagggcatggtggcttggagttgatttttctaggccttactagtttactcaatctttacatcgttctttcgacagttcaaactcagaatccacaggttatgcaattactgtctgaaaatatgttaaaaaccattcagtcactttcggtctggcagatttatttgcttggttttgagcgaatcttggcgcttggtttccaattacttttgacagtttgggtttaccaagctgttcgccagaagaaatggatttatctcctagctgcctatggcttgcatgccttctttgatctggcaccatctctttcccaagtaggctggttgacaaatccagtcttggttgaagtgattctagcactggagctcgttctggtcgcctatggaaccaaggaaatcttttgtaaaaaatcataa

SEQ ID NO: 862 - DNA, 906 bp, Streptococcus pneumoniae
atgtctgtaagagaaaaaatgcttgaaatcttagaaggaattgatatccgttttaaggaacccttgcatagctatagttatacaaaagtaggtggagaggctgattatttggtctttccacgaaatcgttttgagttggcgcgccttgtgaaatttgccaaccaagaaaatatcccttggatggttcttggcaatgcaagcaatatcatcgttcgtgatggtgggattcgtggatttgtcatcttgtgtgacaagctcaataacgtttctgttgatggctataccattgaagcagaagctggggctaacttgattgaaacaactcgcattgccctccgtcatagtttaactggctttgagtttgcttgtggtattccaggaagcgttggcggtgctgtctttatgaatgcgggtgcctatggtggcgagattgctcacatcttgcagtcttgtaaggtcttgaccaaggatggagaaatcgaaaccctgtctgctaaagacttggcttttggttaccgccattcagctattcaggagtctggtgcagttgtcttgtcagttaaatttgccctagctccaggaacccatcaggttatcaagcaggaaatggaccgcttgacgcacctacgtgaactcaagcaacctttggaatacccatcttgtggttcggtctttaagcgtccagtcgggcattttgcaggtcagttaatttcagaagctggcttgaaaggctatcgtatcggtggcgtagaagtgtcagaaaagcatgcaggatttatgatcaatgtcgcagatggaacggccaaagactacgaggacttgatccaatcggttatcgaaaaagtcaaggaacactcaggtattacgcttgaaagagaagtccggatcttgggtgaaagcaagtag

SEQ ID NO: 863 - DNA, 1137 bp, Streptococcus pneumoniae
ttgaaaaaaccaattatcgaattcaaaaacgtctctaaagtttttgaagacagcaacaccaaggttctcaaagacatcaactttgagttggaagaagggaaattctacacccttctaggtgcatctggttcggggaaatcaactatcctaaacattattgcaggtttactggatgcgacgacaggagatatcatgctagacggtgttcgtatcaatgatattccaaccaacaagcgcgacgtacataccgtcttccaatcctatgccttgttcccacatatgaatgtgtttgaaaatgttgcctttccacttcgcttgcgtaaaattgataagaaagaaatcgagcagcgtgtagcggaagttctcaagatggttcagttggaaggttatgaaaaacgttccatccgcaaactttctggaggacaacgtcagcgtgtggccatcgcccgtgctatcatcaaccaaccccgtgtggtcttgttggacgagcctttatcagcgctggacttgaaattgagaacagacatgcagtacgaattgcgtgaattacaacaacgattgggcattacctttgtctttgtcactcacgatcaggaagaagctcttgccatgagtgactggattttcgttatgaatgatggcgagattgtccagtctggaacccctgtggacatctacgatgagccaatcaaccactttgttgccacctttatcggggagtcaaacatcttgccaggtagcatgattgaggactacttggtcgaatttaacggcaaacgctttgaagcggttgatggtgggatgaagccaaatgaacctgttgaggtcgttattcgtccagaggacttgcgcattacccttcctgaagaaggcaagctccaagttaaggtcgatacccagctcttccgtggggtgcattatgaaattatcgcctatgacgaacttggaaatgaatggatgatccactcaacccgtaaggccatcgtgggtgaggaaatcggtctggactttgaaccagaagacatccacatcatgcgtctcaatgaaaccgaagaagagttcgatgctcgtattgaggagtacgtagaaatcgaagagcaagaagcaggtttgatcaatgcacactcgaggagttaa

SEQ ID NO: 864 - DNA, 327 bp, Streptococcus pneumoniae
atgaagaaaacaagctctaaactctttgtagtgccctacatgctttggattgccctctttgtattggcacccttggtcttgattttcggacaatcctttttcaacattgaaggccagtttagtttagaaaattataaatcttactttgcgtcacaacacttgacctacctcataaatgagtttcaactcagtgctttatgcagggattgtgacctttgtgacctgtcttatcagctatccaacagccctctttttgacccgtctcaagcaccgtcaactctggctcatgctgattatccttcctacctggatcaatttgctccttaa

SEQ ID NO: 865 - DNA, 633 bp, Streptococcus pneumoniae
atgagtttcaactcagtgctttatgcagggattgtgacctttgtgacctgtcttatcagctatccaacagccctctttttgacccgtctcaagcaccgtcaactctggctcatgctgattatccttcctacctggatcaatttgctccttaaagcctatgcttttatcgggatttttggtcaaaatggctctattaaccaattcttggaatttatcggaattggttcacaacagttgctttttaccgatttttcctttatctttgtcgcaagctacatcgagctcccctttatgattttgccgattttcaatgtcttagacgacatggataataatctcatcaatgctagttatgaccttggtgcaactaagtgggagaccttccgtcatgtcatcttccctctatctatgaacggtgtgcgaagtggggttcagtcggtctttatcccaagtttgagtctcttcatgctgacccgtttgattggtgggaaccgcgttatcaccttggggacggctattgagcagaattttctaaccaatgacaactatggtatgggttcaactatcggtgtgattctcatcctgaccatgttcatcaccatgtgggtgactaaggaaaggagagaacgatga

SEQ ID NO: 866 - DNA, 774 bp, Streptococcus pneumoniae
atgaaaaaatttgccaacctttatctgggactggtctttctggtcctctacctgcctatcttttacttgattggctatgcctttaatgctggtgatgatatgaatagctttacaggttttagctggactcactttgaaaccatgtttggagatgggagactcatgctgattttggctcagacatttttcttggccttcctatcagccttgatagcgaccattatcgggacttttggtgccatttacatctaccagtctcgtaagaaataccaagaagcctttctatcactcaataatatcctcatggttgcgcctgacgttatgattggtgctagcttcttgattctctttacccaactcaagttttcacttggctttttgaccgttctatctagtcacgtggccttctccattcctatcgtggtcttgatggtcttgcctcgactcaaggaaatgaatggcgacatgattcatgcggcctatgacttgggagctagtcaatttcagatgttcaaggaaatcatgcttccttacctgactccgtctatcattactggttatttcatggccttcacctattcgttagatgactttgccgtgaccttctttgtaacaggaaatggcttttcaaccctatcagtcgagatttactctcgtgctcgcaaggggatttccttagaaatcaatgccctgtctgctctagtctttctctttagtattatcctagttgtaggttattactttatctctcgtgagaaggaggagcaagcatga

SEQ ID NO: 867 - DNA, 678 bp, Streptococcus pneumoniae
atgaaaaaaatctattcatttttagcaggaattgcagcgattatccttgtcttgtggggaattgcgactcatttagatagtaaaatcaatagtcgagatagtcaaaaattggttatctataactggggagactatatcgatcctgaactcttgactcagtttacagaagaaacaggaattcaagttcagtacgagacttttgactccaacgaagccatgtacactaagataaagcagggtggaacgacctacgatattgccattccaagtgaatacatgattaacaagatgaaggacgaagacctcttggttccgcttgattattcaaaaattgaaggaatcgaaaatatcggaccagagtttctcaaccagtcctttgacccaggtaataaattctccatcccttacttctggggaaccttaggaattgtctacaacgaaaccatggtagatgaagcgcctgagcattgggatgacctttggaagccggagtataagaattctatcatgctctttgatggggcgcgtgaggtgctgggactaggactcaattccctcggctacagctcaacctccaaggatctgcagcagttggaagagacagtggataagctctacacactgactccaaatatcaaggctatcgttgcggacgagatgaagggctatatgatttag

SEQ ID NO: 868 - DNA, 375 bp, Streptococcus pneumoniae
gtgaccttctctggtgaagccagccaaatgttagaaaaaaatgaaaatctacgttatgtggtaccgacagaggccagcaatctttggtgtgacaatatggtcattcccaaaacagttaaaaaccaaaactcagcctatgcctttatcaactttatgttgaaacctgaaaatgctctccaaaatgcggagtatgtcggctactcaacaccaaacctaccagcgaaggaattgctcccagaggaaacaaaggaagataaggccttctatcccgatgttgaaaccatgaaacacctagaagtttatgagaaatttgaccataaatggacagggaaatatagcgacctcttcctacagtttaaaatgtatcggaagtag

SEQ ID NO: 869 - DNA, 240 bp, Streptococcus pneumoniae
atgaaaatgtctacttttttcaaaaaaagtttctggccaacctttatgattgttaaccaaactgttatactattccatctaaaggatggcttggatcgacaatacctaacaactgagtccatatattgggtgataggcacctttatatttggaaatattctagtagctgtgtttagtaatatgaaaatttgggataaaaagaaaaacggcagtaagaaaaaatatatcctgaaaaagtaa

SEQ ID NO: 870 - DNA, 219 bp, Streptococcus pneumoniae
cttcctagcttagatggctcgcagcaccgccatttctctggactaagacaagtgaaaattaattctcaactttcttattataacgtttttttaagcttgcgtcaactggaaatgatctccgttgaattagaccaattccctacatctctgattactttttcaggatatattttttcttactgccgtttttctttttatcccaaattttcatattactaa

SEQ ID NO: 871 - DNA, 489 bp, Streptococcus pneumoniae
ttgatgaaaatatttcttgtcaaacaaaagtttcgtcttggaggcgaacgcttcgctatcaaggatgacaggggagaaattgcctatcaggtggagggatcattttttaagattcccaaaacttttaccatctatgatgcggctggtgaacaagtcagtcagatcagtaaagaaatcttgaccttgcttcctcgttttgagattcagcttcgggatggctcgagttttgtcattcgtaagaagttgaccttttggcgagataagtatgagtttgataatctaggtcttcgtatcgagggcaatatctgggatttgaatttcaaattgctggatgatcgcgatcagttgattgcggaaattaagaaggaactcttccatctgacctctacctataccgtaacggttcttgaagacgcttatgcagacctagtcatttccctctgtgtcgcgattgactatgtggaaatgctggaaagccaatcacattaa

SEQ ID NO: 872 - DNA, 267 bp, Streptococcus pneumoniae
atgaaacaactatctagtgcacaagtacgccaaatgtggcttgatttctgggcgaccaaaggtcactcagtaaaaccatcagtaagtttggttcctgtaaatgacccaactcttttgtggatcaactctggggtagcaacccttaagaaatactttgacgggaccattatccctgaaaatccacgtattaccaatgcccaaaaggctatccgtactaacgacatcgaaaacgtagggcaagactgcgcgtcaccataccatgtttga

SEQ ID NO: 873 - DNA, 2361 bp, Streptococcus pneumoniae
atgtttgaaatgttggggaacttctctatcggggattacttccgtgacgaagctatcacttgggcttatgagcttttgacaagccctgaatggtttgatttccctgctgaaaaactttacatgacctactatccagacgataaagattcttacaaccgctggattgaagtgggagtggatccaagtcacttgattccaattgaggacaacttctgggaaatcggtgcgggaccttctggaccagatacagaaatcttctttgaccgtggggaagcctttgacccagaaaatatcggtcttcgcctgcttgcagaagatattgaaaacgaccgttatattgaaatctggaacatcgttttgtcacaatttaacgcagaccctgctgttcctcgtagcgaatacaaggaattgccacataagaacattgatacgggcgctggtttggagcgtttggtggccgttatccaaggggctaagaccaactttgaaacggacctcttcatgccgattatccgtgaagtcgagaaattgtctggtaaggtttatgaccaagatggcgacaacatgagcttcaaggttatcgcagaccacattcgttctctttcatttgctatcggtgatggtgcccttccaggaaatgaaggtcgtggttatgttcttcgtcgtcttctccgtcgtgcttctatgcatggtcaaaaattgggtatcaacgagcctttcctttacaaactcgttccaactgttggaaaaatcatggaaagctactacccagaagtgcttgagaaacgtgactttattgagaaaatcgttaagagcgaagaagaatcatttgcccgtacccttcactcaggtcaacactttgcccaaggaattgtggcagacttgaaagaaaaaggtcaatctgtcattgctggtcaagatgtctttaaactctatgatacatacggattcccagttgaattgactgaagaaattgctgaagaagctggtatgactgtagaccgtgaaggttttgaagcagccatgaaagaacagcaagaacgcgcgcgtgcgtcagctgtcaagggtggctcaatgggtatgcaaaatgaaactcttcaaaacatcactgtagaaagtgtcttcaactacaatgctagccaattgtcttctaaattggtagctatcgttgctgacaatgcagaagtaggagctgtttcagaaggaactgcctctcttatctttgcggaaacgtcattttatgctgaaatgggtggacaggtagctgactacggacaaatcttggatgagtcaggtaaggttgtggctactgtgaccaatgttcagaaagccccaaatggtcaagcccttcatacagttgaagtccttgcaccgcttgccttgaaccaagaatataccttggcaattgatagcaatcgccgtcaccgtgtcatgaaaaaccacactgcgactcatttgcttcacgctgcccttcacaatatccttggaaaccacgcaacacaggcaggatctcttaacgaagttgaattccttcgctttgactttacccacttccaagcagtaactgctgaggaacttcgtgcgattgaacagcaagttaacgagaaaatttgggaagcacttgaagtgaagacagttgaaacggatattgacactgctaaagaaatgggagcgatggccctctttggtgagaaatacggcaaggaagttcgtgtcgtgactatcggtgactactctattgaactttgtggtggtactcatgttggcaacacttctgagattggtctcttcaaaattgtcaaagaagaaggaatcggttcaggaactcgccgtatcttggcagtgactggtaaggaagcctttgaagcctatcgtgaacaagaggatgctcttaaagctgtcgcagcaaccttgaaagcacctcaagtcaaggaagtacctcacaaggtagaaggacttcaagaacaacttcgtcaacttcaaaaagaaaatgctgagttgaaagaaaaagccgcagctgcagccgcaggtgatatcttcaaagatgttaaggaagtcaacggtcatcgttacattgctagtcaagtgtctgtatccgatgccggtgcccttcgtacttttgcagataactggaaacaaaaagactactctgatcttcttgtcctagttgccgctatcggtgacaaagtcaatgtccttgtagcaagcaagacaaaagaccttcatgcaggaaaccttgtcaaagaattagcaccaatcatcgatggacgtggtggtggtaaaccagacatggccatggcaggaggaagcaaccaagctaagatccaagaattgttggatgcagtagcaggtaaattgtaa

SEQ ID NO: 874 - DNA, 1455 bp, Streptococcus pneumoniae
atgcaaaatcaaacactcatgcaatactttgaatggtatctgccccacgacggtcaacactggacgcgtctggctgaaaatgctccacacctagctcatctggggatcagtcacgtctggatgccaccagccttcaaggcaaccaacgaaaaagatgtcggctatggggtctatgacttatttgacttaggagagttcaaccaaaaagggactgtccgcaccaagtatggtttcaaagaagactatcttcaagccattcaagcccttaaagcgcagggaattcaacctatggccgatgtagttctcaaccacaaggctgctgctgatcacagggaagcctttcaggttattgaagtggatcctgtagaccgtacagttgaacttggagaacccttcaccatcaatggctggactagttttaccttcgatggtcgccaagatacctacaatgacttccactggcactggtaccacttcacaggtacagactatgatgccaaacgccgtaaatccgggatttacctaatccaaggagacaacaagggctgggctaacgaggaattggtcgataacgaaaacggaaactacgactacctcatgtatgccgacctagactttaaacatcctgaagtcatccaaaacatctatgactgggctgattggttcatggaaacgactggtgtagctggtttccgtttggatgccgttaagcatattgactctttctttatgcgcaacttcatccgcgatatgaaggaaaaatacggtgacgatttctatgtttttggtgaattttggaacccagacaaggaagccaatctggactatctcgaaaaaacggaagaacactttgaccttgtcgatgttcgtctccaccagaatctctttgaagccagtcaagctggcgcaaactatgaccttcgtggcattttcacagatagcctggttgaactcaagcctgacaaggctgtgacttttgtcgacaaccacgatacccaacgaggacaagcccttgagtctaccgttgaagaatggttcaagccagcagcctatgccctcattttgttacgccaagacggccttccatgtgtcttttacggagactactatgggatttcaggccagtatgctcaagaagatttcaaagaaatccttgaccgcctcctagccatccgaaaagacttggcctatggagaacaaaatgactactttgaccatgctaactgtatcggttgggtacgttcaggtgctgaaaatcaatccccaatcgcagtccttatctcaaatgaccaagaaaacagcaagtcaatgtttgtcggtcaagaatggactaatcaaacctttgtagatttacttggtaaccaccaaggtcaagttacaattgatgaggaaggttatggacaattccctgtctcagctagatccgtaagtgtctgggcagtcaataccatctaa

SEQ ID NO: 875 - DNA, 192 bp, Streptococcus pneumoniae
atgaccaatcaagcccataatctctccattttcaatctgcaaattgagattactcaaggcctctttatcaccatacaacttactaacattttgaaattcaatcatgggacaactcctatctttatctgtattatatatcgctatactagcactttgatacaaaaaaatcaatactttattttaagtagttaa

SEQ ID NO: 876 - DNA, 750 bp, Streptococcus pneumoniae
  unsure (644): n at each above location is unknown.
atgattgaatttcaaaatgttagtaagttgtatggtgataaagaggccttgagtaatctcaatttgcagattgaaaatggagagattatgggcttgattggtcataatggggctggaaaatcgaccactataaaatccctagtcagtatcatttcacccagcagtggtcgtattttggtagacggtcaggagttatcggaaaatcgcttggctattaaacgaaagattggctacgtagcagactcgcctgacttatttttacgcttaacggccaatgaattttgggaattgatcgcctcatcctatgatctgagtagatctgacttggaggctagtctagctaggctattgaacgtttttgattttgctgaaaatcgctatcaggttattgaaactctttctcacggaatgcgtcagaaagtctttgtcatcggagcactcttgtctgatcccgatatttgggtcttggatgaacccttgactggtttggatccccaggctgcctttgatttgaaacagatgatgaatgaacatgcactaaaagggaagacagtcttgttttcaactcatgtcctagaggtggcagagcaagtctgtgatcggattgccattttgacaaagggggatttcatttattgtggtantgtaaaggacttgagaaaagattacccagaccagtctttggaaagtatctaccttagtcttgctggtagaaaagaggaggttgcggatgcgtctcaaggtcattaa

SEQ ID NO: 877 - DNA, 1635 bp, Streptococcus pneumoniae
atgcgtctcaaggtcattaataaattagttgatatcaatatcctttattcatctcaagaagctaatctggctaatctacgaaagaagcaggctaagaatcctgggaaaaaagtaaatgtttccgctagagtcctaagttcttacattttttccagtctcttgatgctcatctgttttagtaatatagcctttcgttttccttttgaggaaatgccaagtttttttagtacgatggttgctattttactggtgctggccttttcaacttctttcactgcattttacaatgtcttttatgagagtaaggacctggcctcctataggccctatgcctttaaagaatcagagattataatggccaaaggtctgtctgtcctcttgccagctctaactggaattgtaccaatcctagcttattttctggtcctctacattaggctagcaccttctctgtggttgggtttgcctttgatgctactgtccttgaccttattatttgtctctgttactttagtgacggtagtggcagtacatttcttggctcagactagggtcttcagaaagtatcagtctattttttcgaatgtgatgattgggataggagttctcatacctttaatatttatcttctttcttcagtcgacttttggaagtattgttgacaaagttagagacattccatttctcctttatcctcttcatatcttttacaaaatagcagtggagcctttttcgacagaagccttagtgggtctgctcgcttggataggactaactctcttcctgctttatctgaccaaaaagaaggtccttcctcgtttttatgacgtgatcctgcttaacagtgaggagaaggtcaaaaaagaacgtcgcagcaaggagaggatttcaactactaaaaagggctttttccgtatggttttacgctaccacctcaccctcttgggacaggggactggcgtgattacagtgctttttacaagtgctttccttccttatctcatgatgatcagtctgatttccaaaatccgagattctcagatagttccagacattcatcctccatactggttacccttgttttttgtaggagtgtttatagcagttgtcaataacaatatcaccagcctgcattcaattgccttgtccttggagagggaaaatgttgattttcttaagagtttaccctttgactttgctcgttatgtgaaagtgaaattttggattatctttgctgttcagtcctttttaccagttctgactttgcttggtctttctctatatctaggcttgcccatcatttcgatgatttaccttcttgtagtctggatcattgccagtgtcatcctttcttgccaccattactttaaggacgttaaaaatctgtcaacaaattggagtagcattacggacctggtgaatcgttcaaatggcatagtcgccatagttttattgtttatttatagtgcaatcctgatggcccttgtaattgggagcatattcttggttcagtctctctccactatccttgccatcagcttgggagtaggagctcttatcctcctgcttgctcttgctatttttggctatcattattacctgtcacgcatattggcagaaatagaaaaaagatga

SEQ ID NO: 878 - DNA, 1164 bp, Streptococcus pneumoniae
atgaatagaataagagtcagcaaaagggttgaaaagaagcttgctaaagggctagttttactagaagccagtgatcttgagaatgtcaatcttaaggatcaggaagtagaggtgcagggtcaggaaggaaactttcttgggactgcctacctttctcagcaaaacaagggcttgggctggtttgtcagcaaagacaaggtggccttcaatcaagctttctttgaaacgttgtttagaaaagccaaagaaaagagaaacgcctactatcaagatgatttgacaactgcctttcgtctctttaatcaagagggagatggctttgggggtctgacagtggatctttatggcgactacgccgtcttttcttggtataactcttatgtttatcagattcgtcagactatatcagaagcctttagacaggttttccctgaggttttaggggcttatgagaaaatccgctttaagggtttggactatgaatctgcccatgtttatggtcaagaagcacctgactttttcactgttttagaaaatggtgtcctgtatcaagtctttatgaatgatggcttgatgacaggaattttcctagaccagcatgaggttcgcggtagtttagttgacggcttggctatgggtaaatccttgctcaatatgttttcctacacagcggctttttcagtagctgcggccatgggaggagctagccagacaacttctgttgatctagccaaacgttcacgagaattgtctcaagcgcattttcaggcaaatgggctcagcacagacgagcatcattttatagtcatggatgtctttgagtatttcaaatatgccaaacgcaaagacttgacctacgatgtgattgtcctagatccgcctagctttgctcggaataaaaaacaaactttctctgtggccaaggattatcacaagttgatttcccagagtcttgagattttaaatccgggagggattatcattgccagtactaatgctgccaatgtttcccgtcagaaatttacagaacaaattgataaaggctttgcaggaagaagttaccagattttaaacaaatatggtcttccagcagattttgcctataataaaaaagatgaaagtagtaattacctcaaggtgattagtatgaaggttagtaaatga

SEQ ID NO: 879 - DNA, 678 bp, Streptococcus pneumoniae
atgaaattaatcgtttcagtaatgccaagaagtttagaggaggctcaggctctggatgccacgaggtacctggatgccgacatcattgaatggcgtgccgactatctgcctaaagaagcgattttgcaggtagctccagccatttttgaaaaattcgcaggccgtgagttggttttcacgctacgaactcgctccgaaggtggagaaatcgacctttctccagaagagtatatccatctaatcaaggaagttgcgcaattctatcaaccagactatattgattttgagtactatagctacaaggatgtttttgaggaaatgctggacttcccaaatcttgttttgagttaccataatttccaagaaacacctgagaacatgatggaaatcttgtcagagttgacgatcctaaatccaaaacttgttaaggttgcggtgatggctcacacggagcaggatgtcttagacttgatgaactatacacgaggctttaaaaccctcaatcctgaacaggaatatgtgaccatttctatgggtaaggtgggcaaggtctctcgtatcactgcggatgtgactggttcgagttggtcttttgccagtctggatgaggttagtgcccctgggcagatttctctagctagcatgaaaaaaatcagggagattttggatgaagcttga

SEQ ID NO: 880 - DNA, 855 bp, Streptococcus pneumoniae
atgaagcttgatggctatacacgtttagctgcagttgttgccaatcctattaagcattctatttctcccttcatccacaatagagcctttgaggcgacagctaccaacggtgcttatgtggcttgggagattgaagcgagtgacttggtagaaacagtggccaatattcgtcgctaccagatgtttggcatcaatctgtccatgccctataaggagcaggtgattccttatttggataagctgagcgatgaagcgcgcttgattggtgcggttaatacggttgtcaatgagaatggcaatttaattggatataatacagatggcaagggattttttaagtgcttgccttcttttacaatttcaggtaaaaagatgaccctgctgggtgcaggtggtgcggctaaatcaatcttggcacaggctattttggatggcgtcagtcagatttcggtctttgttcgttccgtttctatggaaaaaacaagaccttacctagacaagttacaggagcagacaggctttaaagtggatttgtgtgctttagaatatgtttctgaactgcaagcaaggattgccgagtcggatttgctagttaatgccaccagtgtgggcatggatggccaatcctctcctgttcctgaaaacatagtcttaccagaaactcttttagttgcagatatcatataccaaccctttgaaacaccgtttttgaaatgggctagaagtcagggcaatccagcagtcaatggtctgggaatgttactctatcaagctgcagaagcttttcaactgtggacaggcaaggaaatgccgacagaagagatttggcagtctttaacagaaaaataccaataa

SEQ ID NO: 881 - DNA, 1068 bp, Streptococcus pneumoniae
atgaaaatcagaatcgatattcctcatcatccttatgatattcagattgaaaaaggttgtatggcccaggctggtcagtggttgcgagaactctggcaaccgcaaaaggtagtcattgtgacagataaccatgtagcctctctctatgcagagaaggtcaagctcagcctagaagatgctggttttcaggtagctgtttttgatttcttagaaggtgaagaaagaaagaatttaactactgttcagaaagtctatgaatttctagtcaagcaaggtctgactcgtagcgatggaatcgttgctcttggtggtggcgttgttggggacctggctggctttgtagcctctacctatatgcggggtattcactttgttcagattccgactagtttgacagctcaggttgattcttctatcggtggaaagacaggcgttaacacaccatttgctaaaaatatggtggggacctttgcccaaccagatggggttctgattgatccacttgttcttgaaaccctcggaaaaagagagttgattgaagggatgggtgaagttatcaagtatggcttgattgaggatccagaactgtgggctctcttgacgggactgaatggttctgttgagagtattttggaacatgcagagaccttgattgaacattcttgtcaggtgaagcgcaagatggtggttgaagatgagttggacaatggtattcgtctttacctcaattttggccacactattggccatgccatcgaagcgactgccggttatggcaaggtcatgcatggagaggctgttgccatgggaatggtacagatttccaaggttgctgaggaaaaaggcctcatgccagctggcattacccaatctatcacagagatgtgtcagaaattcggcttgcctgttgactatgaaaattgggaagttgacaagctttatcaggctcttactcatgacaagaaaacgcgtggtaacaccttgaaattggtcttggtgtcagagcttggttcagcgatcattcacccagtttctctggaagagatgaaagactacttggtaaaataa

SEQ ID NO: 882 - DNA, 1167 bp, Streptococcus pneumoniae
atgagatatttaactgcaggagaatcacacggcccccgtctaacagctattattgagggaattccagctggacttccattgacagctgaggatatcaatgaggaccttagacgccgtcagggtggctacggtcgtggtggtcgtatgaagattgagagtgaccaggttgtctttacttcgggcgttcgccacgggaagacgacaggggcgcctattactatggatgtcatcaataaggaccaccagaaatggctggacatcatgtctgcggaggacattgaagaccgccttaaaagcaagcggaaaattactcatcctcgcccaggtcatgccgatttggttggggggattaagtaccgttttgatgatttgcgaaattctttggagcgttcatcagctcgtgaaaccaccatgcgggtggcagttggtgcagtagccaaacgcctcttggctgagctggatatggagattgccaaccatgtcgtggtctttggtggtaaggaaatagatgttcctgaaaatctgacagtcgctgaaattaagcaaagagctgcccagtctgaagtttctattgtcaaccaagaacgagaacaggaaatcaaggactatattgaccaaatcaaacgtgatggtgataccatcggtggggttgtggagacagtcgtcggaggcgttccagttggtcttggttcctatgtccaatgggatagaaaattggatgcaagattggctcaagctgttgtctctatcaatgcctttaaaggggtggaatttggtcttggctttgaggctggttatcgtaaaggcagccaagttatggatgaaattctctggtctaaagaagacggttatactcgccgtaccaataatctaggtggttttgaaggtggtatgactaatgggcaacccatcgttgttcgtggggtcatgaaacccattcctactctttataaacctcttatgagtgtggatatcgaaacccacgaaccttacaaggcaaccgtggagagaagtgatccgactgctcttccagctgcaggaatggtcatggaagcagttgtagcaacggttctggcgcaagaaatcctcgaaaaattctcatcagataatcttgaggaactaaaagaagcggtagccaaacaccgagactatacaaagaactattaa

SEQ ID NO: 883 - DNA, 1104 bp, Streptococcus pneumoniae
atggcaaaaacaatctatatcgcaggtcttgggttgattggagcctctatggcacttggtatcaaacgcgatcatccagattatgaaattttaggttataatcgtagtcaagcttcgagagatatcgccttgaaagaaggcatgattgaccgtgcaacggatgattttgctagttttgctcctttggcagatgtcattatactcagcttgccaatcaaacaaactattgctttcattaaggagttggccaatttggatttgcgagaaggcgttattatttcagatgctggttcgaccaagtcaaccattgtggatgcggcggagcagtatttggctggcaagtctgttcgctttgtcggggcccatcccatggctggtagtcacaagacaggggctgcttcggcagatgtcaatctttttgaaaatgcctattatatctttacaccttcaagcctgacaagtcaggacacgcttaaggaaatgaaggatctgctttcaggtcttcatgctcgttttatcgagattgatgccaaggagcatgatcgtgtcacttctcagattagccattttcctcatattttggcttctagtctcatggagcagactgcggtctatgctcaagagcatgagatggcaaggcgctttgcggcaggtggttttcgagatatgacccgaattgcggaaagcgagccaggaatgtggacctccattctcttgtccaatagcgagaccattctggatagaattgaggatttcaaggaacgtttggaagcgattggtcaggccattagtaagggagatgaagagcaaatttggaacttttttaaccaagcgcgtgaacaacgccagaccatggaaatccataagcgtggtggtgtggatagctcttacgacctctatgttgacgttcctgatgaagaagatgtcatcctgcggattttggaactgctacgtggaacttccttggttaacatccacatcaacgaggaaaatcgtgaggatattcacggaatcctacaaatttcatttaaaaatgctcaagacttggaaagagctgagcatctcataacagaaaataccgactatacagtcgtcatcaaataa

SEQ ID NO: 884 - DNA, 339 bp, Streptococcus pneumoniae
atgtcaaatatttacgatagtgcaaacgaactcagtcgcggtctacgcggattaccagaatacaaggctgttaaagcagctaaagatgcgattgcagcagatgctgaggcaagcaaaatctttacagaatatcttgcctttcaagaggaaattcaaaaactagcacagacaggtcaaatgccagatgcgtccttccaagctaagatggaaggctttggtaaacagattcaaggaaatagcctcttgtcagaattctttaccaagcaacaacaattggccatttacctttctgacattgaaaaaattgtttttgaaccagtttcagaattgctgaaataa

SEQ ID NO: 885 - DNA, 1284 bp, Streptococcus pneumoniae
atgaaactaaaaacaaacattcgccatttacatggtagtatccgcgtcccaggtgacaagtctatcagccaccgttccattatctttggaagtttggctgagggtgagaccaaggtttatgatattctgcgaggcgaagacgttctttcgaccatgcaggtttttcgtgaccttggtgttgaaattgaggataaagatggggttattaccattcaaggtgtaggcatggctggcttaaaagcgccgcaaaatgcccttaatatgggaaattctggcacctcgattcgcctgatttcaggtgtccttgctggtgcagatttcgaagtagagatgtttggagatgatagtctttccaaacgtcctatggaccgtgtgacccttccactgaaaaaaatgggcgtcagcatttcagggcaaactgaacgagacttgcctccccttcgcttaaaagggacgaaaaacctaagacctattcattatgagttgccaattgcctctgcccaagtcaagtcagccttgatgtttgcagccttacaagctaagggggagtcagttattatcgaaaaagagtgcactcgtaatcatactgaagatatgttgaaacaatttggtggtcatttaagtgtggacggtaagaaaatcatagtccaagggccacaaaaattgacaggacagaaggtggtcgtaccaggagatatttccagtgcagccttttggttagtcgcaggtttgattgttccaaattctcgtctagtgctgcagaatgtggggatcaacgaaactcgcaccggtattattgatgtcattcgtgccatgggtggaaaattggaaataactgaaatcgatccagtcgctaaatctgcaaccttgattgttgagtcttctgacttgaaaggaacagagatttgtggcgctttgattccacgtttgattgatgaattgcctattattgccctacttgcgacccaagcccaaggtgtaacagttatcaaggatgctgaggagctcaaggtcaaggaaacagaccgtattcaggttgtggcagacgccttaaatagtatgggagcagatattactcctacggcagatgggatgattatcaaaggaaaatcagctcttcacggtgctagagtcaatacgtttggtgaccaccgtatcggcatgatgacagctatcgcagccctcttggttgcagatggagaggtggagcttgaccgtgcagaagccatcaataccagctatcctagtttctttgatgatttggagagcttgattcatggctaa

SEQ ID NO: 886 - DNA, 477 bp, Streptococcus pneumoniae
atggctaaggtgttattagggtttatgggggctggaaaatcgactattgcaagaggcttggacactaattaccttgatatggatgctctgattgagaagcgcctaggtatgtccattgcgaattttttcgctgaaaagggagaagagacctttcgtcaggtagaatcagaagtcctagctgatttactacaaacagaccaagtcgtgtcaactggaggaggagtggttatttctcagagaaatcgtgacttactcaagactaatacagataacatctacctgaaagcagattttgaaaccctctaccaacgtatcgcagctgataaggacaatcagcgaccgctttttctaaataatagcaaggaagaactagtagctatttttcaagaaagacaggcttggtatgaggaagtggctagtcgggttttggatgtgaccaagctaagcccagaggaaattatagaggaactaagatga

SEQ ID NO: 887 - DNA, 846 bp, Streptococcus pneumoniae
atgaaaattgcttatctaggtcccaaaggatcattttcacaccacgttgtgcagacagcttttcctcatgaggaattgcaggcttttgccaacattacagatgtcatcaaggcttatgagcaaggattagtggactattctgtggtgccagttgaaaattctattgagggtagtgttcatgaaaccttggactatctttttcatcaggctcacatccaagcagtagcagaaatcgttcagcctattcatcagcagttgatggtggttccaggccatactaagattgaaaagattttttcacatccacagggcttggctcaaggaaagaaattcatcgatgaacaatatccagaggctcaaatcgaggtaacagctagtacagcttatgcggcccgttttatttccgaacatccagaccagccctttgcagcagttgcacctagaagttctgctgaagaatatggattggaactgattgccgaggatattcaggaaatggaagccaatttcacacgtttctgggttctaggagctgaaaagcctagtattcccttgcaagcacaaactgaaaagatgagtttggccttgacattacctgacaaccttccaggtgcactttataaggccttgtcgacctttgcttggcgaggaattgacttgacaaaaattgaaagtcgtccactcaagacagcactgggtgaatactttttcattatcgatgtggattatatcgataaggacttggtccactttgcccaaaaagaattagaagcgattggaatccagtataaaattctgggtgcctatcctatttatccaatatcagaccatggaaaggagagaaga

SEQ ID NO: 888 - DNA, 693 bp, Streptococcus pneumoniae
atgagtaaagaaaatcccttaagtcatcatgagcagttgcgttatgattatttgctaaaaaatattcactatctcaatgagagagaaaaaaatgagtttgcctatttgcaagaaaagctaactcttgctaggggaaatagtagctctagcttggaacaagaaagagaagagcaggttgacttaccaagctatgcgaaccggagtcgctcacaatccaaatcacaagcactctctttccctccaaaaaagaaaagacggaagctccgtcttaaacgaatttttatggtgattttttcacttttggtctgtgtggctttggccatggtattcatgtttttgcgtggttaccaagatgctagcgcaaagaaaactgctgatgcccgggcagctcaagtagaagtctttaatggtcaggacactagagatggagttaatattttaatcatgggtactgatggtcgaatcggccagaacagtgttgagacacgaactgactctattatggtattaaatgtcgggggctcagataagaaaatgaagctagtcagtttcatgcgtgataatttggtctatatagatggttatagtcaagtgattaatggtagaaaacagacagataacaagttaaacgtagcctacgagttaggagaacaagagggcaaaaaggggcagaaatgtttcgccaagtcttga

SEQ ID NO: 889 - DNA, 600 bp, Streptococcus pneumoniae
atgtttcgccaagtcttgaaagataattttgacttggacattaagttctacgccttggttgattttcaggcctttgccacagcgattgacacgcttttccctgatggggtgacgattgatgctcaattttcaacattgaatgggcgtcccctaacagaagctacagtcggagatgatttatatgctaccgagactgagtctccaacccaaaccattaaagtcggaaaacagcagatgaatggctcgaccctgctcaattatgctcgtttccgtgatgatgatgaggcggattacggccgtacaaaaagacagcaacaagttttaacagcaattttagagcaaattaaagatcccactaaacttttcactggttctgaagctcttggaaaggtttttgctatgacctcaaccaacgtaccttatactttcctcctaacaaacggtttatctgttttggatggagcaaaaaatggtattgaaaaattgacgattccagaactgggtgactgggtagacgcctatgatgtttatggaggcttgggcttgctggttgatcaaaacaaatatcaaaccaagctcgctcaaatgggcttgagataa

SEQ ID NO: 890 - DNA, 846 bp, Streptococcus pneumoniae
atgaacaatatgactgatttaaaagcaattcaggctcgtagtctggagatggctgaatattttgtggccttttgcaaggaacatgatttactttgctatctctgtgggggaggcgctattggtgcccttcgaaacaaggggttcattccttgggacgacgacctagacttttttatgcctcgtaaagattatgagaaattagcagaattatggcctcgttatgcagatgaacgttatttcttgtcaaagagttacaaggattttgttgatcgtaatctttttattaccattcgtgacaaggaaaccacctgtatcaagccttatcagcaggatttggatttgccacatggtctggccttggatgttttgcctttggattattatccgaaagatccagctgagcggaaaaaacaggttcgttgggccttgatttattcactcttttgtgcgcaaactattccagaaaagcatggtgctctcatgaaatggggaagtcgcattttactgggtttgactccaaaatctctccgttatcgcatctggaaaaaagctgagaaagaaatgactaagtatgatttggctgattgtgatggcattacagaattatgctcaggtcctggctacatgagaaacaagtacccaatcacatcttttgaagacaatcttttcttgccatttgaaggaacaaagatgcctattccaatcggctatgatgtctatctcagaactgcttttggggattatatgacgcctccaccagcagacaagcaggtaccgcatcatgatgttgtcatcgctgatatggataagtcttatacagaatacaagggagaatatggtggctaa

SEQ ID NO: 891 - DNA, 402 bp, Streptococcus pneumoniae
atgcgtacatgctttggaacagattcatatcccttgtcaaagtgctccatttcaagaatatcaatatcatacttttctggatccagatttgaaacaatggttgatagaatcttctctgcaccacctccaagagaaaaagaccacataaaaaataagatttttttcttagccaccatattctcccttgtattctgtataagacttatccatatcagcgatgacaacatcatgatgcggtacctgcttgtctgctggtggaggcgtcatataatccccaaaagcagttctgagatagacatcatagccgattggaataggcatctttgttccttcaaatggcaagaaaagattgtcttcaaaagatgtgattgggtacttgtttctcatgtagccaggacctga

SEQ ID NO: 892 - DNA, 1158 bp, Streptococcus pneumoniae
atgatgttgtcatcgctgatatggataagtcttatacagaatacaagggagaatatggtggctaagaaaaaaatcttattttttatgtggtctttttctcttggaggtggtgcagagaagattctatcaaccattgtttcaaatctggatccagaaaagtatgatattgatattcttgaaatggagcactttgacaagggatatgaatctgttccaaagcatgtacgcattttaaaatcccttcaagattatcgccaaaccagatggttacgagcttttttgtggagaatgagaatttattttccaagactggctcgtcgtttgcttgtaaaagatgattatgatgttgaagtttcttttaccattatgaatccaccactgttgttctctaaaagaagagaagtcaagaagatatcttggattcatggaagtattgaagaacttcttaaggatagctctaaaagagaatcacatagaagccagttggatgctgcgaatacaattgtagggatttcaaaaaagaccagcaattctatcaaggaagtttatccagattatgcttctaaattacagacaatctacaatggatatgattttcagactattctagaaaaatctcaagagaagatcgatatcgagattgctcctcaaagtatctgtactatcggacggattgaggaaaataagggttctgaccgtgtagtggaagtgatacgattattacaccaagagggaaaaaactatcatctctattttatcggggctggtgatatggaagaggaactgaaaaaacgagtcaaagagtatgggattgaggactatgtacatttccttggttatcaaaaaaatccttatcagtatttatctcagacgaaagttctcttgtctatgtctaaacaagaaggttttcctggagtgtatgtggaggccttgagtctgggactcccttttatctctacggacgttggaggggctgaggaattatcccaagaaggacgatttggacaaatcattgagagcaatcaagaggcagctcaggcgattactaattacatgacttctgcctcaaactttgatgtcgatgaggctagccaattcattcaacaatttacaattacaaaacaaatcgaacaagtagaaaaactattagaggagtag

SEQ ID NO: 893 - DNA, 987 bp, Streptococcus pneumoniae
atggaaactgcattaattagtgtgattgtgccagtctataatgtggcgcagtacctagaaaaatcgatagcttccattcagaagcagacctatcaaaatctggaaattattcttgttgatgatggtgcaacagatgaaagtggtcgcttgtgtgattcaatcgctgaacaagatgacagggtgtcagtgcttcataaaaagaacgaaggattgtcgcaagcacgaaatgatgggatgaagcaggctcacggggattatctgatttttattgactcagatgattatatccatccagaaatgattcagagcttatatgagcaattagttcaagaagatgcggatgtttcgagctgtggtgtcatgaatgtctatgctaatgatgaaagcccacagtcagccaatcaggatgactattttgtctgtgattctcaaacatttctaaaggaatacctcataggtgaaaaaatacctgggacgatttgcaataagctaatcaagagacagattgcaactgacctatcctttcctaaggggttgatttacgaagatgcctattaccattttgatttaatcaagttggccaagaagtatgtggttaatactaaaccctattattactattttcatagaggggatagtattacgaccaaaccctatgcagagaaggatttagcctatattgatatctaccaaaagttttataatgaagttgtgaaaaactatcctgacttgaaagaggtcgcttttttcagattggcctatgcccacttctttattctggataagatgttgctagatgatcagtataaacagtttgaagcctattctcagattcatcgttttttaaaaggccatgcctttgctatttctaggaatccaattttccgtaaggggagaagaattagtgctttggccctattcataaatatttccttatatcgattcttattactgaaaaatattgaaaaatctaaaaaattacattag

SEQ ID NO: 894 - DNA, 1434 bp, Streptococcus pneumoniae
gtgattgatgggaaacgattattatttagtttgaccatagtcagttatgccttgacgctagtaagtggagttgtgtatctgtttaataataataatgttagcttactttctactttattgttcttgttggttagtagcttaattgcttgttggaatgatatcaagtattacttaatccattttattttctatttaaccatttttgtatttctggtatcaagaccgaccattgattattttagggatggtgctttggatacctatcatccaatagcctatcgttttgcctttatagttgtcatggtttcgattctgggcttgaccacaggaggcattctggctcgttacttcatagctaggaagaaaataaaagtagcaaatataggaaattctctaaaagaggtttatatcaagcggttacgctttgtatcactaggagtttttcttctaacctatcctttctatttcattcggttatttgaacggctcttgtatcgtttgcagacttcctactatgcctactatgcaaattttgaaagtaaactgccttattttacctacattttgtctacctttacggtctatgcaatgtgtatgtatctagcaaccaagccaaagaaattgcaggccacagcagtgcttgtctcctttattgcagctaatactattcatttggcaattgggacacgaaatccctttattttaagtattttatttgcttttgtttattactttatgcgggagcaaactgaaaaaggaaaatggattgggtttaaagaaaagttagcgatttttgtaggttctcctattctcatgttagcgatgggagtactcaattatgtacgggataatgtccaagtttcccatacaggtttctgggatatcttacttgactttatctataaacaagggactagttttggtgttctggctcgaggttttctatttaacagtagcctcccttaccgagatttccgtaattttacttttggtcctgttcttgattattttgcaagggggagtttgggagccattttcggaggaaaagcctttgaacatacaaccaatagtgtggaactagctattgatagtaatagttatgcccacaatctatcctatcttgtcttgaacaaggaatacttgaaagggcatggtatcggaagtagttatatcatggagttgtataccgactatggtatgattggagtctttctgcttagtttcttactcggcgtattatttatagccatgctgcaagtagcctatcgctcaaggacaatcctatttgctttatccctactcatcttgaataatctattctttatgccaagaagcagcttttcagaaagtttcttcaatttatttacaatgcaattctggggaattgttcttgtgattatatttgtagcaaaaatgcttacaaaggaaaactag

SEQ ID NO: 895 - DNA, 453 bp, Streptococcus pneumoniae
atgtttgaacattattcagtagctgatttgtttgcaaatctttataaaaagcgaaaagcaaatattttagctctcatcgctttatttgctctcattgctgtaccatttacaattaaagcagttaggaataaaaacactgtcaaagatacaacaagttattcaacttatcttatctataaaatcactcctccaaaagagtcggccaaaacgattttgaatcatcaaattggtggttatagtgatttttatgggaaattgattgatggtaatttgaatggagcttatcttttcaatgatgtagaacccagtgagttgaaaaaaattgccagtgaattagacacgacagaaacaaccttgaaaaattcaacgaatgactattggtggaaaaaattgaccgtctactatatgattgacgatgcatggggttggtgtgaaaattttgacatcaagtaa

SEQ ID NO: 896 - DNA, 606 bp, Streptococcus pneumoniae
gtgaaaattttgacatcaagtaaagatgccaatgacttgttagagaaaaaaattgatgggttgattgagaaatttaaacatgcttatgcaaatgtgaaaattgaaaaactggaaaccatcaactctaaagaattgaacgcaaatggtgaaacagcgcttggcttaaatgtgaaaaatctgattcttcgtttagttgttattggagtggtttgtgtgattttggttgtgatgggaaatgtgttagtttatctctttaatccaacaatcaatagagtaggtgatttttctcagtatcaaattgattttgtaacagagattacaacaattgctaacctagcagatgttttgtcatacaaaaatactggacaggaattgaccatcgttagctcaaataaagctatcctagataaattgaaacagagtcaagaagctttaaaaggaatgcattttgtagatttacaggatgtatcatctcttttggaaagagatacagtccttcttgttgaagagtacggagtgactcgttataagaaatttgagcaaagtcttcaaattctcagaaacttaaatcgttctatcctcggtgtagcaacctttaaattataa

SEQ ID NO: 897 - DNA, 297 bp, Streptococcus pneumoniae
ggaacgagaaagtcagcaatctccattccacgatccatcaaatcctctaaagatatcgtgatttttaaagttgtatcactaatttgtttcattttcattgatagtaacctcatactttcagttctatctattatactagatttttacgattttatcaaaagaaaatttctgcagacagatagaaaaagccttcaaaatcggctcttagccgactttgaagaccttatacatcagaatacttataatttaaaggttgctacaccgaggatagaacgatttaagtttctgagaatttga

SEQ ID NO: 898 - DNA, 555 bp, Streptococcus pneumoniae
atgaaaatgaaacaaattagtgatacaactttaaaaatcacgatatctttagaggatttgatggatcgtggaatggagattgctgactttctcgttcctcaagaaaaaacagaagagttcttttatgctatcttggatgagctagagatgcctgatagctttctggatacaggcatgttgagcttccgtgtgactgcaaaacctgataaggtagatgtctttgtgaccaactcaaagattgaccaaaatctagattttgaagacttatcggatgggccagatatggaagaattggctcaaatgtctgcagatgaatttatcaaaaccctggaaaaaagcatcgcagacaaaaccaaggatgatatcgaagccattcaatctcttgagcaagttgaagccaaggaagaagagcaagagcaggctgaacaagaagctgagagtaagaaagaaccttacatctactacatcctttcttttgctaagttggctgacttgggagctttttgccaagacagtgactttttgaaatggaaacttctgaactctacaaaatga

SEQ ID NO: 899 - DNA, 384 bp, Streptococcus pneumoniae
gtgcaaactcgcgcatacgggccaacagccaagctggatatgggcttggatgattttcaatatccactaaaatggtcaaataatagcgctcgttcattttgtagagttcagaagtttccatttcaaaaagtcactgtcttggcaaaaagctcccaagtcagccaacttagcaaaagaaaggatgtagtagatgtaaggttctttcttactctcagcttcttgttcagcctgctcttgctcttcttccttggcttcaacttgctcaagagattgaatggcttcgatatcatccttggttttgtctgcgatgcttttttccagggttttgataaattcatctgcagacatttgagccaattcttccatatctggcccatccgataa

SEQ ID NO: 900 - DNA, 213 bp, Streptococcus pneumoniae
atggaaacttctgaactctacaaaatgaacgagcgctattatttgaccattttagtggatattgaaaatcatccaagcccatatccagcttggctgttggcccgtatgcgcgagtttgcacaggatagtgatatcagtcgctcagtcttacaagagtatggtcaagtcttgatgagtcgcgatgcagtgctcaatctgcaaaaaatcggctaa

SEQ ID NO: 901 - DNA, 1287 bp, Streptococcus pneumoniae
atgacagttaaaattgctttactgggatttggtaccgttgcaagtggtgtgcctttcctcctaaaggaaaatggaggaaaaatcaatcaatcagcacattcagatatcaaagttgctaaggtattggtcaaggatgaagatgaaaaaaatcgcttgcttgcagcagggaatgactttaactttgtaaccaatgtggatgatattttatcagaccaggatattactatcgtagtggaattgatggggcgtattgagcctgctaaaacctttatcactcgtgccttggaagctggaaaacacgttgttactgctaacaaggaccttttagctgtccatggcgcagaattgctagaaatcgctcaagctaacaaggtagcactttactacgaagcagcagttgctggtgggattccaattcttcgtactttagcaaattccttggcttctgataaaattacgcgcgtgcttggagtagtcaacggaacttccaacttcatggtgaccaagatggtggaagaaggctggtcttacgatgatgctcttgcggaagcacaacgtctaggatttgcagaaagcgatccgacgaatgacgtagatgggattgatgcagcctacaagatggttattttgagccaatttgcctttggcatgaagattgcctttgatgatgtagcccacaagggaatccgcaatatcacaccagaagacgtagctgtagctcaagagcttggttacgtagtgaaattggttggttctattgaggaaacttcttcaggtattgctgcagaagtgactccaaccttcctacctaaagcgcacccacttgctagtgtgaatggcgtaatgaacgctgtctttgtagaatctatcggtattggtgagtctatgtactacggaccaggtgcgggtcaaaaaccaactgcaacaagtgttgtagctgatattgtccgtatcgttcgtcgtttgaatgatggtactattggcaaagacttcaacgaatatagccgtgacttggtcttggcaaatcctgaagatgtcaaagcaaactactatttctcaatcttggctccagactcaaaaggtcaggtcttgaagttggctgaaatcttcaatgctcaagatatttcctttaagcaaatccttcaagatggcaaagagggtgacaaggcgcgtgtcgttatcatcacacacaagattaataaagcccagcttgaaaatgtctcagctgaattgaagaaggtttcagaattcgacctcttgaataccttcaaggtgctaggagaataa

SEQ ID NO: 902 - DNA, 870 bp, Streptococcus pneumoniae
atgaagattattgtacctgcaaccagtgccaatatcgggccaggttttgactcggtcggtgtagctgtaaccaagtatcttcaaattgaggtctgcgaagaacgagatgagtggctgattgaacaccagattggcaaatggattccacatgatgagcgtaatctcttgctcaaaatcgctttgcaaattgtaccagacttgcaaccaagacgcttgaaaatgaccagtgatgtccctttggcgcgcggtttgggttcttccagctcggttatcgttgctgggattgaactagccaaccaactgggtcaactcaacttatcagaccatgaaaaattgcagttagcgaccaagattgaagggcatcctgacaatgtggctccagccatttatggtaatctcgttattgcaagttctgttgaagggcaagtctctgctatcgtagcagactttccagagtgtgattttctagcttacattccaaactatgaattacgtactcgcgacagccgtagtgtcttgcctaaaaaattgtcttataaggaagctgttgctgcaagttctatcgccaatgtagcggttgctgccttgttggcaggagacatggtgaccgctgggcaagcaatcgagggagacctcttccatgagcgctatcgtcaggacttggtaagagaatttgcgatgattaagcaagtgaccaaagaaaatggggcctatgcaacctacctttctggtgctgggccgacagttatggttctggcttctcatgacaagatgccaacaattaaggcagaattggaaaagcaacctttcaaaggaaaactgcatgacttgagagttgatacccaaggtgtccgtgtagaagcaaaataa

SEQ ID NO: 903 - DNA, 426 bp, Streptococcus pneumoniae
atgaaaccctctggtcaagagtttccccatcctatcttctattctttattttgcttctacacggacaccttgggtatcaactctcaagtcatgcagttttcctttgaaaggttgcttttccaattctgccttaattgttggcatcttgtcatgagaagccagaaccataactgtcggcccagcaccagaaaggtaggttgcataggccccattttctttggtcacttgcttaatcatcgcaaattctcttaccaagtcctgacgatagcgctcatggaagaggtctccctcgattgcttgcccagcggtcaccatgtctcctgccaacaaggcagcaaccgctacattggcgatagaacttgcagcaacagcttccttataagacaattttttaggcaagacactacggctgtcgcgagtacgtaa

SEQ ID NO: 904 - DNA, 225 bp, Streptococcus pneumoniae
ctaatactcttcgaaaatctcttcaaaccacgtcagcgtcaccttaccgtatatatgttactgacttcgtcagttctatctgcaacctcaaaacactgtcttgagctgacttcttcagttctatccacaacctcaaaacactgttttgagcagcctgcggctagcttcctagtttgctctttgattttcattgagtataaacttcttttcacaaaaaggatatga

SEQ ID NO: 905 - DNA, 258 bp, Streptococcus pneumoniae
atggcagaaatttatctagcaggtggttgtttttggggcctagaggaatatttttcacgcatttctggagtgctagaaaccagtgttggctacgctaatggtcaagtcgaaacgaccaattaccagttgatcaaggaaacagaccatgcagaaacggtccaagtgatttacgatgagaaggaagtgtcactcagagagattttactttattatttccgagttatcgatcctctcatctatcaatcaacaagggaatga

SEQ ID NO: 906 - DNA, 768 bp, Streptococcus pneumoniae
atgagaaggaagtgtcactcagagagattttactttattatttccgagttatcgatcctctcatctatcaatcaacaagggaatgaccgtggtcgccaatatcgaactgggatttattatcaggatgaagcagatttgccagctatctacacagtggtacaggagcaggaacgcatgctgggtcgaaagattgcagtagaagtggagcaattacgccactacattctggctgaagactaccaccaagattatctcaggaagaatccttcaggttactgtcatatcgatgtgaccgatgctgataagccattgattgatgcagcaaactatgaaaagcctagtcaagaggtgttgaaggccagtctatctgaagagtcttatcgtgtcacacaagaagctgctacagaggctccgtttaccaatgcctatgaccaaacctttgaagaggggatttatgtagatattacgacaggtgagccactcttttttgccaaggataagtttgcttcaggttgtggttggccaagttttagccgtccgatttccaaagagttgattcattattacaaggatctgagccatggaatggagcgaattgaagttcgttctcgttcaggcagtgctcacttgggtcatgttttcacagatggaccgcgggagttaggcggcctccgttactgtatcaattctgcttctttacgctttgtggccaaggatgagatggaaaaagcaggatatggctatctattgccttacttaaacaaataa

SEQ ID NO: 907 - DNA, 309 bp, Streptococcus pneumoniae
atgaaacacctattatcttacttcaaaccctacatcaaggaatcaattttagcccccttgttcaagctgttagaagctgtttttgagctcttggttcccatggtgattgctgggattgttgaccaatctttacctcagggagatcaaggtcatctctggatgcagattggcctgctccttatctttgcagtaattggcgttttagtggccttgatagctcaattttactcagcaaaggcagcagtaggctttgctataggaattgacaaacgatctttatcgtcatattctttccttgcccaagcatag

SEQ ID NO: 908 - DNA, 1464 bp, Streptococcus pneumoniae
ttgacaaacgatctttatcgtcatattctttccttgcccaagcatagcagagaccgtctgacaacttctagtttggtcactcgcttgacttcggatacctaccagattcagactggtatcaatcaattcctgcgtctctttttgcgagcgcccattatcgtttttggtgccatttttatggcttatcgaatctcagctgagttgactttctggttcttagtcatggttgccattttgaccattgtcattgtagggttatctcgattggtcaatcctctctacagtagtctcagaaagaaaacggaccaactggttcaggaaacgcgccagcaattgcaagggatgcgggttattcgtgcttttggtcaagaaaaacgagagttacagatttttcaaacccttaaccaagtttatgctagattacaagaaaagacaggtttctggtctagtttattaacacctctgacctatctgattgtcaatggaactcttctcgttattatctggcaaggctatatttcaattcaaggaggagtgctcagtcaaggtgctctcattgctcttatcaattacctcttacagattttggtggaattggtcaagctagccatgttgatcaattccctcaaccagtcctatatctcagtcaagcgaatcgaggaagtctttgttgaggctccagaggatatccattcagagttagaacaaaagcaagctaccagagataaggttttacaagtccaagaattgacttttacctatcctgatgcggcccagccttctctgagatacatttcctttgatatgactcaaggacaaattctaggtatcatcgggggaactggttctggtaaatcaagcttggtgcaactcttacttggactttatccagtagacaaggggaacattgacctttatcaaaatggacgtagtcctcttaatttggagcagtggcggtcttggattgcctatgtacctcaaaaggtcgaactctttaaaggaaccattcgttccaacttgactctaggtttcaatcaagaagtatctgaccaggaactctggcaggccttggagattgcgcaagctaaggattttgtcagtgaaaaggaaggactcttggatgctctagttgaggcaggggggcgaaatttctcaggtggacaaaaacaaagattgtctatcgcccgagcagtcttgcgccaagctccgtttctcatcctagatgatgcaacctcggcactggataccattacagagtccaagctcttgaaagctattagagaaaattttccaaacacgagcttaattttgatctctcaacgaacctcaactttacagatggcggaccagattctcctcttggaaaaaggtgagttgctagctgttggcaagcacgatgacttgatgaaatccagccaagtctattgtgaaatcaatgcatcccaacatggaaaggaggactag

SEQ ID NO: 909 - DNA, 186 bp, Streptococcus pneumoniae
gcaatagttcctagaaaggctaggaaaaggaggaaaggatggcttgctaaatctacggctaaacgtttgagcgtctggtttacagtttgtcgtttcattctagtcctcctttccatgttgggatgcattgatttcacaatagacttggctggatttcatcaagtcatcgtgcttgccaacagctag

SEQ ID NO: 910 - DNA, 1752 bp, Streptococcus pneumoniae
atgaaacgacaaactgtaaaccagacgctcaaacgtttagccgtagatttagcaagccatcctttcctccttttcctagcctttctaggaactattgctcaagttggcttatcaatttacctacctattctgattgggcaggtcattgaccaagtcctagtggctggttcatcaccagttttttggcagatttttctccagatgctcttggtggtaataggaaatactctggtacaatgggccaatcctctcctctataatcgtctaatcttctcttataccagagatttacgggagcgaatcatccataagctccatcgtttaccgattgcctttgtagataggcaaggtagtggagagatggttagtcgtgtaaccacggacatcgaacagttggcagctggcttgaccatgatttttaaccaatttttcattggtgttttgatgattttggtcagtattctagccatgctccaaattcatctcctcatgactctcttagtcttgctgttgacgccactgtccatggtgatttcacgctttattgccaagaaatcctatcatctcttccagaagcaaacagagacgaggggaattcagactcagttgattgaagaatcgcttagtcagcagactataatccagtccttcaatgctcaaacagaatttatccaaagattgcgtgaggctcatgacaactactcaggctattctcagtcagccatcttttattcttcaacggtcaatccttcgactcgctttgtaaatgcactcatttatgcccttttagctggagtaggagcttatcgtatcatgatgggttcagccttgaccgtcggtcgtttagtgacttttttgaactatgttcagcaatacaccaagccctttaacgatatttcttcagtgctagctgagttgcaaagtgctctggcttgcgtagagcgtatctatggagtcttagatagccctgaagtggctgaaacaggtaaggaagtcttgacgaccagtgaccaagttaagggagctatttcctttaaacatgtctcttttggctaccatcctgaaaaaattttgattaaggacttgtctatcgatattccagctggtagtaaggtagccatcgttggtccgacaggtgctggaaaatcaactcttatcaatctccttatgcgtttttatcccattagctcgggagatatcttgctggatgggcaatccatttatgattatacacgagtatcattgagacagcagtttggtatggtgcttcaagaaacctggctcacacaagggaccattcatgataatattgcctttggcaatcctgaagccagtcgagagcaagtaattgctgctgccaaagcagctaatgcagactttttcatccaacagttgccacagggatacgataccaagttggaaaatgctggagaatctctctctgtcggccaagctcagctcttgaccatagcccgagtctttctggctattccaaagattcttatcttagacgaggcaacttcttccattgatacacggacagaagtgctggtacaggatgcctttgcaaaactcatgaagggccgcacaagtttcatcattgctcaccgtttgtcaaccattcaggatgcggatttaattcttgtcttagtagatggtgatattgttgaatatggtaaccatcaagaactcatggatagaaagggtaagtattaccaaatgcaaaaagctgcggcttttagttctgaataa

SEQ ID NO: 911 - DNA, 258 bp, Streptococcus pneumoniae
gtgtggttactgatttcgtcagttctatctgcaacctcaaaacagtgttttgagctgacttcgtcagttctatctgcaacctcaaaacagtgttttgagctgacttcgtcagttctatctgcaacctcaaaacagtgttttgaactgacttcgtcagtcttatctacaacctcaaagctgtgctttgagcaacctacggctagcttcctagtttgctctttgattttcattgagtattacagtgaacaatttttctag

SEQ ID NO: 912 - DNA, 387 bp, Streptococcus pneumoniae
  unsure (372): n at each above location is unknown.
atgaaaatcaaagagcaaactaggaagctagccgtaggttgctcaaagcacagctttgaggttgtagataagactgacgaagtcagttcaaaacactgttttgaggttgcagatagaactgacgaagtcagctcaaaacactgttttgaggttgcagatagaactgacgaagtcagctcaaaacactgttttgaggttgcagatagaactgacgaaatcagtaaccacacctacggcaaagtgaatctgaagtggtttgaagagagtacaacttgtcttttaaaaaaggagcctataatgaaagtctttcagcttgtaaatatcgtgacttgtgatcaagatttccatgtttatcttgatggaattttagcngtcaagggtttttaa

SEQ ID NO: 913 - DNA, 192 bp, Streptococcus pneumoniae
  unsure (59),(60),(62),(63),(64),(72),(75),(83),(98),(113),(115),(159),(160),(187): n at each above location is unknown.
aacacaaaaaaaataaagaaaggggggggagggggggccctttttggccctgtctttgnngnnngggtgttnccnttggccgngcccgggtatttccngggccccttatggtntntgttgggggcggcgggtttaaaaaacccttacttatttttaccnnaaaaaacaatattaaaaacccttgacngctaa

SEQ ID NO: 914 - DNA, 222 bp, Streptococcus pneumoniae
attactgaaaatcaaaaaagagagaaccaaactgattccctcttaatgtatataatatctagttttaaaaatacacactcacatatctctgtaatgaatcgggaagacaggattcgaacctgcgacaccttggtcccaaaccaagtactctaccaagctgagctacttcccgagttaaatagaaaaatgcaccctagaggagtcgaacctctaaccgcctga

SEQ ID NO: 915 - DNA, 207 bp, Streptococcus pneumoniae
atgggggaagaagagatgagaaataaaatgattatcgcagtaagtttagtagtagcaggagttatgacctatctcatgttttcgggattggatgaggatttctaccattttccttggaaggtctttgctggctttggaatcatgtcttggcttgttagagaaggtttgaaattagtcagagatgtgaaaaaggagtttgaagaatga

SEQ ID NO: 916 - DNA, 195 bp, Streptococcus pneumoniae
atgaagagagggatcatctatttctttatcggcctgtcactcttggtatggttagtggaaatgtttactgattggtttgatcaagccttgctttgccaattcattcgtggtgctttggagtttggatttatgattttcgtcgttttccctatgggaatggagtggttgaaaggagagtctcatgacggtggttaa

SEQ ID NO: 917 - DNA, 297 bp, Streptococcus pneumoniae
gtgaccagtttatctccaagcaaacaatctaagagtgttgtctttccggcaccatttggaccaattaaggcaacacattcaccatcgttgatttcaaaggagatgttccgcaaaatttccttgtcttttattttcttactcaatttctcaactttaaccaccgtcatgagactctcctttcaaccactccattcccatagggaaaacgacgaaaatcataaatccaaactccaaagcaccacgaatgaattggcaaagcaaggcttgatcaaaccaatcagtaaacatttccactaa

SEQ ID NO: 918 - DNA, 885 bp, Streptococcus pneumoniae
atgacggtggttaaagttgagaaattgagtaagaaaataaaagacaaggaaattttgcggaacatctcctttgaaatcaacgatggtgaatgtgttgccttaattggtccaaatggtgccggaaagacaacactcttagattgtttgcttggagataaactggtcacaagcggtcaagtatctattcaaggtttaccagtgacgagttctaagttagactatactagggcttacctccctcaagaaaatataatcgttcagaaattaaaagttaaagagttgattgctttctttcaacgtatctatccaaatcctttgagcaatcaggaaattgatcaactattgcagtttgtcaagcaacaaaaagaacagttggcagaaaaattatcaggcggtcaaaagcgtctcttttctttcatcttgaccttaattgggcgaccaaagattgtttttttagatgagcctactgcgtccatggatacctcaactcgtcaacgtttttgggaaattgtccaggagttaaaagcgcaaggagtcaccattctctattcgtcccattatattgaggaagtggaacacactgcagaccgcattttgctcttaaataagggagagttgattcgagatacgacgcctctagctatgcgtagcgaggaaatagaaaagcactttatccttcctatagcttacaaggaagtcgtagagcagtcaaatttggttgaaaactggaccctaaagcaagattctttacaagtagtcactcgagaagcagatgctttctgggaactattagcccaagcaggatgtaggatgcaagaaatcgaagttaataatcgtagtttgttgaatacaatctttgaagagacgcagaagggagataactaa

SEQ ID NO: 919 - DNA, 738 bp, Streptococcus pneumoniae
atgaaacgatggatagcacttagtaagatagaatttttattgaccaaacgacaattaatctattatctattgtcggtagggatgccgacggctttctatttatttttttctggtatctatcaggacacaccaggtgaactcgcgaattttatgcgtgattatcttatctccatgactgcattttccatgatgtcaacagctatcttctcattcccagttgttttacataccgacaagatcaacaactggcagaaaacattgcgtcatagccctgtaaatatggtagaatattatctatcaaagataacaagtatgctggttgattatttggtttcaatcttggtggttttctcagttgggcattttgtaagaggtgtggacatgtctcttggaaattggattggggctgcacttttgctgatagtaggaagtattgccttcgtagcgcttggtttgaccttgactctcttaccaactagtcagttgatgtctgtcgtgggcaatcttctttatctagggttggctgttttaggtggactctggatgcctatctctttatttccagactggatgcaagtagtaggtaagtgtctcccgacctatcagttgatggagttgctcaagaccttcttaaatgagggtggcatcaatctatcagccacagtttatttacttgttttttcagtagttttgtttggtttgaccatttaccttcaaggtcataaggagaatgcttaa

SEQ ID NO: 920 - DNA, 1098 bp, Streptococcus pneumoniae
atgcttgaaagactgaaaagcatacattatatgttttggatcagtttaatttttatggttttccccatcctaactgtagtgactgggtggctttctgcctggcatttattgattgatattctatttgtagtggcgtatttgggtgttttaacaactaagagccagcgtctatcttggctatattggggcatcctgctgacttatgtagttgggaatactgcctttgtggctgttaattatatctggtttttctttttcctatccaatctcttaagctatcatttcagcgtaggtggtttaaagtctttacatgtctggacttttcttcttgctcaagtccttgttgtgggtcaactgttgatttttcagagaatcgaagttgagtttctattctatctacttgtaattcttgcttttgtcgatttaatgacttttggcttggttcggattcgaattgtggaggatttgaaagaagcacaggctaagcaaaatgcccagataaatctattgcttgctgaaaatgaacgcaatcgtatcggtcaagatttgcatgatagtctggggcatacctttgctatgcttagtgttaaaactgatctagccttgcagttatttcagatggaggcttatccacaggtggaaaaggaattaaaagaaattcaccagatcagcaaggattccatgaatgaagttcgaactatcgtggaaaatcttaagtctagaactttgacatccgaactagagactgtgaaaaagatgttagaaattgctggaattgaggtggaaacggataaccaactagatactgctagccttactcaagaattggagtcaatggcttctatgattttgcttgagttggtgaccaatatcatcaaacatgccaaagcgtctaaagcttacttaaaattagaacggacagagaaggaactcattttaacagtaagtgatgatggctgcggctttgcttttctaaaaggagatgagctccatacagtccgagatcgtgtttttccattttcaggagaagtaagtgtaatcagtcagaaacatccaacggaagtgcaagttcgactaccttataaggagagaaactaa

SEQ ID NO: 921 - DNA, 600 bp, Streptococcus pneumoniae
atgaaagtattagtcgcagaagatcaaagtatgttgcgagatgccatgtgtcaattgctcacgcttcaaccagatgtggagtctgtccttcaagccaagaatgggcaagaagcaatccaactattagaaaaggagtctgtagatatcgccatccttgacgtagaaatgcctgttaagacaggtcttgaagtcttggagtggatacgatcagaaaagcttgaaacaaaggtggttgtggtgacgaccttcaagcgtgctgggtattttgaacgtgcggtcaaggctggagtggatgcttatgtattaaaggaacgaagcattgcagacctcatgcaaaccttgcacaccgtcctcgaaggacgcaaggagtattcgcctgaattgatggaaatggtgatgacccgtcccaatccgttgacagaacaagagattgctgtcttaaagggaatcgcccggggcttatccaaccaagaaatcgcagatcagctttacctctcaaacggaactattcgaaactatgtcaccaatattctttcaaaactggatgctggtaatcgaacagaggcagctaatatcgcaaaagaatctggttggttatga

SEQ ID NO: 922 - DNA, 1011 bp, Streptococcus pneumoniae
atgaatgcagatgatacagtaaccatttatgatgtcgctcgtgaagcaggtgtttccatggcgacggtcagccgtgtggtcaatggcaataaaaatgtaaaagagaatacccgtaaaaaagtgctagaggtaattgatcgtttggattatcgtccaaatgcagttgcgcgtggtcttgcaagtaaaaagacaaccactgtcggtgtcgtgattccaaatattaccaatggttatttttcgagtttggctaaggggattgatgatattgcagaaatgtacaagtacaatattgtcctagctaatagcgatgaagataacgagaaagaagtttctgttgtcaataccctcttttcaaagcaggtagatggcattatctatatgggttatcacttgacagataaaattcgctcagaattttcgcgttcacgtactccgattgttctcgcaggaactgtcgatgttgagcaccagttgccaagtgtcaatattgactataagcaagcaacaattgatgcagtgagttaccttgctaaagaaaatgagcgtattgctttcgttagcggtccgctagtggatgacatcaatggtaaggttcgtttagttggctacaaggaaaccttgaaaaaagcaggaatcacttatagtgagggtttggtatttgaatctaaatatagctatgatgatggttacgccttagcagagcgtttgatttcatcaaatgcaactgcagcagttgtgacaggtgatgagttggcagcaggagtcttgaacggtttggctgataagggtgtttctgtgccagaagattttgaaattattactagtgatgattcacaaatctcacgctttacccgtccaaacttgacaacgattgcccaacctctttatgaccttggtgccattagtatgcgtatgttgaccaagattatgcataaggaagagttggaagaacgtgaagttctcttacctcatggtttgacagaacgtagctcaacacgaaaacgtaaatag

SEQ ID NO: 923 - DNA, 393 bp, Streptococcus pneumoniae
ctaatactcttcgaaaatctctgcaaaccacgtcacgtcgccttaccgtatgtatggttactgacttcgtcagtttcatccacaacctcaaaaacatgttttgagctgacttcgtcagtttcatccacaacctcaaaaacatgttttgagctgacttcgtcagtttcatccacaacctcaaaaacatgttttgagctgacttcgtcagtttcatctgcaacctcaaagcagtgctttgagctgacttcgtcagttctatctacaacctcaaagcagtgctttgagctgacttcgtcagttctatctgcaacctcaaaacagtgtgttgcacagcctttaaccagccgcctagtccgctctatggtattcattaagtcaacatctcttgtttaa

SEQ ID NO: 924 - DNA, 339 bp, Streptococcus pneumoniae
atgaataccatagagcggactaggcggctggttaaaggctgtgcaacacactgttttgaggttgcagatagaactgacgaagtcagctcaaagcactgctttgaggttgtagatagaactgacgaagtcagctcaaagcactgctttgaggttgcagatgaaactgacgaagtcagctcaaaacatgtttttgaggttgtggatgaaactgacgaagtcagctcaaaacatgtttttgaggttgtggatgaaactgacgaagtcagctcaaaacatgtttttgaggttgtggatgaaactgacgaagtcagtaaccatacatacggtaaggcgacgtga

SEQ ID NO: 925 - DNA, 963 bp, Streptococcus pneumoniae
atgcctaagaaaatccttgttttacatacgggtggaactatttccatgcaggccgatgcttctggcgctgttgtgacgagttcagataatcccatgaaccatgtgtccaacccacttgaaggaatccaagtccacgccttggacttttttaaccttccaagtccccatatcaaacccaaacatatgctggtcctctaccagaaaattaaagaggaagcagataactacgatggagtggtgatcacacacggaaccgatactttagaggaaacagcctatttccttgataccatggaagttccccatatgcctatcgttctaacaggagccatgcgtagctccaatgagctcggtagtgatggtgtttataattacctaagtgctttacgagtggccagtgatgacagggctgctgacaaaggagttttggtcgttatgaacgatgaaatccacgctgccaagtatgtcaccaaaacacatacgactaatgtcaacaccttccagactccaacacatggccccctcggtctcatcatgaaacaggaaatcctctacttcaaaacagctgaacctcgtgttcgctttgaccttgatcacatacaaggtttagtccctatcatctcggcttatgctggtatgacagatgagctgattgatatgctggatttagaacacttggacggtttgattatccaagccttcggagctggtaatattcccaaagaaacggctcaaaaattagaaagccttctgcaaaaaggaatcccagtcgctctggtatcacgatgctttaacggtattgccgagcctgtttatgcctaccagggtgggggcgtacagttgcaaaaagcaggcgttttctttgttaaagaactcaacgcccaaaaagcccgcttgaaactcctcatcgccctcaatgccggactaacaggacaggctttgaaagactatatggaaggctaa

SEQ ID NO: 926 - DNA, 1389 bp, Streptococcus pneumoniae
atggaagtcaaagctgttttttttgatatcgatggaaccttggtcaacaatcgcaagagtgttttgaaatccactaaggatgcgattaagattgtcaaagaacaaggggtactagttggcgtagcgacagggcgaggacctttttttgttaaggaattgatggacgatttggatctggattttgcggtaacctataatggccagtatatctttagtaaagacagagtcttgttcacgagccctatttccaagttacatttgcgccatctaattagctatgctaaaaaagagggcacggagattgccctagggaccaaggatgccatgttgggttctaaaatcatgtcctttggtctgggttctttttcccaacgaattagtcgcttcgttccctctgttttaactcggacggtgagtcagtcttttaatcgcatggtcagcaaggttgttccccaaaaggaagaggacctgcttcacctgatgaatcagcctatctaccaagttttgatgctgatgacaccagaagaatctgagaaggcggcagctgattttgaagacttgaaattgacacgtagcaatccttttgcatcggatgtcatcaatcagggaaattctaaattagaaggcattcgccgagttgggaaagaatatggctttgacctcaatcaagtcatggcttttggtgactcagataatgaccttgaaatgctggctggcgtcggtatgtcggtcgctatgggaaatggtagtagcagtgtcaaggaagctgccaagcacattaccactagcaatcaacaagatgggatccacaaggccttggaacattttggtgttttgtcttcagaaaaagtctttgtcagccgtgactatcatttcaataaggtcaagaccttccaccacatgatggatgaacgaacccaagaagaacctcgagcttgggatttagagggtgcaacccatagggctggttttaaaatagaagaattggtggagtttgttcgagcagccagtccttctgaagaagattttggtcaagctgtatcgcaacttcatcaggcccttgataaggcagcagataaagtagccaagaagacacctgctcagcaagatttgatagggcaagtggatgccttgattgacacgctttacttcacctacggcagttttgtcttgatgggggtggacccagaacgtatttttgatattgtccatcaggccaatatggggaaaatttttccagatggcaaggctcattttgatccagtgacccataaaatcttaaaaccagataattgggaagaaaaatatgctccagaacctgctattaaaaaggaactgcagcgccagctcaaggcttacgaacgccataaagagagaaataaatcgtaa

SEQ ID NO: 927 - DNA, 453 bp, Streptococcus pneumoniae
atggcacaacgttaccaaaatatcatggtcgcaatcgatggttctaaggaagcggacttggcttttgtcaagggagttcattctgctctacgaaacgacgctaaactcaccatcgcacatgtcattgacacacgcgctctccaaagcgtatccacctttgatgctgaagtttacgaagaactccaagtcgacgctgaaagtctgatgaaagagtacgaaaaacgtgctaaagatgctggggtagcagatgttcatatcgtcattgaaatgggaaatccaaagaccctgctagcacgtactattccagatgccgaggaagtggacctcatcctcgttggcgcaactggtctcaacgcctttgaacgcctcttggtcggctcttcatctgaatacatactccgccatgctaaggtcgatttgctggttgtgagagaacaagaaaaaaccttataa

SEQ ID NO: 928 - DNA, 291 bp, Streptococcus pneumoniae
atgaaaaactcttttcaaaaatcaaatttcctttattatggaattatcctagtttcagtcttggtagaagtgatcatgatctgtcaattagagagtctggtaccgcttctttatccaagttttattggatttttagtttttcatgtactctaccatctaatcttatttctagttgcaaaacgaagcgggcgttgggattacttgatgatatgggggcttttcctcatgtttaatcttctttatgactcctttctaggcttgctttttctaggtttatcttttggtttgtga

SEQ ID NO: 929 - DNA, 717 bp, Streptococcus pneumoniae
atgaaagaatataacaagtctagtaaggtagagcatgttgcttatgatatccgaggtcctgtattggaagaagccatgctgatgctagcgaatggagaaaagatcttacgtctgaatacaggaaatccagcacaatttggctttacagcgccagacgaggtcattcatgacttgattatgaatgcgcgtgatactgaaggctattctgactccaaaggaattttctcatcccgtaaggccatcatgcagtatcgccagctgaagatattcccaaacgtagatattgatgatatttactttggaaatggtgtcagtgagttgattgtcatgtccatgcaggggcttttggacaatggggatgaggtcttagtgccaatgccagactatcctctatggacggcggctgtcagcctagctggaggaaatgccgttcactatatctgtgatgaagctgttgaatggtacccagatattgacgatatcaagtcaaaaatcacttccaataccaaggcaatcgtccttatcaatccaaataacccaactggagccctttatcctaagaaactcttgctggagattattgagattgcccgtcaaaacgatttgattatctttgcggatgaaatctatgaccgcatggtaatggacggacatgtgcatacgcctgtggcgagcttggcaccagatgtcttctgtgtcagcatgaatggtctgtaa

SEQ ID NO: 930 - DNA, 333 bp, Streptococcus pneumoniae
ttggacagcatattgagccctttcgatatatcccttaacatgagtcttatggccagacaagaccatccaacccacacggaaacctgctatgcggtgggatttttacagaccattcatgctgacacagaagacatctggtgccaagctcgccacaggcgtatgcacatgtccgtccattaccatgcggtcatagatttcatccgcaaagataatcaaatcgttttgacgggcaatctcaataatctccagcaagagtttcttaggataaagggctccagttgggttatttggattgataaggacgattgccttggtattggaagtgatttttga

SEQ ID NO: 931 - DNA, 375 bp, Streptococcus pneumoniae
ttggcccaacaagtcgtacaaacttccttggggggtcaccaatcagtcgatgaattgcttcttcctggtggacgaatctacgagcaaagaaatttcatctataatgccattcaagatattccaggtttgtctgccgttaaacccaaggcggggctctatatcttcccaaaaatcgaccgcaatatgtaccgtatcgatgatgatgagcagtttgtccttgatttcttgaagcaggaaaaggttctcttggttcatggtcgaggctttaactggcaggaaccagaccacttccgtatcgtttaccttcctcgtgttgatgagttagcccaaatccaagaaaagatgactcgtttcttgaaacagtatcgtagatag

SEQ ID NO: 932 - DNA, 135 bp, Streptococcus pneumoniae
gtgaaacgtacttatcaaccaagtaaacttcgtcgtgcgcgcaaacacggattccgtaaccgtatgtcaactaaaaatggtcgtcgcgtattggcagctcgtcgtcgtaaaggacgcaaagttttggctgcataa

SEQ ID NO: 933 - DNA, 201 bp, Streptococcus pneumoniae
ttgcatctactgaacttttttacaaaaataaaaatcagtagactcgagttcctactgatttttgatagaattcgtttggattatgcagccaaaactttgcgtcctttacgacgacgagctgccaatacgcgacgaccatttttagttgacatacggttacggaatccgtgtttgcgcgcacgacgaagtttacttggttga

SEQ ID NO: 934 - DNA, 654 bp, Streptococcus pneumoniae
gtgacgattctaggaaaagatacagttcaacaatctgcgaaaggtgaatctgtaactcaagaagctacaccagagtataagccagaaactacaccaggtggagataagggaggcaatactggaaactcagatgctaatgcgaatgcaggcggtggtagccaggcgggtggatcagctcacacaggttcacaaaactcagctcaatcacaagcttctaagcaattagctactgaaaaagaatcagctaaaaatgccattgaaaaagcagccaaggacaagcaggatgaaatcaaaggcgcaccgctttctgataaagaaaaagcagaacttttagcaagagtggaagcagaaaaacaagcagctctcaaagagattgaaaatgcgaaaactatggaagatgtgaaggaagcagaaacgattggagtgcaagccattgccatggttacagttcctaagagaccagtggctcctaagacaacaagtgcaccgcaagcaactgcaggaacaatgcaagatgttacctaccagtcacctgctggcaaacaattacctaacacaggttcagcatcaagtgcagcacttgctagtcttggtctagtggtggcaacaagtggttttgctttgctaggaagaaagactagacgtagaaaatag

SEQ ID NO: 935 - DNA, 225 bp, Streptococcus pneumoniae
atgatttttgatacacatacacacttgaatgtagaagaatttgcaggtcgtgaggcagaagaaattgccttggctgatgagatgggtgtgacacagatgaatattgttggttttgatataccgacgattgagcgtgccttggagttggtagatgagtatgagcagctctatgcgactattggttggcatcctacagaagctggtatttatacagtaggaagttga

SEQ ID NO: 936 - DNA, 543 bp, Streptococcus pneumoniae
ttgttggataagttaaaacatcccaaggttgtggctttaggtgaaattggcttagactaccattggatgacagcgcctaaagaggtgcaggagcaggtttttcgccgtcagattcagctatctaaggacttggatttgccttttgttgtccatacccgtgatgcgctggaagatacctatgagattatcaagagtgagggcgttggtcctcgtggtggtatcatgcattcattttcagggacgcttgagtgggcagagaagtttgtggatcttggtatgaccatttccttctcaggagtggtgactttcaagaaggcaactgacctccaagaagcagctaaagagttacctttggacaagatgttggtggaaacagatgcgccttacttagcacctgtacccaagcgtggtcgtgaaaataaaacagcctatactcgctatgtggtcgactttatcgctgacttgcgtggtatgacgacagaagagctggcggtagcaacgactgcaaatgcagaacgaatttttggattggacagcaagtaa

SEQ ID NO: 937 - DNA, 561 bp, Streptococcus pneumoniae
atgaaagagaaaatttctcaagttatcgtggttgaaggtcgcgatgatacggtcaatctcaagcgttatttcgatgtggagacctatgagacacgaggttctgccatcaatgatcaggatatagagcgaattcagcgtctacaccaacgtcatggagtcattgtctttacagacccagattttaatggggagcggattcggcgcatgatcatgacggccattccaacagttcagcatgcctttctcaagcgagatgaagctgttcccaagtccaagaccaaggggcgttctctgggaattgagcatgccagctatgaagacctgaaaacggctctagctcaggtgacagaacaatttgaacatgagagtcagtttgacattagtcgtagcgatttgattcgccttggttttctagcaggggcagacagccgtaagcgtagagaatatctcggagagactctccgaatcggctattctaacggcaagcaactcctcaaacgcctagagttgtttggggttactttggcagaagtggaagaagctatgaaatcttatgagtag

SEQ ID NO: 938 - DNA, 912 bp, Streptococcus pneumoniae
atgttaattggtcaaaaaattaaagagattcggatagaaaaaggaattagtcgtccagatttttgtggagatgagcaagaactgacagttcgtcaactgtcgcgaattgaaagtggagcttcgcaaccgagtttgcccaagttagactatattgctcgccggctaggagttccagtttatagccttatgccggatttttcagctcttccttctgcttatttagaattgaaataccagattttacgtgaaccaatctatgataaagaagaggagtatgataagaaagaagcgtgtttggaagagatagaggatttattttatgagcaacttcctaatgaggagaaagtatggtttgaagctactagagcaacgatagatgttattcgaagcggacaaccagaatacggggaaaccgtactggacgattattttaaaacaatttatgataaggaattgtttttgataaatgaattagaagttatcaacttatattttgctatagtgcttacaaagataaaacaaggtcaaaatcagattgaagaaattaacagaattcattcgtttttagttcgtttgacaaatcatgtagaattaattgcaccagaatatctgtttgctttaagtaacactttgttttcgggtctagcctgtttggataatttgtcgtcttatgattcactaggagcttatatctttagccttaatcatataatggaaaaaacacaagatttccagaagaaaccaattatattaatgttggagtggaaattatctctaataataaacaatgattatgtttctgccgaacagttctatcagaaatcgaagctatttgctgatataatagaaaattcttatttagttactatgttagaaaaacaatggcaagaagatttaaaaaaatatttataa

SEQ ID NO: 939 - DNA, 297 bp, Streptococcus pneumoniae
atgaaacaaacagttaaaaaattagctcttgtagcgagcattgcagcaacattaggtggaagtgtagcagttgcctctgcagccgttcaatacccagaaggtggtgtttggacttatggttcaggtaacggtggtgcttactcaaactactatcacccttcaaaataccatagttcaacagttgttagcagaaaaactggttcatctgacaagggatatgctggtgctggagggacttctcgtgcatggattcgtacttcttggggagagaaagttgcattctactataatgtttag

SEQ ID NO: 940 - DNA, 807 bp, Streptococcus pneumoniae
atgatgaaacgtttatttattttgatttcaatggtattagtatcgctttatatggtgataacttccgttgaccatcgagaagagattttatttggtaactatccttctgttgatgtgacaggaatgatgataaatcaaccagtagctagtcgcgaagaggtgacagaggctttgagtcacttggcggtagagcacaatagtctcattgctcgtcgaatcgttgagccaaatgaagctggagaaacacgctttacctatgccacttatggtgagggaaagcttccagaaggtctgaccatttcctccaaggagagtgcagaaacgagtgatttattagggtcttacttgattgtatcaggaagtttggatggagtgagcttacagaccaccttgaaagagcttggttatcaaggctttgtttcgaatggagaagatccattttcgatagtcttactattgacggccacccctatggtgctactgagtttagctatttttctgctgacctttatgagtctgaccctgatttatcggatcaaatcccttcgtcaggcagggattcgcttaatagctggtgagagcttgtttggagttgctctcagaccagtgttagaagatgtgagacagcttatctgctcagtgctggtatccagtcttttgggattggggattctctggtatcaaggtgccttgtttatggcaacggtgcaactggtcatcattgctcttctactttatggattgcaccttggcagggatttctaccttactaagtgtcgtctatctacttggtttacaggaaaatag

SEQ ID NO: 941 - DNA, 1350 bp, Streptococcus pneumoniae
gtgccttgtttatggcaacggtgcaactggtcatcattgctcttctactttatggattgcaccttggcagggatttctaccttactaagtgtcgtctatctacttggtttacaggaaaatagtctggtggatctattgaaagggaaactccctctcaaacgtatgatgacattgatgatggtggggcaactcttagctgtattggtggtcggatcgagtgcgacacgtctcctaccccactaccgtgaaatgcaggaaatggagagagctagcaataaatggagccagtcctcagaccgttaccgtctatcctttggttggtctagtgcatttgccgatgaagaaggaacgcgtaaggataatcgtgagtggcagacatttactgaagaacggttagccaatacagactctttttatattatgagcaatgttgacaatttctcagatggagcagaagtggacctagatggcaatcgtctcagtgactacacaccgtcagggaatgttatctatgtctcaccgcgctatctgatagaagaaaagattaccgtttcttcagagtttatggacaagatgcaaaacttgtctgagggagagtttgggctgatcttgcctgagagcttgcgagagcagtctatctactaccaaggattgtttacagattacctgcaaaacttttcatctgaaagtgtagaagtgacgagtcagaaacactacctcccacaggtaaggctagcttttacagaaataggacaggaacgtttcctctataatgatgggtacaagacaacacgccagtacctaaaagatccgattattgtagttctaacgccgcaagcgactggaacaagacctgttgcagggatgttgtggggaactacggctaatagtgccttgaaactagatcgatatggagacagcatcacagctctaaaagagcaaggtctgtatcacaaggtttcttacttggtaaaaagccagctattttttgccaaggtactaaatgacaaacgggtggagttttactctctccttattgggacgattttgaccctgtctacggctatcttgttatttgattccatgaatcttctctattttgagcagttcagacgggatcttatgattaaacgtcttgctggtatgacaatctatgagcttcatggcaagtatttactggcgcaaggaggagttctcttgcttggcctagtcctatctagtattttgacaagagatggtttgattagcgctctagttgtagctttgtttacgcttaacgccctcttgattttagtaaggcaggacaaaaaagaagaagctggtagcatggcagtattgaaaggaaaataa

SEQ ID NO: 942 - DNA, 642 bp, Streptococcus pneumoniae
atgattgatattcaaggattggaaaagaaatttaatgaccgcgcgattttctctggtttgaatctcaagctggagaagggcaaggtttatgccttaatcggaaagagtggaagcggaaagacgacgctgctgaatatcttgggaaagctagaaaagatagatggaggaagggttctctatcaggggaaagatttaaaaaccattcccactcgtgagtattttcgagatcagatgggctatctctttcaaaattttggcctcttagaaaaccaatcaatcaaagaaaatttggatttgggttttgttggtcagaaaatctcaaaagtagaacgtttggaaaggcaagtgggggctttagaaaaagttaatctagggtatttggatttagaacaaaaaatttatactttatctgggggagaggcccaacgagttgcccttgcaaaaactattttgaaaaatccacccttgattttggcagatgaaccaacagcagctcttgatcctgaaaattcagaggaggttatgaatctcttggtggatttgaaagatgaaaatcgaattatcatcattgcgacccataatcccctagtctggaataaggctgatgaaatcattgatatgaggaaacttgctcatgtgtga

SEQ ID NO: 943 - DNA, 309 bp, Streptococcus pneumoniae
atgtgtgaaaaaatccgtattcgcagggtatctgattatcctagtgccagaggtggtttagaagatatcctcatcatggaaaatatgaccaatcatctccttttggttcaaatccgagtgcatggctatttgcttgattttgctagtattgaagggcaaaggcaaaagcattatcgtttgaaaaatttacctcagacggttgaactgacagtggatgatgtggaggaggatgtggatttgaccctacccgaaaatcgaagttatcaagaagctgatttttttgaacgcatgtttcgagagaactgttaa

SEQ ID NO: 944 - DNA, 507 bp, Streptococcus pneumoniae
gtgcatgagaataggcgtcgtgatgtagtaaggcaaattagccactaccttgattggcaggttaggatttttaaaattttggatatgttgcgccaaatcaaccttgagaatatcttcgttaactacagtcacattatcaaaatcacgcagggtatctgccaaaattggcaccaaacggtggtcaatctcaaaagccatgacttgggctgcacgctcagccaaaaattctgtcaaggcaccaatacctggcccgatttcgatgacattgacctgatcatcaatttcagccgtatccacaattttttgaaggatattggtatccgtcaagaaattttgcccaaaggactttttaaaggtaaaaccgtgacgctccaacactgccttggtcacgctataatctgcaattctcatctattctcttttctattatctgttactactattgtaacacattccccttgtattttgggaatgaaaatcataccaaaaaactatctttcctcatga

SEQ ID NO: 945 - DNA, 873 bp, Streptococcus pneumoniae
atgagaattgcagattatagcgtgaccaaggcagtgttggagcgtcacggttttacctttaaaaagtcctttgggcaaaatttcttgacggataccaatatccttcaaaaaattgtggatacggctgaaattgatgatcaggtcaatgtcatcgaaatcgggccaggtattggtgccttgacagaatttttggctgagcgtgcagcccaagtcatggcttttgagattgaccaccgtttggtgccaattttggcagataccctgcgtgattttgataatgtgactgtagttaacgaagatattctcaaggttgatttggcgcaacatatccaaaattttaaaaatcctaacctgccaatcaaggtagtggctaatttgccttactacatcacgacgcctattctcatgcacttgattgagagtggcattccttttagtgagtttgtggtcatgatgcagaaagaagtagcggaccgcatttcagcccagcctaacaccaaggcttacggtagcttgtctatcgccgtgcagtattacatgacagccaaggttgcctttatcgtgcctcgtacggtctttgtgccagcgccaaatgtggattcagccatcttgaaaatggtgcgccgtccagagccagctgtagcagtggaagatgagaacttcttctttaaggtttccaaggctagttttacccatcgccgtaagaccttgtggaataacttgacaggttactttggcaagactgaggaagtcaaggacaagctgaccaaggctttggaccaggcagacttgtcgccaagtgtgcgtggggaagctctcagcttggcagaatttgccggtctagcagacgcacttaaagggcaaggactctaa

SEQ ID NO: 946 - DNA, 879 bp, Streptococcus pneumoniae
atgcagggacaaatcattaaagccttggctgggttctactatgtagagagtgatggccaagtctatcaaacacgcgcgcgtgggaatttccgtaaaaaagggcataccccttacgttggggactgggtagatttctctgccgaggaaaattcagaaggctatattctcaagattcacgaacggaaaaacagtctggtccgtccgcctattgtcaatatcgaccaagctgtagtaatcatgtccgtcaaggaacctgattttaacagcaatttgctggatcgtttcttggttcttttggagcacaagggcatccatcccattgtctatatttccaaaatggatttgttggaagataggggagaactggatttttaccagcagacctatggtgacatcggctatgactttgtgaccagtaaagaggaactcctgtctttgttaacaggcaaggttacggtctttatggggcagacaggtgttgggaagtcaactcttctcaataaaatcgcaccagacctcaatcttgaaacgggagaaatttcagacagtctaggtcgcggtcgccataccactcgagctgttagtttttacaatctcaacgggggtaaaatcgcagatacaccaggattttcatccttggactatgaagtatcaagggctgaagacctcaatcaggctttcccagagattgctactgttagccgagattgtaagttccgtacttgtacccatacccatgagccgtcttgtgccgtcaaaccagctgttgaagagggtgttattgcaaccttccgttttgacaattacctgcaattccttagtgaaattgaaaatcgtagagaaacctataaaaaagtcagcaaaaaaattccaaaataa

SEQ ID NO: 947 - DNA, 903 bp, Streptococcus pneumoniae
atgaagtatcaagggctgaagacctcaatcaggctttcccagagattgctactgttagccgagattgtaagttccgtacttgtacccatacccatgagccgtcttgtgccgtcaaaccagctgttgaagagggtgttattgcaaccttccgttttgacaattacctgcaattccttagtgaaattgaaaatcgtagagaaacctataaaaaagtcagcaaaaaaattccaaaataaggagaaacctatgtctcaatacaagattgctccgtcaattctggcagcagattatgccaactttgaacgtgaaatcaaacgtctagaagcaactggggcagaatatgcccatatcgatatcatggacagtcattttgtaccgcaaatcagttttggtgcaggtgtggtcgagagccttcgtcctcatagtaagatggttttcgattgccacttgatggtgtcaaaccctgagcatcatctggaagattttgcgcgtgcaggtgcagacatcatcagtatccatgtagaagcaacacctcatattcatggcgccctccaaaaaattcgttcactcggagttaagccttcagtcgttatcaatcctggcacaccagttgaagccatcaagcacgtccttcatctagttgaccaagttttagtcatgacggttaatccaggttttggtgggcaagcctttctgccagaaaccatggataaggttcgtgagttggttgctcttcgtgaggaaaaaggtttgaactttgaaatcgaagtggatggtgggattgatgaccaaactattgctcaagccaaagaagctggtgcgactgtttttgtagcaggttcctatgtctttaagggagaagtcaatgagcgagtacaaactctcagaaaacaactggactag

SEQ ID NO: 948 - DNA, 663 bp, Streptococcus pneumoniae
atgagcgagtacaaactctcagaaaacaactggactagggttgcagtttttgcaggcggaaaccgcggtcattatcggacagattttgatgcttttgttggggtggatcgaggctcgctctgggtcttggaagaagacttacctcttgctctagcagtcggagattttgattctgtgacggaagaagagcgacaggtgattcaaaaacgtgcccagtattttgtccaagcccgaccagaaaaagatgataccgatttggaattggctctcttaaccatctttgagaaaaatcctcaggctcaggttactattttcggtgccttgggtggccgtattgaccatatgttggccaatgtctttctgcctagcaatcctaagttggcaccctatatgcatcaaatagaaattgaggatgggcaaaacttgattacttattgtccagaagggaccagtcagctagaacctcgttcagactacgactatctagcctttatgccagttcgggatagccagctgactattcttggagccaagtatgagttgacagaggaaaattttttctttaaaaaagtgtacgcttctaacgaatatatagatagggaagtgtcggtaacttgcccagatggttatgtggtcgtactgcatagcaaggataggaggtag

SEQ ID NO: 949 - DNA, 1215 bp, Streptococcus pneumoniae
atggaaagtttacttattctattattaattgccaacctagctggtctctttctgatttggcaaaggcaggataggcaggagaaacacttaagtaagagcttggaggatcaggcagatcatttgtcagaccagttggattaccgctttgaccaagccagacaagccagccagttagaccaaaaagatttggaagtggctgtcagcgaccgtttgcaagaagtgcggattgaattgcaccaaggcctgacccaagtccgtcaagaaatgacagataatctcctccaaactagagataagacagaccaacgtctccaagccttgcaggaatcaaatgagcaacgtttggaacaaatgcgccagacggtcgaggaaaaactagaaaagaccttgcagacacgcttacaggcttcctttgagacagtttctaaacaactggagtctgtcaatcgtggtcttggagaaatgcagacagttgcccgtgatgtcggagctcttaacaaggttctctctggaaccaagacgcgagggattctgggagaattgcaactggggcaaattattgaagacatcatgacacctgcccagtacgaacgagaatacgcaacggttgaaaactctagtgaacgagtggagtatgccatcaagttacccggacaaggcgaccaagaatacgtctatcttccaattgactctaagtttccactggcagattattaccgcttggaagaagcctatgagacaggtgacaaggatgagattgaacgctgtcgtaagtcactcctagcaagcgtcaagcgctttgccaaggatatcaagagcaagtacatagcaccgcctcggacaaccaactttggaatcttgtttgttccgacagaaggtctttattcagagattgtgcgcaatccggtcttctttgatgatttgagacgggaagaacagattattgttgcaggaccaagtaccctatcagcccttcttaactccctatcagttggtttcaagacccttaatatccaaaagagtgccgaccatatcagcaagactcttgccagtgtcaagaccgagtttggcaagtttggtggtattctggttcaggcacaaaaacatctccaacatgcctctggcaatattgatgaattattaaaccgtcgtaccatagctatcgagcggacgctccgtcacattgagttgtcagaaggtgaggcctgcgcttga

SEQ ID NO: 950 - DNA, 942 bp, Streptococcus pneumoniae
atgaagattagtcacatgaaaaaagatgagttatttgaaggctttaacctaatcaaatcaggtgacctgaggcaaactcgagttgggaaaaactacctagcctttaccttccaagatgatagtggcgagattgatgggaagctctgggatgcccaacctcataacattgaggcctttaccgcaggtaaggttgtccacatgaaaggacgccgagaagtttataacaatacccctcaagtcaatcaaattactctccgcctgcctcaagctggtgaacccaatgacccagctgatttcaaggtcaagtcaccagttgatgtcaaggaaattcgtgactacatgtcgcaaatgattttcaaaattgaaaatcctgtctggcaacggattgtccgaaatctctacaccaagtatgataaggaattctactcctatccagccgccaagaccaaccaccatgcctttgaaacgggcttggcttatcatacggcgaccatggtacgtttggcagacgctattagcgaagtttatcctcagctcaataagagcttactctatgcggggattatgctgcatgacttagctaaggttatcgagttgacggggccagaccagacagagtacacagtgcgaggtaatcttcttggacatatcgctctcattgatagcgaaattaccaagacagttatggaactcggcatcgatgataccaaggaagaagtcgttttgcttcgtcatgtcatcctcagtcaccacggcttgcttgaatatggaagtccagtccgtccacgtattatggaggcagagattatccatatgattgacaatctggatgcaagtatgatgatgatgtcaacagctctggctttggtggataaaggagagatgtccaataaaatcttcgctatggataatcgttccttctataaaccagatttagattga

SEQ ID NO: 951 - DNA, 828 bp, Streptococcus pneumoniae
atgaaattaagaagaagtgatcggatggttgtcatttccaactatttgattaataatccttataaactaactagtctcaatacttttgctgaaaagtatgagtctgctaaatcatccatctcagaagatatcgtcattatcaaacgcgcctttgaggaaattgaaatcggtcatatccagacagtgactggggctggcggaggtgtcatcttcacaccgtctatttcgagtcaggatgctaaggaaatggttgaagacttgcgtaccaagttgtcagaaagtgaccgtatcttgccaggtggttatatctatctgtctgatttgcttagcacaccagccatcttgaaaaatattggtcgtattattgccaaaagctttatggaccaaaaaattgacgcggttatgaccgtagcaactaagggtgtgccacttgcaaatgcagttgccaatgtcctcaatgtctcttttgtcattgtgcgccgtgacctgaaaattaccgaaggttcaactgttagcgtcaactatgtttcaggttcaagtggtgaccgtatcgagaaaatgttcctttcaaaacgtagtcttaaggcaggcagccgtgtcttgattgtggatgacttcttgaaaggtggcggaacggtcaacggtatgattagtctcttgcgcgagttcgactcagaactggcaggtgtagcggtctttgcggacaatgcccaagaagaacgtgaaaagcagtttgactacaagtcactcttgaaggtaactaatattgatgtcaagaaccaagccatcgatgttgaggttggcaatatctttgacgaagataaataa

SEQ ID NO: 952 - DNA, 210 bp, Streptococcus pneumoniae
gagatagaactaaaggttggaacgattgtcccagcctttctttgcaaacagaatagaaggaagcttatgaaaacaccatttatcaatagagaagagttagaagcgattgttgccgagttcccgactccctttcacttgtatgatgagaaggggattcgtgagaaggcaagagccgtcaaccaagctttttcgtggaaacaagggctttaa

SEQ ID NO: 953 - DNA, 384 bp, Streptococcus pneumoniae
ttgttgccgagttcccgactccctttcacttgtatgatgagaaggggattcgtgagaaggcaagagccgtcaaccaagctttttcgtggaaacaagggctttaaggaatattttgcagttaaggctactccaactccagctattttgaaaattctccaagaagaaggttgtggtgtggactgctctagttatgtagagcttttgatgagccataaactggactttctgggttctgagattatgttctcttccaacaacacgccagacaaggaatacgcctatgcacgtgaattgggtgcgaccattaacttggatgcctttgaagatattgaacattctggagagagcagcaggtattccagaaatcatctcttgtcgttataa

SEQ ID NO: 954 - DNA, 300 bp, Streptococcus pneumoniae
atgatttctggaatacctgctgctctctccagaatgttcaatatcttcaaaggcatccaagttaatggtcgcacccaattcacgtgcataggcgtattccttgtctggcgtgttgttggaagagaacataatctcagaacccagaaagtccagtttatggctcatcaaaagctctacataactagagcagtccacaccacaaccttcttcttggagaattttcaaaatagctggagttggagtagccttaactgcaaaatattccttaaagcccttgtttccacgaaaaagcttggttga

SEQ ID NO: 955 - DNA, 1005 bp, Streptococcus pneumoniae
gccataaactggactttctgggttctgagattatgttctcttccaacaacacgccagacaaggaatacgcctatgcacgtgaattgggtgcgaccattaacttggatgcctttgaagatattgaacattctggagagagcagcaggtattccagaaatcatctcttgtcgttataatcctggaggcgtttttgaactggggacagacattatggacaatcctggggaggctaagtttggcatgaccaaggaccagctctttgaagcctttgctatcttgaaggaaaaaggagccaagacttttgggattcactccttcctagcgtccaataccgtgacccatctctattatccagagttggctcgtcagctctttgaactggctgttgaaatcaaggaaaagttgggcatttggctagactttatcaatctttctggcggtattggtgttaattatcgtccagaccaggagccgaacgatatcgccttgattggtgagggagttcgtaaggtgtatgaagaagttcttacgtcagcaggtcttggtcaggtcaagattttcaccgaattgggtcgttttatgctggcacctcacggtgctctagtcacaagagtgactcataagaaggaaacctaccgtacctatctaggtgtggatgcctcagcagtcaacctcatgcgtccagctatgtacggagcttaccatcatattagcaacgtgacccatccagatggaccagctgaagcggtagatgtggttggttcactctgtgaaaacaatgataaatttgcagtcaatcgcgaactgcctcatacagaaatcggtgatttgctggtaattcatgatacaggtgcccacggattttcaatgggctaccagtataatgccaaattacgttctgcggaaatcctctataccgaagaaggtaaagcccgtcaaatccgccgtgcagagcgccctgaggactattttgcaaccttatatggcttcgattttgaagaataa

SEQ ID NO: 956 - DNA, 795 bp, Streptococcus pneumoniae
atgtctgaagaaacaattgattatggacaagtgacaggaatggtgcattcgacagaaagctttgggtcagtagatgggcctggtattcgctttattgtctttttgcagggctgtcacatgcgttgccagtattgccacaacccagacacttgggctatggagtccaataagtcacgtgaacggacggtagatgatgtcttgacagaggccttgcgctaccgtggtttctggggaaataagggtgggattacagtcagtggaggagaagctctcttgcagattgatttcctgattgctctcttcaccaaggctaaggaacaaggaatccactgtaccttggatacctgtgctcttcctttccgtaataaaccacgttaccttgagaagtttgacaaactcatggctgtcactgacttggttcttttggatatcaaggaaatcaacgaagaacagcacaagattgtcactagccaaactaataaaaatatcttggcttgtgcccagtatctatcagatattggaaaacctgtctggattcgccacgtgctagttccaggattgacagacagagatgatgacttgattgaacttggtaagttcgtcaagaccctcaaaaatgttgataagtttgaaattctaccttatcacaccatgggtgagttcaagtggcgtgaacttggaattccatattccctcgaaggagtcaaaccaccaacagcagatcgcgtcaagaacgctaaaaaactcatggataccgaaagttatcaagattatatgaaacgtgtacatggatag

SEQ ID NO: 957 - DNA, 927 bp, Streptococcus pneumoniae
gtgaaatctattaaacgttttgcactctcggctatgggagtggctatgttgcttgtcttgactggctgtgtcaatgtcgataaaaccacaggtcagccaacaggatttatttggaatacgatcggagcgcctatggctgaagccatcaagtacttcgctactgataaaggtctaggctttggtgtcgctatcattatcgtaaccattatcgtacgcttgattatcttaccacttggtatctaccaatcatggaaggcaacgcttcactctgaaaagatgaacgccctcaagcacgtccttgagccacaccaaacgcgtctcaaagaagcgactactcaagaagaaaaactcgaagcccaacaagctctctttgctgctcaaaaagagcacggtatcagcatgtttggcggtgtaggatgtttccctatcctccttcaaatgcctttcttctctgctatctactttgctgcccaacatactgaaggggttgctcaagcaagctacctaggcattcctctaggttctccaagtatgattttggttgcctgtgctggtgtcctttactatcttcaatcgctcctttcacttcacggagtagaagatgaaatgcaaagagaacaaatcaagaaaatgatttacatgagcccactcatgatcgtcgtcttctccctcttctcaccagctagtgtcacactttactgggttgtcggtggtttcatgatgattctccaacagtttatcgtcaactatatcgttcgtccaaaacttcgcaaaaaagtccgtgaagaactagccaagaacccaccaaaagcaagtgctttctctaaaccaagtggacgaaaagacgttacccctgaacaaccaactgctatcacaagcaagaaaaaacacaaaaatcgtaacgctggaaaacaacgttcgagataa

SEQ ID NO: 958 - DNA, 279 bp, Streptococcus pneumoniae
atgcaaaaggttagaatgattgcccaaggtagggtgcagggagtcggctttcgttggggtgtttatagcctggcccttgaaatcggtggcatcacaggtcgggtatggaataacgacgatggcacagtggaaatcttagcccaagcagactcatcagctattatggcaaaatttatccaagaaatccgaaaaggaccgacacctttttcaaaagtcagttacttagatgtcaaactgagcaactttcctccctaccctgactttaaaatcgcaaattag

SEQ ID NO: 959 - DNA, 759 bp, Streptococcus pneumoniae
ttgtgttataatatttctatgactattataacctcaaaagccaattctgtggtaaaaaataccaagaaattacaccaaaaaaaataccgcaagtcagcctatttgattgaaggctggcacttgtttgaagaagctgttcaagctggagtgacgattgagaaaatctttaccctagaaaattatcgagatcagttagcaactttttcgcaaactgtctgggtgtcagaggatattttgctagatttggcggattctcagactccacagggaattgtggccgtggttcaaaaagaagaagtaggacaagctgatttgagtcagggcaagttcttgtttttggaagatgtgcaagatcctggtaatgtaggaactatcattcgaactgcggatgcagcaggttttacaggagtgattgtttcagataagtcggcagacatctacagtctcaaaaccctacgttccatgcaaggtagtcatttccatctgcccatttaccggatgactagtcaagcgcttcttgacgaaactaaaaaggtagctatcccagtgctagcaacaaccctatctaaagattctgttgattacagagaactgccttctatagaaaattttgtactagttatgggaaatgagggtcaaggaattagtccccttatggctgaaagtgcagaccagttggtccatattagcatgaaggggcaggccgagagtttgaatgttgcggttgcagccggtattttaatcttccatttaagctaa

SEQ ID NO: 960 - DNA, 684 bp, Streptococcus pneumoniae
atgaatcacactattatacatgaccgtgcaggtctcaatcaattttacgctaaggtttatgcctttgttggtctgggaatcggactatctgctttggtatcaggccttatgttgacggtctttcagtctcagttggtttactttttgatgcaggggcgtctctggttgaccattgctacttttgcggagttggctttggttttcgttgccagtagcatggcttcaagaaatagtccagctgctcttccagtatttttactttactccgttttaaacggctttacccttagttttgtggtggctttctatactccgggtacagttttatctgcctttgtatcgagcgcccttctcttctttgtcatggcggcagttggtatttttaccaagaaagacttgagtgggattggtcgagcaatgatggcagctctcattggtttactgattgctatggtagtcaatattttcttggctagtggcttctttgattatatgattagcgtagccatggttttggttttttcagggttgattgcttgggataaccaaaagattcgcctcgcctatgaacaatcacaaggtcgtgtagcgacaggctgggtggtgtcaatggctctcagcatctatcttgattttatcaatcttttcctaagtattctacgtatctttggtcgcaatgactaa

SEQ ID NO: 961 - DNA, 216 bp, Streptococcus pneumoniae
cttatctttcaaatactgggtaaaagtgtttttgacaaaggaaatttcttcttgttgatggataaaacttttcttcatagacaactcctcaaaaatttaataaacgtattatacacctatttccaagaaaagaaaagagaaaatttaaaaaaaatcagtgtcactcaaaacactgatttcatagaccttttagtcattgcgaccaaagatacgtag

SEQ ID NO: 962 - DNA, 993 bp, Streptococcus pneumoniae
atgaagaaaagttttatccatcaacaagaagaaatttcctttgtcaaaaacacttttacccagtatttgaaagataagctagaagttgtcgaagttcaaggtcctatcttgagtaaggtcggtgacggaatgcaggacaacctgtctggtgtggaaaatccagtatcggtcaaggttctccaaatccctgatgctacttatgaagtggtgcactcacttgctaaatggaaacgccacaccttggctcgttttggctttggtgaaggagagggtctctttgtccacatgaaagcccttcgtccagatgaggattccttggatgcaacccactctgtttatgttgaccagtgggactgggagaaggttatcccaaatggtaagcgtaacatcgtttatctaaaagaaacagttgagaagatttataaggctattcgcctgactgagctagctgttgaagcccgctatgacatcgagtctatcttgccaaaacaaatcacctttatccatacagaagaattggtagaacgctacccagacttgacaccgaaagaacgtgaaaatgcgatttgtaaagaatttggagccgtctttttgattggtatcggtggcgagttgccagatggtaaaccgcacgatggacgtgcaccagactatgatgactggacaagcgagtctgagaatggctacaagggtctaaatggtgatattcttgtctggaatgagtctttaggtggagcctttgagttgtcttctatgggaattcgtgtagatgaagaaactcttagacgtcaggtggaaattacaggtgatgaagaccgcttggaattggaatggcacaagtctttgttgaatggtctattcccattgacaatcggtggaggaattggacaatctcgtatggccatgttcctacttcgcaagagacacatcggagaagtgcaaacaagtgtttggcctcaagaagtccgcgatacttacgaaaatattttgtag

SEQ ID NO: 963 - DNA, 540 bp, Streptococcus pneumoniae
atgaaaatcgtatcaggaatctatgggggacgtcccctcaagacactagaaggcaagacgacaagacctacttcggataaggttaggggagccatttttaacatgattggtccctactttgaagggggacgagtcttggacctttatgcaggtagtggtggtttatctatcgaagcagtatcgcgtggcatgtccagtgctgttttggtggagcgagaccgtaaggctcagaccatcgtggctgaaaatatccagataaccaaggaaattggaaaatttcaactcctcaagatggatgcagaaagggcattggaacaggtatctggggaatttgacctcgttttcttagaccctccctataccaaggaacaaatcgtagcagatattgaaaaaatggctgagagagagcttttttctgaagatgttatggttgtgtgcgagacggataaggccgttgaacttccagaagaaattgcctgtctgggtatctggaaggaaaagatttatggaattagtaaggtgacagtctatgtcagataa

SEQ ID NO: 964 - DNA, 357 bp, Streptococcus pneumoniae
tatgtcggtattttttttaatccccacaaacaaggatttcttcctatcgaaaatcgtaaacgggggctagaaaaggctttgggacatctggaaaatgttgaagtcgtggcttctcatgatgaattggtggtcgatgttgcaaaaagattgggtgctacttgtctagtgcgtggtttgaggaatgcgtcggatttgcaatatgaagccagttttgattactacaatcatcagctgtcttctgatatagagactatttatttacatagtcgacctgaacatctctatatcagttcatcaggcgttagagagcttttgaagtttggtcaggatattgcctgctatgttcccgagagtatt

SEQ ID NO: 965 - DNA, 717 bp, Streptococcus pneumoniae
atgaaaaaaaagattagatggcccttatacgtcattgcggccttgattgtgactttcttggcatttgtagtgcccttgccttattatatagaggttccaggtggttcggaagatattcgccaagtccttaaaataaatgacacagaagataaggaagctggtgcctatcaattcgttacggttggtgttcaacatgccactttagctcatatgatttatgcttggttgacaccttttacagatattcgtagtgctcaggagactacaggtggttcttccgatgttgaatttatgcgaatcaatcaattctacatgcaaacatcgcaaaatatggccaagtatcaaggactaaaaacagctggtaaggatatcgaactcaagtactttggagtttatgttttgaatgtgacggataattcaacctttaaagggattctcaatatctctgatacagtcacagcagtcaatgatcagacctttgatagttccaaagacttgattgattacgtcagttctcaaaaattaggggattccgtcaaggtcacctatgaagaggatgggcaaaccaagtctgcagaaggaaagattatcaccttggaaaatggcaaaaatggaattggaatcggcttgattgaccgtacagaggtaatcagcaatgtcccaattagcttttcaacaagctggtattggcggtccaagtgctggtctcatgtttag

SEQ ID NO: 966 - DNA, 234 bp, Streptococcus pneumoniae
gtgggagacattggaggtattgataagaaggttgtagcttcggctagggcaggtgctgctattttctttgctcctgataaccctgttagcgaagaagaacaaaaggcgcatccggacgcgaaaaacaactaccaaacagccctagaagcggctaaaacaatcaagacggatatgaaaatcgtgcccgttaaaaccctacaagatgcgattgattacttgaaaaacaatccctaa

SEQ ID NO: 967 - DNA, 285 bp, Streptococcus pneumoniae
ttgagtgaagtttccaaactagcgcacaaacatagaagatggtataatagtcaaatggttcaattattattcactctaagtagtcatatgctctttatttatgtgagtttttaccttttaaaggatcttgttagatgggagaaggttttaaaagtgacagatgagaatacaagaaaagttcgtttattagtagccttttttagcattgtcataggctacatcctgagttctttctttattagcctgtatcatttgtggcaagaagcgcttagaggattattatga

SEQ ID NO: 968 - DNA, 1284 bp, Streptococcus pneumoniae
atggataaaattgtggttcaaggtggcgataatcgtctggtaggaagcgtgacgatcgagggagcaaaaaatgcagtcttacccttgttggcagcgactattctagcaagtgaaggaaagaccgtcttgcagaatgttccgattttgtcggatgtctttattatgaatcaggtagttggtggtttgaatgccaaggttgactttgatgaggaagctcatcttgtcaaggtggatgctactggcgacatcactgaggaagccccttacaagtatgtcagcaagatgcgcgcctccatcgttgtattagggccaatccttgcccgtgtgggtcatgctaaggtatccatgccaggtggttgtacgattggtagccgtcctattgatcttcatttgaaaggtctggaagctatgggggttaagattagtcagacagctggttacatcgaagccaaggcagaacgcttgcatggtgctcatatctatatggactttccaagtgttggtgcaacgcagaacttgatgatggcagcgactctggctgatggggtgacagtgattgagaatgctgcgcgtgagcctgagattgttgacttagccattctccttaatgaaatgggagccaaggtcaaaggtgctggtacagagactataaccattactggtgttgagaaacttcatggtacgactcacaatgtagtccaagaccgtatcgaagcaggaacctttatggtagctgctgccatgactggtggtgatgtcttgattcgagacgctgtctgggagcacaaccgtcccttgattgccaagttacttgaaatgtgtgttgaagtaattgaagaagacgaaggaattcgtgttcgttctcaactagaaaatctaaaagctgttcatgtgaaaaccttgccccacccaggatttccaacagatatgcaggctcaatttacagccttgatgacagttgcaaaaggcgaatcaaccatggtggagacagttttcgaaaatcgtttccaacacctagaagagatgcgccgcatgggcttgcattctgagattatccgtgatacagctcgtattgttggtggacagcctttgcagggagcagaagttctttcaactgaccttcgtgccagtgcagccttgattttgacaggtttggtagcacagggagaaactgtggtcggtaaattggttcacttggatagaggttactacggtttccatgagaagttggcgcagctaggtgctaagattcagcggattgaggcaagcgatgaagatgaataa

SEQ ID NO: 969 - DNA, 225 bp, Streptococcus pneumoniae
gtgctaagattcagcggattgaggcaagcgatgaagatgaataagaaatcaagctacgtaatcaatcgtttacttttagtcatcatagtactgattttaggtactctggctctaggaatcggtctaatggtaggttatggaatcttgggcaagggtcaagatccatgggctatcctgtctccagcaaaatggcaggaattgattcataaatttacaggaaattag

SEQ ID NO: 970 - DNA, 825 bp, Streptococcus pneumoniae
atgaacaaaaaaacaagacagacactaatcggactgctagtgttattgcttttgtctacagggagctattatatcaagcagatgccgtcggcacctaatagtcccaaaaccaatcttagtcagaaaaaacaagcgtctgaagctcctagtcaagcattggcagagagtgtcttaacagacgcagtcaagagtcaaataaaggggagtctggagtggaatggctcaggtgcttttatcgtcaatggtaataaaacaaatctagatgccaaggtttcaagtaagccctacgctgacaataaaacaaagacagtgggcaaggaaactgttccaaccgtagctaatgccctcttgtctaaggccactcgtcagtacaagaatcgtaaagaaactgggaatggttcaacttcttggactcctccaggttggcatcaggtcaagaatctaaagggctcttatacccatgcagtcgatagaggtcatttgttaggctatgccttaatcggtggtttggatggttttgatgcctcaacaagcaatcctaaaaacattgctgttcagacagcctgggcaaatcaggcacaagccgagtattcgactggtcaaaactactatgaaagcaaggtgcgtaaagccttggaccaaaacaagcgtgtccgttaccgtgtaaccctttactacgcttcaaacgaggatttagttccctcatcttcacagattgaagccaagtattcggatggagaattggaattcaatgttctagttcccaatgttcaaaaaggacttcaactggattaccgaactggagaagtaactgtaactcaataa

SEQ ID NO: 971 - DNA, 984 bp, Streptococcus pneumoniae
  unsure (892): n at each above location is unknown.
tcagaatttgttgctacatttaacatagtgtttatcttgacgggattaatgccttttttgccagccacaaaaatggcaatggttttttttaatcgtgcccgagttgaccaaaaggggaattatggagacacccgctacttccgcctgttgaaggtactagaaaatcttaaccgctttttatcaaccattcaggtaggaatcaccctgattacaatcttatcaggggcgagtttaactaatactctaggacgtgtgattgcctcttggcttgggaatggcgaaacagcacaagccgtggcaacttttctatccttggcatttttgacctatatttccatcgtttttggggaattatatcctaagagaatcgctcttaatctaaaggatgccttggcaattcgtacagcgccggttatcattgggatcggaaaactagtcagtccttttgtttggcttttagctgcttcgaccaatttcttgagccatttgactcctatgtcattcgatgatgcggatgaaaagatgacccgtgatgaaattgcctatatgctgacaaatagtgaagaaacattggatgctgatgagattgagatgctacaaggtgtcttttcgctcgatgaactgatggcacgagaggttatggttcctcgaacggatgcctttatggtggatattcaggatgatagtcaagccattatccaaagtattttaaaacaaaattattctcgtatcccggtttatgatggggataaggacaatgtaattggaatcattcacaccaagagtctccttaaggcaggctttgtggacggttttgacaatattgtttggaagagaattttgcaagatccactttttgtacctgaaactatttttgtggatgacttgctanaagaactgcgaaatacccaaagacaaatggcgatcttgctggatgaatacagtggtatggctgggttggtgactttgggaaaactcttataa

SEQ ID NO: 972 - DNA, 285 bp, Streptococcus pneumoniae
  unsure (156): n at each above location is unknown.
ctttgggaaaactcttataaggaaattgttggtgaaattgatgatgaaacggacaaagcagcaatagatgttcatcagattggcgaagatacctacattgttcaaagaactatgaccctcaatgatttcaataattactttgatgttgaactgganagtgatgacgttgataccatcgctggttattatttgacaggagtgggaactattccaacgactgagaaactcagctatgaattggttagccaaaacaaacagtttatcttaaccaatgataaagtatag

SEQ ID NO: 973 - DNA, 3612 bp, Streptococcus pneumoniae
ttggcaggacatgacgttcaatacgggaaacatcgtacccgtcgtagtttttcaagaatcaaagaagttcttgacttaccaaatttgattgaaattcaaactgactcattcaaagctttcctagaccacggtcttaaggaagtgtttgaagatgtattgccaatttcaaacttcacagacacaatggagttggaatttgttggatatgaaatcaaggaaccaaaatatacgctagaagaagctcgtatccacgatgctagctactcagcaccaatttttgtaaccttccgtttgatcaataaagaaacaagcgaaatcaagacccaagaagttttctttggtgatttcccaatcatgacagaaatgggtactttcatcatcaatggtggtgaacgtattatcgtttctcagttggtccgctcaccaggtgtttactttaacgacaaagtagacaaaaatggtaaggtgggctatggttcaactgttatccctaaccgtggagcttggttggaacttgaaagcgactcaaaagatatcacctacactcgtatcgaccgtactcgtaagattccatttacaaccttggttcgtgctcttggtttctcaggtgatgatgaaatctttgatatctttggtgacagcgaattggttcgcaacactgttgaaaaagatatccacaagaatccaatggactctcgtacagacgaagccttgaaagaaatttacgaacgccttcgtccaggtgagcctaagacggctgaaagctcacgtagcttgcttgtagctcgcttctttgacccacgtcgttatgacttggcagcagttggtcgttacaaaatcaataaaaaactcaatgttaaaacacgtttgctcaaccaaaccattgcagagccattggtagaccctgaaactggagaaatcttggtagaagctggtacgattatgactcgtagcgtgattgaaagcattgaaagccatttggatggcgacttgaacaagattgtctacatcccaaacgatgcagccgttgtgactgagcctgttgttcttcaaaaattcaaggttattgctccaactgatccagatcgcgtcgtaacgatcattggtaatgctaacccagatgacaaggttcgtacggtgactcctgcagatatccttgctgagatgagctacttcctcaacttggctgaaggacttggccgtgtagatgatatcgaccaccttggaaatcgtcgtatccgtgcggttggtgaattgcttgccaaccaagtacgtttgggactttctcgtatggaacgtaatgtccgtgaacgtatgtctgttcaggacaatgaagtcttgacaccacaacaaattatcaatattcgtcctgtaacagctgcagttaaagaattctttggttcatcacagttgtcacagttcatggaccaacacaacccgctttctgagttgtctcacaaacgccgtttgtcagccttaggacctggtggtttgactcgtgaccgtgccggatatgaagtgcgtgacgtgcactacactcactatggtcgtatgtgtccaatcgagacacctgaaggacctaacatcggtttgatcaataacttgtcatcttacggacacttgaacaaatatggttttgttcaaacaccataccgtaaggttgaccgtgaaacaggtgttgtcacgaacgaaattgtttggttgacagctgatgaagaagatgaatatactgtagctcaggctaactctcgtctgaatgaagatggaacctttgctgagaagattgtcatgggacgtcaccaaggggtcaaccaagagtatccagctaatattgttgactacatggacgtttcaccaaaacaggtagttgccgttgcgacagcatgtattcctttcttggaaaacgatgactccaaccgtgccctcatgggagccaatatgcaacgtcaggctgtgccattgattaatcctcaggcaccttacgttggtactggtatggaataccaagcagcccacgattctggtgcggctgtgattgctcagtatgatggtaaagttacttacgcagatgctgacaaggtagaagttcgtcgtgaagatggttcattggatgtttaccacatccaaaaattccgtcgttcaaactcaggtactgcttacaaccaacgcactctcgtaaaagttggtgatgtcgttgaaaaaggcgatttcatcgctgacggaccttctatggaaaatggagaaatggcgcttggacaaaacccaatcgttgcctacatgacttgggaaggctacaacttcgaggatgccgttatcatgagcgaacgcttggtgaaggacgatgtctacacatctgttcaccttgaagaatacgaatcagaaacgcgcgatacaaagcttgggcctgaagaaatcactcgcgaaattccaaacgttggtgaagatgccctcaaagaccttgacgaaatggggattatccgtattggtgctgaggttaaagaaggtgatattcttgtagggaaagtaacacctaagggtgagaaagatctttcagctgaagaacgtctcttgcacgctatctttggagacaagtctcgtgaagtgcgtgatacttctcttcgtgtaccacacggtgccgatggtgtcgttcgtgatgttaagatctttacacgtgtaaatggagatgagttgcaatcaggtgttaacatgttggttcgtgtttacatcgctcaaaaacgtaagattaaggtcggagataaaatggccggacgtcacggaaacaaaggggttgtctctcgtatcgttcctgtagaagacatgccttaccttccagacggaactccagtcgacatcatgttgaacccacttggggtgccatcacgtatgaatatcggtcaggttatggagcttcaccttggtatggcagctcgtactcttggtattcacattgcgacaccagtctttgatggagcaagttctgaagatctttggtcaactgttaaagaagcaggtatggatagcgatgccaagacaatcctttacgatggacgtacaggtgaaccatttgataaccgtgtttctgttggagtcatgtacatgatcaaactccaccacatggttgacgataaattgcatgcgcgttcagtcggaccttactcaactgttacccaacaaccactcggaggtaaagctcagtttggtggacaacgtttcggtgagatggaggtttgggctcttgaagcctacggtgcgtcaaatgtccttcaagaaatcttgacttacaagtcggacgatatcaacggacgtttgaaagcctatgaagctattacaaaaggcaaaccaattccaaaaccaggtgttccagaatccttccgagttcttgtcaaagaattgcaatctcttggtcttgacatgcgtgtcctagacgaagatgaccaagaagtggaacttcgcgacttggatgaaggaatggacgaagatgtcatccacgtagatgaccttgaaaaagcccgcgaaaaagcagcccaagaggctaaagcagcctttgaagctgaagaagctgagaaagcaacaaaagcggaagcaacagaagaagctgctgaacaagaataa

SEQ ID NO: 974 - DNA, 348 bp, Streptococcus pneumoniae
atgttaacacctgattgcaactcatctccatttacacgtgtaaagatcttaacatcacgaacgacaccatcggcaccgtgtggtacacgaagagaagtatcacgcacttcacgagacttgtctccaaagatagcgtgcaagagacgttcttcagctgaaagatctttctcacccttaggtgttactttccctacaagaatatcaccttctttaacctcagcaccaatacggataatccccatttcgtcaaggtctttgagggcatcttcaccaacgtttggaatttcgcgagtgatttcttcaggcccaagctttgtatcgcgcgtttctgattcgtattcttcaagg

SEQ ID NO: 975 - DNA, 171 bp, Streptococcus pneumoniae
atgacatcttcgtccattccttcatccaagtcgcgaagttccacttcttggtcatcttcgtctaggacacgcatgtcaagaccaagagattgcaattctttgacaagaactcggaaggattctggaacacctggttttggaattggtttgccttttgtaatagcttcatag

SEQ ID NO: 976 - DNA, 3678 bp, Streptococcus pneumoniae
gtggttgatgtaaatcgttttaaaagtatgcaaatcaccctagcttctccaagtaaagtccgttcatggtcttatggagaagtcaaaaaacctgaaacaatcaattatcgtaccttgaaaccagaacgtgaaggactctttgatgaagtgatctttggtcctacaaaagactgggaatgtgcttgtggtaagtacaaacgcattcgttacagaggaattgtttgtgaccgctgtggggttgaagtaacgcgtacgaaagttcgtcgtgagcgtatgggacatatcgaattgaaagctcctgtatctcacatctggtacttcaaggggattccaagccgtatgggcttgacccttgatatgagccctcgtgccctcgaggaagttatctactttgcggcttatgtggtgattgatcctaaggatacaccacttgagcacaagtctatcatgacagagcgcgaataccgagagcgcttgcgcgaatatggttatggttcatttgttgccaagatgggtgcggaagccatccaagaccttttgaagcaagtagatcttgaaaaagaaattgctgaactcaaagaagaattgaaaacagctactggacaaaaacgtgtcaaagccatccgtcgtttggatgttttggatgccttttacaagtctggaaacaaacctgaatggatgattcttaacattcttccggttatcccaccagatcttcgtccaatgttgcagttggatggtggccgttttgcctcatctgacttgaatgacctttaccgccgtgttatcaaccgtaacaaccgtttggctcgtttgcttgagttaaatgcaccaggtatcatcgttcaaaatgagaagcgtatgcttcaagaagcagttgacgctttgattgacaatggtcgtcgtggtcgtccaatcacaggaccaggtagccgtccattgaaatcattgagccacatgcttaaaggtaaacaaggacgcttccgtcaaaacttgctcggtaaacgtgttgacttctcaggacgttccgttatcgccgttggtccaactcttaagatgtaccaatgtggtgtgccgcgtgaaatggcgattgaactctttaaaccatttgtcatgcgtgaaatcgttgcccgtgatatcgtgcaaaacgtcaaagcagctaaacgcttggtggaacgcggagatgagcgtatctgggatatccttgaagaagtgattaaagaacacccagtgcttttgaaccgcgcaccgacccttcaccgtttgggtatccaagccttcgagccagtcttgattgatggtaaggctcttcgcttgcacccacttgtctgtgaagcctacaatgctgactttgacggggaccaaatggccatccacgtaccactttcagaagaagcacaagcagaagctcgtatcctcatgctagctgctgagcacatcttgaacccgaaagatgggaaaccggtagttactccatctcaggacatggttttgggtaactactacttgaccatggaagaagctggtcgcgaaggtgaaggaatggtcttcaaagaccgtgacgaagcggttatggcttaccgcaatggttatgttcacctccactcacgtgttggtatcgcaacagacagcctcaacaagccttggacagaagagcaaagacataaggtcttgcttacaacagttggtaaaattctcttcaacgatatcatgccagaggggctaccatacttgcaagaaccaaacaatgccaacttgacagaaggtgttccagctaaatacttcttgccacttggtggagatatcaaggaagctatcagcaatcttgagctcaaccctccattcaagaagaaaaaccttggaaatatcatcgctgaaatcttcaaacgtttccgtacgacagaaacttctgccctacttgaccgcatgaagaacctcggttaccaccactcaactcttgcaggattgacagtgggtattgccgacatcccagtcgttgatgacaaggctgaaatcattgaagaatcacacaaacgtgtcgaacaaatcaccaaacaattccgtcgtggtatgatcacagacgacgagcgttacaatgctgttacagctgaatggcgtgctgcccgtgaaaaacttgagaaacgcttgattgctaaccaagatcctaagaacccaatcgttatgatgatggactctggagcccgtggtaacatctcaaacttctcacagcttgccggtatgcgtggtctgatggctgctccgaatggacgtatcatggaattgccaatcctttcaaacttccgcgaaggtttgtcggtattggaaatgttcttctcaactcacggtgctcgtaaaggtatgaccgatacggcccttaagacagccgactcaggttacttgactcgtcgtttggtcgacgttgcccaagacgttatcatccgtgaggacgactgtggaactgaccgtggtctcttgatccgttctatcgcagaaggaaaagagatgatcgagtctctcgaagagcgtctcaacggtcgttacactaagaaaactgttaaacatccagaaactggtgcagtgattattggtccaaatgaattgattacagaagacaaggcgcgtgaaattgtcaatgctggtgtggaagaagtgactatccgttctgtatttacatgtaacactcgtcacggtgtctgccgtcactgttacggtatcaacttggcgactggtgatgcggttgaagttggtgaagcagttggtacaatcgctgcccaatctatcggggaacctggtacacagcttacaatgcgtaccttccacacaggtggggttgcctcaaataccgatatcactcagggtcttcctcgtgtccaagaaatctttgaagcccgcaatcctaaaggggaagcggttatcacagaggttaaaggacaagttactgctatcgaagaggatgcatcaactcgtaccaagaaagtctttgttaagggtgaaactggcgaaggtgaatatgtcgttccatttacagctcgtatgcgtgtcgaagttgggggccaagtagcgcgtggtgctgctctgacagaaggttctatccaaccaaaacgtctccttgcagttcgtgatgtcttgtcagttgaaacgtaccttctcggtgaagtacaaaaagtttaccgtagccaaggggtagaaatcggtgacaaacacatcgaggtaatggttcgtcaaatgatccgtaaagtccgtgtcatggatccaggtgatacagatcttctcatgggtaccctcatggatatcaatgactttacagatgccaacaaagatgtccttatcgcaggtggagttccagcgacaggtcgcccagtccttatgggaattaccaaagcctcacttgaaacaaacagtttcttgtcagcggcttccttccaggaaacaactcgtgtccttactgacgcagctatccgtggtaagaaagaccatctccttggacttaaagaaaatgttatcatcggtaagatcatcccagctggtactggtatggcccgttaccgtaaccttgaaccacatgctgtcaacgaagaagaataccttaatcctccagtagaggaagaaggaaatgaagaaacaacagaagtagttgtggatactgccgttgaaactgtggaagaaacagtagaataa

SEQ ID NO: 977 - DNA, 393 bp, Streptococcus pneumoniae
atgtgtgttccatacccgtctcctttgtcagcttctttcttttattttaccacatttcgtggaaaaatggagaaagttttcagaagagagaatgagagaacccgagggttctctcattctctcttattctactgtttcttccacagtttcaacggcagtatccacaactacttctgttgtttcttcatttccttcttcctctactggaggattaaggtattcttcttcgttgacagcatgtggttcaaggttacggtaacgggccataccagtaccagctgggatgatcttaccgatgataacattttctttaagtccaaggagatggtctttcttaccacggatagctgcgtcagtaaggacacgagttgtttcctggaaggaagccgctga

SEQ ID NO: 978 - DNA, 414 bp, Streptococcus pneumoniae
atggaacacacattctttatcatcaaaccagatggtgtaaaaagagggctagtgggtgaagtgttaaagcgcatcgaacaacgtggatttacaatcgaaaaattggagtttcgttcacaggtttcagaagagttgattgaccagcactatcaggacttggttggtcagagtttttacccaccgattcgtgaattcatgacttcaggtccagttcttgtgggtgtcatttctggtcccaaagtaatcgaaacttggcggaccatgatgggtgcaactcgtccagaagaagctttaccaggcactattcgaggtgattttgcaaaagctgctggagaaaatgagattatccaaaatgttgtacatggttcagattcagaagagtcagctaagcgagaaattgctctttggttttaa

SEQ ID NO: 979 - DNA, 279 bp, Streptococcus pneumoniae
atgaaaaaattcgacaattatattattgagaagccttgcgattctaattcagataaactgcaaaaaatcttaataattgaaaatttggtagatgatattttgcaattttctctcagaatcaataatagtgtaggagagattttcctcctacaaccgtttcaaaagaaaactatctttattccatgttattttgaggaagatattgtgaaagtcaaagatgatgataaagttgagtggaatttgttagaatttcaaaaatttagagcatttttggcttag

SEQ ID NO: 980 - DNA, 633 bp, Streptococcus pneumoniae
atgattgaacttaaacaggtgagtaaatcttttggagaacgagagttattttcgaatctttcaatgacatttgaggctggaaaagtctatgccttaattggttcaagtggtagcggaaaaacaaccttgatgaacatgattgggaaattagaaccttatgatgggacgattttttaccgaggtaaagacttggccaattataaatcgagtgattttttccgtcacgaattgggttacctcttccagaactttggcttaattgaaaaccaaagtattgaagaaaaccttaagctaggtctcactggtcaaaagttgagtcggtcggaacagcggttgaggcagaagcaggctttagaacaggtcggcctggcttatcttgacctagataagcgcatctttgagttatcgggcggagaatcgcaacgggttgccttggcaaaagttatcttaaagaatccaccctttattctggcagatgagccaacagcttcaatagacccagcaacctctcagttgattatggagattttgctatctcttcgagatgataataggctaatcattatcgcaacacataatccagcaatttgggagatggctgatgaagtgttcacgatggatcgtctgaaataa

SEQ ID NO: 981 - DNA, 2016 bp, Streptococcus pneumoniae
atgaaaaaattatttatactcatatccaacctgcttgctagtttgttctttgtttgggtatttaccatttggactgatacatatgtctcctattattactccaacgttgttgtacatgattcttcccctgaaacaacttttcagcatgttgctacacgcttggaaaaactagcagaagaaacagatagctttattgcgattcaacaccaagatcctaactcagaaggtactacagttttttcttatacgacctttggggacggaaagttgcctgatgggcttcaggaaaaaaaactagaagatgctcaaagtagtagtgttgaaacaaactattttgtattcgatggacacctagatattcacttgctaagggaggagctaagtcaacttggcttgactaacatgaacctgacaattccatctaaactatctacgttaatggctatctttagtaacggatttcagttaatcagtctattgattttcatcttaacctttgtagcactgactttaattagtcaaattagccaattacggtcgtcgggcattcgcctcatttcaggagagaaacggtggtccattttccttagaccagttggtgaggatttgaaagggatagctgttggtttcagtttagctggcgtgctcgccattcttatgcaaaaaattctgtcgcttccaacgcaatccctaatgaccataggagcaggcttgctcagttataatctcatcttgttgtcgatctccctgtttttcgctcaactcttcgcagttgggataaaaaagatacacctgatgcagattataaaagggcaagtgcctgtcagaggaatcattagtttgattttaatcggtcaactattagcgattattattgtaacgctgggaatagggagtagcttaaagtattcccaagcctggcaacagcatcggattggacaagaggcttggagtcaggaaaggcaactgattaccctatcaatcagccgtgaaggaacgagtcctggttttgatgaacaagctcaaaggaaactcagaacttggtatcaattgatggatctggctgtttcagaacaaaaggctttcttatctagacaccagttaattgaccgtactttgcaaaatggcatggcttcctccaaaaacttgataacctctacagaatggcacgattacaacccgaatggcaatgtccttatcgtcacaccgcaatacttggagcgtcaaaacattcctgtagatacaactattgagcaaaagatgaatcaccttgatgtaggggagtttgtcttattgctgcctgaacacctccgttcagaggaagaacattataaatctgtttttgaagacgacttaaccagtcgcatgtctagtcaagatgaacgacagcaaatgactgctacggtaggttatttagaatcaggtcaggatcgttttgtgtataatacgacccctatttcttaccagcagtttttgaaagatccaatcatcattgttataacaccccaatcaactggtccacagtccattttgttttggatagacgcagtacagaactacgttctctttaatcaattgtctgatgcccaggagcttatccagagacaaggcattgaaaattgggtctcagaaatgcaaacaggttaccacaactacatcacattattggataatatccagagggaacgttgggtaatgctagcaggagctgtgcttgggattgcaacttcaatcttgttgtttaacactatgaataggctctactttgaagaatttagacgtgccatttttatcaaacgcattgcaggtctcaggttcttagaaatccatcgcacttatctctttgctcaactgggtgtgtttttactgggatttgttgcgagtgtatttcttcaggtagagataggagttgctttcttagtcttgttactctttactggtctatctcttttacagttacatgtccaaatgcagaaagaaaacaagatgtccattcttgttttgaagggaggttaa

SEQ ID NO: 982 - DNA, 195 bp, Streptococcus pneumoniae
atgaaaaagaaaagggtttcacgaatgaagaaaaatcgtggaattcaaaaattagctatattagtattactaggtgtttttatgtttagtaatacaattccttaccaacagtttattcagaagaatagacaattggagattcgagtgcaatcgcaaaagaagtccaatggtcttgatgttgggaaggctgattga

SEQ ID NO: 983 - DNA, 864 bp, Streptococcus pneumoniae
atgaatacactcgcagagaaattcagattgaaaagaaaagagttgagactctcccaacaaactcttgcagaaggaatttgtgaacaaagtcagattagtaaaattgagagagggcatttcattccctccgcagaccttttgttcaaactctctcaacgacttgaagtaccattagattatttttttaatgaacaaattgaaattaaatctaacctctctaatttcaagcaattgtctgctcgactattagacgatagaaattatgacgatttggaatatatttatagaatagagattgaacgaagtacttttctaacactagaagaccgaacttaccttgaatggattaaagctattattgacttctatcaatatgacagtaagtgtgaggcaatttcttcattggaaaatatattattaaaagtctcttcaaatactctgatttatttaaaggcgttgaatactctatctaatttctattccttagtgggtcgtgaacaagaatatgaggcaaactactctcatttaatagagttgtatcagacaaaaaatttggaccatcaagagtttttatttggctacatcagagttcgttacaactacgctcactacctagtatcaaaggaaaaatataatgaagccatccaagaagctcttgaaacgattgaactctgtaaacaaagacagacaagctaccaattggctcctctacttattcttgtaggaaatgctggagccaaatttctagacagagaacaagtcaaaaattattatatagaagcaagagagttatgtaagatttataacaatcctttaatgttgatgaagatagaaaattatttgaaggaactagatactgtttag

SEQ ID NO: 984 - DNA, 411 bp, Streptococcus pneumoniae
gtgaagcttttttacagtatgttactcttaattaatgtgttaggagctgttcttgttttgtcagataacttgttcatcaaaaatacgctgcagcaagaattagttgactttttattgccatccttctttttcctatttgggctagatttgctgatttttttacccttgaaaaaatacgtgcgcgattttcttgctatgctggacagaaaaaagacagtgttggtgactattttagcaacacttcttttcttaagaaatccaatgaccattgtctcacttctgatttatattggactgggcttgttttttgcagcctatcttgtcccaaattcggttaagaaggaagtttccttttatggtcatattttccgagatcttgtattggtcattgttacgctcattttcttttag

SEQ ID NO: 985 - DNA, 477 bp, Streptococcus pneumoniae
acacaaaagaaaagtttttggtataataagagtatgtacacaaaaaatgaagaagagttgcaagccttaggggagcgtttgggccatctattagcaaagaatgatgttttaatcttaactggagaactgggtgcaggtaaaacgacctttactaaaggacttgcaaaaggattacagatttctcaaatgattaaaagtcccacctatactatcgtgagagagtatgaaggtcgacttccactttatcacctagatgtttatcgtattgaaggagatgctgattctatcgacttggatgagtttatctttggtggcggcgtgactgttattgagtggggaaatctcttaggagatgccttgccagatgcttatttagaattggaaattctaaaagaagcagatggacgccgtttaaattttcaggcaaagggtttgcgtgctgagaaattgttagaggagcttcaatatggagtatga

SEQ ID NO: 986 - DNA, 519 bp, Streptococcus pneumoniae
atggagtatgaattgctcattagggaagcagagcccaaagatgcagctgaattagtggcctttttaaatcgtgtgagtttggagacagactttaccagcctagacggagatggtattctcttgactagtgaggagatggaaatattcctcaacaagcaagctagttcggacaatcagataaccttacttgcattcttaaatggcaaaattgctggtattgtaaatattacagctgatcagcgtaagagagtccgtcatattggagatctcttcattgtgattggaaaaagatattggaataatggcttgggaagtttgttgctagaagaagcgatagagtgggcacaagcaagtggcattctgcgtcgtctccaactgactgtccaaactcgtaatcaagcagcagtccatctttatcaaaagcatggctttgtcattgaaggtagccaagagcgtggggcatatatagaagaagggaaatttatcgatgtttacttgatgggtaaactgataggttag

SEQ ID NO: 987 - DNA, 1017 bp, Streptococcus pneumoniae
atggttaaaaaaattattggaatggtgctagctttactttctgtaactgtagtaggagtaggtgtttttgcttatactatttatcaacaagggacagaaaccttagctaaaacctataaaaaaatcggtgaagaaaccaaggttattgaagcgactgaacctctaaccattctgttaatgggagtggacaccggaaatgttgaacgaactgaaacttgggtcggtagaagtgatagcatgatcttgatgacagtgaatcctaaaacgaaaaaaacaacaatgatgagtttagagcgggatattctgacgcgcattgaatcagggaatggtcaggctcatgaagcgaaactgaactcagcatatgcagatggtggagcagagcttgctatagaaaccattcaaaaaatgatgaatatccatattgatcgctatgtgatggtcaatatgagagggttgcaaaaattagtggatgcagtaggaggtattacagtcaataatatcctaggtttcccaatttctatcagtgaccaagaagaatttaataccatttctatcggtgttggggagcaacatattgggggagaagaagccctagtctatgcacgaatgcgttaccaagatcctgagggggattatggtcgtcaaaaacgtcaacgtgaagttattcaaaaagtcatggaaaaagctctcagtttaaatagcgttggtcattatcaagagattctaaaagctttgagtgacaatatgcagaccaatattgatttgtctgcaaaaagtatccctaacttgctaggctataaagattcatttaaaaccattgaaactcagcagttgcagggtgaaggagagatacttcaaggtgtttcttaccagattgtttcgagagcacatatgttggaaatgcaaaatatactccgacgttctttgggacaagaagaagttactcagcttgaaaccaatgcggttttatttgaagatttatttggcagagcacctgttggtgatgaagataattaa

SEQ ID NO: 988 - DNA, 1257 bp, Streptococcus pneumoniae
  unsure (268),(288): n at each above location is unknown.
atgaaagcagaaatcattgctgttggaacagagattttgacaggacagattgtcaacaccaatgcccagtttttgtcggaaaaactagctgagattggggtagatgtatattttcagacggctgtaggagacaatgaagttcgtctcttgtctttgcttgagattgccagtcaacgtaaccatctggtgattttgacaggcggtttggggccaactggagacgaacctaccaaacaaaccctagctaaatttttagggaaagcattantctttgatcctcaggctcangaaaaattggatatcttttttgccctgcgaccagactatgcccgaacaccgaataacgaaagacaagctcaaattgtagaaggagcgattccactgccaaacgaaacaggactggctgttggaggaaaattagaagtagacggagtgacctatgtcgtccttccaggtccgccaagtgaattgaaacccatggtcttaaaccaacttctacccaagttgatgacagggagcaagctgtattcccgagttcttcgtttctttgggattggcgagagccagctggttacgattttggctgatttaattgataatcagatcgatcctaccttggccccttatgccaagacaggagaagtcactctacgtctgtcaacaaaggctagcagtcaagaagaggcgaatcaagcgctggatatcttggaaaatcaaatcttggactgccagactttcgaaggaatttctttacgagacttttgctatggttatggggaagaaactagtttagccagcattgtggtagaagaactgaaaaggcaagggaaaaccatcgcggctgcagagagtttaacggcaggtcttttccaagctaccgtggcgaatttttctggagcttcaagtatatttaagggtggttttgtgacctatagcttggaggaaaaatcaaggatgttggatattcctgccaagaatttggaagaacatggtgtggtgtctgaatttacagctcagaagatggctgagcaggcacgaagcaagacccagtctgattttggaattagtttgaccggagtggcaggaccagatagcctagaaggacacccagttgggacagtcttcataggcttggcgcaagagcaaggaactgaggttatcaaggttaatattggaggcagaagccgagcagatgtacgtcatattgcggttatgcatgcctttaacctagttcgcaaggctttattaagtgactaa

SEQ ID NO: 989 - DNA, 1167 bp, Streptococcus pneumoniae
atggcgaaaaaaccaaaaaaattagaagaaatttcaaaaaaatttggggcagaacgtgaaaaggccttgaatgatgctcttaaattgattgagaaagactttggtaaaggatcaatcatgcgtttgggtgaacgtgcggagcaaaaggtgcaagtgatgagctcaggttctttagctcttgacattgcccttggctcaggtggttatcctaagggacgtatcatcgaaatctatggcccagagtcatctggtaagacaacggttgcccttcatgcagttgcacaagcgcaaaaagaaggtgggattgctgcctttatcgatgcggaacatgcccttgatccagcttatgctgcggcccttggtgtcaatattgacgaattgctcttgtctcaaccagactcaggagagcaaggtcttgagattgcgggaaaattgattgactcaggtgcagttgatcttgtcgtagtcgactcagttgctgcccttgttcctcgtgcggaaattgatggagatatcggagatagccatgttggtttgcaggctcgtatgatgagccaggccatgcgtaaacttggcgcctctatcaataaaaccaaaacaattgccatttttatcaaccaattgcgtgaaaaagttggagtgatgtttggaaatccagaaacaacaccgggcggacgtgctttgaaattctatgcttcagtccgcttggatgttcgtggtaatacacaaattaagggaactggtgaccaaaaagaaaccaatgtcggtaaagaaactaagattaaggttgtaaaaaataaggtagctccaccgtttaaggaagccgtagttgaaattatgtacggagaaggaatttctaagactggtgagcttttgaagattgcaagcgatttggatattatcaaaaaagcaggggcttggtattcttacaaagatgaaaaaattgggcaaggttctgagaatgctaagaaatacttggcagagcacccagaaatctttgatgaaattgataagcaagtccgttctaaatttggcttgattgatggagaagaagtttcagaacaagatactgaaaacaaaaaagatgagccaaagaaagaagaagcagtgaatgaagaagttacgcttgacttaggcgatgaacttgaaatcgaaattgaagaataa

SEQ ID NO: 990 - DNA, 1371 bp, Streptococcus pneumoniae
atgaataaaaaacgaacggtggacctgatacatggtccgattcttccctcgctcttaagcttcacctttccaattttgctatcaaatatttttcaacagctctataacactgctgatgtcttgattgttggacgatttcttggtcaagaatccttggctgcagtaggagcgacgacagcgatttttgacctgattgtaggttttacacttggtgttggcaatggcatggggattgtcattgctcgttattatggggctcggaatttcactaaaatcaaggaagcagtagcagctacttggattttaggtgctcttttgagcattctagttatgttgctgggctttcttggcttgtatcctctcttgcaatacttagatactcctgcagaaattcttcctcaatcttatcaatatatttctatgattgtgacctgtgtaggtgtcagctttgcttataatctttttgcaggcttgttgcggtctattggtgacagtctagcagccctgggatttctgattttctctgccttggttaatgtggttctggatctctattttattacgcaattgcatctgggagttcaatccgcaggacttgctaccattatttcgcaaggtttatcagcggttctctgcttttattatattcgtaaaagtgtgccagaactcttgccacagtttaaacatttcaaatgggacaaaagcttgtacgcagatctcttggagcaaggtttggctatgggcttgatgagttcaattgtatctatcggcagtgtgattttacagtcttctgttaatacatttggtgcagtgattattagtgcccagacggcagctcgacgcattatgacctttgcccttcttcctatgaccgctatttctgcatcaatgacgacctttgcttctcagaatctaggagctaagcaacctgaccgcattgttcaaggtcttcgaatcggcagtcgtttaagtatatcctgggcagtttttgtttgtattttcctcttttttgccagtccagctttggtttccttcttggctagttcgacagatggttacttgatagaaaatggaagtctctatctgcaaatcagttcaaccttttatcccattttgagcctcttgttgatttatcgcaattgcttgcagggcttggggcaaaagatccttcctctagtttctagctttattgaactaatcggaaaaatcgtttttgtggttttgattattccttgggcaggatataagggtgttatcctttgtgaacctcttatctgggttgccatgacagttcaactgtacttctcactattccgtcatcccttgataaaagaaggaaaggcaattttggcaaccaaagtgcaatcctag

SEQ ID NO: 991 - DNA, 957 bp, Streptococcus pneumoniae
atggaaattaatgtgagtaaattaagaacagatttgcctcaagtcggcgtgcaaccatataggcaagtacacgcacactcaactgggaatccgcattcaaccgtacagaatgaagcggattatcactggcggaaagacccagaattaggttttttctcgcacattgttgggaacggttgcatcatgcaggtaggacctgttgataatggtgcctgggacgttgggggcggttggaatgctgagacctatgcagcggttgaactgattgaaagccattcaactaaagaagagttcatgacggactaccgcctttatatcgaactcttacgcaatctagcagatgaagcaggtttgccgaaaacgcttgatacagggagtttagctggaattaaaacgcacgagtattgcacgaataaccaaccaaacaaccactcagaccatgtggatccatacccttacttggcaaaatggggcattagccgtgagcagtttaagtatgatattgagaacggcttgacgattgaaacaggctggcagaagaatgacactggctactggtacgtacattcagacggctcttatccaaaagacaagtttgagaaaatcaatggcacttggtactactttgacagttcaggctatatgcttgcagaccgctggaggaagcacacagacggcaactggtactggttcgacaactcaggcgaaatggctacaggctggaagaaaatcgctgataagtggtactatttcaacgaagaaggtgccatgaagacaggctgggtcaagtacaaggacacttggtactacttagacgctaaagaaggcgccatggtatcaaatgcctttatccagtcagcggacggaacaggctggtactacctcaaaccagacggaacactggcagacaagccagaattcacagtagagccagatggcttgattacagtaaaataa

SEQ ID NO: 992 - DNA, 237 bp, Streptococcus pneumoniae
gtaagatttgaagatattctaagttcttttattctttttccaacatcacatacatttatcacatacatttatcatattcatacacctctcataaaaagaatagcacactcttgtcataattttttaaataaaaaaattatgacaaaacaaggaagcaatttattgatgctgcttaaaaatctaaaattgatgagttcctatcaaaaatcgtatcttcaacctcaaaacagtacttaa

SEQ ID NO: 993 - DNA, 243 bp, Streptococcus pneumoniae
ttgccaaaatggaaaaaggtgaaaggaatatcacgaatggatttaagtaataaagcttcaaatcttagaaaaaagttgggagctgatggtgaatcgccgatagatatttttaaattggtacaaaagatagaaaatttgacgctggtattttatggactcggaaagaatattagcggagtctgttataaaggaactcagttcagtctcattgcagtcaattcagacatgccattaggaaggtaa

SEQ ID NO: 994 - DNA, 360 bp, Streptococcus pneumoniae
gtgaagaagagttcagtcagtcttatcttgattggtgaaggagatgaaactgaaagaaaagcggatcagtttgcttcttattttttaattttcccatcttcactgtataggatggttgaggaaatcagagaaaatgccaatagaactcatcttgaagtagaagatattataaaattgggtcagttttatggtatcagtcataaagctatgttatatagattgaggaatgatggataccttgatgcagaagaaattaaaaatatggatattagtgttatagagacagcttcaagattaggctatgatacaagtttatatcgtcctttgtcagaaagtaaaaaagaaatggcattaggataa

SEQ ID NO: 995 - DNA, 426 bp, Streptococcus pneumoniae
ttgactagtcgtgtatttattgatgcagattgtatttcagtatttttatgggttggcactgaacatcttttagaaaagctctatttgggtaaaattgttattccacaagaggtgtatgatgaaatcaatatacctacaattccccatttaaaatctaggatagaccagttggtaactaagggttcagctgagattgtgagcatagacattggaactgaagaatacgcattatatagagatttaacaagaaatcatgatagtaacaagattattggtaagggagaagcgacttctattttcttagcgaaaaagcataatgggatattaggaagtaataacctaagagatgttaaaccatatgtagaagaattttctttagaacatatgacaacaggagatatactgattgaagcgtttaaagcgtaa

SEQ ID NO: 996 - DNA, 225 bp, Streptococcus pneumoniae
ttcaggaaaacttcaaggagaacttttctctcatccactatgcaggacttactatttcacttctactcctataggctcaatttgacacttttctttttcgaattgctcatatgcctcctgaatagtgagttcgatttatccaaatttatttttgtctattttgatgaatacttccacgaagatagtctgaaaatgaatttgcaccaattttccttctctttttaa

SEQ ID NO: 997 - DNA, 996 bp, Streptococcus pneumoniae
atgaatgtcaaaaagataatgtcaatttttcaatccttttatgttgatgtcagtattgaggaactgactttgactttaccaatcagttttgtaaaaaggtttgagtatactcaaatgacttttcataaggaatcatttttattgattaaagaaaagagaagggggagtttgagttcatttgttactcaggctcgcactatgggtgaaaaagccaatatggatgttgttttggtgttttcgaagttatcagacagtgaaaaaaagcaattacttcaagctagagttccgtttgtagactttaagggaaacctcttcttccctccattgggactagtactcaatgcgaatgatactgaaatccctaaggaattaacacctagcgaacaattaacgtggattgcctttttattgccaaaaggtcaaaaagtagtaaatgttgatttgctttcacaagtcactggacttccaaactcaacaatttataggtgtttgaggacttttaaagctttatattggttaaacaagcaaaataagctttacacatatacggtgtcaaagaaagaattattcttaaaatccgtgtcatgtttatttaatcccatcaaaaaacggattttattgccagatggcgatataaagcagataaaatctgtttctaaccttctatatggtggtgcttatgctttgtcgcattcaacttttttagctgaaacggatgaaaatactagctatgtcatatggcagagaaaattcaatcagttatccttgccactttctcagcatgttttaaaaggaaagatgctagagatatggaaatatcgtccttttgtatctgagttttggaatgattttaaaaataatcatgataaacaatttgtagatccgatttctctttatttgaccttaaaagatgatgatgacccacgtatagaggaagagagtgaagcactagaaaatatgatattacagtatctgggagaagatgatgccagctaa

SEQ ID NO: 998 - DNA, 246 bp, Streptococcus pneumoniae
atgatgccagctaatacgaaagttatttttcaagaaatgtttgcggattttcagaactattatgttctgattgggggaactgctacctctatcgtattggattcgcaaggatttaaaagtcgcacaacaaaagattatgatatggtcatcattgatgaagtaaaaaataaggaattttatactacctggaatcattttttagaattgggagagtatcaaggaagtcagaaagatgagaaagcgtag

SEQ ID NO: 999 - DNA, 270 bp, Streptococcus pneumoniae
atgattgaactatttagtatcttaccagaatatccattaaagaaggacggtcgagaaattcccttacattttgaccaagatgctagtttatcagccttattattggatgaagattattataatatattggtgcatgaaaaagaaaccattcaggggtattcggtattgagtaattgtggtctatactcttcgaaaatctcttcaaaccacgtcagcttccatctacaacctcaaaacagtgttttgagcagcctgcagctagcttcctag

SEQ ID NO: 1000 - DNA, 261 bp, Streptococcus pneumoniae
atgagggaacgctctgctacaggtgctcaaggtttaagtaagtccattaaaaagcatttgaatgacattacccgtttgacagcttccttgctaggagatgaaaagttatcggctataacatcaagtagtgcggtaaaagcagacatgcaccgctttgtgatagaattagagcttgtgaagtcaactattcttcaaaatgatgacatttcattagatcaaaatgaaatttttgaaattctgaaaaattttttcgatggttaa

SEQ ID NO: 1001 - DNA, 303 bp, Streptococcus pneumoniae
aaacagcttatcaaaaaagtcggacaagctggtaaaatcttggctgacagtggttatcaagggctcatgaagatatatcctcaagcacaaactccacgtaaatccagcaaactcaagccgctaacagttgaagataaaacctataaccatgcgctatctaaggagagaagcaaggttgagaacatctttgccaaagtagaaacgtttaaaatgttttcaacaacctgtcgaaatcatcgtaaacgcttcggattacgaatgaatttgagtgctggtattatcaatcatgaactaggattctag

SEQ ID NO: 1002 - DNA, 132 bp, Streptococcus pneumoniae
atgaattatgaagcaagtaaacaactaaccgatgcacgatttaagcgtcttgttggtgttcagcgcaccacttttgaagagatgttagctgtgttaaaaacagcttatcaaaaaagtcggacaagctggtaa

SEQ ID NO: 1003 - DNA, 459 bp, Streptococcus pneumoniae
atgacgccagaagaaatgtacctgacagagcgattagacgtacagatagctcattttttaaagaaaagcgttcaacatcgtaggcgctataaggtattaaaaataacagaaatcgtggcaggtttcctcatagctgtcttttgtgctattcctatgccaggtgatcgctaccgtttgatttcggttgccttatccagtctcggcttgctgtgtgaggggattatcaatttgtataatgcaaaggaaaattggatttcttaccaaaaaactgcgcaactcctggagaaagaaaaattcctctatcaatgccaaacggagaaatatgcaggaaagaccaaggcttttgccctatttgtcaagacatgcgaaggtcttatctcagaggagattaaccagtgggaaagtatccagtcaaaagaagtggcagctagtgcagatgctccagttaaaaaagagtag

SEQ ID NO: 1004 - DNA, 609 bp, Streptococcus pneumoniae
atgtctcaatccagctacctgtcgcccttgctctggttaaaaaaagaagccgataaggaaaagatgagcgcgacccagtgccagatatttttcttttactatcaaatgtttgagctcttatttgctagagaaagcgacatgaaagacttatgtctgggaacgaaaggtttttatttctcgcagttagagaaaaatttgctttctggagtttcccgatttctaaaaaacttggaggggaaagtaactctcaaggctaaccaagaagtatcagctcgcaaagccctttttctagccttgacaactagccaatcagattggcaggagttagctcctgtttttgatttttatcagactatcgggaggcttgaaaatccttctctcttgagttctcaggacagacaacatctgatgtggatttaccagtcagctttggagaaagattatattgtcaaggttattggcgacaagcattttgtattgaagagacaagatgctactaaattgacagcgcgccaaactcaaactttggaaattctgagtcaatcagaagacttggtcaatcctgtctatgttacattaggagaaaagggggtgctcttgcttgattaa

SEQ ID NO: 1005 - DNA, 411 bp, Streptococcus pneumoniae
ttgattaagagaggagatgttgtagctctttatttgccttttccgactattagtagcgatttggctgtgaagaatcatatgtatatctgtattgacaacagcatgactaaaaacaaagagctggttaaaaatcagaccttcaaaccagctctcttgaccagacgtttggtcaagaactttatgatagaagagccggatctagctcgtaatccttttacaagaccaaccttgattgacttagataaggtatttatgttggataatacggtcattccgacttcttatttagccagacggcgacgcaatgtctcagaagaattgtacgaggaaattttggattacttagtccaaccacggctgatttcgctgaacaagtctgagtttatgcaactcaatccaggaacttattag

SEQ ID NO: 1006 - DNA, 1416 bp, Streptococcus pneumoniae
atggcaaataaagcagtaaatgactttatactagctatgaattacgataaaaagaaactcttgacccatcagggagaaagtattgaaaatcgtttcatcaaagagggtaatcagctacccgatgagtttgttgttatcgaaagaaagaagcggagcttgtcgacaaatacaagtgatatttctgtaacagctaccaacgacagtcgcctctatcctggagcacttctcgtagtggatgagaccttgttagagaataatcccactcttcttgcggtcgatcgtgctccgatgacttatagtattgatttgcctggtttggcaagtagcgatagctttctccaagtggaagaccccagcaattcaagtgttcgcggagcggtaaacgatttgttggctaagtggcatcaagattatggtcaggtcaataatgtcccagctagaatgcagtatgaaaaaatcacggctcacagcatggaacaactcaaggtcaagtttggttctgactttgaaaagacagggaattctcttgatattgattttaactctgtccattcaggcgaaaagcagattcagattgttaattttaaacagatttattatacagtcagcgtagacgctgttaaaaatccaggagatgtgtttcaagatactgtaacggtagaggatttaaaacagagaggaatttctgcagagcgtcctttggtctatatttcgagtgttgcttatgggcgccaagtctatctcaagttggaaaccacgagtaagagtgatgaagtagaggctgcttttgaagctttgataaaaggagtcaaggtagctcctcagacagagtggaaacagattttggacaatacagaagtgaaggcggttattttagggggcgacccaagttcgggtgcccgagttgtaacaggcaaggtggatatggtagaggacttgattcaagaaggcagtcgctttacagcagatcatccaggcttgccgatttcctatacaacttcttttttacgtgacaatgtagttgcgacctttcaaaatagtacagactatgttgagactaaggttacagcttacagaaacggagatttactgctggatcatagtggtgcctatgttgcccaatattatattacttggaatgaattatcctatgatcatcaaggtaaggaagtcttgactcctaaggcttgggacagaaatgggcaggatttaacggctcactttaccactagtattcctttaaaagggaatgttcgtaatctctctgtcaaaattagagagtgtaccgggcttgcctgggaatggtggcgtacggtttatgaaaaaaccgatttgccactagtgcgtaagcggacgatttctatttggggaacaactctctatcctcaggtagaagataaggtagaaaatgactag

SEQ ID NO: 1007 - DNA, 717 bp, Streptococcus pneumoniae
atgggacgtaaatgggccaatatcgtagctaagaaaacggctaaagatggagccaactctaaagtatatgcaaaatttggtgtagaaatctatgtagcagctaaaaaaggtgatccagatccagaatcaaactcagctttgaaattcgttatcgaccgtgctaaacaagcccaagtgccaaaacacattatcgataaagcgattgataaagccaaaggaaacacagacgaaacctttacagaaggacgttacgaaggttttgggccaaatggctctatgctaattgtggatactttgacttctaacgtcaaccgtacagcagccaatgtccgtgcagcctttggtaaaaacggcggaaacatgggcgcttcaggttctgtttcttacctttttgacaacaaaggtgttattgtatttggaggtgaagatgcggacgcagtctttgagcaattgctcgaagcggatgtggatgtggatgacgtaaaagcacaagaaggtacaatcacagtttacacagcgccaactgaccttcacaaggctatcgttgctctccgtgagtctggtattgaagaattccaagtgactgaattggaaatgattcctcagtcagaagtggaattgtcaggcgaagaccttgaaacctttgaaaaactttacagcgttcttgaagacgacgaagacgtccaaaagatttatacgaacgtagatgggttttaa

SEQ ID NO: 1008 - DNA, 450 bp, Streptococcus pneumoniae
atgggtaaaccgatgttagtctttaagcgttttggtcatcaaattcacctgatggtgcaaaaggaagccaaacgttgcggcattgaatttatgggtgggccgcaaggtcaggttgtgcattttttggataatcgcgagaaaaaccaagacttggtcttgattaaagatatcgatcaggaactcaatattaccaagtctgttgctagtaatctggttaagcgtatagtgcaaaattgtttggtggaattggaggcgagtcctgttgataagcgggctaagtttgttcgtctgacggacaaagcacgttctcagatgcaacaggttaaggctttttttgaacgcatagacaagcagttgatggaagatattgatgaagatgaattactgatttttgagaaggttctcggtcaactacaggcaaaatatcaagggaataggaggagagaataa

SEQ ID NO: 1009 - DNA, 873 bp, Streptococcus pneumoniae
gaggagagaataaagaaattagccaaaagaattagtagaaaagaatgggggatgattttactagccattctctttacttgcttttcggtctatctagagttggaagtgccgacctatatctcgaaaattacggatttgctaggtagtcaagaaactaatttagatgagttgtggcagccggcaagcatgatgatgggaatgtcctttcttgccttcttgtccgtagttgcagttggattttttgcatcccgagtggcggcttcttatactagtaggctgagaagtgatatttttaaccgagttttggattactcgcagacagagattaagaaattttcaattcctagcctcttgacgcgtactaccaatgacattactcaagttcaaatgttgattactatgggcttgcaagtggtaacgcgtggttcaattatggctatctgggctattgggaagattttaggtcattcagaatactggctctgggccgtacttgtggtagtgattgtcaacgtcctgatgacgaccgttttgatgacgctagcctttccaaaacagtccttgattcaggggttgacagataaactgaacagtatcactcgtgagagtttaacaggtattcgtgtcgttcgtgcctacaatgcagaggattatcaaaatgaaaaatttgcagcagtaaatgatgaattgacccgtttgaatttgtttgtcaaccgtcttatggctattttgaatcctatcatgatggggatttcaagtggtttgagtgtagcgatttactggattggggcctatgtgattaacgacgctgctccgatagcgcgtctgcctctctttagtgacatgattgttttcatgtcttatgccatgtag

SEQ ID NO: 1010 - DNA, 1032 bp, Streptococcus pneumoniae
atggacttccttctcatgggagcactcttcatcgttcttccccgaactatggtctctgctaagcggattaatcaagttttagatttgcattcttctatccaaaaccctgctcaagtgcagctgactgatgaaaacttcaaaggtcaggtcgagtttaaggatgtgaccttccgctatgcggcaaattcggaggcagttattgaacatgttagctttaaagcagaaactggtcaaacagtggcctttattgggtcaataggttctggtaaatcaactctggtcaatctgattccacgtttctacgacgtgtcagcaggagaaattctggtggacggtgtcaatgttcaagactatgacttctctgcgacagctcatgctggtcaaagggttgccattgttgggccgactggggctggtaagacaaccattgtcaatcttttgatgaaattctatgagattgataagggaagtattcgcattgatggtgtggataccaaggctatgacgcgttcagaagtgcatgatgccttttcaatggtcttgcaggatacctggctctttgaaggaactattcgagacaatctcatctataatcaaatagggattagtgatgaacgaatgatggaagctagtaaggctgtgggaattcaccactttattatgaccttgccagatggctatgataccatcttggatgacaccgtgaccttgtctgtaggacaaaaacaactattgactattgcttgtgcccttcttaaggatgcatcgcttttgattttggatgaggcgacttcttctgttgacacacggacagaggaattgatccaaaaagccatggaccgtttgatggaaggacgcacatcctttgtcattgcccaccgcttgtcaatcatccgaaatgcagacttgatcttggtcatgaaagatggaaatatcatcgagcaaggcaactatgaggaactgatggcgcaaggtggcttctacgctgacttgtacaatagtcaatttacagaagatgaagcagaagaataa

SEQ ID NO: 1011 - DNA, 363 bp, Streptococcus pneumoniae
atgagtcagaaattatacaatatgaaatttgctgctgtctacttagccttgattgcaaaagttgagcgaaagggtgaaaaggcagagtcagttcaccaagtgaccagttggttgacagggtatgaagtgagtgacgttcttgcttgtctggatagggatgttacttacggagatttttttctacaagcaccatattatgtccctgaacgaattacaattacagggaagatttgcggtgtccgtattgaggaaattgatgatcctctgatgcaggaaatacgtcgcttagacaagctattggattggcttgccaaggggaaaacatctcaacaagttctagaaaagtatgagaagcataaatga

SEQ ID NO: 1012 - DNA, 504 bp, Streptococcus pneumoniae
atgaaaaattatcaagaatggtatcgaaatatcagctccagactaactagtcgtccaattcttttattcctattacgcagtttcaatcgtttgatgacagtcgccatgcccctggtctatctgatcttgctagtcaccacttacctgcaactaggacttggtcagcaagttggggtttatgtgcttattcctgcatcaggttttgtggccttgtccctgtttcgtaagaaaatcaatcacccgagaccttatgaaacttgggatatctgtccccttcttgataaggatagtgcgggacggtcgatgcccagtcgccatgtcttttctgcaactatcatctccatggcctgtctgcatgctagtctacctattggcttagtatgcttgatcttttcagctttgctggggttggtgagggttttagggggtgttcattatcccaaggatgtcttggttggctatgcttgtggtctggtgtggggattccttttcttcctattctga

SEQ ID NO: 1013 - DNA, 450 bp, Streptococcus pneumoniae
gtgatgaagttacgaattgagattgacggcaatttagaggagactgaaattgtcatcaagacccccactttgacagatgaaattgcagacttgcaacggctcttgcaagagtcaaaggctccgaggttgactttttacaaggggacaggtgaatattatctagacctgtcagaaattctcttctttgaaacagaagggagcaagatctacgctcataaccagaaggaagcttatgaggttcgcctcaagctctatgagttggagtctatcttgcctcgctattttaatcgagtttccaagtcaacgatcgcaaacatccgtcagatttactcagtggacaagtccttttcaggaacgggcaccatttccttttatcagacgcacaaggaggttcatgtctcacggcattaccaatccctcctaaaagaaaatctaagaaacatgaggtaa

SEQ ID NO: 1014 - DNA, 675 bp, Streptococcus pneumoniae
atgaaaaagaaagcatttggtattgtgttacttgtactagcagctttaatattagtacaaggaaattttggaatcccttctctaggagggcacatttggcccttgattggtattgctttttttgcctaccaatcagttggagctttgttgcgtcgccacttaacttcagcctcttttacagctctagtagccttaatgattgctaaccacttttatggcattttaccgattccaaaccagacactaatctgggcaggagttctaatcgttctcggagtaaatatgttgactcattctaacagaacttggaatgggaaaaaatggtggtatgatggtgaaaaaaacattcttatagataaggaagttgcttttgggacagggactttctacaagcaagaccaagaattggtagaagaccaagtagaagttggttttggcaatgcaaaaatctactatgacaatgcagagatgttaggtgattttgcaactttaaatattgaagtagcttttggtaatgcaactgtctatgttccgcaacactggcgtgtcgatttgaaagtagaaacatcctttggtacagccaaggcggacgctcctgtagcgccaacaagcaaaaccttgattattcgtggagacgtggcctttgggaagttggagcttgtctacgttaaataa

SEQ ID NO: 1015 - DNA, 222 bp, Streptococcus pneumoniae
gtgcctggcaataagaataatactcttcgaaaatctcttcaaaccacgtcagcttcatccacaacctcaaagcagtgctttgagcagcctgcggctagcttcctagtttggtctttgattttcattgagtataagaagtccttttccttaaaggaagaggctttttacttgcttttttgctgtttcctcatttgtcctaaagccttttttgtgttaaaatga

SEQ ID NO: 1016 - DNA, 300 bp, Streptococcus pneumoniae
atgaatggtatgaaagctaaaaaaatgtggatggcaggtctggctctgcttggtattgggagccttgcccttgctacgaaaaaagttgcagatgaccataagctcatgaagactcaggaagagttgacagcgattgtacgagaccatttttcagacatgggggaaattgcgaccctctatgttcaagtctatgaaagcagtctagagagcttgcttggtggcgttatttttgaggatggccgtcattatacctttgtctatgaaaatgaagacctagtctatgaggaggaagtcttatga

SEQ ID NO: 1017 - DNA, 318 bp, Streptococcus pneumoniae
atgatacaaccagcaagtttagaagaattggcatctttagtagaaaaagacggtaagaaggtcttcctttttgtggcggactggtgtggcgattgccgttatatctatcctgccttaccagaaattgaggagagtaatccagagtttacctttattcgagtggatagagaccagtatatagatttggccaaactctgggatgtatatggaatccctagccttgttgttctagaaaaggacaaggaaatcggtcgttttgtcaatcgcgaccgtaaaagcaagcaacaaattaacgattttttagcaggattgaaatag

SEQ ID NO: 1018 - DNA, 378 bp, Streptococcus pneumoniae
atgttccaagctactgtttccccattttctttgaggaaaacacgggctaccttgtctttgcgttccacattcagtttagcatctccgctatttttcacgatgaccataaggacatcaccgacatgttctttgttatatgtaaaaatcattgtttcctttttctcctatttcaatcctgctaaaaaatcgttaatttgttgcttgcttttacggtcgcgattgacaaaacgaccgatttccttgtccttttctagaacaacaaggctagggattccatatacatcccagagtttggccaaatctatatactggtctctatccactcgaataaaggtaaactctggattactctcctcaatttctggtaaggcaggatag

SEQ ID NO: 1019 - DNA, 627 bp, Streptococcus pneumoniae
atgatttttacatataacaaagaacatgtcggtgatgtccttatggtcatcgtgaaaaatagcggagatgctaaactgaatgtggaacgcaaagacaaggtagcccgtgttttcctcaaagaaaatggggaaacagtagcttggaacatttttgaggtttcgagcttgtttgaaattgcagagcgcggtcaagtctttttatcagatgagcaagtcgctcgtttgaaccaagaattacaggcggaaggttttacagaagaaattgttaatgataaggaacctaagtttgttgttggtgaaattgtcgagatggtagctcatccagacagtgaccacctcaacatctgccaagttgcagtcgcaagtgacaagatagtgcaaatcgttgcaggagcacctaatgcgcgtgttgggttgaaaaccattgtggctcttcctggtgccatgatgccaaaagggaatttcattttcccaggcgaacttcgtggtgaaaagagttttgggatgatgtgtagtcctcgtgaattgcatttgccaaatgctccgcaaaaacgtggggtgcttgaattatcagaagaccaagttgtcggaacaccgttcgacccagcgaaacactggactgcctag

SEQ ID NO: 1020 - DNA, 762 bp, Streptococcus pneumoniae
atggcaaaaaatgtagtgattacgggagcaacctcaggaatcggtgaagcgattgcgcgtgcttatctggagcagggtgaggatgtcgttctaacaggacgacggatagacagattagaaatcctcaagtcggagtttgcagtaagctttccaaatcaaaccgtctggacttttccactagatgtgacggatatggtcatggtgaagactgtttgctctgatattctagaaacgatagggaggattgatatcttggtcaacaacgccggactggctcttgacttggctccctatcaagactatgaggagttggatatgttgaccatgttggataccaatgttaaaggtctgatggcggttactcgctgtttcttgccagcaatgataaaagtcaatcaaggtcacgttatcaatatggggtcaaccgcaggaatctacgcctatgctggtgccgctgtttactcagctaccaaggcagcggttaagaccttttcggatggactgcgaattgataccatcgcaacggatatcaaggtgacaaccattcagcctgggattgtcgaaacagatttctcaactgttcgttttcatggtgataaagagcgggctgcgtccgtttaccaaggaatagaagccttgcaagctcaggatattgcagacacagtagtctatgtgaccagtcagcctcgccgtgttcagattacagatatgaccattatggccaatcaacaggcgacaggtttcatgattcataaaaaataa

SEQ ID NO: 1021 - DNA, 396 bp, Streptococcus pneumoniae
atgtataataaagttatcatgattgggcgtttaacgtctacaccagaattgcacaaaaccaacaatgacaagtcagtagcgcgagcaactatcgctgtcaaccgtcgttacaaagaccaaaacggtgaacgtgaagctgattttgtcaatatggttctatggggcagactagcagaaactttggcaagctacgcaaccaaaggtagtctcatttccgttgatggagaattgcgtacccgtcgctttgagaaaaatggtcagatgaattatgtaaccgaagtccttgtgacaggattccaactcttggaaagtcgtgcccaacgtgctatgcgtgaaaataatgcaggccaagatttggcagatttggtcttggaagaggaagaattgccattttaa

SEQ ID NO: 1022 - DNA, 285 bp, Streptococcus pneumoniae
atgttgaaaccattaggggaccgtgtgctcttaaaaatagaagaaaaagaacaaaccgttgggggctttgtccttgcaggctcagcccaagaaaaaaccaaaacagctcaagttgtggctactggacaaggtgttcgtaccttgaacggtgacttggttgctccaagtgttaaaactggagatcgtgtcttagttgaagcccacgcaggtcttgatgtcaaagatggcgatgaaaagtacatcatcgtaggcgaagctaacattttggcaatcattgaggaatag

SEQ ID NO: 1023 - DNA, 609 bp, Streptococcus pneumoniae
ttggcaacagggatggcgttgtttttcaaagcttcaactgctgcggcaactgctgtttcaatcccacgacgaataccgattggatttgcacctgctgtgacgtttttgattccttcacggacgatagcttgggtcaagactgttgcagtcgtagttccgtcacctgcgatatcattggttttagaagctacttctgatactaacttagcacccatattttcaaaatggtcttccaattcgatttctttggcaatggtcacaccgtcattggtaatcaagggtgaaccgaatgacttttcaagaacgacattgcgaccttttggtcccaaggttactttaacagtgtctgcaagaatatcgacaccacgaaccatggctgaacgggcatctgatgaaaatttaatttcttttgacatacttactttctccttctattcctcaatgattgccaaaatgttagcttcgcctacgatgatgtacttttcatcgccatctttgacatcaagacctgcgtgggcttcaactaagacacgatctccagttttaacacttggagcaaccaagtcaccgttcaaggtacgaacaccttgtccagtagccacaacttga

SEQ ID NO: 1024 - DNA, 1623 bp, Streptococcus pneumoniae
atgtcaaaagaaattaaattttcatcagatgcccgttcagccatggttcgtggtgtcgatattcttgcagacactgttaaagtaaccttgggaccaaaaggtcgcaatgtcgttcttgaaaagtcattcggttcacccttgattaccaatgacggtgtgaccattgccaaagaaatcgaattggaagaccattttgaaaatatgggtgctaagttagtatcagaagtagcttctaaaaccaatgatatcgcaggtgacggaactacgactgcaacagtcttgacccaagctatcgtccgtgaaggaatcaaaaacgtcacagcaggtgcaaatccaatcggtattcgtcgtgggattgaaacagcagttgccgcagcagttgaagctttgaaaaacaacgccatccctgttgccaataaagaagctatcgctcaagttgcagcagtatcttctcgttctgaaaaagttggtgagtacatctctgaagcaatggaaaaagttggcaaagacggtgtcatcaccatcgaagagtcacgtggtatggaaacagagcttgaagtcgtagaaggaatgcagtttgaccgtggttacctttcacagtacatggtgacagatagcgaaaaaatggtggctgaccttgaaaatccgtacattttgattacagacaagaaaatttccaacatccaagaaatcttgccacttttggaaagcattctccaaagcaatcgtccactcttgattattgcggatgatgtggatggtgaggctcttccaactcttgttttgaacaagattcgtggaaccttcaacgtagtagcagtcaaggcacctggttttggtgaccgtcgcaaagccatgcttgaagatatcgccatcttaacaggcggaacagttatcacagaagaccttggtcttgagttgaaagatgcgacaattgaagctcttggtcaagcagcgagagtgaccgtggacaaagatagcacggttattgtagaaggtgcaggaaatcctgaagcgatttctcaccgtgttgcggttatcaagtctcaaatcgaaactacaacttctgaatttgaccgtgaaaaattgcaagaacgcttggccaaattgtcaggtggtgtagcggttattaaggtcggagccgcaactgaaactgagttgaaagaaatgaaactccgcattgaagatgccctcaacgctactcgtgcagctgttgaagaaggtattgttgcaggtggtggaacagctcttgccaatgtgattccagctgttgctaccttggaattgacaggagatgaagcaacaggacgtaatattgttctccgtgctttggaagaacccgttcgtcaaattgctcacaatgcaggatttgaaggatctatcgttatcgatcgtttgaaaaatgctgagcttggtataggattcaacgcagcaactggcgagtgggttaacatgattgatcaaggtatcattgatccagttaaagtgagtcgttcagccctacaaaatgcagcatctgtagccagcttgattttgacaacagaagcagtcgtagccaataaaccagaaccagtagccccagctccagcaatggatccaagtatgatgggcgggatgatgtaa

SEQ ID NO: 1025 - DNA, 210 bp, Streptococcus pneumoniae
gtgcatgtttgctgtgccccttgtagtacctatacactagaatatttgaccaagtatgcagatgtgaccatctattttgccaattctaatatccatcccaaggcagaataccataagcgggtctatgtcaccaagaaatttgttagtgattttaatgagcggacaggaaatacggttcagtacctagaagctccctacgaacccaattaa

SEQ ID NO: 1026 - DNA, 252 bp, Streptococcus pneumoniae
gtggctatggacttgggctttgactactttggttcagccttgaccatcagtcctcataagaattctcaaactatcaatagcatcggaatcgatgtgcaaaaaatttacacgccccactattttcccaacgatttcaagaaaaatcaaggctacaaacgttcagtagagatgtgtgaggagtatgatatctatcgtcaatgttattgtggctgcgtctatgcagcccaagcccagaatattgacctggtttaa

SEQ ID NO: 1027 - DNA, 192 bp, Streptococcus pneumoniae
cttttatattgttcaattactttatcaatcattttaaatgacctccactctataatttggcattatatcacaagaataaagatagtgttaaataagttatataaatgcaaaaaaggaatattccgttatagcagagttgtaacacatttctataaagaaatttattcctacgactcagtttggcatgcttaa

SEQ ID NO: 1028 - DNA, 774 bp, Streptococcus pneumoniae
atgattgataaagtaattgaacaatataaaagtcatgataatcttgatattcgagtagaattgcataagaagtattcaaaaaataaattgggatttaataattggatattttctaactaccaaatcactgatgaagtaaaggttctagaattgggatgtggtacaggagaattgtggaaaagtaatagtgattctatagataaaatgaagcagttgattgttacagatttttctaaagatatggtaaaatcaacgaagtcagtgattggaaatagaaacaatgtcaattatgagataatggatattcaaaagatttcttttgagaatgaaacttttgatattgttattgctaatatgcttctacatcatgtgaatgatattcctaaagctctctctgaggtgaatagggtcttaaaaaccggaggcattttttactgtgctacatttggtgaaaatggagttgtaaattatttggcaagtttatttaaagatgaggttaatcaagatttagaaaatagaacgtttactttacaaaatggtaaaaggtacctgagtaggtattttaactctgtcgatacattactctatgatgatgagttacaggtaactagtatagatgacctagttaaatacatccaatcgtttaaaggaatttcagaaataggttcactagaagaggaaataatacgtaaaagattggaaagtgagtttaataatggtatgttgatcattcctaaagaatatggtatgtttatcgctcgaaaagaaagttaa

SEQ ID NO: 1029 - DNA, 339 bp, Streptococcus pneumoniae
gtgaaaaattacggagaagcttttcgatattttagaaaattaaacggatattctttagagtatgctgcagctgattttatatcaaaatctcaactttctagatttgaaaggggagaaaatgaaatttctctttcaacattttttgaattattatcaaatatcaatgtttcgatagagaatttttgtaatcacttagaatattataaaagatcggagcgtgatgattttttggttaatttatctccaaatttttatagtttgaatattaaaggattggaggtaataaaaaataagcaacaaaaactttttgagaagagtgggaaaaaactcataaaataa

SEQ ID NO: 1030 - DNA, 348 bp, Streptococcus pneumoniae
atggtcggaaaagaaatactagaacgtacacattattacgaaaaaatcggcaagaatagaaatttagttgtgtcagcttgtttaaatttttggttctgttgccttgaaaattcacatctaatatatgcagactactttgaaatgaaattacaaaaattattaaaagatgacacaaaagtttttgaaaaatctacattcaaatttgtagaaggatataaaatatacctgacagaatctaaagaatctggaattaaacaaatggacaatgtcataaaatattttgagtttattgaatctaaaagtattgctttatattttcaaaaacgattaaatgagctgatagattaa

SEQ ID NO: 1031 - DNA, 534 bp, Streptococcus pneumoniae
atgaagcttccaaaagaaggcgactttattacaattcaaagttataagcatgatgggagtctccaccgaacttggcgggacaccatggtactaaaaacaacagaaaacgccattattggtgtcaacgatcatacacttgttaccgaaagtgatggtcgtcgttgggtcactcgagaaccggctattgtttactttcacaagaaatattggtttaatatcattgccatgattcgtgataatggaacttcttactattgcaatatggctagcccctactatctggatgaagaagcactgaagtatattgattacgatttggatgttaaaatttttacagatggggaaaaacgtctcttggacgttgaagagtacgagcgtcacaaacgcaaaatgaattattctgatgacttggactatattttaaaagaacatgtcaaaattcttgttgattggattaacaatggacgtggtcctttctcagaagcctatgtaaacatttggtacaagcgctatgtagaactaaagaatcggtaa

SEQ ID NO: 1032 - DNA, 180 bp, Streptococcus pneumoniae
attgtaataaagtcgccttcttttggaagcttcataactaaccaactttctacaatttataagtttatcatttactattgtaccataaaattacctaaaatctgtgaatttcacttggaaatattaaagatattctctaagagcgcttgctatatccgaaaaatcgtagccctttcgtgc

SEQ ID NO: 1033 - DNA, 861 bp, Streptococcus pneumoniae
atgcgcttgatttttaatggtattttttgtttcactttcagattcatacccctatcttatcacattttgagttataatagagctatgaaaatcacaaaacttgaaaagaaaaaaagactctatctgatggagcttgataatggcgacaaatgctatatcaccgaagatacaattgttcgttttatgttatcgagagataaggtgataagcgaagaggaattgaaagagattcaagactttgctcaattttcttatggtaagaatctggccctctaccacttatcctttaaagcacgcactgaaaaagaagtcagagaatatctgaaaaaatacgatattgataaaaacatcgtttctcaagttattgctaatcttaaagaagataagtggattaatgatggtcagtacgcttatgctatcatcaataccaatcaactttcaggagacaagggtccttatgtgctgactcagaaactagctcaaaaagggatttcaaaatctactatagaagagaacttgaaagaatttgatttttctgaagttgctcaacgtgtagctaataaactattgaaaaaatatgagggaaaacttccagctcgtgccctgcaagataagattatccagaacttgactaacaagggcttctcttattctgatgctaaaattgcctttgacgacttagatagccaagttgaccaagaaacgactcaagaactcatcttcaaggaacttgataagcaatatactaagtatgctcgaaagtatgaaggatacgaactgaagcagcgtttaactcaagttttagcacgaaagggctacgatttttcggatatagcaagcgctcttagagaatatctttaa

SEQ ID NO: 1034 - DNA, 1356 bp, Streptococcus pneumoniae
atgaatctgaaagtgaaacaaaaaataccattaaaaatcaagcgcatgggaattaacggtgagggaatcggcttttaccaaaaaacattagtctttgtaccaggagctctcaaaggcgaagatatctattgtcagattacttctattagacgcaactttgttgaagcaaaattactgaaggtcaacaagaagtctaaatttcgaattgtgccatcttgtactatttataatgaatgcggaggctgccaaatcatgcacctgcattatgataagcagctggagttcaagacggacttacttcatcaagcgctgaaaaaatttgctcctgcaggatatgaaaattatgaaattcgtccaactattggaatgcaggaaccaaaatattacagagctaagttacaatttcagactcgaaaatttaaaaatcaggtcaaggcgggcttatatgcacaaaactctcactatttagtagagttgaaagactgcctggtacaagataaggaaacccaagtgattgctaatcgcttagcagaattacttacttatcaccagattccaatcacggatgagagaaaagttctaggtgtccgtactattatggtccgacgcgcgagaaagaccggacaggttcagattattattgttacaaaccgccagcttaatttaactcaattggtaaaagagttggttaaagatttcccagaagttgtgacagtagctgttaatacaaatacagctaaaaccagtgagatatatggtgaaaagacagagattatctgggggcaagagagtattcaagaaggtgtactcaattatgaattttcactatcccctcgagctttttatcaactaaatcctgagcaaacagaagtcctctatagcgaagcagtaaaagcgctggatgttgataaagaagaccatttgattgacgcttattgtggagttggaacgattggatttgcctttgcaaagaaagtaaaaacactcagaggtatggatattattccagaagctattgaagatgccaagcgaaatgctaaaagaatgggatttgacaatactcattatgaagctggaacggcagaagagattattcctcgttggtacaaggaaggctaccgagcagatgctttgattgttgacccaccacgtacaggtctggatgataagttattagatactattcttacttatgtaccagaaaaaatggtttatatttcttgtaatgtttcgaccttggctcgtgatttggtacgcttagtagaagtctatgatcttcattatatccagtcggtcgatatgttcccacatacagctcgaactgaagctgttgtaaaattaataaaaaaagtttaa

SEQ ID NO: 1035 - DNA, 246 bp, Streptococcus pneumoniae
tacaacgcaggtccatctggtagtgatgcaagtgcaccttttaagcaaatgtcatgcaacatccactcttatgcggtattagctatcgtttccaatagttatcccccgctaccaggcaggttacctacgcgttactcacccgttcgcaactcatccagagaagcaagctcctccttcagcgttctacttgcatgtattaggcacgccgccagcgttcgtcctgagccaggatcaaactctcattaa

SEQ ID NO: 1036 - DNA, 150 bp, Streptococcus pneumoniae
ttgctcggtcagacttccgtccattgccgaagattccctactgctgcctcccgtaggagtctgggccgtgtctcagtcccagtgtggccgatcaccctctcaggtcggctatgtatcgtcgccttggtgagcccttaccccaccaactag

SEQ ID NO: 1037 - DNA, 186 bp, Streptococcus pneumoniae
gacacggcccagactcctacgggaggcagcagtagggaatcttcggcaatggacggaagtctgaccgagcaacgccgcgtgagtgaagaaggttttcggatcgtaaagctctgttgtaagagaagaacgagtgtgagagtggaaagttcacactgtgacggtatcttaccagaaagggacggctaa

SEQ ID NO: 1038 - DNA, 261 bp, Streptococcus pneumoniae
gctaaggccccacaagacctctcaagactaaacaagaccaatgcgcagttccttatccttagaaaggaggtgatccagccgcaccttccgatacggctaccttgttacgacttcaccccaatcatctatcccaccttaggcggctggctccttacggttacctcaccgacttcgggtgttacaaactctcgtggtgtgacgggcggtgtgtacaaggcccgggaacgtattcaccgcggcgtgctgatccgcgattactag

SEQ ID NO: 1039 - DNA, 228 bp, Streptococcus pneumoniae
atgacttttgtcaacagacgaaactctttatactcttcgaaaatctcttcaaacttcgtcagcgtcgccttgccgtatgtatggttactgacttcgtcagtttcatctacaacctcaaaaacatgttttgagctgacttcgtcagttctatctacaacctcaaagcagtgctttgagcaacctgcggctagtttcctagtttactctttgattttcattgagtattag

SEQ ID NO: 1040 - DNA, 237 bp, Streptococcus pneumoniae
actaggaaactagccgcaggttgctcaaagcactgctttgaggttgtagatagaactgacgaagtcagctcaaaacatgtttttgaggttgtagatgaaactgacgaagtcagtaaccatacatacggcaaggcgacgctgacgaagtttgaagagattttcgaagagtataaagagtttcgtctgttgacaaaagtcattctctttagtagaatagtagatgcgatgagtcgatag

SEQ ID NO: 1041 - DNA, 282 bp, Streptococcus pneumoniae
atgggatatacagttgctgtagtcggcgcgacaggtgctgtcggtgctcagatgataaaaatgttggaagaatcaacactttcaatcgataaaatccgttaccttgcttgtgcacgttcagcaggtaagtcagtgggatttaaagatcaagatattacaattgaagaaacgactgaagcagcttttgaaggagttgatattgctctcttttcagcaggtagttctacatcagctaagtatgcaccatacgctagtaaaagctggcgtggtagtagtagataa

SEQ ID NO: 1042 - DNA, 276 bp, Streptococcus pneumoniae
aaagctggcgtggtagtagtagataatacatcttatttccgtcaaaatccagatgttcctttggttgttccagaggtcaatgctcatgcacttgatgctcacaacggaatcattgcctgccctaattgttcaacaatccaaatgatggtggctcttgagcggtttcgccaaaaatggggcttggagcgtatcattgttttaacttatcaagccagtattcaggagctggtatgggagcaattcttgagacacaacgtgaacttcgtgaagtcttga

SEQ ID NO: 1043 - DNA, 666 bp, Streptococcus pneumoniae
gcggtttcgccaaaaatggggcttggagcgtatcattgttttaacttatcaagccagtattcaggagctggtatgggagcaattcttgagacacaacgtgaacttcgtgaagtcttgaatgatggtgtgaaaccatgtgatttgcatgcggaaattttgccttcaggtggtgacaagaaacattatcctatcgcctttaacgctcttccacaaattgatgttttcactgataatgattacacgtacgaagagatgaagatgaccaaggaaactaagaaaattatggaagatgatagcattgcagtatctgcaacatgtgtgcgtattccagtcttgtcagctcactctgagtctgtttatatcgaaacaaaagaagtggctccaatcgaagaagtaaaagcagctatcgcagccttcccaggtgctgttcttgaagatgatgtagctcatcaaatctatcctcaagctatcaatgcagttggttcgcgtgatacctttgttggtcgtatccgtaaagacttggatgcagaaaaaggaattcacatgtgggttgtttcagataaccttctcaaaggtgctgcttggaactcagttcagattgctgaaactcttcatgaacgtggattggttcgtccaacagctgaattgaaatttgaattaaaatag

SEQ ID NO: 1044 - DNA, 936 bp, Streptococcus pneumoniae
atgtcttatcaagatttaaaagagtgtaaaatcatcacagcctttattactcccttccacgaggatggttccatcaactttgatgctattccagccttgattgagcatttattggaccatcatacggatggaattcttctcgcagggaccactgctgagagtccaactttgacccacgatgaggagttggagttatttgcggctgtacaaaagattgtcaatggacgagttcctttgattgcgggtgtaggtactaatgatacgcgtgactctatcgagtttgtcaaagaagtagcggaattcggcggttttgctgctggtcttgctattgttccttactacaacaaaccttctcaagaaggaatgtatcagcattttaaagccattgcagatgcttctgacctaccaattattatctataacattccagggcgtgtggttgttgaattaactccagaaaccatgcttcgcttggctgatcatccaaatattatcggtgtcaaagaatgtactagcttggctaatatggcttacttgattgagcacaaaccagaagagttcttggtctatactggtgaggatggagatgctttccatgccatgaaccttggggcggatggggttatttctgttgcctctcatacaaatggggatgaaatgcacgagatgtttattgccattgcagaaagtgatatgaagaaagccgcagctattcaacgtaaattcattcctaaggttaatgctctcttctcttatccaagtcctgctccagttaaggcagttttgaactacatgggatttgaagctggaccaactcgtctacctcttgttccagcaccagaagaagatgctaaacgcattatcaaggttgtcgtagatggcgactacgaagcgaccaaggcaactgtaacaggtgtcttaagaccagattactaa

SEQ ID NO: 1045 - DNA, 1374 bp, Streptococcus pneumoniae
atgattacacgtgaatttgataccatcgctgctatctctactccactaggtgaaggggctattggtattgtccgcctgagcggaacagacagttttgctattgtgcaaaagatttttaaaggaaaagacttgaacaaggttgccagccacactctcaactacggtcacattattgatcctctgactggtaaagtcatggacgaggttatggttggggctatgaagtctccaaagaccttcactcgtgaggatattatcgagattaacacccacggtggtattgcggtgaccaatgagattctccagctagctatccgtgaaggagctcggttggcagaacctggtgaatttaccaaacgtgcctttttaaacggtcgcgtagatttgacacaggccgaggcggtgatggatatcatccgcgccaagacagacagggccatgaacatcgcggtcaaacaacttgatggttccctttctgatcttatcaataatatccgtcaagaaatccttaatacacttgcccaagttgaggtcaatatcgactatcctgagtatgacgatgttgaggaagccactactgctgttgtccgagagaagacaatggagtttgagcaattactaaccaatcttcttaggacagcacgtcgtggtaaaatccttcgtgaaggaatttcaacggctatcattggacgtcccaacgttgggaaatcaagccttctcaacaacctcttgcgtgaggacaaggctatcgtaacagatatcgctgggacaacacgagatgtcatcgaagagtacgtcaacatcaatggtgtacctctcaaattgattgatacagccggtattcgtgaaacagatgacatagtggaacaaatcggtgttgagcgttcgaaaaaagccctcaaagaagccaacttggttctactagtgctaaatgccagtgaaccactgactgcgcaagacagacaacttcttgaaattagccaagataccaatcgcattattctacttaataaaaccgacctgccagaaacgattgaaacttcgaaactacctgaagacgttatccgtatttcagtccttaaaaaccaaaacatcgacaagattgaagagcgaatcaacaacctcttctttgaaaatgctggcttggtcgagcaagatgctacttacttgtcaaacgcccgtcacatttccctgattgaaaaagcagttgaaagcctacaagccgttaatcaaggtcttgagctggggatgccagttgatttgcttcaagttgacttgactcgtacttgggaaatcctcggagaaatcactggggatgctgctccagatgaactcatcacccaactctttagccaattctgtttaggaaaataa

SEQ ID NO: 1046 - DNA, 225 bp, Streptococcus pneumoniae
gtggtaaaatggaagaaatcaaaactagtggaggaagctattatgccatttgtacgcatcgatttatttgaaggacgcacgctcgagcaaaagaaagctcttgctaaggaagtaacggaagcggttgttcgcaacactggagcacctcaatctgctgttcatgtcatcatcaacgacatgccagaaggaacttatttcccacaaggggaaatgcgcaccaaataa

SEQ ID NO: 1047 - DNA, 492 bp, Streptococcus pneumoniae
gtgattatgacctcggctctggatacgcgtgaccgtgtgggctatgtgtcgagtcgaattggcatgaaacgccctgcccttgcgattgaggaaacaacggatatctttggctatatccgagacctaccagaaaaaccttactgtgttttggtcgatgaagcccagtttctcaaacgccaccatgtttatgacctagctcgtgttgtggacgagttagacatacccgtcatggcttttggcttgaaaaatgactttcgcaatgaattgttcgaaggttccaaatatctcttgcttttagcagacaagattgacgaaatcaagaccatctgtcagtattgcaagaaaaaggcgaccatggtgttgcgaacacaggatggactgcccgtttacgatggagaacagatccagattggtggtaatgaaacctatatctcggtttgccgtaaacattattttgcccctgaaatcaataaggagaatgaagaaaaatga

SEQ ID NO: 1048 - DNA, 843 bp, Streptococcus pneumoniae
atgaacatctatgatcaactacaagctgtagaagaccgttatgaagaactaggagaattgctgagtgaccctgatgtcgtttcagacaccaagcgttttatggagctttcaaaagaagaagcttccaatcgtgacaccgtaatagcctaccgtgagtataaacaagtccttcaaaatatcgtcgatgccgaagagatgattaaggaatcaggcggagatgcggacttggaagaaatggccaagcaagaactcaaagatgccaaggctgaaaaagaagaatatgaagaaaaactgaaaattttgctccttccaaaggatccaaacgatgacaagaatatcatccttgaaatccgtggagcagctggtggagacgaagcggcacttttcgctggagatttgctaactatgtaccaaaagtatgcggaagcccaaggttggcgctttgaagtcatggaagcctctatgaatggtgtcggtggttttaaagaagtggttgctatggtttcaggtcagtctgtatactctaagcttaagtatgaatcaggtgcccaccgtgtgcaacgtgttcctgtgacagaaagccaaggccgtgttcatacttcgacagcgacagttcttgttatgccagaagttgaagaggttgaatacgacattgatccaaaagaccttcgtgtcgacatctatcacgcctctggtgctggtggacagaacgtcaataaggttgcgactgccgttcgtatcgttcacttgccaaccaatatcaaggttgagatgcaggaagaactgtacccagcagaagaaccgcgagaaggctatgaagattatccgtgcacgcgtcgctga

SEQ ID NO: 1049 - DNA, 429 bp, Streptococcus pneumoniae
ttgatccaaaagaccttcgtgtcgacatctatcacgcctctggtgctggtggacagaacgtcaataaggttgcgactgccgttcgtatcgttcacttgccaaccaatatcaaggttgagatgcaggaagaactgtacccagcagaagaaccgcgagaaggctatgaagattatccgtgcacgcgtcgctgaccactttgctcagattgctcaggatgaacaagacgctgagcgtaagtcgacaatcggtactggtgaccgttcagaacggatccgaacttataacttcccacaaaaccgtgtcacagaccaccgtatcggcttgaccctccaaaaactagatacgattttgtctggtaaattggacgaagttgtggatgccttggtgctttatgaccaaacacaaaaactagaagaattaaacaaataa

SEQ ID NO: 1050 - DNA, 840 bp, Streptococcus pneumoniae
atgaaattagctcaattattttcaaattttgaagaagagttgataagacaaggagaggaagcggaaagcctctcttttgtctatcgtagtctgaaaaatctatcttttacagactttatttttgccctccagcaggaggtgacaacagaggaagaaaaacaatttgtagaagatatttaccagcaactagcagctcacaagccagctcagtacatcattggacaggcagatttttatggaatgcatttaaaggtggatgaacgggttttgattcctcgtccagaaacagaggagttagtggagcttattctaactgaaaatcttgagacgaatctctcagttctggatattggaacaggtagtggagctattgctctcgctctagcaaaaaatagaccagattggtcagtgacagcagcagatgtttctcaagaggccttagagcttgcatcagagaatgctagcgatcaaaatcttaatatattttttaaaaaatctgattgttttgcagaaatttctgaaaaatatgatataattgtatccaatccaccctatatctctcgtgaagatgagtcagaggtaggcttgaatgttttgcattcggagcctcatctagctctctttgcagacgaggatggcctagctatttactgtagaattgcggaagatgcaaaagactatctcaaggatggtggtaagatttaccttgaaattggatacaagcaaggtcaaagtgttcccgaactttttagaaaacatcttcctgaaaaaaaagttcgaacactcaaagaccaatttggtcaagataggatggtcgtggttgatgatggacaggattag

SEQ ID NO: 1051 - DNA, 603 bp, Streptococcus pneumoniae
atgatggacaggattagacaagagttggaaaagggtggagctgtcattctgcctacagagacggtttatggtctttttgccaaggccttagacgaaaaagcagttgaccatgtttaccagctcaaacgtcgtcctagagacaaggcgctcaatctcaatgttgcctctttagaggatatcttgcacttttctaagaatcagccagcttatctacaaaaacttgtagagacctttttgccaggtcccttgaccattattctcgaagccaatgaccgagttccctattgggtaaattctgaccttgcaactattggatttcggatgcccagtcaccctatcacactggatttaattcgagagacaggtcccttgattgggccgtctgccaatatctcaggtcaggcaagtggtgtaacctttgaacaaattctgaaggattttgaccaagaggttctgggtctggaagacgatgcttttctaactggacaggattcaactattgtggatttgtctggagacaaggtgaaaatcttacgccaaggcgcaattaaacgagaagatattcttgctcggttgccagagatttcttttgaggaggcttga

SEQ ID NO: 1052 - DNA, 432 bp, Streptococcus pneumoniae
atgctaagagatttgcaagaaacagatgtgaaagcgatatgtgacatcaaccaagagactttgggttatacttttagtccagaggaaacggctagccaactagctagactgtctcaggattcccatcatttcctacttggctatgaggatgcagctaatcatgtcttacttggatatgtccacgctgaagtttacgaatcactctattccaaagcaggatttaatatcttagctttagcagtttcacctcaagcgcaaggtcaaggtatcggtaaaagtttactacaagggttggaacaagaagccaaaagatgtggttatgggtttatccgcttaaattctgccaatcatcgtctgggtgctcatgcattttatgaaaaagttggctatacttgtgataaaatgcagaaacggtttattcgcatcttttag

SEQ ID NO: 1053 - DNA, 1257 bp, Streptococcus pneumoniae
atgatttctgacaaagatgattttaaagcatatgatgctgatctctggaatgctattgccacagaagaagaacgccaacaaaataatatcgagttaattgcttcggaaaacgtagtttccaaggctgttatggcagctcaagggtctatcttgacaaataaatatgccgagggttacccaggacgccgttattatggtggaactgatgtagtagacgttgtagagactcttgctattgaacgcgcaaaagaaattttcggtgctaaatttgccaatgtccaaccacattcaggaagccaagctaactgtgcggcttacatgtccttgattgagccaggtgatacggttatgggaatggatttggcagcaggtggacacttgacccacggagctccagttagcttctctggtcaaacctacaactttctttcctatagtgtggatcctgaaacggaacttttggactttgatgctatcttgaaacaagcccaagaagtaaaaccaaaactgattgtagctggtgcttcagcctattctcaaattattgacttttcaaaattccgtgaaattgcagatgctgttggggctaagcttatggttgatatggcccacatcgctggcttggttgcagctggtcttcacccaagcccagtgccatacgctcatatcactacaacaacgacccacaaaacccttcgtggtcctcgtggtggtttgattttgaccaatgatgaggatttagctaagaaaatcaattcagctattttccctggtattcagggtggtcctttggagcatgttgtggctgctaaggcagtttccttcaaagaagttttggatccagctttcaaggaatatgctgccaatgtaattaagaacagcaaggctatggcagatgtcttcttgcaagaccctgatttccgtattatttcaggtggaactgaaaaccatctcttccttgttgatgtgactaaggttgtagaaaacggaaaagttgctcaaaacttgctggatgaagtcaatattaccctaaataaaaattcaatcccttacgaaaccttgtcaccattcaagacaagtgggattcgtatcggagcagcagctattactgcacgtggatttggtgaagaagaaagtcgcaaagtggctgaactcatcattaaaacccttaagaattcagaaaatgaggctgtattagaagaagtgagaagtgcagtcaaagaattgacagatgccttcccattatacgaggaataa

SEQ ID NO: 1054 - DNA, 1008 bp, Streptococcus pneumoniae
atgccttcccattatacgaggaataaaacttttatggacatttatattaagaaagccattattcaccagttcagtccggatgataccgagctgttcttagcagataagtttctcaatattactccaaaaatcgaagaatacctacgtaaaaaaattgaacatgtgtattcagatgaagccaagactgggattttcgaagaagaaaatcccttcttcaatcatattacagacgatttgttggagacatcagtaacgctggctaatctctggaaagaggagtttagcatttctgaaaatctcaagaccaatgacttgatttttgttcaattttctaaagaaggtgtagaacatttcgctttcttgcgaattgccctgcgggagaccttgacccacctcggaggagaagttgataatccaatcaagctgactcagaataacctgcctggatttggaacgggtgctgacgaggccttggtggtcaatcttcagagtcgcaagtatcacctgattgaaaaacgaatcaagtacaacgggacttttttgaactatttttcagataatcttcttgctgtcgctcctaagatttctcctaaaaaatctatcaaggaactggaaaaaacagcccagagaattgctgaatcttttaacacagatgattttcaatttcaatccaaggtcaaatcagcgattttcaacaacctagaagaaagcaatgaattgtcacctgagaaattggctaatgacctttttgacaacaatctgacggctcgtttgagctttattgaccaagtcaaagaagccgtaccagaacctgttcaatttgatgaaattgatgcaagtcgccaattaaagaaatttgaaaaccaaaaactctccttatcaaatggaattgagctcatcgttcccaataacgtctatcaagacgccgagtctgttgagtttatccaaaacgaaaatggaacctactctatcttaatcaaaaatatcgaggatatccaaagtaaataa

SEQ ID NO: 1055 - DNA, 615 bp, Streptococcus pneumoniae
atgtttaaacgaattcgaagagtgcttgtactagcagtcttcctttttgctggctataaagcttaccgcgttcatcaagatgtcaaacaagtcatgacctatcaacccatggtgcgagaaatcttgagtgaaaaagacaccccagcaaacgaagagcttgtgcttgctatgatttatactgaaacaaaaggaaaagaaggcgatgttatgcagtctagtgagtctgcaagtggttccaccaacaccatcaatgataatgcctctagcattcggcaaggcattcaaactctgacaggcaatctctatctggcgcagaagaagggggtagatatctggacagctgttcaagcctataattttggacctgcctatatcgattttatcgcccaaaatggcaaggaaaataccttggctctagccaaacagtactctcgtgagactgttgcccccttgcttggtaatacgactggaaagacttatagttatattcaccccatttccatttttcacggtgctgaactctatgtaaatggaggaaattattattattctagacaggtacgacttaacctttacatcatcaaatgtttcactctcttttcaacatctggctag

SEQ ID NO: 1056 - DNA, 975 bp, Streptococcus pneumoniae
atgagaaagaaactctttctgactagtgctgcggtcttgtgggcagtaacagctatgaatagcgtccatgcagcaacagatgttcaaaaagttatcgatgaaacctatgtccaacctgaatatgtcctaggttcctccctatctgaagaccaaaaaaatcaaactcttaaaaaactgggctacaatgcctcaacagataccaaagaactcaagaccatgacacctgatgtttattctaaaatcatgaatgtggccaatgactctagcttacagttgtattcatcagccaagattcaaaagctaggtgacaaatcgccacttgaggtcaagattgaaacaccagaaaatatcactaaggtgactcaggatatgtaccgaaacgcagcagtaacgctgggtatggaacatgccaaaatcactgtagcagcccctattccagttacaggagaaagtgctttagcagggatttactattcgctagaggctaatggagccaaggtgccacaagctaataaagatttggctcaagaagagctaaaagctttgtcagatatcaatgctgaaaacaaggacaaatcaggctatgatgctaataaattaaacgttgccctagctgatatcaagtcaggactcgccaaagctaaagaaagcaagggaaatctgacagaagaagatatccgcaagattgttgaagataccttaaaaaattacaaacttgatcaggtcataacaggaaaccagatcaatatcatcatcaattttgccttgaatctctcaaagagtgatatcctcagcaatgcagatttcactaaaaccctaaatgaccttaaacaaagcatcgtatcacaagctggcgacagttttaaaaatatcaaccttaactttgatgcggataaggcgctagaggacggtggtaacttcttaagctccctctggcaagcccttgtcaacttcttcaagagttttggttcttaa

SEQ ID NO: 1057 - DNA, 1644 bp, Streptococcus pneumoniae
aaagagaaaagaatgttaaagaaaaatgatattgtagaagttgaaattgttgacttgacccatgaaggggcaggagttgccaaggtagatggtttggtcttttttgtagagaatgctttaccgagtgaaaaaattctcatgcgtgtcctcaaggtcaataaaaagattggctttggaaaagttgaaaaataccttgtccagtcaccacaccgtaatcaagatctagatttggcttacctgcgttcaggaatcgcggatttaggacacctttcttatccagaacagctcaagtttaaaaccaagcaagtcaaggacagtctctacaagattgctggaattgcagatgtagaagttgctgaaacgcttggtatggaacatccagtcaagtatcgcaataaggcgcaggtgcccgttcgtcgagtgaatggtgtcttggaaacaggatttttccgtaagaattcgcacgacctcatgccccttgaagatttctttatccaggatcctgtcattgaccaagtcgtagtagctcttcgagacctgctccgtcgttttgatttaaaaccttatgacgaaaaggaacagtctggattgattcggaatcttgtggtgcgtcgtggtcactattcaggacaaatcatggtcgttttggtgacaactcgtccaaaagtttttcgtgttgaccaattgattgaacaagttatcaagcagttcccagagattgtgtctgtcatgcaaaatatcaacgaccagaataccaatgcgatttttggtaaggagtggcgcactctttatggtcaagactatattacggaccagatgttgggaaatgacttccaaatcgctggcccagccttttaccaagtcaatactgaaatggcggagaaactctatcaaacagccattgactttgcagagttaaaaaaagatgacgtgattattgatgcctattctggtattggaaccattggtttatcagtcgccaagcatgtcaaagaagtctacggtgttgaactgattccagaagcggttgagaatagtaaaaaaaatgctcagctgaacaatatttcaaacgcccactatgtctgtgacacagctgaaaatgctatgaagaattggcttaaagatgggattcaaccaaccgttatcttggttgatcctccacgcaagggcttgacagaaagctttatcaaagcaagcgcccaaacaggagccgatcgcatcgcctatatctcctgcaatgtcgcaaccatggcgcgtgatatcaaactctaccaagaattgggatatgaattgaagaaagtccagccggtggatctatttcctcaaacgcatcacgtcgagacggtagcacttttgtccaaactcgatgtcgataagcacataagtgttgaaattgagctggatgagatgaatttgacaagtgcggagagcaaagcaacatatgctcaaatcaaagaatatgtttggaataaatttgaattaaaagtttcgacattatatattgcacagataaaaaagaaatgtggaatagaattacgagaacattacaacaagtctaaaaaggataaacaaattattccacagtgtacacctgaaaaagaagaagccatcatggatgctttgagacacttcaaaatgatttaa

SEQ ID NO: 1058 - DNA, 294 bp, Streptococcus pneumoniae
ttgtatgccccttttatgaaaaaagataaagaggtttatgataaagtttgtgaatatcttagtcctcatttgaataaagatatggaggtgcttgaacttgcttgttggtttcgtgtcataacagttatagaggcaaatagttatgtaaatataaggagttcaagacttctaccaaagtttaaaactcaaaaaataaatagttggtgtgctgcttacaatatccattttaataatggatattgtaagcagcataccaatgaatttaaagattctttaaagagtcttattttgtga

SEQ ID NO: 1059 - DNA, 249 bp, Streptococcus pneumoniae
ttaagtgccataatatccctctttttttcttcattaaatttatttaattatagcataaatattgatttcattcaatcttacattgatttagtgatttgttttagagaatttgttgtgttattccgtccttattttgccataaattgttttaagtgggacctcttatccttaccatttttacctcctaattttgagtataaaaaagacgatagagtttttaatttctatcgtctgagatttacatattaa

SEQ ID NO: 1060 - DNA, 195 bp, Streptococcus pneumoniae
atggatacagttagcaaaaaaagactaaagaaaacagatgtaatagctatggcaggacttacaacaaatgttatggcacaaatgggaaaggataaaccaattacatttaagaatttagaaagaatatgtaaggctttatcttgcactcctaatgatattattagttttgaagataattttagtgacgaggaatag

SEQ ID NO: 1061 - DNA, 240 bp, Streptococcus pneumoniae
ggattatgcaagagaagtataggctttaatgaagttgaagaaaacatcaatcaaggtactggtcaaataactacttttaatcaattaggcttcaagggatattcagataagccagatggttggtatttacctaaaaatatgaatgatgtagcaataatccttgaaacaaaatcagaagaaagagatattagcaaacaaatttttattgatgagttaatgaaaaatatagacataatttaa

SEQ ID NO: 1062 - DNA, 1035 bp, Streptococcus pneumoniae
ggagtttttatgaaaaacaaattttttctaatagctattttagctatgtgtatagtttttagcgcttgttcttctaattctgttaaaaatgaagaaaatacttctaaagagcatgcgcctgataaaatagttttagatcatgctttcggtcaaactatattagataaaaaacctgaaagagttgcaactattgcttggggaaatcatgatgtagcattagctttaggaatagttcctgttggattttcaaaagcaaattacggtgtaagtgctgataaaggagttttaccatggacagaagaaaaaatcaaagaactaaatggtaaagctaacctatttgacgatttggatggacttaactttgaagcaatatcaaattctaaaccagatgttatcttagcaggttattctggtataactaaagaagattatgacactctatcaaaaattgctcctgtagcagcatacaaatctaaaccttggcaaactttatggagagatatgattaaaattgattcaaaagccttaggtatggaaaaagaaggtgatgagttaatcaaaaatactgaagctcgtatatccaaagaattagaaaaacatccagaaatcaaaggaaaaatcaaaggaaaaaaagtattatttactatgattaatgctgcagatacatcaaaattctggatttatactagcaaagatccaagagcaaattatttaacagatttaggtctagttttccctgaatcattaaaagaatttgagagtgaagatagttttgcaaaggaaatttctgcagaagaagcaaataagataaatgatgctgatgtaatcataacttatggtgatgataaaactcttgaagctttacaaaaagatcctcttttaggtaaaataaatgcaattaaaaatggtgccgttgctgtaattccagataatacaccgttagcagcctcatgcactccaacaccactttcaataaactatactattgaagaatacctaaatcttttaggaaatgcatgcaaaaatgcgaaataa

SEQ ID NO: 1063 - DNA, 636 bp, Streptococcus pneumoniae
cctaaaattataaaaggtagtagtgtagatatagaagataatgtagctgctccaaggctacctatttgccaaaatctaaatttgtctaagacgttattattcggtaaaattaaaaaacttacaaaactgcttaaagccatactaacacaagttcctgataaggctagttttataggggtaaggcctgcttttccgcttacagcaatcgcgtatacaaaaattacacttactaagccaccaatgattgcaaaacttatatggcttatgcttgatgaaattcctaaaaaagaaagaccaattactacactaagacttgctcctgtgtttataccgagtatacctggatcagctattgggtttctagtaactgattgcatcaatacaccgcttatggcaagactagaacctgctaaaattgcaaaaatagttctaggtattcttttatatataattgatttaataaaatcatcatttgtattgcccattccaaaagctgctaaaaaatctctgatattaatttcttttgttccaagctttaatgacaaaaatattgtaataagaagacctaggcagattacaaaaattatgcctaggtttatttgttttttatttcgcatttttgcatgcatttcctaa

SEQ ID NO: 1064 - DNA, 1008 bp, Streptococcus pneumoniae
atgcgaaataaaaaacaaataaacctaggcataatttttgtaatctgcctaggtcttcttattacaatatttttgtcattaaagcttggaacaaaagaaattaatatcagagattttttagcagcttttggaatgggcaatacaaatgatgattttattaaatcaattatatataaaagaatacctagaactatttttgcaattttagcaggttctagtcttgccataagcggtgtattgatgcaatcagttactagaaacccaatagctgatccaggtatactcggtataaacacaggagcaagtcttagtgtagtaattggtctttcttttttaggaatttcatcaagcataagccatataagttttgcaatcattggtggcttagtaagtgtaatttttgtatacgcgattgctgtaagcggaaaagcaggccttacccctataaaactagccttatcaggaacttgtgttagtatggctttaagcagttttgtaagttttttaattttaccgaataataacgtcttagacaaatttagattttggcaaataggtagccttggagcagctacattatcttctatatctacactactaccttttataattttaggtcacttgatagctatatttatttcatcagatttaaacgctttagctatgggtgatgaaatggctgttggtcttggagttaatgttaataggataagatcacttgcaataattgcaagtgtgcttttatgttcaagtattactgcaattggtggacctattggcttcgtaggtcttatagttcctcacttttgtggcttatttataagcaaagatatacgcacaatgaccatttcttcatcttttataggtgcagagctcttgcttatatgtgatataatcggccgtatgttaggtaaaccaggtgaaattgaagtagggataattactgcaataatcgggggtccagtacttatttatgtaactatgaaaaatagaggggttaataactaa

SEQ ID NO: 1065 - DNA, 1008 bp, Streptococcus pneumoniae
atgcaaaatttaattataggtattcaaaaaagaaaaaatagaataacactattttcctcactatttttattaataataatcagtctatcatttttcattttacttatcggagatgaaagttattctttttcaactttgattaaagtcttaaatagtgaaactgttcctggagctagtttttcgattatggaaattagattaccaaaattattagcaggaattatagctggctggtcttttggattggcaggatttatctttcaaactatgttaagaaatcctcttgcaagtcctgatataatcggtgtcacaagttcttcatctattgcagcggtcttttgcatattggtattaaaaacaaatagtttaactactggaattatttcaataacttgtggactaacatcatctttaatattatttttactagctaaaaaagatggtttttcagcagcaagactgataatattaggtattggttttcaagctgtcacaagagcaggcacctcatttttattgttgaaagtagcaagatatgaattacaagaagttatgagatggctcagtggctctttatcttttacaaagttagatgacatacctcttgttctaatagtaagtattattgctactatattagttttattttttaataaaagactagaaattattgaacttggtgaagaaatagcaatcggacttggagcaaatcccgagctttcaaggcttgttttaattttttgcgctgtatctttaactgctttttctacttcaattacaggaccaatagcttgtatatcttttttagctggtcccatagccttaaatattggcaagaaaagaagcccaatattagctggattggttggaattttactagttttgttatcagacatattctctcaaaatattttaccagctagatatccagtaggtgttgtaactggcttgttaggttcaccatacttaatatacttactaataaaaatgaacaggaggaatatataa

SEQ ID NO: 1066 - DNA, 222 bp, Streptococcus pneumoniae
aaaccaatacctaatattatcagtcttgctgctgaaaaaccatcttttttagctagtaaaaataatattaaagatgatgttagtccacaagttattgaaataattccagtagttaaactatttgtttttaataccaatatgcaaaagaccgctgcaatagatgaagaacttgtgacaccgattatatcaggacttgcaagaggatttcttaacatagtttga

SEQ ID NO: 1067 - DNA, 414 bp, Streptococcus pneumoniae
atgtctgataacaaaactagtaaaattccaaccaatccagctaatattgggcttcttttcttgccaatatttaaggctatgggaccagctaaaaaagatatacaagctattggtcctgtaattgaagtagaaaaagcagttaaagatacagcgcaaaaaattaaaacaagccttgaaagctcgggatttgctccaagtccgattgctatttcttcaccaagttcaataatttctagtcttttattaaaaaataaaactaatatagtagcaataatacttactattagaacaagaggtatgtcatctaactttgtaaaagataaagagccactgagccatctcataacttcttgtaattcatatcttgctactttcaacaataaaaatgaggtgcctgctcttgtgacagcttga

SEQ ID NO: 1068 - DNA, 795 bp, Streptococcus pneumoniae
atgaaaggtctgtggtcaaatagtcttacctgcggttatgatgaaaaaataatcttggaaaatataaatataaaaatacctgaagaaaaaatatcagttattattgggtcaaatggttgtgggaaatcaacactcattaaaaccttgtctcgacttataaagccattagagggagaagtattgcttgataataaatcaattaattcttataaagaaaaagatttagcaaaacacatagctatattacctcaatctccaataatccctgaatcaataacagtagctgatcttgtaagccgtggtcgtttcccctacagaaagccttttaagagtcttggaaaagatgaccttgaaataataaacagatcaatggttaaggccaatgttgaagatctagcaaataacctagttgaagaactttctgggggtcaaaggcaaagagtatggatagctctagccctagcccaagatacaagtatcctacttttagatgagccaactacttacttggatatctcatatcaaatagaactattagacctcttgactgatctaaaccaaaaatataagacaaccatttgcatgattttgcacgatataaatctaacagcaagatacgctgattacctatttgcaattaaagaaggtaaacttgttgcagagggaaagcctgaagatatactaaatgataaactagttaaagatatctttaatcttgaagcaaaaattatacgtgaccctatttccaattcgcctctaatgattcctattggcaagcaccatgttagctcttaa

SEQ ID NO: 1069 - DNA, 261 bp, Streptococcus pneumoniae
agaataacagcaatattaaaaagatcaggactgataataaacaaaaagaaagtacaacgactagttcaaaagctaaaacttcaagtaaaaagttattcaagaaaatctagaaaatactcatcctacaaaggacaggtaggaaaaatatcagacaacaaaataaaaagaaatatttattaccgaaaaaaaggggaaatcgagtcaagtaccaacaggctcatctattccaaaaagatatttactcgatggaaaaactcctag

SEQ ID NO: 1070 - DNA, 456 bp, Streptococcus pneumoniae
aaagaaatatttattaccgaaaaaaaggggaaatcgagtcaagtaccaacaggctcatctattccaaaaagatatttactcgatggaaaaactcctagaattagtgctacaaatattgacaatggtatcttaggttactacgaagatatagatgataaaaattatagagtttttgaaaattttatatctgtttcatgtttaggagcagtcttttatcataaatataaagcaagcctagatatgaaaattcattgtttaaaattaaaaaataaagaattgaataaagaagtagcattctatttaacttcaattattaggcaagctttaaaaaatactgaatataaagatcaaatatctagcacagtattgccagatatcaaaattaaattaccgatagacagtagaggtactccagattggaattacatggaaagatatagagagagggagagatag

SEQ ID NO: 1071 - DNA, 276 bp, Streptococcus pneumoniae
agagagggagagatagataaaaagtccacccccattttttatggagaattcaaaaatgtaaggttaagcaaagaagaatataaaaatctaaaagaaaaattaaactcacacacagatataatgataaataaactatccagatacatggaaagcagtggtaagacctatcaaaaccactatgtgacaatcttaaaatggtatgaagaagataaagacaaactaagacagaaaggtttaaataaaaaaatgaattatgatgtaggagaatctttatag

SEQ ID NO: 1072 - DNA, 249 bp, Streptococcus pneumoniae
gtgcctttccacctctttttatctataaagattctcctacatcataattcatttttttatttaaacctttctgtcttagtttgtctttatcttcttcataccattttaagattgtcacatagtggttttgataggtcttaccactgctttccatgtatctggatagtttatttatcattatatctgtgtgtgagtttaatttttcttttagatttttatattcttctttgcttaaccttacatttttga

SEQ ID NO: 1073 - DNA, 210 bp, Streptococcus pneumoniae
agaaatgctagaagacttttagatgacagttaccaagagggtctaattttcactgctacttatgcagtgggaattggacctttttatataagcaaattctatttcaaaattggttaccaagaaagacttcttttcactgttaagtataagagggtaatttatagaattttgttacatcaagataaatattttctgatggtcaaattttaa

SEQ ID NO: 1074 - DNA, 1680 bp, Streptococcus pneumoniae
atgtcaaaagaaaaaataaaagtatacctctatacacgagtatctacgtcaatacagatagaggggtattcgttagaggcacaaaaatcacgaatgaaagcttttgctatttacaacgattatgaaattgttggagagtatgaagatgccgggaagtctggcaagtctattgaaggtagaatacagttcaatcgaatgatggaagatataaaatctggaaaagatggagtatcttttgttcttgtgtttaagttatcaagatttgcaagaaatgccgctgatgttctttctacacttcagataatgcaggattatggagttaatcttatctgcgttgaagatggcattgattcatctaaagatgctgggaaactaatgatttctgttttatcagctgtggctgaaatagaaagagaaaacatccgtattcaaacaatggaaggtcgcattcaaaaagcaagggaaggaaaatggaatggtggctttgctccgtatggatataaacttgaagacggcaagctgtttataaatgaggaagaggcagttgcaataagaacgattttcgaccagtatgtaaatactacgataggagccaatgggatatctaaatacttagagaatcatggaattagaaaaatcccaagacagaatggtaagaatcctttgtttgatgcaggtcttataagaaagatattaaagaatcctgtatataatgggaaaatagcatttggaagaagaactttagaaaaagttcatggtacaagaaatgaatataagcaggttgaacaagatgaatatctaatatctgaagggatacatgaagctatagtttccgatgaagtttggcaagctgctcaggttaagctaaaatctcaagcaaagaaatatgagcatgtgaataaaggaaaagatacacgcacacacttgctttctggaattgtaaaatgcccgatatgtggagtgggaatgtttgggaacaagtgtatcaagaaaaagaaagatggcacaaagtataaagatttttattactatggttgtaaacataggcagatgataagaggtcataagtgtacattcagtaagcaaattagagaagaattgttagatgatgctgttgcagaggtgattgtcaagatagtaagtaatccgaaatttgcttctatgatgcaagaaaaaatcaacatgaaggtggatacctctgaaatagaaaaagaaatagataattaccaaaaggaattgagaaagagtcattctacaaagtttaagctaattgaggaaatagataatttagatgttgaagataagcattataagagaaggaaacaggatttagatgatagactatatcgtatgtatgacaaaatagatgaattagaatcatcactaattgatgcgaaagcaaagaaacagactattgaagctgaaaagcttacaggagataacatatataaggttctaatctattttgataagctctataaagtcatgaatgatgtagagcgtaggcagttaatttcagctttgatttctgaaattcaagtttatgaagaaaaacaatctaacggacaatggctaaaatccattacttttaagctaccaattatagaagaaaatctcaacataggtttggacaatgatgaacaagttgaatgtgtaagtttattagagaaacgtagttaa

SEQ ID NO: 1075 - DNA, 612 bp, Streptococcus pneumoniae
gtgcttatttacattagcctgataatgaaaatggagagattatcgatggttatattggaattgtaccaaaatgattattctaaagatttagtagcatttgattccatagaagatgggaaagcctttgtagctcaaatcccgggatacactctggaaacagaagatggttttgaagtggagtattttaatcctaaaaacataccggattatatggaaattatttttaacggaaatattgttcctttatctaaatttatgttcgatcctgaggaaaatgtaaacattatttggaaagagatttcaaatttatccctcaaaaatgatagagtgatcgaaggatattcaaaaattgatgcatatgtcgttaacaaccatgaagttaaagcctatgtcgaaacaagagaaacgaactatcgtaaagcaaaagacttcttagaaagccgcggatatgaaatcgacagaagctttttcggaagtgaagacggtgaagcgattctttacagaaaaaaagggatcgaagtttggcatttcttgtgtcacttagacccaatgtttgtagagattgaagatgtagaaggatatgttaaagaagaagttggagagattcaatag

SEQ ID NO: 1076 - DNA, 189 bp, Streptococcus pneumoniae
atggcaaccgataaaaatagaataatgattagcttggatgataaaaatctagagaaacttgaaaatttagtagaagatgctagagatagaaggggaatgcgactaacaaagtcccaggttattgaattactcctaaataccgttgattatttcgatgatattatgggggctatttactcaaaaaaataa

SEQ ID NO: 1077 - DNA, 759 bp, Streptococcus pneumoniae
atggttgtttatattagacaaagtaaattaccaagtgaggtttcaattaataaatacaatgctcaagtaggtgcctacttacaaggagaagaagctgttttatatcaatctttttctgaaataaaagagttaacaagtgaagatatagttgtagattatataatggagactagagcattactaaaaatgatgggcttaaacgttccggttcatgactatcctattgagcttaaagagttttatggtcgaaagatttatgctggtattttaggagagattgtgaatatacctgataattggggaaaatttattaagcctaaagctggttcaaaagtctttactggaagagttgttaatggaacccatgatttaataggtattggtctacctttcgactatcctatatggattagtgaggttgtagaattcatagctgaatggcgttgttttgtgttagatggtcgcgtattagatgttcgaccctatacaggtgattatcatgcacaatttgatgcaagtgtaattgatgaagcgatatcatgttggaaagatgcgccaatagcttatggactagatatcggtgttactcgcgatggcagaacacttgttgttgaagtaaatgatggttatgcattgggaaattatggcctatctcctttaaaatcaatcaattttcatagagctaggtggaaagaaatggtaaaaccctattttgaaaaaaatgaaatttttaaaatccaacaggatgttattttctaa

SEQ ID NO: 1078 - DNA, 855 bp, Streptococcus pneumoniae
atgcttggagcaattattggagatattgtcggttctgtttacgaatggaacaatatcaaaacaaaggactttcctttatttcggaaggactgcttttttacagatgacacggttatgacctgtgctgttgcagaagcaattatgaatggtggacaaaaagacgatttcattgacgcgatgaagaaatatggcagaatgtatccgaatgctgattacggtgctcggtttaatgcatggctaaacagcgataaccgtgagccttataatagctttgggaatggatcagctatgcgtatttctccatgtgcttggatcatggactgtggtttttatgcgaaaactggtatgtggccatcatctagaggacttacgagtctttctgcagaggtaactcataatcatccagaaggtgtcaaaggcgctatggctacagctgatgctatctttctatgtcgtttttactttggtggttattgtagagagtacgagcaatcaattaacgacaatcctacagagtgtaaaagacgaattaaggattatatagaaaaagaatacgattacaatctatctcaaactttagatgaaatccgtcctaactatcgttttaacgaaacatgtcaggaaactgtccctcaagccattatcgcctttcttgaaagtagagacttcgaagatgcgataagaaatgccatctcacttggtggcgacagtgatactctcgcagcaatcacttgtagcatagcagaggcagcttacggtattcctgattggatcaaggataaggcctattcttacttggatgaacccttaaaggatgtagttaggcgatgggaaaatagaataaaagcgtattaa

SEQ ID NO: 1079 - DNA, 885 bp, Streptococcus pneumoniae
atgaaaaaagcaatggtaattatcaaccctacttctggtggcgagaaggctttggattacaaagaaaagctggagaataaagcaaaagaatactttgaatatgttgaaaccaaaattaccgaaaaagcgctggatgcaacacattttgctgaagaagcttctcgtgagcagtatgatgcagtggttgtgtttggtggagatggaactgtcaatgaagtcatttcaggtattgatgagagagactacattcctaagttagggattatcccaggcggtacgggtaacctcattacaaaacttttggaaatcaatcaagacatcgatggcgcaattgacgaactggattttgatttaaccaataagattgatatcggtaaagcaaatgacaactattttggttatatctttagtatcggttctctgcctgaggcgattcacaatgttgaaatagaggacaaaacaaaattcggtattttaacctatgctgtaaataccatgaagtctgtcatgacagatcaggtctttaacattaaggttgagacagaaaatggaaattatgttggtgaagctagccatgttttggtccttttgacaaattacttcgctgataagaaaatctttgaagaaaacaaggacggctatgccaacattttgattctgaaagatgcctctatattctccaaattatccgtcattcctgatttattaaaaggggatgttatcgcaaatgataatatcgagtatatcaaagcgcgtaatattaaaatctcttcagatagtgaattggagtcagatgttgacggagataaatcagataacctacctgtagaaatcaaagtcctagctcagcgagtagaagtattttcaaaaccgaaagaggattag

SEQ ID NO: 1080 - DNA, 279 bp, Streptococcus pneumoniae
atggaattgagtgctatttaccataggactgagtcggagtatgcctatctttataaggataagaaactccatattcgaattcgaactaagaaaggggacattgaaagcatcaacttgcactatggggacccttttatctttatggaggagttttatcaggatacaaaagaaatggtcaagataacttctggtaccttatttgaccattggcaggttgaagtgtcagttgactttgcacgtatccagtatctttttgagctcagagatacagaaggttaa

SEQ ID NO: 1081 - DNA, 1455 bp, Streptococcus pneumoniae
ttgtatggcgataaagggtgtgtggaaaattctctagaaaatcttcatgcaattgggaatggatttaagttgtcttatcttcatgagattgatgcctgcaaggttcctgactgggtttcaaatacggtatggtatcagatatttcctgaaagatttgccaatggcaatgctctattaaacccagaagggactttagactgggattcatctgtcacacctaagagcgatgatttctttggtggtgatttacaggggattattgatcatatggattacttgcaagacttgggtattactggactatatctttgtcccatctttgaatctacaagcaatcacaagtacaatacgacagattactttgaaattgaccgtcattttggagacaaggagacctttcgggaactggtggatcaagcgcatcatcgtggcatgaaagtcatgctggatgcggtatttaatcatattggttcgcaatctcttcaatggaaaaatgtcgtcaaaaatggtgaacagtctgcttataaggattggttccatattcaacaattcccagtgacaactgaaaagctagttaataagagagacttaccctatcatgtttttggtttcgaggactatatgcctaagctaaatacagccaatccagaggtcaagaattatcttttaaaggttgcgacttattggattgaagagtttaatatcgatgcttggcgtttggatgtggctaatgagattgaccatcagttctggaaggattttcgtaaggcagttttagctaaaaatcctgatctttatatcctaggagaagtctggcatacatctcagccttggctaaatggagatgagttccatgccgtcatgaattatcctttatctgatagtatcaaggactatttcttacgaggaattaagaagacagaccagttcatcgatgaaatcaatggagagtctatgtattacaagcagcagatttcagaggtcatgtttaatctcttggattcacatgatacagagcgaatcctgtggacggccaatgaagatgttcaactggttaaatcagccttagcctttctctttttacaaaaaggaacaccgtgcatttattacggaaccgagctagccttgactggaggaccagatccagattgtcgtcgttgtatgccttgggaacgtgtatcaagtgacaatgatatgctgaactttatgaagaggctgattaagattcggaaatacgcgtcagtaatcatttcgcatggcaagtatagccttcaagaaatcaaatctgatctagtagctctggaatggaaatacgaaggacggatcctcaaagcaatattcaaccaatcaacagaagattatcttttagagaaagaagcagtagcactagcaagcaattgccaagaattggagaatcagcttgtcatctctccagatggatttgtgattttctaa

SEQ ID NO: 1082 - DNA, 303 bp, Streptococcus pneumoniae
atgggtgcggcaagggattttttagaactaattaatcacaaagggctacctctttttaatccgcttgtaggtgattctcatgtaaataatagacaagaatatgacaatacagggagtggaaatttacaacctgaaaagtggaatgaaactgcaaagcagctttataatgctataatgtggttgattattttatggaatgctaagccggatacacctttatttaattttaaagacgaagtaattaagtataaaacatatgagccttttgaaagcagtataaaattggtatcaatcaatgagtaa

SEQ ID NO: 1083 - DNA, 429 bp, Streptococcus pneumoniae
atggatggaataacaaaagattttataaaaacggctaaactaatgaaacaattatggccccaattgaccgataaagaagctattgatgaagtaaaaaaatatacgaatggcaaaaatactgcaatctttactgaagttgaaggtgacacaattgtaggtctagcactatgttcactcagatttgattatgttgaaggttgtaaatatagtcctgttggattcttagaagggattattgttgacgaggaatatcgtttaaaggatattgctaaaaatctctgtacaaaatgtgaggaatgggcgaaaaataaaggatgtaaggaatttgcaagtgactgtactttaacgaatacggattctataagatttcatctcaatattggatttcaggaggcaaatagaattattcattttaagaaaaaattataa

SEQ ID NO: 1084 - DNA, 570 bp, Streptococcus pneumoniae
atgaagaaatatagtattgttgataaaattgtattatcaaccaagattaaaagaattatcatttttacagtttttcgagaaaattgggaaccgtacatgaaaaagtacacggaagtttttcaaagtcaatttcctaatctaaacattgattacttgctcctggacactgagcagattgatcttgatagctatctagatgctgacataattatcatcggtggtggaaatacggaaaaatatattgctacttatgttaatcaggagttcaaaagttatatcgatcatatgcttaataaagaggcaaaaattataggattttctgcaggagccctactattaggagaaaaagtctatgtctcacctaatgataattcagatcatcagataaagataaaaaatggattaggactctttagtcagtttttaattagtgtccattatgattcctggaatgataaagcaaataaggatagagctgaagaactcgttaatgttcccataattccactaaatgatcattcttgtcttgtattggataaacttggaaacatcatagagaaaattgactaa

SEQ ID NO: 1085 - DNA, 213 bp, Streptococcus pneumoniae
atgtacttcgtcatcgcagagttcaatgctaattggtttacacatcggaactccaagagaagctactttctccatcatatcaaattcaaatttttttataatctaacttcgacttatcagaaacacgcaagaaatatttttactgattttgatctgtcacacaatattttttatcatctgaccagcctttatttatggctatcttactactaa

SEQ ID NO: 1086 - DNA, 282 bp, Streptococcus pneumoniae
atgatggagaaagtagcttctcttggagttccgatgtgtaaaccaattagcattgaactctgcgatgacgaagtacattctttacacgaatggatagacggaagagatgcaatagatagcattttaacttattcagaaaaccaacaatacacatatggtgtagaagcaggaaagatacttagaaagattcatacaattcctgctacagaagtttgtgaagattgggaaatcttttttaatctaaaaattgatgataaaatctccaacgaaatgatatggtaa

SEQ ID NO: 1087 - DNA, 195 bp, Streptococcus pneumoniae
atgaatgatgaagcaagtaaacaattaagagatagccgtttcaagagccttgcaggtgttcagcgcacgacttttgaagagatgttagccgtgctaaaaacaacttatcaacgtaaacacgcaaaaggtggacgaaaaaccaaattaagcctagacgatctcctcatggtaactattcaatacatgcgagaatag

SEQ ID NO: 1088 - DNA, 1230 bp, Streptococcus pneumoniae
atgaagattagtaagaggcacttattaaattattccatcttgattccctacttacttttatctattttgggcttgattgtggtctattcgaccaccagtgctattttaattgaagaaggcaagagcgccttgcagttggttcgaaaccaaggaatcttttggattgttagtttgatactgattgccttaatttataaattgagactagattttttgagaaatgagcgactaatcattttagttatattaatagaaatgcttttattgttcttggctcgttttattggtatttcagtaaacggggcatacggttggatttcggttgcaggagtaactattcagccagctgagtacttaaaaatcattattatttggtatttagctcaccgattctccaaacagcaagaagaaatagctacttatgattttcaagttttgactcaaaatcaatggcttccccgtgcttttaatgattggcgattcgttctcctagttctgattggaagtttgggaattttccctgatttaggaaatgcgactattttagtcttggtttccttgattatgtatacagttagtggaatcgcttatcgctggttttcaaccattctggcgctcgtatctgccacttctgtctttgtcttgaccactatcagcctaatcggtgttgagaccttttcaaaaattccagtatttggctatgtagccaagcgctttagtgccttttttaatccttttgccgatcgtgctgatgcaggtcaccagttagctaattcttattttgccatggtcaatggtggttggtttggtctaggtcttggaaactcgattgaaaaacgaggttatttgccagaagctcatacagactttgtcttttctatcgtgattgaagaatttggctttgttggtgccagtcttattttagctctcttgtttttcatgattttgcggattatcttggtcggtatccgagcggagaatcctttcaatgccatggttgcactcggtgtcggagggatgatgttggttcaggtatttgtcaatatcggagggatttcgggcttgattccatctacaggagtgactttccctttcttatcccagggtggaaatagtcttctagtcttatcagtggcagtagcctttgtcttaaatattgatgccagtgaaaaacgcgctaagttgtaccgagaattggaaaatcaaccaatgaaccttctgttgaagtag

SEQ ID NO: 1089 - DNA, 2697 bp, Streptococcus pneumoniae
atgtctcttcaaaaattagaaaattatagtaataaaagtgttgtgcaagaagaagtcttgattctaacagaattactggaagatattactaaaaatatgcttgccccagagacctttgaaaaaataatacagttgaaagaattatcaacgcaggaagattatcaaggtctaaaccgtctagtgactagcttatcaaatgatgaaatggtctatatttcacgctatttctctatcttgcctcttttgattaatatttcagaggatgtggatttagcttatgaaatcaatcatcaaaataatattgatcaggactatttaggtaaattatctacaacgattaaattggtagcagaaaaggaaaatgccgttgagatcctagaacacttgaatgttgtccctgttttgacagcccatccaacacaagtgcaacgcaaaagtatgttggatttaacaaatcatattcatagtcttttgcgtaaataccgtgatgttaagttggggttgatcaataaagataaatggtacaatgatttgcgtcgttacatcgaaattatcatgcagacagacatgattcgtgagaaaaaattaaaagtgactaacgaaatcacgaatgctatggaatattataacagctcctttttgaaagctgtacctcatttgacgacggagtataagcgcttagcgcaagcgcatggtctgaatttaaaacaggctaaaccaatcaccatgggtatgtggataggtggtgaccgtgatggaaatccatttgttacagcaaagaccttgaagcagtctgcactcactcagtgtgaagtcatcatgaactactatgataaaaagatttaccaactttatcgtgaattttctctttcaactagcattgtcaacgtcagcaagcaagtcagagaaatggctcgtcaatccaaggataactctatttaccgcgaaaaagagctttaccgtcgtgccttgtttgatattcaatcaaaaattcaggcaactaaaacctatctgattgaggatgaagaagttgggactcgttatgaaaccgccaatgatttctacaaggatttgattgccattcgagattctctactagaaaataagggtgagtccttgatttcaggtgattttgtggaattattgcaggcagtagagatatttggtttttacttagcgtcaattgatatgcgacaagactctagcgtctatgaagcctgtgtggcagaactcttgaaatcagcaggaattcattctcgttatagcgagttgagcgaagaagaaaagtgtgaccttctcttgaaagaattagaagaagatccccgaattctttctgcgactcacgcagaaaaatcagaattattagcaaaagaattagctatttttaagacggctcgtgttttgaaagataagttgggagatgatgtcatccgtcagaccatcatttcacatgcaaccagcctttctgatatgctagaattagctattctgttaaaagaagtaggactggtggatacggaaagggcgcgtgttcagattgttcccctttttgaaacaattgaagacttggatcattcagaggaaacaatgagaaaatatctttctcttagccttgccaaaaaatggattgactcacgaaataactaccaagaaatcatgcttggctactctgacagtaataaagatggcggttacttgtcatcatgttggaccctctacaaggctcaacaacaattgactgctattggagatgaatttggcgttaaggttaccttcttccatggtcgtggtggtactgtcggtcgtggtggtgggccaacctatgaagccattacatctcaaccgctcaagtctatcaaggatcgtatccgcttgacggagcagggtgaagtaattgggaataaatacggtaacaaagacgccgcttactataaccttgaaatgctagtatcggcagctattaaccgtatgattactcagaagaagagcgataccaataccccaaatcgttatgaagccattatggatcaagtagtggaccgtagttacgacgtctaccgtgatttggtctttggtaatgagcatttctatgattatttcttcgagtcaagtccaatcaaggctatttcaagttttaatattggttctcgtccagccgctcgtaagactattactgaaatcggtggattgcgtgccatcccttgggtattctcatggtcacagagtcgtgttatgttccctggatggtacggggttggttcaagcttcaaggaatttatcaataaaaatccagagaatattgctatcttacgagatatgtaccaaaattggcctttcttccaatcgcttctttcaaatgttgatatggttttgtcaaaatcaaatatgaatattgcttttgaatatgctaaactttgtgaagacgagcaagttaaggccatctatgagactattttaaatgaatggcaagttactaagaacgttatcttggctattgaaggacatgacgaactcttagctgacaatccatatctaaaagctagtctggattaccgtatgccttactttaatattctcaactatattcagttggagttgattaaacgccaacgtcgtggagaattgtccagtgatcaagaacgattgattcatatcaccatcaacggaattgcgacaggattgcgtaattcaggttga

SEQ ID NO: 1090 - DNA, 306 bp, Streptococcus pneumoniae
atgaaaaataaacgtttaattggaattattgctgcattagcagtcttagtagcaggaagcttgatttattcttcaatgaataaatcagaagctcagaataataaggatgagaagaaaataactaagattggtgtgcttcaatttgtgagccatccatcccttgatttgatttataaagggatccaagatggacttgcagaagaaggatataaagatgatcaagttaaaattgattttatgaactcagaaggtgaccaaagtaaggttgcgacaatgagtaaacaattggttgcaaatggggaatga

SEQ ID NO: 1091 - DNA, 630 bp, Streptococcus pneumoniae
atggccgctattacagacccaattggtgctaacttggttaaagatttgaaaaaaccaggtggcaacgttacaggggtatctgaccacaatccagctcaacaacaaattgaactcatcaaggctctgacaccgaatgtgaaaacaatcggagctctttactcaagtagcgaagacaattcaaaaacacaggtcgaagaatttaaggcttatgctgaaaaagcaggtctgacagtggaaacatttgcagttccttcaacaaatgaaattgcctcaactgtcactgttatgactagcaaggtagatgctatttgggttccaattgataacaccattgcatcaggatttccaacggttgtctctagcaatcaaagttctaagaaaccaatttatcccagtgcgacagctatggtagaagtaggtggtttggcatcagttgtaattgaccaacatgaccttggtgtggcaacaggtaaaatgattgtgcaagtcttgaaaggtgcaaaaccagccgataccccagtcaatgtcttttcaactggtaagtcagtcatcaataaaaaaatagcacaagaactaggtattactattcctgagtctgttctcaaagaagcaggacaagtcatcgaataa

SEQ ID NO: 1092 - DNA, 669 bp, Streptococcus pneumoniae
ttggctggaatggcagcaggccttctttatacaaaaggaaagatcccaaccttgctctcagggattttggtgatgacttctcgtcactcaatcatgctcttgattatgggacgtgcaaatttaggcctgcttggaaccaagcaaattcaggatgttttgccttttgattcggatttgaatcaactcttgacaggtctcatctttgtgagcattgttattgctctcatgctctttttcttggacactaaactcggacaagcctatattgctacaggggataatcctgatatggctagaagtttcgggattcatactggacgcatggagctcatgggcttggtcttatcaaatggtgtgattgcccttgcaggtgccctcattgctcagcaagaaggctatgccgatgtgtctcgagggatcggggttatcgttgtgggacttgcaagtttgattattggagaagttattttcaagagtttgagcttggcagagcgtttggttactatcgttgtaggttctatcgcttatcaatttttagtgtgggcagttatcgcacttggctttaatacaagttaccttcgtttatacagtgccttgattttagcagtctgcctcatgattccaacatttaagcaaacaatcttgaaaggagccaagttaagcaaatga

SEQ ID NO: 1093 - DNA, 759 bp, Streptococcus pneumoniae
atgacagcaattgtagaattaaaaaatgcaaccaaaatcgttaaaaatggctttgatgaagaaaagattattttaaatgatgtttccttagaaatttttgaacgggactttatcacgattttgggcggaaatggtgctggaaaatcaaccctctttaacactatagcagggaccttatcactaactagtggaactatccgtattttaggtgaagaactcactaagttttcacccgagaagcgtgccaagtacctgtctcgtgtcttccaagatccaaagatggggacagctccccgtatgacggtcgctgaaaatcttttaatcgccaagtttcgtggtgaaaagcgtggattgttaccacgacgcttgactagctataaggatgaatttcaggcaaccattgaaaaagtaggaaatggtcttgagaaacacttgaatacaccgattgagttcttatcaggtggacaaagacaggctttgagtctcttgatggcaaccttgaagcgacctgaattactcttgttagacgagcatactgctgccctggatccaaagactagtgttgctttgatgggattgacagatgaatttgttaagaaagatcaattgacagcccttatgattacccatcatatggaagatgctctcaaatatggcaatcgcttgattgtcatgaaagaaggacgggttatccaagatttgaaacaagaagaaaaagcaaaaatgaaaatctctgattattatcaactctttgaataa

SEQ ID NO: 1094 - DNA, 192 bp, Streptococcus pneumoniae
gtcaatcccatcaaagcaacactagtctttggatccagggcagcagtatgctcgtctaacaagagtaattcaggtcgcttcaaggttgccatcaagagactcaaagcctgtctttgtccacctgataagaactcaatcggtgtattcaagtgtttctcaagaccatttcctactttttcaatggttgcctga

SEQ ID NO: 1095 - DNA, 1776 bp, Streptococcus pneumoniae
atggaggtattgtgtatggttgacaaacaagtcattgaagaaatcaaaaacaatgccaacattgtggaagtcataggagatgtgatttctttacaaaaggcaggacggaactatctagggctctgtccttttcatggtgaaaaaacaccttctttcaacgttgtagaggacaagcagttttaccactgttttggttgtggtcgctcaggtgatgtctttaaattcatcgaggagtaccaaggggttacctttatggaggctgtccaaatcttaggtcagcgtgtcgggattgaggttgaaaaaccgctttatagtgaacagaagccagcctcgcctcaccaagctctttatgatatgcacgaagatgcggctaaattttaccatgctattctcatgacaacgactatgggcgaagaggccagaaattacctttatcagcggggtttgacagatgaagtgcttaaacatttttggattggtttagcacctccagaacgaaactatctctatcaacgtttgtctgatcagtatcgtgaagaggatttactggattcaggcctgttttatctctcggatgccaatcaatttgtagacacctttcacaatcgcattatgtttcccctgacaaatgaccaaggaaaggtcattgccttctcaggtcgtatctggcaaaaaacggattcacaaacttctaagtataaaaacagccgatcgactgcaatttttaacaaaagttacgaattatatcatatggatagggcaaaaaaatcttctggaaaagctagtgagatttacctgatggaaggattcatggatgttattgcagcctatcgggttggaatcgaaaatgctgtggcgtcgatgggaacggccttgagtcgagagcatgttgagcatctgaaaaggttaaccaagaaattggttcttgtttacgatggagataaggctgggcaagccgcgatattgaaagcattggatgaaattggtgatatgcctgtgcaaatcgtcagcatgcctgataacttggatcctgatgagtatctacaaaaaaatggtccagaagacttggcctatctattaacgaaaactcgtattagtccgattgagttctacattcatcagtacaaacctgaaaacagtgaaaatctgcaggctcagattgagtttattgaaaaaatagctcccttgattgttaaagaaaagtccatcgctgctcaaaacagctatattcatattttagctgacagtctggcgtcctttgattatgcccagattgagcagattgttaatgagagtcgtcaggtgcaaaggcagaatcgcatggaaagaatttccagaccaacgccaatcaccatgcctgtcaccaagcagttatcggctattatgagggcagaagcccatctactctatcggatgatggaatcccctcttgttttgaacgattaccgtttgcgagaagactttgcatttgctacacctgaatttcaggtcttatatgacttgcttggccagtatggaaatcttcctccagaagttttagcagagcagacagaggaagttgaaagagcttggtaccaagttttagctcaggatttgcctgctgagatatcgccgcaggaacttagtgaagtagagatgactcgaaacaaggctctcttgaatcaggacaatatgagaatcaaaaagaaggtgcaggaagctagccatgtaggagatacagatacagccctagaagaattggaacgtttaatttcccaaaagagaagaatggagtaa

SEQ ID NO: 1096 - DNA, 915 bp, Streptococcus pneumoniae
atggcaacaaaacaaaaagaagtaacaacatttgacgtacaggtagcagaatttatccgtaatcataagcaaaaagggacagcaacagatgatgaaatcaatgcaagtttggttattccttttaccttggacgctgatgggattgaagatctcttgcaacggattcaggatgcaggaatttctatcacagataacgaaggaaatccaagtgcgcgtgttcttagcaatgaagaagaaccagaactcagcgatgaggacttgattgggtcaacttctgctaaggtcaatgaccctgtccgtatgtacttgaaagaaataggggtcgttcctctcttgaccaatgaagaggagaaagagttggcactggctgttgaagctggtgatatcgaagccaaacaacgtcttgcggaagccaatcttcgtttggttgtttccattgccaaacgctatgtcggtcgtggtatgcagttccttgacttgattcaagaaggaaatatgggcttgatgaaggcggttgacaagtttgactattctaaagggttcaagttttcaacttatgcaacttggtggattcgtcaggctatcactcgtgctattgcagaccaagctcgtaccatccgtatcccagttcacatggttgaaactatcaataaattggttcgtgaacagcggaatctccttcaagaattggggcaagatccgacaccagaacagattgctgaacgaatggatatgacacctgataaggttcgtgaaatcttgaagattgcccaagaaccagtatctcttgaaactcctatcggtgaagaggacgatagccaccttggagactttatcgaagatgaagtgattgaaaatccagtggatctcatacgactcgtatcgtcttgcgtgagcaattggatgaaatcttag

SEQ ID NO: 1097 - DNA, 198 bp, Streptococcus pneumoniae
atactcttacagaccgtgaaagaaaatgttctgcgtctacgttttggactagatgatggaaaaatgcgcacacttgaagatgtggggaaagtctttaacgtaactcgtgagcgtatccgtcagattgaagcaaaggctttgagaaaactacgccaaccaagtcgcagcaaaccgcttcgtgattttattgaagactaa

SEQ ID NO: 1098 - DNA, 330 bp, Streptococcus pneumoniae
atggcttatacagaagagcaaattgaaaacatcaaaacacggattttaacagccttggaagaagtcatcgaccctgagttgggaatcgatattgtcaatcttggtttgatctatgagattcgttttgacggtgacacagggcaaacagagattgacatgactttgacaactatgggttgtcccttagcagaccttttgacagaccagatttatgatgctatgatagaggttccagaagtaacggatactgaggttaaattagtctggtatccagcatggacagttgaaaaaatgagtcggtatgcccgcattgccataggcattaagtaa

SEQ ID NO: 1099 - DNA, 207 bp, Streptococcus pneumoniae
aatcacgcaacaagaaaggatagactagaggaaaagaggggaaatttcctcgcttttccaacagtctctcacatgcttttatatgtttacttaatgcctatggcaatgcgggcataccgactcattttttcaactgtccatgctggataccagactaatttaacctcagtatccgttacttctggaacctctatcatagcatcataa

SEQ ID NO: 1100 - DNA, 801 bp, Streptococcus pneumoniae
atgttgagttcaagtgagaaagtagcaggacagggagtttcaggtgcttaccgtgaattagttcgtcttcttcaccgtgctgccaaggaccaattgattgttacagaaaatcttccaatcgaggcagatgtgactcactttcatacgattgattttccctattatttatcaaccttccaaaagaaacgctcagggagaaagattggctatgtgcatttcttgccagctacacttgagggaagtttgaaaattccatttttcttaaagggaattgtgaaacgctatgtattttctttttacaaccggatggagcacttggttgtggtcaatcctatgtttattgaggatttggtagcagctggtattccacgtgaaaaagtgacctatattcctaactttgtcaacaaggaaaaatggcatcctctaccacaagaagaggtagttagactgcgcacagatcttggtcttagtgacaatcagtttatcgtagtaggtgctgggcaagttcagaaacgtaaagggattgatgactttatccgtctggctgaggaattgcctcagattacctttatctgggctggtggcttctcttttggtggtatgacagatggttatgaacactataagaaaattatggaaaatccccctaaaaatttgatttttccaggcattgtatcgccagagcggatgcgcgaattgtatgctctagcggatcttttcttgttgcctagctacaatgagctctttcctatgactattttagaagctgcgagttgtgaggctcgctattatgttgcgtga

SEQ ID NO: 1101 - DNA, 198 bp, Streptococcus pneumoniae
ttttgggagggaaattatcgggcgacagcgggtagagaagagatgaaagaggctattttggaatatcaagcaaatcctgctgccttaaaagatctcaaagaaaaggctaagaatatttccagagagtattctgaagagcatctgttacaaatctggttggacttttatgagaaacaagccgctttagggagaaagtaa

SEQ ID NO: 1102 - DNA, 1326 bp, Streptococcus pneumoniae
atgcgaattggtttatttacagatacctattttcctcaggtttctggtgttgcgaccagtattcgaaccttgaaaacagaacttgaaaagcagggacatgctgtttttatctttacgacgacagataaggatgtcaatcgctacgaagattggcaaattatccgcattccaagtgttcctttctttgcttttaaggatcgtcgctttgcctaccgaggttttagcaaggcacttgaaattgctaaacagtatcagctagatattatccatactcagacagaattttctcttggcctgttggggatttggattgcgcgtgaattgaaaattccagtcatccatacctatcacacccagtatgaagactatgtccattatattgctaaggggatgttgatccggccgagtatggtcaagtatctggttagaggtttcctgcatgatgtggatggggttatttgccctagtgagattgtccgtgacttgctatctgattataaggtcaaggttgaaaaacgggtcattcctactgggattgaattagccaagtttgagcgtccggaaatcaagcaggaaaatttgaaagaactgcgtagtaaactagggattcaagatggtgaaaagacgttgcttagtctttcgagaatctcctatgaaaaaaatattcaagcagttttagtagcctttgctgatgttctgaaagaggaagacaaggttaaactggtagtagctggggatggcccttatctgaatgacctcaaagagcaagcccagaacctagagattcaagactcagttatctttacagggatgattgctcctagtgagacggctctttactataaagcggcggatttcttcatttcggcatcgacaagcgaaacgcaaggtttgacctacttggaaagcttagccagtggaacacctgtcattgctcacggaaatccttatttgaacaacctcatcagtgataaaatgtttggaaccttgtactatggagaacatgatttggctggtgctattttggaagccctgattgcaacaccagacatgaacgagcataccttatcagagaaattgtatgagatttcagctgagaactttgggaaacgagtgcatgagttttatctggatgccattatttcaaataacttccagaaagatttggctaaagatgatacggtcagtcagcgtatctttaagacagttttgtatcttccgcaacaggtggttgctgtacccgtaaaaggctctagacgcatgttgaaggcttcaaaaacacagttgatcagtatgagagactattggaaagaccatgaagaatag

SEQ ID NO: 1103 - DNA, 177 bp, Streptococcus pneumoniae
atgagaagcggtcgtgataaaaagattgcgggtgtttgtgctggggtggcccattatctggatatggatccgactatcgttcaagtcatttggggtgttcttacttgctgttacggatctggaattgtagcttacattattttatggattatcgcaccagtagcaactgactattga

SEQ ID NO: 1104 - DNA, 1176 bp, Streptococcus pneumoniae
gtggtcttcgttgtagacgaaggactacgtaccttgatggatttccgctacaatcgccatttcaaggctgattctggtgaaaaagggatgaccaaagggatgcatggtcgtggtgctgaggaccttagagttcgagtaccacaaggtacgactgttcgtgatgcggagactggcaaggttttaacagatttgattaaacatgggcaagaatttatcgttgcccacggtggtcgtggtggacgtggaaatattcgttttgcgacaccaaaaaatcctgcaccggaaatctctgaaaatggagaaccaggtcaggaacgtgagttacaattggaactaaaaatcttggcagatgtcggtttagtaggattcccatctgtagggaagtcaacacttttaagtgttattacctcagctaagcctaaaattggtgcctaccactttaccactattgtaccaaatttaggtatggttcgcacccaatcaggtgaatcctttgcagtagccgacttgccaggtttgattgaaggggctagtcaaggtgttggtttgggaactcagttcctccgtcacatcgagcgtacacgtgttatccttcacatcattgatatgtcagctagcgaaggccgtgatccatatgaggattacctagctatcaataaagagctggagtcttacaatcttcgcctcatggagcgtccacagattattgtagctaataagatggacatgcctgagagtcaggaaaatcttgaagaatttaagaaaaaattggctgaaaattatgatgaatttgaagagttaccagctatcttcccaatttctggattgaccaagcaaggtctggcaacacttttagatgctacagctgaattgttagacaagacaccagaatttttgctctacgacgagtccgatatggaagaagaagcttactatggatttgacgaagaagaaaaagcctttgaaattagtcgtgatgacgatgcgacatgggtactttctggtgaaaaactcatgaaactctttaatatgaccaactttgatcgtgatgaatctgtcatgaaatttgcccgtcagcttcgtggtatgggggttgatgaagcccttcgtgcgcgtggagctaaagatggggatttggtccgcattggtaaatttgagtttgaatttgtagactag

SEQ ID NO: 1105 - DNA, 1260 bp, Streptococcus pneumoniae
atgagaaaaattgttatcaatggtggattaccactgcaaggtgaaattactattagtggtgctaaaaatagtgttgtggccttaattccagctattatattggctgatgatgtggtgactttggattgtgttccagatatttcggatgtagccagtcttgtcgaaatcatggaattgatgggagctactgttaagcgttatgacgatgtcttggagattgatccaagaggtgttcaaaatattccaatgccttatggtaaaattaacagtcttcgtgcatcttactatttttatgggagcctcttaggccgttttggtgaagcgacagttggtctaccgggaggatgtgatcttggtcctcgtccgattgacttacaccttaaggcgtttgaagctatgggtgccactgctagctacgagggagataacatgaagttatctgctaaagatacaggacttcatggtgcaagtatttacatggatacggttagtgtgggagcaacgattaatacgatgattgctgcagttaaagcaaatggtcgtactattattgaaaatgcagcccgtgaacctgagattattgatgtagctactctcttgaataatatgggtgcccatatccgtggggcaggaactaatatcatcattattgatggtgttgaaagattacatgggacacgtcatcaggtgattccagaccgcattgaagctggaacatatatatctttagctgctgcagttggtaaaggaattcgtataaataatgttctttacgaacacctggaagggtttattgctaagttggaagaaatgggagtgagaatgactgtatctgaagacagcatttttgtcgaggaacagtctaatttgaaagcaatcaatattaagacagctccttacccaggctttgcaactgatttgcaacaaccgcttacccctcttttactaagagcgaatggtcgtggtacaattgtcgatacgatttacgaaaaacgtgtaaatcatgtttttgaactagcaaagatggatgcggatatttcgacaacaaatggtcatattttgtacacgggtggacgtgatttacgtggggccagtgttaaagcgactgacttaagagctggggctgcactagtcattgctgggcttatggctgaaggtaaaactgaaattaccaatatcgagtttatcttacgtggttattctgatattatcgaaaaattacgtaatttaggagcggatattagacttgttgaggattaa

SEQ ID NO: 1106 - DNA, 528 bp, Streptococcus pneumoniae
atgttttctttttttgaaacggatcgcttgtatttgcgtcctttcttttttagtgatagtcaggacttccgcgagatagcttcaaatccagaaaatcttcaatttattttcccaacgcaggcaagtctggaagaaagtcaatatgcactggccaattactttatgaagtcccctttgggagtgtgggcaatttgtgaccagaaaaatcaacaaatgattggttctattaaatttgagaagttagatgaaatcaaaaaagaagctgagcttggctattttttgagaaaagatgcttggtcgcaaggatttatgacagaggttgttagaaaaatttgtcagctttcttttgaggaatttggcttaaaacaattatctatcattacccaccttgaaaatgaagctagccaaagagttgctcttaagtctggatttagtttgttccgtcagtttaagggaagtgatcgttacacaagaaaaatgcgggattatcttgaatttcggtatgtaaaaggagagttcaatgagtaa

SEQ ID NO: 1107 - DNA, 1278 bp, Streptococcus pneumoniae
atgagtaagcatcaggaaattctaagctatttggaggaattaccagtaggtaaaagggtcagtgttcgtagcatttcgaatcatctaggagttagtgatggaacagcctatcgggctattaaagaagctgaaaaccgtggaattgtggagacccgtcctagaagtggaacaattcgtgttaaatcccagaaagttgctatagagagattaacgtttgctgaaattgcagaagtgacttcttctgaggttctggctgggcaagaaggtttagagagagaatttagtaagttttcaattggtgccatgactgaacaaaatatcttgtcttaccttcatgatggggggctcttgattgtcggagaccgaacccgtattcagttgctagccttggaaaatgaaaatgcagttctggttacagggggatttcaggttcatgatgatgtgcttaaactggccaatcaaaaagggattcctgttctaagaagtaagcatgatacctttaccgtcgcgaccatgatcaataaagccttgtcaaatgtccaaatcaagactgatattctgacagttgagaaactttatcgccctagtcatgagtatggttttctgagagagacagatacagttaaagattatttggacttggttcgtaagaatcgtagcagccgtttccctgttatcaatcaacatcaggtcgttgttggcgttgtaaccatgagagacgctggtgataaatcaccaagcacgacaattgataaggttatgtctcgtagtctatttttggttggattatcgacaaatattgccaatgtgagtcaacggatgatcgcagaagactttgaaatggtaccagttgttcgaagcaatcaaactttgcttggcgttgtgacgcgacgagatgtcatggagaagatgagccgttcccaagtttcggctctaccaactttttctgagcagattggacaaaagctctcttatcaccatgatgaagtagtcattacagtggaaccctttatgctagaaaaaaatggagttttggctaatggtgtattggcagaaattctgacccacatgacccaagatttagttgttaatagtggtcgcaatctcattatcgagcagatgctgatctactttttgcaggctgttcagatagatgatatattgcgcattcaggcacggattattcatcatacgagacggtcagctataattgattacgatatttatcatggtcaccagattgtttcaaaagcaaatgtgactgttaaaattaattag

SEQ ID NO: 1108 - DNA, 861 bp, Streptococcus pneumoniae
atgataacattaaaatcagctcgtgaaatcgaagctattgacaaagctggtgattttctagcaagtattcatataggcttacgtgatttgattaagccaggcgtagatatgtgggaagttgaagaatatgtccgccgtcgttgtaaagaagaaaatttccttccacttcagattggggttgacggtgccatgatggactatccttatgctacctgttgctctcttaacgatgaagtggctcacgctttccctcgtcattatatcttgaaagatggtgatttgctcaaagttgatatggttttgggaggtcccattgctaaatctgacctaaatgtctcaaaattaaacttcaacaatgttgaacaaatgaaaaaatacactcagagctattctggtggtttagcagactcatgttgggcttatgctgttggtacaccgtccgaagaagtcaaaaacttgatggatgtaaccaaagaagctatgtacaagggtattgagcaagctgttgttggaaatcgtatcggtgatatcggtgcggctattcaagaatacgctgaaagtcgtggttacggtgtagtgcgtgatttggttggtcatggtgttggcccaactatgcacgaagaaccaatggttcctaactatggtattgcaggtcgtggactccgtcttcgtgaaggaatggtcttaaccattgaaccaatgatcaatacaggcgattgggaaattgatacagatatgaaaactggttgggcgcataagaccattgacggtggattgtcatgtcagtatgaacaccaatttgtcattacgaaagatggacctgttatcttgactagccaaggtgaagaaggaacttattaa

SEQ ID NO: 1109 - DNA, 543 bp, Streptococcus pneumoniae
atgcgtttttctgcttttaagattttttccaactctgtttgtaagcgcatcataacaaagggtctaggattcagggctctcctcctatatactattagtaaagtaaaactaagagaggatattttagtgtcgcagtctattgttcctgtagagattccacaatattgtcgttttgattctaaaaagagaaatggaattctgtttaacgttcgtattgccaatcttaaatttaccttttttagattagacttcctgcgaaataaaatatggtatagtagttctatgaatgatgaagcaagtaaacaactaactgatgcacgatttaagcgtcttgttggtgttcagcgcacgacttttgaagagatgttagctgtattaaaaacagcttatcaacttaaacacgcaaaaggtggacgaaaacctaaattaagcctagaagaccttcttatggccactcttcaatatgtgcgagaatatcgaacttatgaagaaattgcggctgtttttggtatccacgaaagcaacttaatccgtcggagctaa

SEQ ID NO: 1110 - DNA, 225 bp, Streptococcus pneumoniae
tgggttgaagtaactcttgttcaaagtggtgttacgatttcaagaactcctctcagctctgaggccacggtaatgattgatgcgacggaagtaaaaatcaatcgccctaaaaaagaattagcgaattattcttgtaaaaaaatgccacgctatgaaggctcaagcgattgtcacaagtcaagggagaattgtttctttggatatcactgtgaactattgtcatga

SEQ ID NO: 1111 - DNA, 390 bp, Streptococcus pneumoniae
atgaaggctcaagcgattgtcacaagtcaagggagaattgtttctttggatatcactgtgaactattgtcatgatatgaagttgttcaaaatgagttgcagaaatatcggacaagctggtaaaatcttggctgacagtggttatcaagggctcatgaagatatatcctcaagcacaaactccacgtaaatccagcaaactcaagccgctaacagttgaagataaagcctgtaaccatgcgctatccaaggagagaagcaaggttgagaacatctttgccaaagtaaaaacgtttaaaataatttcaacaacctatcgaaatcatcgtaaacgcttcggattacgaatgaatttgagtgctggtattatcaatcatgaactaggattctag

SEQ ID NO: 1112 - DNA, 2292 bp, Streptococcus pneumoniae
atgaacgcattattaaatggaatgaatgaccgtcaggctgaggcggtgcaaacgacagaaggtcccttgctaatcatggcaggggctggttctggaaagactcgtgttttaacccaccgtatcgcttatttgattgatgaaaagctggtcaatccttggaatatcttggccattacctttaccaacaaggctgcgcgtgagatgaaagagcgtgcttatagcctcaatccagctactcaggactgtctgattgcgaccttccactccatgtgtgtgcgtattttgcgtcgcgatgcggaccatattggctacaatcgtaattttacaattgtggatcctggtgaacagcgaacgctcatgaaacgtattctcaaacagttgaacttggatcctaaaaaatggaatgaacgaactattttggggaccatttccaatgctaagaataatttgattgatgatgttgcttatgctgcccaagctggcgatatgtatacgcaaattgtggtccagtgttatacagcctatcaaaaagaacttcgtcagtctgaatccgttgactttgatgatttgattatgctgaccttgcgtctctttgatcaaaatcctgatgttttgacctactaccagcaaaaattccaatacatccacgttgatgagtaccaagataccaaccacgctcagtaccaattggtcaaactcttggcttcccgttttaaaaatatctgtgtggttggggatgcggaccagtctatctacggttggcgtggtgctgatatgcagaatatcttggactttgaaaaggattaccccaaagccaaggttgtcttgctggaggaaaattaccgctcaaccaaaaccattctccaagcggccaacgaggttattaaaaataataaaaatcgccgtcctaaaaatctctggactcaaaacgctgatggggagcaaatcgtttactatcgtgccgatgatgagctggatgaggctgtatttgtagccagaaccatcgatgaacttagtcgcagtcaaaacttccttcataaggattttgcagttctctatcggactaatgcccagtcccgtacaattgaggaagccctgctcaagtctaacattccttataccatggttggcggaaccaaattctacagccgtaaggaaattcgcgatattattgcttatctcaaccttattgctaatttgagtgacaatattagttttgagcgtattatcaacgagcctaaacgtggaattggtccaggtacagttgagaaaatccgtgattttgcaaatttgcaaaatatgtctatgctggatgcttctgctaatattatgttgtctggtatcaagggtaaggcagcccaatctatctgggattttgccaatatgatgcttgatttgcgggagcagctagaccacttaagcattacagagttggttgagtccgtcctagaaaaaacaggttatgtcgatattcttaacgcccaagcgactctagaaagcaaggcacgggttgaaaatatcgaagagtttctttctgttacgaagaactttgatgacaccacggatgtgacagaagaggaaactggtctggacaaactgagtcgtttcttaaatgacttggctttgattgccgacacagattcaggtagtcaggagacatcagaagtgaccttgatgaccctgcatgctgccaaaggtctcgaatttccagttgtctttttgattgggatggaagaaaatgtctttccacttagtcgtgcgactgaagatccagatgaattagaagaagagcgccgtctagcctatgtaggtatcacgcgtgcagagaaaattctctatctgaccaatgccaactcacgcttgctttttggtcgtaccaattataaccgtccgactcgttttattaacgaaatcagttcagacttgcttgagtatcaaggtctggctcgtcctgcaaatacaagctttaaggcatcatatagcagtggtagtatttcctttggtcaaggtatgagtttggctcaggctcttcaagaccgtaaacgcggtgctgccccaaaatcaatccagtcaagcggtcttccatttggtcaatttacagctggcgcaaaaccagcatctagcgaggcaaattggtccattggtgatattgctctccacaagaaatggggagagggaaccgttctggaagtttcaggtagcggtgctaggcaggaattgaaaatcaatttcccagaagtaggtttgaaaaaacttttagccagtgtggctccaattgagaaaaaaatctaa

SEQ ID NO: 1113 - DNA, 720 bp, Streptococcus pneumoniae
ttttccatccttctcacgaataataaagtgaggaggatttttatgtacagtatttcattccaagaagattcactattaccaagagaaaggctggccaaggaaggagttgaagcgcttagtaaccaagagttgctagctattttactcaggacaggaacacgtcaagttagcgtttttgaaattgcccaaaaagtcttgaacaatctttcaagcctaacggatttgaaaaaaatgaccctgcaggaattgcagagtttgtctggtattgggcgtgttaaggccatagaattacaagctatgattgaactggggcatcgtattcacaaacacgagactcttgaaatggaaagtattctcagcagtcaaaagttggccaagaagatgcagcaggaattaggggataaaaaacaagagcacctggtggcactctatctcaatactcaaaatcaaatcatccatcagcagaccatttttatcggttctgtaactcgtagtatcgctgaaccgcgagagattcttcactatgcaatcaagcatatggcgacttctcttatcttggtccacaatcatccttcaggagcggtagcgcctagccaaaatgatgatcatgtcactaaacttgttaaagaagcctgcgaactgatgggaattgttctcttggaccatttgattgtctctcattctaattactttagttatcgtgaaaagacagatttaatc

SEQ ID NO: 1114 - DNA, 690 bp, Streptococcus pneumoniae
atgaaaaaaccagttattgggattacaggaaacgaaaaaactcatccagatgatgacatcatgatgagctacgcagcaaaaggctttgttgaaggcgttaaagatgctggagggattcccatcatcctaccgattggtgatcaagaaatggcctgccactatatcagtttgattgacaagctcatcttaacaggtgggcaaaatgtcgatccaaaattttatggcgaacccaaaaccattgatagcgatgactatcaccttcaaagagatatcttcgaactggccctcatcaaggaagctattaaacagaaaaagcccattttctctgtctgccgtggtacccaactctttaacgttgccatgggtggaactttgtaccaagatatcgaagaccattggcaggattcttctgttgagtacacaactcaacgcttggtgacagaaccagataccgttctccaagaaatctatggagaaatctctcatatcaactccttccaccaccagagcatcaaggacttagcaccaaatttaaaagttgtggctcatgatcctaaagatggtatcattgaggctgtcatgagtacggatgatgtcgcctttctcggtgtccaatggcatccagaacttctttttgaaaatcgtcccaaagataagaaactctttgactatgtcgttaatgaactttag

SEQ ID NO: 1115 - DNA, 642 bp, Streptococcus pneumoniae
gtgaaagataaacagtttgctattccaaaagctacagcaaaaagactctctctctactatcgaatttttaagagatttcatgcagaaaagattgaacgtgccaactctaagcaaattgcagaggccattgggattgattcagcgaccgtacgtcgtgatttttcctattttggtgaacttggtcgtcgtggttttggctatgatgtcaaaaaactaatgacattttttgccgatttgctcaatgacaactctattaccaatgtcatgctggttggtattggaaatatgggccatgcccttctccactaccgcttccacgaacgtaacaagatgaagattatcatggcctttgacctagacgaccatcctgaagtcggtacccaaactcctgacgggattcccatttacgggatttctcagatcaaggataaaatcaaggatgctgatgtgaagactgctatcctaactgttcccagcgtcaagtcacaagaggttgctaatctcttggttgatgctggtgtgaaaggaattctcagtttttcaccagtccatctgcatttaccaaaagacgtggtcgttcagtatgtcgatttgacaagtgaactccaaaccctcctctacttcatgcgaaaagaggattag

SEQ ID NO: 1116 - DNA, 252 bp, Streptococcus pneumoniae
gtggtatctttacaaaatcggaaagatagagccaaaatgtttgaactgacctataaggactgctatcatgtagagcgtactctcaagtatgaggatcatgaggctctcatgttgactttgtcaggatgtgtaaccttaccagatacactttatgtgacttctctgacttttaggggccaaaaagtttatcagggtctggtcggagacctctaccgttttctatctcatgcagattttttacatcaaaactaa

SEQ ID NO: 1117 - DNA, 348 bp, Streptococcus pneumoniae
atggcatttgaaaaaatcattcagttaaaaaattgtcgttacgattacactcttagcccttctgttaaaaaattcaccctcaaagataacaccttttttgaaactaaggttggtaactatgaactgactcgccttttggaaaaagtgccaaacagcggtgaaggcttccaactcaaaatcatcattaacaaggaacttacaggggctaaaatcaatatcactgacaagtttggccttcgtctagttgatattttcaaatcagaagaccaccatattcatcaggaaaaattctacttcctcatggatagcttggtagaacgtggtatctttacaaaatcggaaagatag

SEQ ID NO: 1118 - DNA, 795 bp, Streptococcus pneumoniae
ttggttcaacactttgggtttgaagcaaccattatccagccagaaaatcaagaaatcacagcccagcaaattcaaaaggctttacgtgacgatacgattttggtttctactatgtttgccaataatgagacaggaaacctacttcccatcgctgaaattggccaaatactcaagcaacaccctgctgcctatcatgttgatgcagttcaggctattggtaaaatcccaattcattcagaagaattgggcattgattttctcactgcttctgcccacaaattccatggtcctaagggaatcggttttctctacgcatctagcatggactttgattcctatctacatggcggagaccaggaacagaaaaaacgtgcaggaactgaaaatctgcctgccatcgtaggcatggttgcagccctaaaagaagacctagaaaaacaagaagaacattttcaacatgtacaaaatctagaaactgcctttctggcagagctggagggcattcagtattacttgaatagaggaaaacatcatctcccttatgttctcaatattggatttcctggtcagaaaaatgacctcttactccttcggctagatttagctggaatttcaatctctactggctcagcctgtactgcaggcgttgtccaatccagccatgttcttgaagccatgtatggcgcaaattcagaacgcttgaaggaatcccttcgcatcagtttgtcgccacaaaataccgttgaagacctacaaaccctcgcaaaaaccttaaaagaaattatcggaggttag

SEQ ID NO: 1119 - DNA, 435 bp, Streptococcus pneumoniae
ctcttgatttgcatgccgttcaggttcaaggtttctttgatattccagtggataatcttttcactgttcccctattcgcaaaacattactgcgataaaggattgcttggttcagatgttgttgtcgttagccctaaaaaattcaggtgtcaaacgtgcgcgtagcctggctgaatatcttgatgctcctatcgccattatcgactaccctcaagacgatgcaactcgtaacgaaggttatattattggtgatgttgaaggtaagacagctatcttgattgatgatattttaaatacaggacgtaccttctctgaagcttctaaaatcgttgaacgtgaaggagctacagaaatttatgctgtttctagccacggtctcttcgtcgagggagctgctgagcttcttgacaatactaatattaaagaaatcttgtga

SEQ ID NO: 1120 - DNA, 549 bp, Streptococcus pneumoniae
atgtcagatagaaaaaacatgaaacttttcgcactcaactctaaccaagagattgcacaaaaaattgcccaagctgttggtgtcccacttggaaaactatcatcacgtcaattttcagacggagaaatccaagtaaatatcgaagaaagtgtccgtggttatgatgtttacatcatccaatcaacaagtttccctgtcaacaaccacctaatggaattgttaatcatggtcgatgcttgtgtgcgtgcaagtgcccacagtatcaacgttgtccttccatattttggctatgcacgtcaagaccgcattgcttgtcctcgtgagccacttacagcaaaactagttgccaatatgctggttaaggctggagttgatcgtatcctgactcttgatttgcatgccgttcaggttcaaggtttctttgatattccagtggataatcttttcactgttcccctattcgcaaaacattactgcgataaaggattgcttggttcagatgttgttgtcgttagccctaaaaaattcaggtgtcaaacgtgcgcgtag

SEQ ID NO: 1121 - DNA, 570 bp, Streptococcus pneumoniae
atgaaacatttagaaattgaattgaaaacactattgaaaaaagatgaatacaatcgtctaaaagaccagttcacaggtgtcactcctgttcttcaaacaaattactacatcgacacgcctgattttgaactgcgagaaaagaaagtcgctatgcgcattcgaacctttgaagactgggctgagttgacactcaaagtcccgcagagtgttggaaacatggaatacaaccaaaaattgcaactaaaagatgctgagaactatctgagtaaggaagaacttcctcaagggctagtactggatgaattggcgaaacatggtatccaaagtaagaactggcaggttcttggttgtctaacaacgcttcgctatgaaatgaaaacagctattggtctcatggcactggatcagagccgatactttgatatgacagattacgaattggagcttgaagtggaaaatcatgagcaaggcaaacaggatttccgacaatttttagagaaaaatcagatttcctaccaaaaagctccttcaaaattggttcgatttgtcaaaagtatgaaaaatagctga

SEQ ID NO: 1122 - DNA, 504 bp, Streptococcus pneumoniae
atgaccttagaatgggaagaatttctagatccttacattcaagctgttggtgagttaaagattaaacttcgtggtattcgtaagcaatatcgtaagcaaaataagcattctccaattgagtttgtgaccggtcgagtcaagccaattgagagcatcaaagaaaaaatggctcgtcgtggcattacttatgcgaccttggaacacgatttgcaggatattgctggcttacgtgtgatggttcagtttgtagatgacgtcaaggaagtagtggatattttgcacaagcgtcaggatatgcgaatcatacaggagcgagattacattactcatagaaaagcatcaggctatcgttcctatcatgtggtagtagaatatacggttgataccatcaatggagctaagactattttggcagaaattcaaattcgtactttggccatgaatttctgggcaacgatagaacattctctcaactacaagtaccaaggggatttcccagtatga

SEQ ID NO: 1123 - DNA, 213 bp, Streptococcus pneumoniae
aacattctctcaactacaagtaccaaggggatttcccagtatgagattaagaagcgactggaaattacagctagaatcgcccatcagttggatgaagaaatgggtgaaattcgtgatgatatccaagaggcccaggcactttttgatcctttgagtagaaaattaaatgacggtgtagggagcagtcacggtacagatgaagaatacaggtaa

SEQ ID NO: 1124 - DNA, 789 bp, Streptococcus pneumoniae
ccaactagaaacaccgcgagaggtcaaagggtcttgtatgaattgcgagatcgtttgaagagaaatcagtttatactcaatgataccaatccggatattgtcatttccattggcggggatggtatgctcttgtcggcctttcataagtacgaaaatcagcttgacaaggtccgctttatcggtcttcatactggacatttgggcttctatacagattatcgtgattttgagttggacaagctagtgactaatttgcagctagatactggggcaagggtttcttaccctgttctgaatgtgaaggtctttcttgaaaatggtgaagttaagattttcagagcactcaacgaagccagcatccgcaggtctgatcgaaccatggtggcagatattgtaataaatggtgttccctttgaacgttttcgtggagacgggctaacagtttcgacaccgactggtagtactgcctataacaagtctcttggcggtgctgttttacaccctaccattgaagctttgcaattaacggaaattgccagccttaataatcgtgtctatcgaacactgggctcttccattattgtgcctaagaaggataagattgaacttattccaacaagaaacgattatcatactatttcggttgacaatagcgtttattctttccgtaatattgagcgtattgagtatcaaatcgaccatcataagattcactttgtcgcgactcctagccataccagtttctggaaccgtgttaaggatgcctttatcggtgaggtggatgaatga

SEQ ID NO: 1125 - DNA, 897 bp, Streptococcus pneumoniae
atgaggtttgaatttatcgcagatgaacatgtcaaggttaagaccttcttaaaaaagcacgaggtttctaagggattgctggccaagattaagtttcgaggtggagctattctggtcaataatcaaccgcaaaatgcaacgtatctattggacgttggagactacgttaccattgacattcccgctgagaaaggctttgaaaccttggaggctattgagcttccattagatattctctatgaggatgaccactttctagtcttgaataaaccctatggagtggcttctattcctagtgtcaatcactctaataccattgccaattttatcaagggttactatgtcaagcaaaattatgaaaatcagcaggttcacattgttaccagactagatagggacacttctggcttgatgctctttgccaagcacggttatgcccatgcacgattagacaagcagttgcagaagaaatctatcgagaaacgctactttgctttggttaagggagatggacatttggagccagaaggggaaattattgctccgattgcgcgtgatgaagattccattattaccagacgagtggctaaaggcggaaagtatgcccatacttcatacaagattgtagcttcttatggaaatattcacttggtctatattcacctgcacactggtcgaacccatcaaatccgagtccatttttctcatatcggttttcctttgctgggagatgatttgtatggtggtagtctggaagatggtattcaacgtcaggctctgcattgccattacctatccttttatcatccatttttagagcaagacttgcagttagaaagtcccttgccggatgatttcagtaaccttattacccagttatcaactaatactctataa

SEQ ID NO: 1126 - DNA, 975 bp, Streptococcus pneumoniae
atggaagtttttgaaagtctcaaagccaaccttgttggtaaaaatgctcgtatcgttctccctgaaggggaagagcctcgtattcttcaagcaacaaaacgcttagtaaaagaaacagaagtgattcctgttttgcttggaaatcctgaaaaaattaaaatttatcttgaaattgaaggaatcatggatggttatgaggtcatcgaccctcaacattatcctcaatttgaagaaatggtttctgccttggtggagcgtcgcaagggcaaaatgactgaagaagatgtacgcaaggttttggttgaagatgtcaactactttggtgtgatgttggtttacttgggcttggttgatggaatggtgtcaggagcgattcactcaacagcttcaacagttcgcccagctctacaaatcatcaaaactcgtccaaatgtaactcgtacttcaggagccttcctcatggttcgtggtacggaacgttacctatttggagactgtgccattaatatcaatccagatgcggaagccttggctgaaattgccatcaactcagcaatcacagctaagatgtttggcatcgaacctaaaattgccatgttgagctattctactaaaggttcagggtttggtgaaagcgttgataaggtcgttgaagcaactaaaattgctcacgacttgcgtcctgaccttgaaatcgatggtgagttgcaatttgatgcggcctttgttcccgaaactgcagctctgaaagctccgggaagtacagtagctggtcaagcaaatgtcttcatcttcccaggtatcgaggcaggaaatatcggttacaagatggctgaacgcatgggtggctttgcggctgtaggacctgttttgcaaggtttaaacaagccagttaatgatctttctcgtggatgtaatgcagatgatgtttacaagttgaccctcatcacagcagctcaagcagttcatcaatag

SEQ ID NO: 1127 - DNA, 237 bp, Streptococcus pneumoniae
aaacttcaaaaaacggatttttatcgctctgaacatcaaaaaagaaaggacgaaatttgtcctttctcaagcttagctgacttcaacccactacagttgacaaagagccaaaaaattctcttttcatactcatttaaaatcaaaaagggaatttatcgttttacggacatgtatattacagatttctataggtcgtgtatagacaggatatcatcgcttggaagttttcctttttga

SEQ ID NO: 1128 - DNA, 597 bp, Streptococcus pneumoniae
gctcaggctgaaacagtctcccagactgtttcactcccgaatgctaaaatcgttcttgatcgctttcacattgtacaacatcttagccgtgctatgagtcgtgtgcatgtccaaatcatgaatcagtttcatcgaaaatcccatgaatacaaggctatcaagcgctactggaaactcattcaacaggatagccgtaaactgagtgataaacgtttttatcgccctacttttcgtatgcatttaaccaataaagagattttaaacaagcttttgagctattcagaagacttgaaacaccactatcagctctataataaggaaccagagaaatttttcggacttattgaggacaatcttaagcaggttcatcctatttttcagactgtctttaaaacctttctaaaggacaaagagaaaatcgtcaacgcccttcaactaccctattcaaacgccaaattggaagcgaccaataatctcatcaaacttatcaaacgcaatgcctttggttttcgaaactttgaaaacttcaaaaaacggatttttatcgctctgaacatcaaaaaagaaaggacgaaatttgtcctttctcaagcttag

SEQ ID NO: 1129 - DNA, 327 bp, Streptococcus pneumoniae
aacagtccgggtagtgactgtttcaatcgggagatggagatgagctttattgcgcaagattttgacaagctcaatatcatcactgttcttgagggaagaacacaagctatcattcgaaatcactttcttcgctacgatagagccgtccgatgtcgcgtcaaaatcattactatggatatgtttagcccttactatggcttggctaaacagcttcgctttcaaatttctaggctcaggctgaaacagtctcccagactgtttcactcccgaatgctaaaatcgttcttgatcgctttcacattgtacaacatcttagccgtgctatga

SEQ ID NO: 1130 - DNA, 519 bp, Streptococcus pneumoniae
atggaacaattacattttatcacaaaattactagacattaaagaccctaatatccagattttagacatcatcaataaggatacacacaaggaaatcatcgccaaactggactacgacgccccatcttgccctgagtgcggaaatcaattgaagaaatatgactttcaaaaaccttctaaaattccttatcttgaaacgactggtatgcctactagaattctccttagaaagcgtcgattcaagtgctatcactgttcaaaaatgatggtcgctgaaacttctatcgtcaagaaaaatcaccaaatccctcgtatcatcaaccaaaagattgctcaaaagttaattgaaaagatttctatgactgatattgcccatcagcttttcatctcaacttcaactgttattcgtaagctcaatgattttcactttaaacatgatttttcttgtcttcctgagattatgtcttgggacgttgaaacagtccgggtagtgactgtttcaatcgggagatggagatga

SEQ ID NO: 1131 - DNA, 324 bp, Streptococcus pneumoniae
gatgaaaggaactttagaaatcttatgatgaacatgcaaaacatgatgcgtcaagcacaaaaacttcaaaaacaaatggaacaaagccaagctgaacttgctgctatgcaatttgttggcaaatctgctcaagatcttgtccaagcgaccttaactggcgataagaaagttgtcagcattgatttcaatccagctgtcgttgacccagaggaccttgagactctttctgatatgaccgttcaagccatcaactctgctcttgaacaaatcgatgaaactaccaagaaaaaactgggtgctttcgctgggaaattacctttctaa

SEQ ID NO: 1132 - DNA, 693 bp, Streptococcus pneumoniae
atgaggttattacctataagaaaaatatcacgtcagtctaaaaggttagcactttttttgacgttttgtgctggatatgtggatgcttacacttttattgttcgcgggaatacccttgtagctggacaaactggaaatgttgtctttctttcagtagaattaattaaaaataatgtttcggatgttagggacaaggttctcaccttgctagcgtttatgatgggagtctttttattaacgatttataaggaaaaattgagaattgtgaaaaaacctattctgtccttgattcccttggcaatcttatcaatcattattgcttttgtgccgcaaactgtggataatatctatctagtgccgcccttggccttctgtatgggactggtgacaactgcttttggagaagtgtcgggtattgcctataataacgcttttatgacagggaatatcaaacggaccatgctggcttttggagattatttccgaaccaagcacactccttttttgcgtgaaggattcatatttgttagcctgcttagtagttttgtccttggcgttgtcttttcagcctatttgacgattttctatcatgaaaagaccattcttggtgttcctattatgatgagcgttttttacctcagcatgctttttgcctcttggcagaaaaaagtaaaagaaaaagcttcattttag

SEQ ID NO: 1133 - DNA, 315 bp, Streptococcus pneumoniae
atgagcacatacgcaattatcaaaactggcggaaaacaagttaaagttgaagttggtcaagcagtttacgttgaaaaattgaacgttgaagctggtcaagaagttacttttaacgaagttgttcttgttggtggtgaaaacactgttgtcggaactccacttgttgctggagctactgtagttggaactgttgaaaaacaaggaaaacaaaagaaagtggttacttacaagtacaaacctaaaaaaggtagccaccgtaaacaaggtcaccgtcaaccatatacaaaagttgtcatcaacgcaatcaacgcttaa

SEQ ID NO: 1134 - DNA, 441 bp, Streptococcus pneumoniae
gtgtccagtaatttccgcactcctcagctcgccatcttcggctctctcaaagactgcctgtatcatgtgttctccttaaaattaagcgttgattgcgttgatgacaacttttgtatatggttgacggtgaccttgtttacggtggctaccttttttaggtttgtacttgtaagtaaccactttcttttgttttccttgtttttcaacagttccaactacagtagctccagcaacaagtggagttccgacaacagtgttttcaccaccaacaagaacaacttcgttaaaagtaacttcttgaccagcttcaacgttcaatttttcaacgtaaactgcttgaccaacttcaactttaacttgttttccgccagttttgataattgcgtatgtgctcattatgcacctcctatgatttttatgggtttccccgattttttgtga

SEQ ID NO: 1135 - DNA, 345 bp, Streptococcus pneumoniae
atgatacaggcagtctttgagagagccgaagatggcgagctgaggagtgcggaaattactggacacgccgagagtggcgaatacggcttagatgtcgtgtgtgcatcggtttctacgcttgccattaactttatcaattctattgagaaatttgcaggctatgaaccaatcctagaattaaacgaagatgaaggtggctatctgatggttgaaataccaaaagatcttccttcacaccagagagaaatgacccagttattctttgaatcatttttcttaggtatggcaaacttatcggagaactcttctgagttcgtccaaaccagagttatcacagaaaactaa

SEQ ID NO: 1136 - DNA, 294 bp, Streptococcus pneumoniae
atgttaaaaatgactcttaacaacttgcaacttttcgcccacaaaaaaggtggaggttctacatcaaacggacgtgattcacaagcaaaacgtcttggagctaaagcagctgacggacaaactgtaacaggtggatcaatcctttaccgtcaacgtggtacacacatctatccaggtgtaaacgttggtcgtggtggagacgatactttgttcgctaaagttgaaggcgtagtacgctttgaacgtaaaggacgcgataaaaaacaagtttctgtatacccaatcgcaaaataa

SEQ ID NO: 1137 - DNA, 165 bp, Streptococcus pneumoniae
ttgatacccatactttttaatatgtatagtggattgatactcttcgaaaatcaaattcaaaccacgtcaatttcaccttgccgtactcaagtacagcctgcggctaacttcctagtttgcactttaattttcattgagtatgaatctggaatagaacactgttaa

SEQ ID NO: 1138 - DNA, 918 bp, Streptococcus pneumoniae
atgattattactattcctataaaaaaccaaaaagatattggcacaccatctgattcagtcgttgttctcggctattttgatggcatacataaggggcatcaagaattatttcgtgttgccaacaaggctgcgagaaaggatttattacctatcgtcgttatgacctttaatgaatctccaaagatcgctttagagccttatcatccagatttgtttttgcatattttgaaccctgctgaacgtgaaagaaaattaaagcgcgaaggtgtagaagaattatatctccttgattttagtagtcaattcgctagtctcactgcacaagaattctttgcaacttatatcaaggctatgaatgccaaaattattgttgcaggttttgattatacatttggttctgacaaaaaaacagcagaagatttaaaggattactttgatggagaagttatcattgttccacctgtagaagatgagaaaggaaagattagttcaactcgtatccgtcaagctattttagatggaaatgtgaaagaagcaggaaaacttttgggggcaccgcttccatcaagaggtatggtggttcatggtaatgctcgtggtcgtacaattggttatccgacagcgaatttagtgcttttagaccgtacttatatgccagcagatggcgtttatgtcgttgatgttgagattcaaagacagaagtatcgtgctatggctagtgtcgggaaaaatgtgacctttgatggagaagaagcacgttttgaagtcaatatttttgattttaatcaagatatttatggggaaaccgtcatggtttattggcttgatcgcattcgtgatatgaccaaatttgactcagttgaccaattagtggatcagttaaaggctgatgaagaagtaactcggaattggtcttaa

SEQ ID NO: 1139 - DNA, 849 bp, Streptococcus pneumoniae
atgattaaaaaaatttaccccatttttaccattttactaggtgctgctatttatgcttttggactgacttattttgtagttccccatcatctctttgaaggaggggcgacaggtattaccctcatcacattttatctttttaaaatccctgtttccctcatgaacctgctgattaatattccccttttcatcctagcttggaagatctttggagccaaatccctctattctagtttactaggaaccttagctttgtccggctggttagctttttttgagcatattccccttcatattgatcttcaaggtgatttactaatcacagcccttatagcgggaatcctattgggaattggccttggaattatttttaatgctggaggtacaactggcggaactgatattctagctcgtattctcaacaaatacactcatatatccataggaaaactgctctttatcttagatttttgtattctcatgttgattctcctaatcttcaaggatttgagattggtttcctacacgcttttgtttgattttattgtttctcgtgttattgatttgattggtgaaggaggatatgccggcaaaggctttatgattatcacaaaacgtcctgaccaacttgctaaggcgattaatgatgacctcggaagaggtgttacttttatttctggtcaaggctactatagtaaagaaaatttgaaaatcatctactgtattgtcggaagaaatgaaattgtgaaaacgaaggaaatgattcatcgaatcgatcctcaagcctttataactattacagaagcccatgaaatcctaggagaaggcttcacctttgaaaaagaataa

SEQ ID NO: 1140 - DNA, 840 bp, Streptococcus pneumoniae
atgacaaaaattaagattgtaaccgattcatctgttactattgaacctgaactagtaaagcaattagatattacaattgttccattatctgtaatgattgataatgttgtttattctgatgcggatttgaaagaagaaggtaaatttcttcagttgatgcaagaaagtaagaatcttccgaaaacaagtcagccacctgtaggtgtctttgctgagatttttgaagacctatgcaaagatggtggccagattcttgctattcatatgtcccatgctctttcgggtacggtagaagcagcacgccaaggtgctagcctatctactgcagatgtgactgttgttgatagttccttcactgaccaagccctgaaattccaagttgttgaggctgcgaagttagctcaagaaggtaaagatatggaggcaattttatctcatgtagaagaggttaaaaaccatacagagctttatattggtgtttcaactttggaaaatcttgtcaaaggtggacgaattagccgtgtaactggcttgttgagctctcttctcaatatccgtgttgtcatgcaaatgaaagaccatgaattgcagccaatggttaaaggtcgtggaactaaaacatttaaaaaatggttagatgagttgataacatcgctttctgaacgtgctgtagcagagattggaatttcatattctggtagtgatgattgggcaaaagagatgaaagaaagcttacaagcttatgttgaaaagccaatttctgttttggaaacgggttccattattcaaactcacacgggtgagaacgcttgggctattttgatacgttaccactcctaa

SEQ ID NO: 1141 - DNA, 276 bp, Streptococcus pneumoniae
atggcaaacaaacaagatttgatcgctaaagtagcagaagctacagaattaactaagaaagactcagcagcagcagttgaagctgtatttgcagcagtagctgactatcttgcagctggtgaaaaagttcagttgatcggttttggtaactttgaagttcgtgagcgcgcagaacgtaaaggtcgcaacccacaaactggtaaagaaatgacaattgcagcttctaaagtaccagcattcaaagctggtaaagctcttaaagacgctgttaaataa

SEQ ID NO: 1142 - DNA, 1902 bp, Streptococcus pneumoniae
atgattattttacaagctaataaaattgaacgttcttttgcaggagaggttcttttcgataatatcaacctgcaggttgatgaacgagatcggattgcccttgttgggaaaaatggtgcaggtaagtctactcttttgaagattttagttggagaagaggagccaactagtggagaaatcaataagaaaaaagatatttctctgtcttacctagctcaagatagccgttttgagtctgaaaataccatctatgatgagatgcttcatgtctttgatgacttacgtcggacagataaacaactgcgtcagatggagctggagatgggtgaaaagtctggtgaggatttggataaactgatgtcagattatgaccgcttatctgaaaattttcgccaagcaggtggctttacctatgaagctgatattcgagcgattttgaatggattcaagtttgacgagtctatgtggcagatgaaaattgctgagctttctggtggtcaaaatactcgtttggctctagctaaaatgctccttgaaaagcccaatctcttggtcttggacgagccaactaaccacttggatattgaaaccatctcctggctagagaattacttggtaaactatagcggtgccctcattatcgtcagccacgaccgttatttcttggacaaggttgcgacaattacgctagatttgaccaagcattccttggatcgctatgtggggaattactctcgttttgttgagttgaaggagcaaaagctagctactgaggcaaaaaactatgaaaagcaacagaaggaaatcgctgctctggaagactttgtcaatcgcaatctagttcgtgcttcaacgactaaacgtgctcaatctcgccgtaaacaactagaaaaaatggagcgtttggacaagcctgaagctggcaagaaagcagccaacatgaccttccagtctgaaaaaacgtcgggcaatgttgttttgactgttgaaaatgcagctgttggctatgacggggaagtcttgtcacaacctatcaacctagatcttcgtaagatgaatgctgtcgctatcgttggtccaaatggtatcggcaagtcaacctttatcaagtctattgtggaccagattccttttatcaagggagaaaagcgctttggcgctaatgttgaggttggttactatgaccaaacccaaagcaagctgacaccaagtaatacggtgctggatgaactctggaatgatttcaaactgacaccagaagttgaaatccgcaaccgtcttggagccttccttttctcaggagatgatgttaaaaaatcagtcggcatgctatctggtggcgaaaaagctcgtttgcttttagctaaattgtctatggaaaacaataactttttgattctggatgagccgaccaaccacttggatattgatagtaaggaagtgctagaaaatgccttgattgactttgatggtaccttgctttttgtcagtcatgatcgttactttatcaatcgtgtggcaactcatgttttggaattgtctgagaatggttcaactctctaccttggagattacgactactatgttgagaagaaagcaacagcagaaatgagtcagactgaggaagcttcaactagcaatcaagcaaaggaagcaagtccagtcaatgactatcaggcccagaaagaaagtcaaaaagaagttcgcaaactcatgcgacaaatcgaaagtctagaagctgaaattgaagagctagaaagtcaaagccaagccatttctgaacaaatgttggaaacaaacgatgccgacaaactcatggaattacaggctgagctggacaaaatcagccatcgtcaggaagaagctatgcttgagtgggaagaattatcagatcaggtgtaa

SEQ ID NO: 1143 - DNA, 894 bp, Streptococcus pneumoniae
gtgggaagaattatcagatcaggtgtaaagatggaacatcttggaaaagtatttcgtgaatttcgaacaagtggaaattattctttaaaggaagcagcaggcgaatcctgctctacctctcagttatctcgctttgagcttggggagtctgacctggcagtctcccgtttctttgagattttggataacattcatgtaacaatcgaaaatttcatggataaggcaaggaattttcataatcatgaacatgtgtctatgatggcacagattatcccactttactattcaaacgatattgcaggttttcaaaagcttcaaagagaacaacttgaaaagtctaagagttcgacgactcccctttattttgagctgaactggattttgctacaaggtctgatttgtcaaagagatgcgagttatgatatgaagcaggatgatttggataaggtagcagattatctcttcaaaacagaagaatggaccatgtatgagttgattcttttcggtaacctctatagtttctacgatgtagactatgtcactcggattggtagagaagttatggagagggaggaattttaccaagagattagtcgccataagagattagttttgattttggccctcaattgttaccagcattgtttagagcattcttctttttataatgccaactattttgaggcttatacagagaagattattgacaaaggtattaagctttatgagcgtaatgttttccattatttaaaaggttttgccttatatcaaaaaggacagtgtaaagaaggctgtaagcagatgcaagaggccatacatatttttgatgtgttaggtcttccagagcaagtagcctattatcaggaacactacgaaaaatttgtcaaaagttaa

SEQ ID NO: 1144 - DNA, 1179 bp, Streptococcus pneumoniae
atgaatcgctatgcagtgcagttgattagccgtggggctatcaataaaatgggaaatatgctctatgattatggaaatagtgtctggttggcttctatggggactataggacagacagttttaggaatgtatcagatttctgagctcgtcacatctattctcgtcaatccctttggcggagttatttcagaccgtttttctcgtcgtaagattttaatgacggcagatcttgtttgtgggattctttgtctggctatttctttcataaggaatgatagctggatgattggcgctttgattgttgctaacattgtgcaggctattgcttttgccttttctcgcacagccaataaagctatcataactgaagtggtggagaaagatgagattgtgatctataattctcgcctagagctggttttgcaggttgtaggtgttagctctcctgttctttccttccttgttttacagtttgcaagtctccatatgacgctactgctagactcgctgacttttttcattgcttttgttctagtggctttccttccaaaagaggaagcagaagttcaagagaaaaaggcttttactgggagagatatttttgtagatatcaaggatgggttacactatatctggcatcagcaagaaattttcttccttttgctggtagcttccagcgttaatttcttttttgcagcttttgaatttctacttcccttttcgaatcagctttacgggtcagaaggagcctatgcaagtattttaactatgggggctattggttccatcattggggctcttctagctagtaaaattaaagctaatatttataatcttttgattttactggctttgacaggtgtcggagtttttatgatgggattaccacttccaacttttctttccttttctggaaatttagtttgtgaattgtttatgacgatttttaatattcacttttttactcaagtacaaaccaaggttgagagcgaatttcttggaagagtactgagtacaatttttaccttagctattctatttatgcctattgcaaaaggatttatgacagtcttgccaagtgtacatctctcttctttcctgataattggaagtggtgttatcatcttgtcttgtatatcgtttatttatgttcgaactcattttgaaaaattgatataa

SEQ ID NO: 1145 - DNA, 1968 bp, Streptococcus pneumoniae
aatggtcttatgaataaaagaatgaatgagttagtcgctttgctcaatcgctatgcgactgagtactataccagcgataatccctcggtttcagacagtgagtatgaccgcctttaccgtgagttggtcgagttagaaactgcttatccagagcaagtgctagcagacagtccgactcatcgtgttggtggcaaggttttagatggttttgaaaaatacagtcatcagtatcctctttatagtttgcaggatgctttttcacgtgaggagctagatgcttttgatgcgcgtgttcgtaaggaagtggctcatccgacctatatttgtgagctgaaaatcgatggcttatctatctcgctgacttatgaaaaggggattttggttgctggggtaacacgtggagatggttcaattggtgaaaatatcacagaaaacctcaagcgtgttaaggacatccctttgactttgccagaagaactagatatcacagttcgtggggaatgttacatgccacgcgcttcctttgaccaagttaaccaagtgcgccaagaaaatggagagcctgaatttgctaatcctcgtaatgcggcagcaggaactctgcgtcagttggatacagcagtagttgccaagcgtaatcttgcaacgtttctctatcaagaagccagcccttcaactcgtgatagccaagaaaagggtttgaagtacctagaacaactaggttttgtggtcaatcctaagcgaatcttggctgaaaacatagatgaaatctggaattttatccaagaagtaggacaggaacgggaaaatctgccttacgatattgatggagtggtaatcaaggtcaacgacctagcaagtcaagaagaacttggttttacagttaaggctccaaagtgggcagtagcctacaagttccctgccgaagaaaaagaagctcaactcttatcagttgactggacagttggccgtaccggtgttgtaactccaactgctaatctaacaccagtacaacttgccggtacgactgttagccgtgcgaccctgcacaatgtagattatattgctgaaaaagatatccgaaaagacgatacggtcattgtatataaggctggtgacatcatccctgccgttttacgtgtggtagagtccaaacgggtttctgaagaaaaactagatatccctacaaactgtccaagttgtaactctgacttgttgcactttgaagatgaagtggccctacgttgtatcaatccgcgttgccctgctcaaatcatggaaggcttgattcactttgcttctcgtgatgctatgaatattacaggccttggtccatctattgttgagaagctttttgctgctaatttagtcaaggatgtggcggatatttatcgtttgcaagaagaggatttcctccttttagagggggttaaggaaaagtccgctgctaaactgtatcaggctatccaagcatcaaaggaaaattctgccgagaagctcttatttggtttgggaattcgtcatgtcggaagcaaggctagtcagcttttacttcaatatttccattcaattgaaaatctgtatcaggcagattcagaggaagtggctagtattgaaagtctaggtggcgtgattgccaaaagtcttcagacttattttgcgacagaaggctctgaaattctgctcagagaattgaaagaaactggggtcaatctggactataaaggacagacggtagtagcggatgcggccttgtcaggtttgaccgtggtattgacaggaaaattggaacgactcaagcgctcagaagctaaaagtaaactcgaaagtctgggtgccaaagtgacaggtagtgtttctaaaaagaccgacctcgtcgtggtaggtgcagacgctggaagtaaactgcaaaaagcacaagaacttggtatccaggtcagagatgaggcatggctagaaagtttgtaa

SEQ ID NO: 1146 - DNA, 2280 bp, Streptococcus pneumoniae
atgtataactaccctatgcgcattcattaccatcgtaagaatggagaatatgacacttgctcctttgtaaaaagtcaggatcaacgaattgatttgctaacctacaaagaagattattttggagctttatttagctttgaacacccaagttcacatgttatagaaagcttgaattttgtggttcatacaggtcaaactagtaaagaatattctatccgttttaatcactatcccctattaacagaggtctggattttggaaggcgatgataggatttattactctgaaaatcctgctattgccagtcctttctataaaaatcaaaatccttttgcctttgataaggccattaacagtgctagttttgatcatcattggggttaccaaggagaattgggttgccgtgtagaggacaatcaggctcatttttccctctggtcacctacagcgacaaaagtgcaagttgtcgtttatgaatcagctgctaatgatgcacccgtttggaagacttttgagatgaaaagaggcaatagctactcttataatcataaggacaatacaatcggtgtctggagtttggatgttgaagaagatttggtaggtaagacttatcagtatcaagtccaattccctcatcaccaaacactgacacgtgatccttatacaatcgcgaccagccctgatggcaaacgttcagctattctgagccatgtagaaaagcaagttgaaaacttcgaggttaagcacggttcggaggctacttggcgcttggaaaatccatgtaaggcagttatctgtgaaatgcacattcgtgatttgactaaatcacctacatcgggtgtagatgaacatcttcgaggaactttcttgggtgctgctcaggctggaacagttaaccaatacggccagtcaactgcttttgattacatcaagaagctgggctacaattatgttcaattgcaaccaattgcagaccgtcataaagaatacgatgaggatggaaatgtaacctacaactggggttatgatccacaaaactataacgcgccagaaactagtttttcaactaatccagatgatccagctcaggtcattcgtgatttgaaggtgatggttcaagcttatcacgatgcgggtattggagtcattatggatgtagtctataaccataccttctcagttgttgatgcaccattccaaacaacagtccctgattactattatcgtatgaatccagatggtaccttccagaatggaacgggtgttggaaatgaaacagccagtgaacacgaaatgtttcgcaagtatatgattgattctcttctatactgggtgcaggaatataatattgacggcttccgttttgacttgatggggattcatgatgtcaagaccatgcagatgattcgtcaaagcttggatgaaatcgactccaacattatcctctatggagaaggatgggatatgggaacaggtcttgccccttatgataaggccaagaaggacaatgcctaccagatgccaaatattggtttctttaatgacaatcagcgcgatgctgtcaaagggggagaagtttatggtgctatcaagtcaggttttgtcagtggtgctgcgacagagccaattctagctaaagcaatcctaggaagtcgtgaattaggaagctatacacatccaaatcaggtgcttaactatgtagaagcccatgacaattacaatcttcacgatttattggcaacccttcatccagaccaaagttcagagcaaatcatgcgcaaggtcgaaactgccacagccatgaatctgctcatgcaggggatggcctttatggaaatcggtcaagaatttggtcgtaccaaactggttgcgactggtgaaaatggtgagttgacccatgatgatagagagcgtgcgatgaatagctataatgctcctgacagtgtgaaccaagtgaactggaacttgattaatgagcgtcaagacagtattgagtttatccgtcaagtcatccgattgaagacaaaaactggtgccttttcttactctagctatgatgaaatttaccatcatgtctttgtgcattctgcgattgaacatagcggctgccttatctatgaagttcacggcaaagaacacctcttggtagttgtgaatgctaaatcagaaccctatcaatttgaaaatgcaggaaatttagctatgttggtaaccaacagtcgctcaaaagaagataatgttttaaatgatattagtctagctgtcttgagtgttttataa

SEQ ID NO: 1147 - DNA, 1425 bp, Streptococcus pneumoniae
ttgacaagatatcagaatttagtaaatggaaaatggaaatcatccgaacaagaaattacgatttattcaccaatcaatcaagaagaattgggtacagttccagccatgactcagactgaagctgatgaggctatgcaagctgcgcgtgcagccctgccagcatggcgagctttatcagcaattgaacgtgcggcttatttgcataaaacagcagctattttagaacgcgataaggaaaaaattggtactatccttgccaaagaagtagcaaaagggattaaagcagcaattggagaagtagtgcgtacagcagacttgattcgttatgctgctgaggaaggtctccgtatcactggacaagcaatggaaggtggtggttttgaggcagcaagtaaaaacaaactggctgttgtccgtcgtgaaccagttggtatcgtgctagcgattgctccttttaattatccagttaatttatctgcttctaaaattgcacctgccttgattgcagggaatgttgtcatgtttaagccaccaacacaaggttccatttctggactcttgttggctaaagcatttgaagaagcagggattccggcaggtgttttcaacaccattacaggtcgtggttcagaaattggggattatatcattgagcacaaagaagtcaacttcatcaactttacaggttcaactcctattggagaacgtattggtcgtttagctggtatgcgtcctatcatgttggaacttggtgggaaagatgcagctcttgtactagaagatgcagatttggaacatgctgccaagcaaattgttgcgggagcctttagctactcaggacaacgttgcacggccattaaacgtgtcattgttctcgaaagtgtagcagataaattagctactttgcttcaggaagaagtttctaaattaacagttggtgatccatttgacaatgctgatattacacctgttattgacaatgcttcagccgacttcatttggggcttgattgaggatgcacaagaaaaagaggctcaggctcttacaccaatcaaacgtgagggcaatctcctctggccagtgctttttgaccaagttacaaaagatatgaaagtggcatgggaagagccatttggtcctgttttaccaatcattcgtgtggctagtgtagaggaagctattgcctttgccaacgaatctgaattcggccttcaatcatcagtctttacaaatgatttcaaaaaagcctttgaaattgctgaaaaacttgaagtaggtacagtccacattaataataaaacccagcgtggtccagataatttcccattccttggtgtcaaaggttctggagctggagtgcaaggaattaaatatagcattgaagcgatgacaaatgtcaaatccattgtttttgatgtgaaataa

SEQ ID NO: 1148 - DNA, 1929 bp, Streptococcus pneumoniae
atggataatagagaagcattaaaaacctttatgacgggtgaaaatttttatctccaacattatctaggagcacatagggaagaactaaatggagagtatggctataccttccgtgtttgggcacctaatgctcaggctgttcacttggttggtgattttaccaattggattgaaaatcagattccaatggtaagaaatgactttggggtctgggaagtctttaccaatatggctcaagaagggcatatttacaaatatcatgtcacacgtcaaaatggtcatcaactgatgaagattgacccttttgctgtcaggtatgaggctcgtccaggaacaggggcaatcgtaacagagcttcctgataagaaatggagggatggactttggctggcacgaagaaaacgttggggctttgctgaacgtcctgtcaatatttacgaggttcatgctggctcttggaagagaaatcctgatggcagtccttatagttttgcccaattgaaagatgaactcattccttacctagttgagatgaactatactcatattgagtttatgcccttgatgtcccacccactaggtttgagttgggggtaccagcttatgggttacttcgctttagagcatgcctatggtagaccagaggagtttcaagattttgtcgaggagtgtcatacccataatattggggttattgtggactgggtaccaggtcactttaccatcaatgatgatgccttagcctattatgatgggacaccgacttttgaataccaagaccataataaggctcataaccatggttggggtgcccttaattttgaccttggaaaaaatgaagtccagtccttcttaatttcttgcattaagcattggattgatatctatcatttggatggtattcgtgtggatgctgttagcaacatgctctatttggactatgatgatgctccatggacacctaataaagatggcggaaatctcaactatgaaggttattatttccttcaacgcttgaatgaagttattaagttagaatatccagatgtgatgatgattgcagaagaaagttcgtctgcaaccaagattacgggaatgaaagagattggtggtctaggatttgactacaaatggaacatgggctggatgaatgatatcctccgtttctacgaagaagatccgatttatcgtaaatatgactttaacctggtgactttcagctttatgtatgttttcaaggagaattatctcttgccattctcgcacgatgaagtggttcatggcaagaagagtatgatgcataagatgtggggagatcgttacaatcaattcgcaggcttgcgcaatctctatacgtaccaaatttgtcaccctggtaagaaattgctcttcatgggtagcgaatacggtcaattcctagaatggaaatctgaagaacagttggaatggtctaacctagaagacccaatgaatgctaagatgaagtatttcacttctcagctaaaccagttttacaaagatcatcgctgtctgtgggaaatcgataccagctatgatggtattgaaatcattgatgcggataatcgagaccagagtgttctttcctttattcgtaagggtaaaaagggagaaatgttagtctgtatctttaacatggtacctgttgagcggaaagattttacaatcggactacccgttgcaggaatttacgaagaagtatggaatactgagttggaagagtggggaggcgtttggaaagaacataatcaaactgttcaaacgcaagaaggactatggaaagattatgagcagaccttaacctttaccctaccggctatgggagcaagtgtatggaaaatcaaacgtcgcttgaaatctactaaaaccgtcacaaataaaaaccaaaaaggagtagaaaatgaaaaatga

SEQ ID NO: 1149 - DNA, 1143 bp, Streptococcus pneumoniae
atgaaaaatgaaatgttagctttgattcttgctggtgggcaaggaactcgtctcggtaaactcactcaaagcatcgcaaaaccagctgtgcaatttggggggcgctaccgtatcattgactttgccctatcaaactgtgccaactcagggattcataatgttggggtcgttacacagtatcaaccacttgctctcaacaaccatattgggaatggttcaagctggggactagacggtattaattcaggtgtctctattcttcaaccttattctgcaagtgaaggaaatcgttggtttgaggggactagtcacgctatttaccaaaatatcgactatatcgacagtgtcaatcctgagtatgtcttgattttgtctggggaccacatctacaaaatggactatgatgatatgctccagtctcataaggataataatgccagcttgacagtagcagttttagacgtccctcttaaagaagcaagccgttttggtatcatgaacacagatgctaacaatcgtattgttgaatttgaagaaaaaccagctcaacctaaatctacaaaagcttctatgggaatctacatttttgattggcaacgccttcgtaatatgttagtcgctgctgaaaagagcaaggttggcatgtcagactttggtaaaaatgtcattccaaattaccttgagtcaggtgaaagtgtttatgcttacgaatttagtggttattggaaagatgttggtactattgagtcactttgggaagcgaacatggagtatatttctccagaaaatgccttggatagtcgtaaccgtcaatggaagatttactcaagaaacttgatttcaccaccaaacttcctcggggcaaatgctcatgtggaagactcattagttgtagacggatgtttcgttgatggaactgttaaacattctatcctttcaacaggcgcgcaagttcgcgaaggagcggaagtccttgattcagttatcatgagtggagctatcattggtcaaggagctaagattaaacgtgccattattggtgaaggtgcgattatttctgacggtgtcgaaattgatggaacagatgaagtacaagttgtaggatataatgaagtagtgggggtagcaacagatgaagattga

SEQ ID NO: 1150 - DNA, 1140 bp, Streptococcus pneumoniae
atgaagattgataaatattctgccattttaggaaatacagttggttttcacaatatgtcgacattgacggaccaccgtccagtagcaagtttgccatttggtgggaaatatcgtttgattgacttcccactttcaagccttgctaatgcaggtgttcgtagtgtctttggtattttccagcaggataatatcagctcagtatttgaccatattcgttcaggacgcgagtggggcttatcaacccttcttagtcattactatctaggaatttacaatacccgtgtagaaagtagtacagttggaaaagaatactaccaacagcttcttacttatttgaaacgttctggctcaaaccaaacggttgccctcaactgcgatgttcttattaacattgatttgaaccaagttttccacctacatagtacaacaaaagagcctatcactgtagtttataaaaaactagctaagaaagatatttcagaagtaaatgcaatcttggatgtagatgaaacagaccatgttctttctcataaactctttgatagcaagtcaacagctgaaacgttcaatatgtctacagatatctttgtcgttgatacaccttggttgattgaacacttggaagaagaagctaaaaaagaacatccagagaaattgcgctatgttttacgggatttggctgtaaaagagggagctttcgcctacgagtacacgggctatctagccaatattcactctgttaaatcttattatcaagcgaatatcgatatgcttgaatcacaaaaattctattctcttttctcaccaaaccaaaagatttatacaaaggtcaaaaacgaagagccaacttactatgctaatacatctaaggtaagcacttctcagtttgcctctggtagtattattgaaggtcaagtagctaattctgttctatcacgtaatattcatgtccataaggatagcttggttaaagatagcctgctcttccctcgtgttgttattggagaaggggctcaggtcgaatatgctatcttggacaaaggggttgaagttgagcctggtgttgtgattcgaggaactgcagaacatccagttgtggttaagaaaggtgctaaagtaacagaggatattcattcatga

SEQ ID NO: 1151 - DNA, 1434 bp, Streptococcus pneumoniae
atgaaaattttatttgtagcagcagagggtgcacccttttcaaaaacaggtggtttgggagacgtcattggcgctcttccaaaatcactggtaaaagctgggcacgaagttgcagtgattttaccctactatgatatggtagaggctaaatttggaaatcagattgaagatgtgcttcattttgaggtgagcgttggttggcgcagacagtattgtggaattaagaaaacagtattaaatggtgtaaccttctactttattgacaatcaatattatttcttccgtggtcatgtttacggtgattttgatgacggagaacgctttgcctttttccaactggctgccattgaggctatggaaaggattgcctttattcctgatcttctccatgttcatgactaccatacagctatgattcctttcttgttgaaggaaaaataccgttggattcaagcctatgaggacattgaaacagttttaaccattcataatttagaattccaaggacaattttcagaaggaatgttgggtgatttgtttggagttggctttgaacgttacgctgatggcacccttcgatggaacaactgtctgaactggatgaaggcaggtattctctatgcgaaccgtgtttcaactgtttcacctagctatgctcatgaaattatgactagtcagtttggatgtaatttggatcagattcttaaaatggagtctggtaaagtatctggtatcgtgaatgggattgatgctgatctttataatcctcagacggatgctcttttagactatcatttcaatcaggaagatttgtctgggaaagccaaaaataaggcaaaattgcaagaaagagttggcttgcctgttagagctgacgttccactggtgggaattgtttctcgtttgacacgtcaaaaaggttttgatgtggtggtcgaaagtcttcaccatatcttgcaagaagatgttcagattgttcttttgggaactggcgatccagcctttgaaggagctttctcatggtttgctcagatttacccagacaagctatcagcaaatatcacttttgatgtcaaacttgctcaggaaatctacgctgcttgtgacctcttcctcatgccaagtcgttttgaaccgtgtggtttgtctcaaatgatggctatgcgttatggaaccttgccattggtccatgaagttggaggcttgcgagatacagtttgcgctttcaatccaatcgaaggaagcggtactggctttagctttgacaatctatctccttattggttaaattggactttccaaacagcattggacttgtatagaaaccatccagacatttggagaaacctacaaaaacaagctatggagagtgacttctcatgggatacagcctgcaagtcataccttgacttgtatcatagtttagttaattaa

SEQ ID NO: 1152 - DNA, 372 bp, Streptococcus pneumoniae
atgtctcaagtaaaaggcttgtgtgttttggatgtagatggaaccttaatcctagaagaagtgattgattttttagggagagaggcaggtcatgaggcggaaatttcgcagattacaagtcgggcaatgcgaggagagttggtctttgaaagcagtttaagaaaaagagtgtccttgttggaaggtcttcctattttggtctttgataacgtcttcaactcaattcatctatcgctaaatgtcccagagttcatctctattctccaaaagaatggcatcctagttgatctggtgtctggtggatttacaccaatagttggagagattagcaaaatcccttggtattgcctatttcactgccaaccagcttga

SEQ ID NO: 1153 - DNA, 330 bp, Streptococcus pneumoniae
ttggagagattagcaaaatcccttggtattgcctatttcactgccaaccagcttgaagtcaaagaaggtcttttaacaggaaaattagttggacaaattataagtccccaggtcaaaaaagaaactctggaaaaatggagaaagaaactaaaactttctaaagaaagaacggtggcaatcggtgatggggtcaataatctattaatgttgaagtcggcggagttaggaatcgccttttgtgccaaagaagtgctcaaaaaagaaataccacatcatgttgacaagagggattttttagaagttcttcctttgattgactgtttagaatga

SEQ ID NO: 1154 - DNA, 1116 bp, Streptococcus pneumoniae
atgaagattgtaattgcaccggattcgtttaaggaaagcttgacagctcaacaggtagctgaagcaataaaaagaggcttccaacaatcgatagcagatgtagaatgtctcctctgccctgttggtgatgggggagaaggtactgtagatgctatccgacattctcttgacctaaaagaaaaatggatccaagtgacagacccttctggacaaaaagaagccatgcgctattttcaaaaaggggaactggcactatttgaagtagctgacttggttggtcttggaaaaattccgctagagaaacgaaatccacttcaaatccaaacttgtggtattggagagttgattctccatctcatttctaaagggattaaagatatttatatcggtgttggtggcacggccagtaatgatggaggactggggattgctgctggtttaggttatcaattttatgatagggatggaaatgtcttgcctgcttccggtcaatccttattaaacttagcttctgtttcaacagaaaatcgctataaaattcctgaaggtgttcaaattcatattttagcagatgtcgtgagtcccttatgtggtcatcaaggtgcgacttacacttttggcaatcaaaaaggtctacatccgactatgtttgcagtcgtagatcaggcgatccaagatttttatgaaaaattctcacctgcaacattagaaattaaaggagcaggagcaggtggaggccttgctggtggtttgtgtgcctttgctcaggcaagtatcgtgtctggaattgatacctgcttggacttaatcaactttgataagaaagtttcagatgctgacttggttgttgttggagaaggaagacttgatagtcaaagctttgctgggaaagcgcctataggtgttgcaaaaagaacccctgttggagttcctgttattgctatttgcggtagtcttgctgaagatttacctcccctaccatttgaaaatatccaagctgtcttttctattttggagaaaagtgaacctttagaagatagtttgaaaaatgccagtctctatctggagcgcacggctgccaatattgggcacttattaaatatgtgcaagatttag

SEQ ID NO: 1155 - DNA, 447 bp, Streptococcus pneumoniae
atgacagatttatcaaaacaattacttgaaaaagctcatggtgggttaaaaataaatccggatgagcaaagacgctatcttggtacttttgaggaaagagttcttggatatgtagatattgacacagcaaatagccctcagttagaaaaaggctttttatttattttagaaaaccttcaggaaaaagcagagccactatttgtgaagatttcaccaactatcgaatttgataagcaagttttctacttaaaagaagcaaaagaaactgatagtcaagccaccatagtatctgaagagcatattacttctccttttggcctggttattcatagcaatgcaccagttcaagtagaagaaaaagaccttcgacttgcttttccaaaactttgggaagttaaaaaggaagaaccagccaaaacatccttatggaagaaatggtttagctaa

SEQ ID NO: 1156 - DNA, 1305 bp, Streptococcus pneumoniae
atgtcaattattactgatgtttacgctcgcgaagtcctagactcacgcggtaacccaacacttgaagtagaagtttacactgaatcaggtgctttcggacgtggtatggttccatcaggagcttctactggtgaacacgaagcagttgaacttcgcgacggtgacaaatctcgttacggtggtcttggtacacaaaaagctgttgacaacgtaaacaacatcattgctgaagctatcattggctacgatgtacgtgatcaacaagctattgaccgtgctatgatcgcacttgacggtactcctaacaaaggtaaattgggtgcgaatgcaatcctcggtgtgtctatcgctgtagctcgtgctgctgctgactaccttgaaatcccactttacagctaccttggtggattcaacactaaagttcttccaactccaatgatgaacatcatcaacggtggttctcactctgacgctccaatcgctttccaagagttcatgatcttgccagttggtgcgccaacatttaaagaagcccttcgttacggtgctgaaatcttccacgcccttaagaaaatccttaaatcacgtggtttggaaactgccgtaggtgacgaaggtggattcgctcctcgtttcgaaggaactgaagatggtgttgaaactatccttgctgcgattgaagctgctggatatgtaccaggtaaagacgtatttattggatttgactgtgcttcatcagaattctacgataaagaacgtaaagtttacgactacactaaatttgaaggtgaaggtgctgctgttcgtacatctgcagaacaaatcgactaccttgaagaattggttaacaaatacccaatcatcactattgaagatggtatggatgaaaacgactgggatggttggaaagctcttactgaacgtcttggtaagaaagtacaacttgttggtgacgacttcttcgtaacaaacactgactaccttgcacgtggtatccaagaaggtgctgctaactcaatccttatcaaagttaaccaaatcggtactcttactgaaacttttgaagctatcgaaatggctaaagaagctggttacactgctgttgtatcacaccgttcaggtgaaactgaagattcaacaatcgctgatattgcagttgcaactaacgcaggacaaatcaagactggttcactttcacgtacagaccgcatcgctaaatacaaccaattgcttcgtatcgaagaccaacttggtgaagtagctgaatatcgtggattgaaatcattctacaaccttaaaaaataa

SEQ ID NO: 1157 - DNA, 468 bp, Streptococcus pneumoniae
tttaaggattttcttaagggcgtggaagatttcagcaccgtaacgaagggcttctttaaatgttggcgcaccaactggcaagatcatgaactcttggaaagcgattggagcgtcagagtgagaaccaccgttgatgatgttcatcattggagttggaagaactttagtgttgaatccaccaaggtagctgtaaagtgggatttcaaggtagtcagcagcagcacgagctacagcgatagacacaccgaggattgcattcgcacccaatttacctttgttaggagtaccgtcaagtgcgatcatagcacggtcaatagcttgttgatcacgtacatcgtagccaatgatagcttcagcaatgatgttgtttacgttgtcaacagctttttgtgtaccaagaccaccgtaacgagatttgtcaccgtcgcgaagttcaactgcttcgtgttcaccagtagaagctcctga

SEQ ID NO: 1158 - DNA, 132 bp, Streptococcus pneumoniae
ttgtatttagcgatgcggtctgtacgtgaaagtgaaccagtcttgatttgtcctgcgttagttgcaactgcaatatcagcgattgttgaatcttcagtttcacctgaacggtgtgatacaacagcagtgtaa

SEQ ID NO: 1159 - DNA, 507 bp, Streptococcus pneumoniae
gtgaagagtttgggtataaacttttacctcttcctccctactcacctgagtacaatcctattgagaaaacatgggctcatatcaaaaagcacctcaaaagggtattaccaagttgcaataccttttatgaggctcttttgtcttgttcttgtttcaattgactatataaattgtctaagcgaaacaaccgataagaattggcacaaaagcgaccgtgtttttgttaccaatacaggaaaaacagttcatagttctatcttgagcaagtctctccagcgagcaaacgaacgccttaaaaaaccaattcccaaacatctgtcccctcacatcttcagacacaccactattagcatcttatcagaaaataaaattcctttaaaaacaatcacggacagggttggtcattccgactctgaagtcactacttccatctacacccacgtcacaaagaacatgaaagatgaagcaatcaatgtactggataaagttatgaaaaagattttttaa

SEQ ID NO: 1160 - DNA, 339 bp, Streptococcus pneumoniae
ttggttgcaggtctaacaaatggtgagttaatcgctccaatgacttacgaagagacgatgacgagcgacttttttgaagcttggtttcagaaatttctcttaccaacattaaacacaccatcggttattattatggataatgcaagattccatagaatggggaagctagaactcttgtgtgaagagtttgggtataaacttttacctcttcctccctactcacctgagtacaatcctattgagaaaacatgggctcatatcaaaaagcacctcaaaagggtattaccaagttgcaataccttttatgaggctcttttgtcttgttcttgtttcaattga

SEQ ID NO: 1161 - DNA, 348 bp, Streptococcus pneumoniae
atgtggtataatcttcttatggcatattcaatagattttcgtaaaaaagttctctcttattgtgagcgaacaggtagtataacagaagcatcacacgttttccaaatctcacgtaataccatttatggctggttaaagctaaaaaagaaaacaggagagctaaaccaccaagtaaaaggaacaaaaccaagaaaagttgatagagatagacttaaaaactatcttactgacaatccagacgcttatttgactgaaatagcttctgaatttggctgtcatccaactaccatccactatgcgctcaaagctatgggctacactcgaaaaaaagaaccacacctactatga

SEQ ID NO: 1162 - DNA, 3276 bp, Streptococcus pneumoniae
atgaaattactttatactgatattcggacttctttgacagaaattctaacaagagaggcagaagagctagttgcagctggcaagcgggtcttctacattgcccccaactctctttcttttgaaaaggaacgcgccgtgctagaatacttgtcccagcaggcttctttttcgattaccgtcacgcgctttgctcaaatggctcgctatctggtcttgaatgatttaccagctaaaactactcttgatgatatcggtcttgggttggccttttacaaatgccttgccgaactcgatcccaaggacttgcgtgtttatggcgctattaagcaggatcctcaattgatccagcagttaattgagctttaccatgagatgaccaaatctcagatgagttttttggacttggagaatttaacagatgaggataagagggcggatttactcttgatttttgagaaagtaacagcctatcttaatcaaggtcagttagcccagggaagtcagttgtcccatttgattgaggctattgagaatgacaaggtaagtagtgattttaatcaaatcgccttggtcattgacggctttactcgtttttctgctgaggaagagcgggttgtggacttacttcacggcaaaggtgttgagattgttatcggggcttatgctagtaagaaagcctataccagtccttttagcgagggcaatctctaccaagccagcgtaaaatttctccatcatctggcttctaaataccaaacgcctgctcaggactgttctcaaactcatgagaagatggatagttttgacaaggcctctcgtttgttggagtcttcttatgacttttcagaactcgctttggatgtcgatgagaaagaccgtgaaaatttacaaatctggtcttgtttgacgcaaaaggaggagttggagctagtagcccgtagtattcgtcagaaattacatgagaactcagacctgagctacaagcattttcgtattctcttgggggatgtagcttcttaccagttatctctcaaaaccatttttgaccagtatcagattcctttttatcttggtagaagcgaagccatggctcatcatcccttgactcagtttgtcgagtctattttagctttaaaacgttaccgttttcgtcaggaggatttgatcaatcttcttagaactgatttgtatactgacctcagtcagtctgatattgatgcttttgagcaatatatccgctatcttggtatcaatggcttgccagcctttcagcaaaccttcaccaaatcccaccatggaaaatttaatcttgagcgtttgaatgtcctccgcctgagaattttagcacctcttgaaaccctctttgccagccgaaaacaaaaggctgaaaacctcctacaaaaatggagtgtctttctaaaagaaggagctgtgactaagcagttacaagatttgacaaccactttggaagctgtagaacaggaaagacaaaccgaagtttggaaggctttctgccatgttttagaacaatttgcgactgtttttgctggttcacaggttagtctggaagacttcctagccttgctccattctggaatgagtttgtcccaataccgtaccattccagcaacagtggacactgttctggtgcagagttacgatttgattgcaccattgactgctgactttgtctatgctattggactaactcaggacaatttaccaaaaatttctcaaaacaccagtcttctgacagatgaagaaaggcaaaacctaaaccaaacgaccgaagaaggcgttcaattactgattgccagcagtgaaaatctcaagaaaaatcgctacactatgctttccttggtcaattctgctcgtaagcagttgttcttgtcggctccaagcctttttaacgaaagtgaaagtaaggaatctgcctatcttcaagagttgatccattttggatttaggcggagagagaagaggatgaatcacaaaggactgtctaaggaggatatggggtcctatcacagtcttttgtctagtctggttgcctatcaccagcagggtgagatgagcgatactgagcaagatttgacttttgtcaaggttctgtcgcgtgtcataggtaaaaaactagatctgcaaggtctggaaaatccagctatcccaaccagtccaagcagcaagaccttaaccaaggacaccttgcaagctctctatcctgccaaacaggagttttacctgtctacgtcgggtttgacagagttctatctcaatgaatacagttatttcctacgctacgttttaggcttgcaggaggaattacgtttgcgtcctgatgcccgtagtcacgggaatttcttgcatcgtatctttgaacgcgccttacagttgcctaatgaagattcctttgaccaacgtctagaacaagctattcaagaaaccagtcaagaacgcgaatttgaagctatttatcaagaaagtttggaagcccagtttaccaaggaagttttgcttgatgttgcacggacgactggacatattctccgacacaatccagccatcgaaaccatcaaagaagaagcaaattttggtggaaaagaccaagcctttattcaattagacaatggacgcagtgtctttgtacgaggcaaggtggaccggattgaccgtttgaaagctaatggagcgataggagtagtagactacaaatccagtctgactcagttccagtttcctcatttctttaatgggctcaattctcagttaccaacctatcttgctgccctaaaaagagaaggggagcagaactttttcggcgccatgtacttggaaatggctgaacctatccaatctctgatggcggtaaaaagtctggcaggagcagtggtagaagccagcaaatctatgaaataccaagggctcttcttggaaaaagaaagcagttatttaggcgaattttataacaaaaacaaggctaatcaactgacagatgaggaatttcagctcctactggactacaatgcctatctttacaagaaagctgctgagaagattttagcaggccggttcgccatcaatccttatactgaaaatggcagaagcattgccccatacgtccagcaacatcaggctattacaggctttgaagccaattaccatctgggccaagcccgtttcctagaaaagttggacctagctgatggcaagcgtctggtcggagaaaaactcaagcaagcttggtttgaaaaaataagagaggagttaaatcgatga

SEQ ID NO: 1163 - DNA, 3651 bp, Streptococcus pneumoniae
atgaagcttattccctttttaagtgaggaggagattcaaaaactgcaagaagcagaagcaaattcgagcaaggaacagaagaaaactgccgaacaaatcgaagctatctacacttctggtcagaatatcctggtctcagcatcggctggttctggaaagacctttgtcatggtagagcgcattctggaccaattggcgcgtggtgtcgaaatttctcaactctttatctcaacctttaccgtcaaggctgcaactgaacttaaagaacgtttagagaaaaaaatcagcaagaaaatccaagaaacagatgatgtcgacctcaaacaacacttgggtcgccagttggcagacctacccaacgctgccatcggaaccatggactctttcacacaaaaattccttggcaaacatggttatctgcttgatattgcacctaatttccgtattttacaaaaccaaagcgagcaacttcttctcgaaaacgaagtctttcatgaggtctttgaagcgcattaccaaggtaaacagaaagagacctttagtcatttgctgaaaaactttgctgggcgtggcaaggacgaacggggtctgcggcagcaagtctataaaatctatgacttcctccaatccaccagtaatcctcaaaagtggctgagtgaatctttcctcaaaggctttgagaaagctgattttaccagtgaaaaagaaaaactgactgagcaaatcaaacaagccctttgggatttggaaagctttttccgttaccatctggataacgatgccaaggagtttgcaaaggctgcctatttagaaaatgttcagttaattctggatgaaattggctccctaaatcaggagttcgatagtcaggcttatcaggcagtacttgcgcgtgttgtcgccatctctaaggagaaaaacggtcgtgctctgactaatgccagccgtaaggctgatttgaagcccctggctgatgcctacaacgaagagagaaagacccagtttactaaactaggacaattatcagaccagatagcgattctcgactatcaagaacgttatcatggagacacttggaaactagctaaaaccttccaatctttcatgagcgattttgtagaggcttatcgtcagagaaaacgacaggaaaatgcctttgaattcgctgatatcagccattacaccattgagattttagaaaatttcccacaagttcgtgagtcttatcaggagcgcttccatgaagtcatggtcgatgagtatcaggataccaaccatattcaagaacggatgctggaattgttgtctaatggccacaatcgctttatggtgggagatatcaagcaatccatctatcgtttccgtcaggcagacccgcagattttcaatgagaaattccaacgctatgcgcaaaatcctcaagaaggcaagctcattctcctcaaggaaaatttccgtagtagttcagaagtgctgtcagcaaccaatgatgtctttgaacgtctcatggaccaagaggtcggcgaaatcaactatgataacaagcaccagcttgtttttgccaataccaaactgactcccaatccagacaacaaggcagaatttctcctctacgacaaggacgatacaggtgaggaagaagagagtcaaacagaaacgaaactaacaggcgaaatgcgcttagttatcaaggagattctgaaacttcatcaagaaaaaggtgttgcctttaaggaaattgcccttctgacctccagccgcagtcgtaatgaccagattctcctcgccctgtctgagtacgggattcctgtcaaaactgacggagagcaaaacaattatctccaatccctagaagtgcaagtcatgctagacactcttcgtgtcattcacaatcccctgcaagactacgccttggttgcccttatgaagtctccaatgtttggttttgatgaggatgagctagcacgtttgtcccttcagaaagcagaggataaagtccacgaaaatctctatgagaaactggtcaatgcacaaaaaatggcaagtagtcaaaaaggcttgattcacacagctctagctgaaaaactaaagcaattcatggatatcctagcttcttggcgcttgtatgccaaaacccactctctctatgacttgatttggaagatttacaacgaccgtttttattatgactatgttggggctttgccgaatggtcctgctaggcaggccaatctctatgccctagcactgcgtgctgatcaatttgaaaagagcaatttcaaaggtttgtcgcgttttattcgtatgattgaccaagtcttagaagcccagcacgatttggcaagcgtggccgtcgcaccgccaaaagatgcagtagagctcatgaccatccacaagagtaaagggctggagtttccttacgtctttatcctcaatatggatcaagatttcaacaagcaagactctatgtcagaagtcattctcagtcgtcagaatggtcttggtgtcaaatatattgccaagatggagacaggggcagtagaagaccactatcctaaaaccatcaaactctccattcctagtctgacctataggcagaacgaagaggaattacagctagcaagctattctgagcagatgcgtttgctgtatgttgctatgacgcgggctgagaaaaagctctatcttgtcggcaagggttctcgtgaaaagctggaatccaaggaatacccagcagccaaaaatgggaaactaaatagcaatactagactgcaagcacggaatttccaagattggctttgggctatcagtaaagtgtttactaaggacaagctcaactttagttatcgttttattggcgaagatcagttgaccagagaagctatcggagagttggaaaccaagagtcctctccaagatagctcccaagcagacaatcgtcagtcagataccatcaaagaagctctggaaatgctgaaggaggtggaagtttataatactcttcaccgcgcagctattgaacttcctagtgttcaaaccccaagtcaaatcaagaaattctacgaaccagttatggatatggaaggtgtcgagattgctggtcaaggtcagtcagtaggcaagaaaatcagcttcgatttgccagatttttcaaccaaagaaaaggtaactggagctgagattggtagcgctactcacgaactcatgcagagaattgacctcagccagcaactaacccttgctagcctaacagaaacactcaaacaagttcaaactagccaagctgtcagagacaagatcaatcttgataaaattcttgctttctttgacacagtactcggtcaggaaattcttgctaataccgaccatctctatcgcgagcaacctttctccatgctcaaacgagaccaaaagagtcaggaagactttgttgtccgtggtatccttgatggctatctgctttacgaaaacaaaattgttctgttcgactacaagacagaccgctatgatgaaccaagtcaactcgtagaccgctatcgtggtcagttagctctatacgaagaggctttatcacgagcctattcgattgaaaatattgaaaaatacttgattttactcggtaaagacgaggttcaagttgtaaaagtataa

SEQ ID NO: 1164 - DNA, 237 bp, Streptococcus pneumoniae
tactcaataaaaatcaaagagcaaactagaaagctagccgcagtcagctcaaaacactgttttgaggttgtggatagaactgacgaagtcagctcaaaacactgttttgaggttgtggatagaactgacgaagtcagtaaccatatatacagcaaggcgaagctgacgtggtttgaagagattttcaaagagtataagttatacttttacaacttgaacctcgtctttaccgagtaa

SEQ ID NO: 1165 - DNA, 192 bp, Streptococcus pneumoniae
ttgaaaatctcttcaaaccacgtcagcttcgccttgctgtatatatggttactgacttcgtcagttctatccacaacctcaaaacagtgttttgagctgacttcgtcagttctatccacaacctcaaaacagtgttttgagctgactgcggctagctttctagtttgctctttgatttttattgagtattag

SEQ ID NO: 1166 - DNA, 1179 bp, Streptococcus pneumoniae
atgacacttccagttagaaaatccctgcacgatgcagttttacaggcttcgaaagcggatacttgggaacaagcgaccaaggaatggaatgaagtttcctttatttttaacggtatcggccgtagcaattgtgtctgtggaaatgccatcaaatacgcttatgaactctttaacggtgtcacaggccaacgcctctttccaattggtagcgactgtgttcgtcattttcatcgattgccccttgaccagcaattggaagaggaagaaaaactgctcagaaaggttgaaaatctaaccagaaaagctcagaaaaaggaaaaaatcaaggtcaataaaagtgactttgacgagcgacttctaaaatggctctgggaaaaaggtgttttcaaacccaatcgtggcaatcaatttgcgcctgagagagactaccagcttttcctagaagtctttcagggaggaagttggaccaaggcggaaccaaagaaaaaggctcggatggaagaagtccttgaaaagtgtatcaaaccctttttacttgggaaatcggatgaccaactctaccttgtcaagctaggcaaggagaaaattgactacgaacaagaactccgtatccaggcagagaaagaacgcaagaagagggataaaatcgccaagcaatatgcagacaatctggttctagccatgggacccgcagagcgtgcttatcaagattactttggctttacagagaccctgactcaagaagaacgcaagtgggaaaaaattctttttggtaaaaatagagcagaacgggctatcaaggccaaacaataccaaaaagagctggaaaaagaccaacgaattgccagtcaggatccaattgaaagaaaacagaaacagacttggctcctcaattcctattttcgtgagcttcctgaagaaaaagctcgattttctaggctcttattagaatatcgaaaaaatggtgaagtacccttttcaactgaatacctgtcagatcatctcatcgactttttctataaaatgaaagcctttgaatttgaaatcgcaccagaacaagtccgagattttctaaaaaaaagcctgcaggaagactatcgctcatcagcacaaggaagctggatagaaggaattctcctcaactgcctcaaaccatttttagaacgattagtgatatga

SEQ ID NO: 1167 - DNA, 333 bp, Streptococcus pneumoniae
atgaaaaacgctcttgtttttcaccaaaatacttttccattattcctccttgaaataaaatttatatatgttacaaagacctttattatattagtgtattatctattatctatagaaaaggcagtataccttaattatactcttaatttacaaaaaagtcttaaaattgagatgcgctttcatactttgttttatattatttgggggtacaataacacctaccatgaaatttacacggtaggtgttactcatatcactaatcgttctaaaaatggtttgaggcagttgaggagaattccttctatccagcttccttgtgctgatgagcgatag

SEQ ID NO: 1168 - DNA, 5898 bp, Streptococcus pneumoniae
atggaaaagtattttggtgaaaaacaagagcgtttttcatttagaaaattatcagtaggacttgtatctgcaacgatttcaagtttattttttatgtctgtattagctagttcatctgtggatgctcaagaaactgcgggagttcactataaatatgtggcagattcagagctatcatcagaagaaaagaagcagcttgtctatgatattccgacatacgtggagaatgatgatgaaacttattatcttgtttataagttaaattctcaaaatcaactggcggaattaccaaatactggaagcaagaatgagaggcaagccctagttgctggtgctagcttagctgctctgggaattttaatttttgctgtttccaagaaaaaggttaagaataaaacggtattacatttagtattggttgcgggaataggaaatggtgtcttagtttcagtccatgctttagaaaatcatcttttgctaaattacaatacggactatgaattgacctctggagaaaaattacctcttcctaaagagatttcaggttacacttatattggatatatcaaagagggaaaaacgacttctgattttgaagtaagtaatcaagaaaaatcagcagccactcctacaaaacaacaaaaggtggattataatgttacaccaaattttgtagaccatccatcaacagtacaagctattcaggaacaaacacctgtttcttcaactaagccgacagaagttcaagtagttgaaaaacctttctctactgaattaatcaatccaagaaaagaagagaaacaatcttcagattctcaagaacaattagccgaacataagaatctagaaacgaagaaagaggagaagatttctccaaaagaaaagactggggtaaatacattaaatccacaggatgaagttttatcaggtcaattgaacaaacctgaactcttatatcgtgaggaaactatagagataaaaatagattttcaagaagaaattcaagaaaatcctgatttagttgaaggaattgtaagagtaaaacaagaaggtaaattaggtaagaaagttgaaatcgtcagaatattctctgtaaacaaggaagaagtttcgcgagaaattgtttcaacttcaacgactgcgcctattccaagaatagtcgaaaaaggtactaaaaaaactcaagttataaaggaacaacctgagactggtgtagaacataaggacgtacagtctggagctattgttgaacccgcaattcagcctgagttgcccgaagctgtagtaagtgacaaaggcgtaccagaagttcaaccagcgttgtccaaagcagttataaccgacaaaggtgagactgaggttcaaccagagtcgccagatactgtggtaagtgataaaggtgaacctgaacaggtagcaccgcttccagaatataagggtaatattgagcaagtaaaacctgaaactccggttgagaagaccaaagaacaaggtccagaaaaaactgaagaagttccagtaaaaccaacagaagaaacaccagtaaatccaaatgaaggtactacagaaggaacctcaattcaagaagcagaaaatccagttcaacctgcagaagaatcaacaacgaattcagagaaagtatcaccagatacatctagcgaaaatactggggaagagtccagtaatcctagtgattcgacaacctcagttggagaatcaaataaaccagaacataatgactctaaaaatgaaaattcagaaaaaactgtagaagaagttccagtaaatccaaatgaaggcacagtagaaggtacctcaaatcaagaaacagaaaaaccagttcaacctgcagaagaaacacaaacaaactctgggaaaatagctaacgaaaatactggagaagtatccaataaacctagtgattcaaaaccaccagttgaagaatcaaatcaaccagaaaaaaacggaactgcaacaaaaccagaaaattcaggtaatacaacatcagagaatggacaaacagaaccagagaaaaaactcgaattaagaaatgtttctgatattgagttgtatagtcagacgaatggaacctacagacaacatgtttcattggatggaattccagagaatacggatacttactttgtcaaggtaaaatcttcagcatttaaagatgtctatataccagtagcttcaataactgaagagaaaagaaatgggcagtcagtttataaaatcacagccaaagctgagaaactccagcaagaactagaaaataaatatgtcgacaatttcaccttctacctcgataagaaggctaaagaggaaaatacaaactttacttcctttagcaacctggtcaaagctataaaccaaaatccctctggaacctatcatttagcggccagcctgaatgctaacgaagtggagcttagtactgatgataaatcctatatcaagggaacctttactggtcagttgattggtgaaaaagatggtaagcattatgctatttacaacttgaaaaagcctctttttgaaaacttgagtggtgctacagtagaaaaactgagtctaaaaaatgttgctatttcagggaaaaatgatattggttcactggcaaatgaagctacgaatggcacaaagattaaacaagttcatgttgatggtgttctggctggagaacgtggtgtcggtggtttgttggctaaggcagaccaatcaagcatcgcagagagcagtttcaagggaagaattgtcaatacctatgaaacgactgattcctacaatattggcggtctggtcggtcatttaacaggaaaaaatgcgtctattgctaaatccaaagcgacagtaaccatttcgtcaaacaccaataggtcagatcagactgtcggtggtcttgcaggtctagtagaccgagacgcacagatccaagatagctatgctgaaggtgatatcaacaatgtcaagcactttggtagagtcgctggagtggcaggcaatttgtgggatcgaacttctggtgatgttaggcatgctggaagtttgaccaatgttctcagcgatgttaatgtaacaaacggaaatgccatcactggataccactatacaggaatgaaggtagctaatacatttagtagtaaggctaatagagttttcaatgtcactttagagaaggatgaggtcgtcagcaaggaatcctttgaagaaagaggaacaatgctagatgcttctcaaattgtaagcaaaaaagcagaaataagtcctctcactctaccaacggtggaacccctctcaacaagtggcaagaaagacagtgatttttctaagatagcccattatcaagctaaccgtgctttggtttataagaacattgaaaaattgttacctttttataataagtcaaccatcgtgaaatacggaaacctggttaaggagaacagtctcttataccaaaaagaactcttatctgcagttatgatgaaggatgaccaagtaatcacagatattgtttccaacaaacagactgcaaacaaactattacttcactataatgaccattcatctgagaaatttgatctcaagtaccagactgattttgccaatctagcagaatataatctaggtaatacgggacttctctacactcctaaccaattcttatatgatcgagactctattgttaaggaagtcttgcctgagttgcagaagcttgattaccagtcagatgctatcagaaagacacttggtatttctccagcagttaagttaaccgagctctatttagaagagcagttctccaaaacaaaacaaaatctgggaggcagcttgaaaaaacttttgtcagcagatgccggtctagctagcgataactcagtcaccagaggctatcttgtagataaaatcaagaataataaggaagccttgctactcggtttaacttatttagaacgttggtataactttaactatggtcaagtgaatgtcaaagacctagttatgtatcatccagacttctttggtaaaggaaatacttccccactagatactctgattgagttaggtaaatctggctttaacaatcttcttgccaagaacaatgtcgatacttatggtatcagtctagccagccatcatggaacgacagatttgtttagcgcacttgaaacttaccgaaaagtctttttaccaaacactagcaacaatgactggtttaaaaaacagaccaaagctttcattgtcgaagaaaaatccactattgcagaggtcaaagccaagcaaaagcaagcaggaactaagtactctatcggtgtttatgaccgaattactagtaatacttggaagtaccggaatatggtcttgcctctccttaccttgccagaaagatctgtatttgtcatctcaaccttgtctagtctaggatttggtgcttacgatcgctaccgtaatagtgaacataaagcaggcaaggacctcaataatttcgttgaagaaaatgcgagtgaaactgccaaacgtcagcgagatcactacgattattggtatcgcattttagataatgagggacgtgaaaaactatatcgtacgattctcctttatgatgcctataagtttggtgatgacacaacatctggaaaagctacagtggaggctaagtttgatagctccaatccagccatgaagaatttctttggtccagttggtaataaggttgttcataatcatcacggtgcctacgcaacaggagatggtgtctactatatgtcttaccgcatgctcgacaaggatggagccattacctatacccatgagatgacccatgattcggatcaagatatttaccttggcggctatggtcgaagaagtggtcttggtcctgagttctttgctaaaggtttattacaagcgccagaccatccatatgatgcgaccattaccattaccattaactctatcttgaaacattcaaaatcagatagcttagaaggatcgcgtctgcaagtcttggatccgacagaaagattccaaaactcagcagatcttcaaaactatgttcacaacatgtttgacctcatctatatgttggaatatctagaagggcaatcgattgttaagaaactgaatgtttctcagaaaatggaagctctcagaaaaatcgagaatcaatatctaacagatcctgctgatggaaatgaggtttacgctactaacgtagtcaaagaattgacagaagaagaggcccgaaacctgaatagttttgatagtttgattgacaataatattctttcagctcgtgagtataaggctggtacatatgagagaaatggctactttactataaaactctttgcaccaatcttttcagcattgagcagtgagaaaggtactcctggagatcttatgggacgaaggatagcttatgaactcttagctgctaaaggatttaaagatggtatggtaccatatatttccaaccaatatgaaggaattgctaaacaaaatggtcagacaatcaacctttacggtaaaaagcaaggattagtgacagataagcttgttttggaaaagatattctctggcaagtatccatcttggacagcctttaaaaaagctatgtatcaagagcgtattgctcagtttgatcatttgactaaagttatttttaaagatccgacaaaaccatggccaagctatggcacaaagactatcaataatgtggatgaattgcaagccctcatggaccaagctgttctcaaggatgctgaaggtccacgttggagtaattataatccagaaatcgacagtgccgttcataagttgaagagagcaatctttaaagcctatcttgaccaaacaaatgattttagaagttcaatttttgagaataaaaaatag

SEQ ID NO: 1169 - DNA, 228 bp, Streptococcus pneumoniae
aaaggtgatgaagaacaaaccaagattcaagcaggaattcctactgataatgaagtaagttatgctcttatttatcagcaggaaactcttcctgcaacaggttcatcaacttctgcgcttacagctttaggcctattagctgttggtagtttagttcttttggttcggaacagttttttgctccctctgaaaagtcatcatttgatggcttttttctatatagggtaa

SEQ ID NO: 1170 - DNA, 852 bp, Streptococcus pneumoniae
atggctactattcaatggtttcctggtcacatgtctaaagctcgtcgacaggtgcaggagaatttaaaatttgttgattttgtgacgattttagtagatgcacgcttgcctctatctagtcaaaatcctatgttgaccaagattgttggtgataaaccaaaactcttgattttaaacaaggccgacttggctgatccagcaatgaccaaggaatggcgtcagtattttgaatcacaaggaatccagacgctagctatcaactccaaagagcaagtgactgtaaaagttgtaacagatgcggccaagaagctcatggctgataagattgctcgccagaaagaacgtgggattcagattgaaaccttgcgtactatgattatcgggattccaaacgctggtaaatcaactctgatgaaccgtttggctggtaaaaagattgctgttgttggaaacaagccaggggtcacaaaaggtcaacaatggcttaaaaccaataaagacctggaaatcttggatacaccggggattctctggcctaagtttgaggatgaaactgttgcacttaagttggcattgactggagctatcaaggatcagttgcttcctatggatgaggttaccatttttggtatcaattatttcaaagaacattatccagaaaagctggctgaacgcttcaaacaaatgaaaattgaagaagaaccgtctgtgattattatggatatgacccgcgccctcggtttccgtgatgactatgaccgtttttacagtctcttcgtgaaggaagttcgtgatggcaaactcggtaactataccttagatacattggaagacctcgatggcaacgattaa

SEQ ID NO: 1171 - DNA, 780 bp, Streptococcus pneumoniae
atggcaacgattaaagaaatcaaagaactccttgtgacagtcaaggagttagaaagccctatttttttagatcttgaaaaggataatcgctcaggagttcaaaaagaaatcagcaagcgtaaaagagccattcaagctgaattagatgaaaatttgcgcttggaatccatgctttcttatgaaaaagaactttataagcaaggattgaccttaattgcaggtattgatgaggttggtcgtggtcctcttgctggtcctgtagtcgctgcggccgttattttacctaaaaattgtaagattaaaggtctcaacgacagcaagaaaattcctaaaaagaaacatctggagattttccaagccgttcaagaccaagccttgtcgattggaattggtatcatagataatcaggtcatcgaccaagtcaatatctatgaagcaaccaaactagccatgcaagaagcaatctcccagctcagccctcaaccagagcatcttttgattgatgccatgaaactggacttgcccatttcacaaacctccattatcaaaggagatgccaactccctctctatcgcagcagcatctatagtagccaaggtaacacgtgatgaattgatgaaagaatacgatcagcagttccctggctatgatttcgctactaatgcaggatatggcacagctaaacatctggaaggcctcacaaaactaggagttaccccaattcatcgaaccagctttgaacccgttaaatcactggttttaggtaaaaaagaaagttaa

SEQ ID NO: 1172 - DNA, 1551 bp, Streptococcus pneumoniae
atggaggaacagtcggaaatagtccgttctaagaaagaattcgcctttgcatctagcactatactatcccaagttggtcgaggaatcattgtcggcctcatcgttggaattatcgtcggatcctttcgtttcttaattgaaaagggattccacctgatacaaggagtttatcaagatcaagggtacttagtgcgcaatctttttgtactggttttgttttatatactcatctgttggctcagtgccaaactaacacggtcagaaaaagatattaaaggctcaggaattcctcaagtcgaagccgaactgaaaggcctcatgtccctcaactggtggggcattctttggaaaaaatatgtgctaggtattcttgctattgccagtggactcatgctgggtcgagaaggacccagtattcaacttggagcagttggtggtaaaggaattgccaagtggctcaaatccagtccagtagaggaacgttccttgattgccagtggagctgcagcaggtttagccgcagcctttaatgctcctattgcagcacttctctttgttgtagaagaagtctatcaccatttttcgcgctttttctgggtctcaactctagcagccagcatcgtagcaaactttgtgtctctactcatgttcggtttgacaccagtattggatatgccagataacattcctcccatgaccctagatcagtattggatatatctcgtcatgggaattttccttggattttcaggttttctctatgagaaagctgtattaaacgttggaagagtttatgacttgattggtcaaaaaatccatttggatagggcttattatcccatcttggcttttatccttatcataccagtcggaatcttcttacctcaaatccttggtggcggaaatcagcttgtcctttctttaactgaacaaaattttagttttcaagttttattagcttactttttgatccgctttatttggagtatgattagctatggaagtggactgccaggaggaattttcctccccattttagctcttggttctttgcttggtgccttagttggtgttatctgtgtcaatcttggacttgtcagtcaagagcaattccctatatttgtcattctaggaatgagtggctattttggatccatatcaaaagctcccttaaccgctatgatcctcgtaactgagatggtaggagatattcgcaacctcatgccacttggtcttgtcactcttgtttcttatattatcatggatttgctcaaaggtacgccagtctatgaagccatgctggaaaaaatgcttccagaagaagtatctagcgaaggagaagttacacttatcgaaataccagtttctgataaaattgctgggaaacaagttcatgaactcaacttaccacacaacgtcctcatcacaactcaagtccataatggcaagagccaaacagttaacggctcaaccagaatgtatctgggtgatatgattcacctggttattccaaaaagtgaaattggaaaagtcaaagatttgttgttgtag

SEQ ID NO: 1173 - DNA, 1071 bp, Streptococcus pneumoniae
atgaaacgtgagattttactggaacgaatcgacaaactaaaacaactcatgccctggtatgttctggaatactaccaatctaagctggctgtgccctacagttttacaaccctgtacgaataccttaaggaatatgaccgatttttcagctgggttttggagtctggtatttcaaacgctgataaaatatccgatattcctttatcagttttggaaaatatgtctaagaaagacatggaatcctttatcctttatctacgtgaacgtcccttgctgaatgctaatacaacaaaacaaggtgtttcacagacaactatcaatcgaaccttatcagcactttctagtctttacaagtatctaaccgaggaggttgaaaacgatcagggggaaccttatttctatcgtaatgtaatgaaaaaagtttcaaccaagaaaaagaaagaaacccttgctgccagagctgaaaatatcaagcaaaaactctttctaggtgatgaaacagaaggttttctaacttatatcgatcaagagcacccacaacagctttcaaatcgagctctctcatcattcaacaaaaataaagaacgagatttagccattattgcccttctcttggcatctggtgttcgcttatctgaagctgttaatctagatctaagagatctcaatctaaaaatgatggttattaatgttactcgaaaaggtggcaaacgtgactcagtcaatgtcgctgcttttgctaaaccttatttagagaattatctggccattcggaatcaacgctataaaacggaaaaaacagatacagccctttttttaactctctacagaggtgttcctaatcgtatcgatgcttctagcgttgagaaaatggttgctaaatactcagaggattttaaagtacgtgtaacaccccataaactgcgccatacgctagcaactaggctctatgatgcgactaaatcacaagttttagtcagtcaccaactaggacatgccagcacacaagtcactgacctctatacccatattgttaatgatgaacaaaagaatgctctagatagtttatga

SEQ ID NO: 1174 - DNA, 990 bp, Streptococcus pneumoniae
atgaaatacattatcaatcattcaaatgacactgcttttaatattgccttggaagaatacgcctttaaacaccttttggatgaggatcaaatcttcctactttggattaacaagccatctatcattgttggtcgtcaccagaacactatcgaagaaatcaaccgtgattatgttcgcgaaaatggtattgaggtagttcgccgtattagtggtggtggagctgtttaccacgatttaaataacctcaactacacgatcatctccaaagaagatgaaaataaggcatttgacttcaagagcttctcaactccggttatcaataccctggctcaactcggggttaaagctgagttcacaggtcgtaatgaccttgagattgatggtaagaagttctgtggcaatgcccaagcctatatcaacggccgtatcatgcaccacggttgcttgctctttgacgttgatttgtcagtcctcgcaaatgcccttaaggtttcaaaagataaatttgaatcaaaaggtgtgaaatccgtccgtgcccgtgtaactaatattatcaatgaattaccaaaaaaaatcacagtcgaaaaattccgtgatttactcttggaatacatgaaaaaagagtacccagagatgactgaatacgtcttttcagaagaagaattggccgaaatcaatcacatcaaggatactaagtttggaacttgggactggaactatggtaaatcacctgaatttaacgtccgtcgtggaaccaaattcactagtggtaaggttgaagtctttgctaacgttactgaatcaaaaatccaagacatcaagatttatggtgacttctttggtattgaagacgttgctgcagtagaagatgtccttcgtggggtgaaatacgaacgcgaagatgttcttaaggcgctaaaaaccattgatatcacacgctacttcgctggtattagccgtgaagaaatcgctgaagcggtagttggataa

SEQ ID NO: 1175 - DNA, 1704 bp, Streptococcus pneumoniae
atggccttagaagtaattatgccaaaagccggcgtggatatgacagaaggacaaatcgtccaatggaataaaaaagtcggagaatttgtaaaagaaggagaaatccttttggaaatcatgactgataaagtcagcatggaattggaagccgaagaagatgggtacttgattgccattctcaaaggagatggtgaaactgtccctgtaacggaagttatcggttaccttggtgaagaaagggaaaacatcccaacagctggagcagcatcgccagaagctagccctgtacctgtagcaagtacctcaaacgatgatggtaatagcgatgatgcttttgatatcgttgtgattggtggaggtcctgctggttatgttgcagccattaaagctgcccaactcggcggtaaggttgcccttgttgagaaatctgaacttggtggaacctgcttaaaccgtggatgtattccaaccaagacctaccttcataacgctgaaattattgaaaatatcggtcatgctgcaaatcgtggtatcgtgattgaaaatcctaacttcactgttgatatggaaaaacttttagaaactaaatctaaagttgttaatactcttgttggtggtgttgcaggacttcttcgtagctacggagttactgttcataaaggaattggtacaatcactaaagacaagaacgtcttggtaaatggttctgaattgcttgaaaccaagaaaatcattcttgctggtggttcaaaagtcagcaagatcaacgtccctggtatggaatctccacttgtcatgactagtgatgacattcttgaaatgaacgaagtgccagaaagccttgttatcatcggtggtggagttgtcggtatcgaactcggtcaggccttcatgacatttggttcaaaagtgactgttatcgaaatgatggaccgtatagttccagctatggatgcggaagtttctaagaaccttcgcttgatccttgagcgtaaaggaatgaccatcttgactggtactaaactgcaagaaatcattgaggaaaatggtcaacttcgtatcaaggttgaaggaaaagacgatatcatcgcaagcaaagctcttctttcaattggtcgtatgccagaccttgaaggtattggagaggttgagtttgaattggatcgtggttgtatcaaggtcaacgaatacatggaaacttcagttccaggcatttatgcaccaggtgacatcaacggtactaagatgttggctcacgcagctttccgcatgggtgaagttgccgctgaaaatgcccttaaaggaaatcatgcagttgccaaattgaatttgactcctgcagccatctacactctccctgaagtagcagcagtaggtttgacagaagaacaagcccgtgagaaatacgatgttgccatcggtaagtttaactttgctgctaacggtcgtgctattgcatctgacgcagctcaaggtttcgtaaaagttatcgctgataagaaatgcggagaaatccttggtgtacacattattggtcctgcagccgcagaattaataaacgaagcatcaagcatcatcgaaatggaaatcactgttgaggaaatgctgaagaccatccacgggcacccaacttactctgaagtgatgtacgaagcgtttgcagatgttctaggaatggccatccattcacctaagaaaaaataa

SEQ ID NO: 1176 - DNA, 1128 bp, Streptococcus pneumoniae
ttggcttcatcgaagccatcgtcgatttcctatttttcagtcgcttttgacgccctttgtatcataaatagaattggagaggtcatggctgatgacaagctaagagcgactcctgcagctagaaagttagcagatgatttagggataaacctctacgacgtttctggctcaggtgcaaacggtcgtgtccacaaagaagacgtggaaacttataaagacacaaacgtggttcgcatttcgccacttgcaaaacgaattgccctcgaacataacattgcttggcaggaaatccaaggaaccggtcatcgtggtaaaatcatgaagaaggatgttttggccctgcttcctgaaaatatcgaaaacgatagcatcaaatctcctgctcagattgaaaaagtggaagaagtccctgataacgtaacaccatatggtgaaatcgagcgtattccaatgacaccaatgcgtaaggttattgcccaacgcatggttgaatcttacttgactgcgccaaccttcaccctcaactatgaagttgatatgactgaaatgttggctcttcgtaagagggttcttgagccaatcatggaagcaactgggaagaagactactgtaacagaccttctttcacttgcagttgttaagtctcttatgaaacatccatacatcaacgcttcattgacagaagatggcaagactattatcactcacaactatgtcaatcttgccatggcagttgggatggataatggattgatgacacctgttgtttacaatgctgagaagatgagtctttcagaactggttgtagcctttaaggatgttattggccgtaccttggatggtaaattggctccaagtgagttacaaaattcaacattcacaatcagtaatttgggaatgtttggtgttcagtcctttggcccgattattaaccaacccaactcagctatccttggtgtcagttcgacaatcgagaagccagttgtcgtcaatggtgaaattgtgattcgcccaatcatgagtttaggattaaccattgaccaccgtgtcgtagatggtatggctggtgctaagtttatgaaggacttgaaagagttgattgaaaccccaatctcaatgttgatttaa

SEQ ID NO: 1177 - DNA, 993 bp, Streptococcus pneumoniae
atggaaacaaaaacaatgtccttccgtgacaccattatccttgctatgtctgaggaaatgcgtcgcgatgaaaatgtgttcttgatgggagaagacgtcggtgtcttcggaggagacttcggtacttctgttggaatgcttgaagaatttggtccagaacgtgtccgtgactgtccgatttctgaagctgccatctctggagcagcagcaggagcagccatgacaggacttcgtccaatcgtcgatatgaccttcatggacttctctgttattgccatggacaatatcgtcaaccaagctgctaaaacacgttacatgtttggtggtaaaggtcaggttccaatgactgttcgttgtgcagctggtaacggagttggctctgccgcccagcactcacaatctctagagtcttggtttactcacattccaggacttaaggttgtggcacctggaacacctgcggacatgaaaggcctgcttaagtcttctatccgtgataacaacccagttattatacttgagtacaagtcagaatttaaccaaaaaggggaagtgccagttgatccagactacacaattccacttggggttggtgaaatcaaacgccaaggaacggatgtaacagttgttacttatggaaaaatgcttcgccgtgtggttcaagctgctgaagaattagcagaagaaggaatttcagttgaaattgttgacccacgtacccttgttccgcttgataaggatatcatcataaactcagtgaagaagactggtaaggttgttctggtcaacgatgcccacaaaacaagtggctatatcggtgaaatttcagctattatttcagaatcagaagcatttgactatctagatgcaccaattcgccgttgtgcaggagaagatgtgccgatgccttatgcacaaaacctagaaaatgcaatgattccaacagttgaaagtatcaaagatgcaatccgaaaaacttataacaaagaatag

SEQ ID NO: 1178 - DNA, 438 bp, Streptococcus pneumoniae
gtgctgggcggcagagccaactccgttaccagctgcacaacgaacagtcattggaacctgacctttaccaccaaacatgtaacgtgttttagcagcttggttgacgatattgtccatggcaataacagagaagtccatgaaggtcatatcgacgattggacgaagtcctgtcatggctgctcctgctgctgctccagagatggcagcttcagaaatcggacagtcacggacacgttctggaccaaattcttcaagcattccaacagaagtaccgaagtctcctccgaagacaccgacgtcttctcccatcaagaacacattttcatcgcgacgcatttcctcagacatagcaaggataatggtgtcacggaaggacattgtttttgtttccattttatctctttctccttagtctgcgtaaatatcttcaaaggctga

SEQ ID NO: 1179 - DNA, 312 bp, Streptococcus pneumoniae
ttgacgatattgtccatggcaataacagagaagtccatgaaggtcatatcgacgattggacgaagtcctgtcatggctgctcctgctgctgctccagagatggcagcttcagaaatcggacagtcacggacacgttctggaccaaattcttcaagcattccaacagaagtaccgaagtctcctccgaagacaccgacgtcttctcccatcaagaacacattttcatcgcgacgcatttcctcagacatagcaaggataatggtgtcacggaaggacattgtttttgtttccattttatctctttctccttag

SEQ ID NO: 1180 - DNA, 969 bp, Streptococcus pneumoniae
atgtcaactttagataaaaatcttttgctagaaatgttccgtaagatggaagaaatccgtcgcatggacttaaaaattgcacaattagtaaagaaagggaaagtgccaggaatgacgcacttttctgttggtgaagaggcagctaacgtgggggctatgttagctctcaatccagatgatctgattacctcaaaccaccgtggacacgggcaagctattgctaaagggattgacctcaacggaatgatggctgaaatccttggtaaatacactggaacctgtaaagggaaaggtggatctatgcatatcgctgaccttgatgctgggaaccttggtgccaatggtatcgtaggtggtggtatggggatcgctgtcggtgcagccctcagtcagcaaatgcaaaataccggtaaaatcgttgtttgcttctttggagatggtgcgaccaatgaaggtgttttccacgaagcagtgaacatggcttctatctggaacctgccagtcattttctattgcattaacaacggttacggtatctctgcggatatcaagaaaatgaccaatatagaacatatccatcaacgtagcgccgcttatggaattcctggaatgttcatcgaagacggtaacaatgtcatcgatgtctatgaaggatttcagaaagctgtagaccatgttcgcagtggcaatggtccagtcttgattgaaagtgtaacttatcgctggcttggtcactcatcatctgaccctggtaaatatcgtacgcgtgaagaagtggaattgtggaaacaaaaagatccaatcgaaaacctccgcaattaccttattgaaaataacattgcaagtgccgaagaattggaagaaatccaagcgcaagtaaaggaagcagtagaagcttctgttaaatttgcagaggaaagcccattcccatcgcttgaatcagcctttgaagatatttacgcagactaa

SEQ ID NO: 1181 - DNA, 1362 bp, Streptococcus pneumoniae
atgtataagacaaagtgtttacgagagaagttagtattatttttaaaaattttcttcccaatcctgatctaccaatttgccaattattctgcctcttttgttgatactgcaatgacaggtcaatacaacactatggacttggctggtgtatctatggcaaccagtatctggaatcctttctttacatttctaacagggattgtgtcagccttggtgcctatcattggtcaccatcttggtcgaggcaaaaaggaagaagttgcgtctgatttttaccaatttatttatttggccttgggcctatctgtggtcttgctggggatggtacttttcttggcaccaacaatcttgaatcatattgggttagaagcagcagtagcggcagtagcggttcgctatctttggtttttatctatcgggattatccccttgttgctctttagcgtcattcgttccttgctggattcgctgggcttgaccaaactgtccatgtacctcatgcttttgttactccctctcaatagcggatttaactatctcttgatttacggtgcctttggtgttccagaactgggaggggctggtgctggtttaggaacatccttggcctactgggtcttgcttgggatttctgttctggttttatttaaacaggagaagctcaaagccttacaccttgagaaacgaattccacttaatatggataaaattaaggaaggagttcgtttaggtctgcctattgggggaactgtcttcgcggaagtggctgtcttttcagtggttggcttgattatggctaagttttcgtccttgattatagctagtcaccagtcagctatgaacttttcaagtcttatgtacgcctttcctatgagtatctcatcggctatggctattgtcgtttcctatgaagtgggagccaagcgatttgatgatgcgaaaacctatattggtctaggaagatggactgccctcatttttgcggccttcaccttaaccttcctttacatttttaggggaaatgtggccagtctttatggtaacgacccaaaatttatcgatttgacagcgcgttttttaacttatagtcttttcttccagttagcagatacctttgcggcgccgcttcagggaattttgcgggggtataaggatacagttattcctttttaccttggtttgcttggttattggggcgtagcaatccctgtggctacgctatttgattccctaacagattttggagcttattcttactggatcggcttgattattagtttgattgtgagcggggcgctctaccgttggcgtttaactgtgattatgaagagatttgaatctttagcaaaatccaaacgctaa

SEQ ID NO: 1182 - DNA, 261 bp, Streptococcus pneumoniae
atgaattattttcgaaaacgtagggagagacaagcgaaatctaatagtggaatttactgtcccgcagctaatcgttccaaaattcaatatgaaactaaagaaaaagctgaccatgcggttcaatatgataacggaggtttagttagaagctattattgtcgtacatgtgcgtgttggcatactacttcaaaatctaataaacctccgctaagtttgaaaaactatggtctgaaactctttggtttagataaatcagaatag

SEQ ID NO: 1183 - DNA, 1269 bp, Streptococcus pneumoniae
atgctactaatcaaaaatggtcgtgtaatggatcctaagtctggtttggatcaagtttgtgatgtcttagttcaagatgggaaaattatcaaaattgcgcctgagatcacggaagaaggagcagaaacgattgatgctactggtcttgtggttgctcctggtttggtcgatattcatgtgcatttccgtgaacctggtcaaacacataaagaagacattcatactggtgccctggcagccgctgcaggtggttttactactgtcgtcatgatggctaataccagtccaaccatttcagacgtggagactttgcaagcagttctccagtcagctgccaaagagaagattaatgtcaagacagttgcgaccattactaaaaactttaatggtaaaaacttgactgactttaaggcgctcttagaagctggtgcggttggtttctctgatgacggtattccgcttgagagcagtaagattgtcaaggaagccatggaggaagccaaaaaactcaatacctttatcagccttcatgaggaagatccaggtttgaacggtgttcttggctttaatgaaaatattgctagagaacatttccatatctgcggtgctactggggtggctgagtacgctatgatggcgcgtgatgtcatgattgcctatgcaactaaagcccatgttcacatccagcatttgtctaaggaagaaagtgttaaagtagtggagtttgctcaggggttaggtgcagaagtcacagcagaagtagcgccacagcatttctctaagacagaagcacttcttttaacacaaggtagcaatgctaagatgaatccaccgcttcgtttggaatcagaccgtcgtgccgttatcgaaggtctcaaatcaggtgtcatcacagttattgcgactgaccacgcgcctcatcatgtagatgaaaaaaatgttgaggatattaccaaagcgccatctggtatgactggcttagaaacatccctgtctctcggcttgacctatttagtagaagctggtgagttgagcttgatggaattacttgaaaaaatgacatacaacccagccaagctttacaactttgaagcaggttacttggctgagaatggtccagcagatatcactatttttgatgccaaggctgaccgccttgtggactcccattttgcttccaaagcagctaattcaccattcatcggtgaaaccttaaaagggcaggttaaatataccatctgtaagggacaaatcgtctatcaagcttga

SEQ ID NO: 1184 - DNA, 465 bp, Streptococcus pneumoniae
atgcctcagttagcgacgatttgctacattgataatgggaaagaactgctcatgctccatcgtaataagaaacccaatgatgtccatgaagggaaatggattggtgtgggtggtaagctagagagaggagagacgccccaggaatgcgcggcgcgtgaaatccttgaagaaacagggctcaaagccaagccagttctaaaaggtgtcatcacttttcctgaatttacaccagatttagactggtacacctatgtttttaaggtgacggagtttgagggcgacttgattgactgcaatgaggggatgctagaatgggttccctatgatgaggttttgagcaagccgacttgggaaggtgaccacacctttgttgagtggcttttagaggataaacccttcttttcagccaagtttgtttatgatggggataaattgttggatacccaagttgatttctatgaataa

SEQ ID NO: 1185 - DNA, 666 bp, Streptococcus pneumoniae
atgaaggagtcagctatggaacactcgtcttggcatgctttgattaaggcgcaattacctgagggttatttcgggaaaatcaatcagtttatggagcaggtctattctcaggggattatttatccacccaaggaaaaggtttttcaggctctcttgacaacactgcttgaagaagttaaggtggtaattctagggcaagacccctatcacggaccaggtcaagcgcagggcttgagtttttctgtacctgactctatcccagctccaccatccttgcaaaatatcttgaaagaattgtcagatgatatcggagttaagaaatctcatgatttgacagcttgggctgagcaaggagtcttgcttcttaatgcttgtttgactgttcctgctggacaggccaatggtcatgctggtcaaatctgggagccttttactgatgctgtgattcaggtggtcaatcatctagatagaccagtcgtttttgtactctggggagcttatgcacgtaagaagaaggccttagttaccaatcctcatcacttgattatcgaatcagcccatccaagtcctttgtcggtttatagaggattttggggttccaagcccttttccaaggccaatgcattcttaaaagagacaggacaagagccaatcgcattggcttag

SEQ ID NO: 1186 - DNA, 603 bp, Streptococcus pneumoniae
atgtctgaagttgattttaatgaagctgttaattatgaatttacatctgacacttgtcaattagcaaatagtatttatcaatctctttttaagttttttgataagaaaaatttctctggcgatttaatttttacttggaaatctccatcattagtcaaagaaggggattatattgggaaaagggattcacaagtagataatcttagagtaataggaaatatatttccgaattatcttactaatcgaaaatatagcctcaatatgaatcgtaatggctgtatgggagattttcctcatgacttttttgatatatacctagatcatgtagcaaaatatgcctacgaacaaaaagttaataatattaaagagtattatcctttaaaaagagcgattttacaccaagagaatgcattgtattttcgatttttttctaattttgacgactttttagaaaaaaattatttaaagactatatggcaagtttctaaagaaactcctttttctgaaatggattttaatatgtttaaaaatatttcagaaaagataatcttcgaaagaggtagtaaaatgcttaatgatttaaaaagtaattataaaaaatag

SEQ ID NO: 1187 - DNA, 714 bp, Streptococcus pneumoniae
ttgttctacaaatttctactcttcgacctcgaccacactcttcttgattttgatgctgctgagaatgtggctttgacccaacttctaaaagaagaaggagttgcggatattcaggcttataaagattattacgttcctatgaacaaggctctctggaaagacttggagctgaagaaaatcagtaaacaagagctggttaacacgcgcttttctcgtttatttgctcattttggacaggaaaaagacggtagttttcttgcccagcgttaccaattttacctcgcccagcagggacaaacactatcgggcgctcatgatctcttggacagcctcattgagcgtgattataacttgtatgctgcgacaaatggcattactgccattcagacaggacgtttggctcaatctggtctagcaccttatttcaatcaagtctttatctcagaacagttgcaaactcaaaagccggatgctcttttttatgaaaagattggccagcaaattgctggatttagtaaagaaaagacgctgatgattggagattctctaaccgccgacattcaaggtggcaataatgcggggattgacactatctggtataatcctcatcacctcgaaaatcacacacaagcccagccgacttacgaagtctattcttaccaagacttgctggattgtttagataaaaatattcttgaaaagatcacattttaa

SEQ ID NO: 1188 - DNA, 228 bp, Streptococcus pneumoniae
ttgatggaaagtattggtcttgttatcgtttcacattccaaacacattgcagaaggtgttgttgaactaattagtaaagtagctaaagatgttccgattacttatgtaggaggaaccgagggcggaggaattggaacgagttttgatcaagtagatagggttgtttccgaaaatccagcagatactttacttgccttttttgacctaggttctgctataaaatgttaa

SEQ ID NO: 1189 - DNA, 2556 bp, Streptococcus pneumoniae
gtgcatcaaatatccttaagaaaaaaggaaagaatgaaaatcaataaaaaatatctagctgggtcagtagcaacacttgttttaagtgtctgtgcttatgaactaggtttgcatcaagctcaaactgtaaaagaaaataatcgtgtttcctatatagatggaaaacaagcgacgcaaaaaacggagaatttgactcctgatgaggttagcaagcgtgaaggaatcaacgccgaacaaatcgtcatcaagattacggatcaaggttatgtgacctctcatggagaccattatcattactataatggcaaggtcccttatgatgccatcatcagtgaagagctcctcatgaaagatccgaattatcagttgaaggattcagacattgtcaatgaaatcaagggtggttatgtcattaaggtaaacggtaaatactatgtttaccttaaggatgcagctcatgcggataatgtccgtacaaaagaagaaatcaatcggcaaaaacaagaacatagtcagcatcgtgaaggagggacttcagcaaacgatggtgcggtagcctttgcacgttcacagggacgctacaccacagatgatggttatatcttcaatgcatctgatatcatcgaagatacgggcgatgcctatatcgttcctcatggagatcattaccattacattcctaagaatgagttatcagctagcgagttggctgctgcagaagccttcctatctggtcgggaaaatctgtcaaatttaagaacctatcgccgacaaaatagcgataacactccaagaacaaactgggtaccttctgtaagcaatccaggaactacaaatactaacacaagcaacaacagcaacactaacagtcaagcaagtcaaagtaatgacattgatagtctcttgaaacagctctacaaactgcctttgagtcaacgccatgtagaatctgatggccttattttcgacccagcgcaaatcacaagtcgaaccgccagaggtgtagctgtccctcatggtaaccattaccactttatcccttatgaacaaatgtctgaattggaaaaacgaattgctcgtattattccccttcgttatcgttcaaaccattgggtaccagattcaagaccagaagaaccaagtccacaaccgactccagaacctagtccaagtccgcaacctgcaccaaatcctcaaccagctccaagcaatccaattgatgagaaattggtcaaagaagctgttcgaaaagtaggcgatggttatgtctttgaggagaatggagtttctcgttatatcccagccaagaatctttcagcagaaacagcagcaggcattgatagcaaactggccaagcaggaaagtttatctcataagctaggagctaagaaaactgacctcccatctagtgatcgagaattttacaataaggcttatgacttactagcaagaattcaccaagatttacttgataataaaggtcgacaagttgattttgaggctttggataacctgttggaacgactcaaggatgtctcaagtgataaagtcaagttagtggatgatattcttgccttcttagctccgattcgtcatccagaacgtttaggaaaaccaaatgcgcaaattacctacactgatgatgagattcaagtagccaagttggcaggcaagtacacaacagaagacggttatatctttgatcctcgtgatataaccagtgatgagggggatgcctatgtaactccacatatgacccatagccactggattaaaaaagatagtttgtctgaagctgagagagcggcagcccaggcttatgctaaagagaaaggtttgacccctccttcgacagaccatcaggattcaggaaatactgaggcaaaaggagcagaagctatctacaaccgcgtgaaagcagctaagaaggtgccacttgatcgtatgccttacaatcttcaatatactgtagaagtcaaaaacggtagtttaatcatacctcattatgaccattaccataacatcaaatttgagtggtttgacgaaggcctttatgaggcacctaaggggtatactcttgaggatcttttggcgactgtcaagtactatgtcgaacatccaaacgaacgtccgcattcagataatggttttggtaacgctagcgaccatgttcaaagaaacaaaaatggtcaagctgataccaatcaaacggaaaaaccaagcgaggagaaacctcagacagaaaaacctgaggaagaaacccctcgagaagagaaaccacaaagcgagaaaccagagtctccaaaaccaacagaggaaccagaagaagaatcaccagaggaatcagaagaacctcaggtcgagactgaaaaggttgaagaaaaactgagagaggctgaagatttacttggaaaaatccaggatccaattatcaagtccaatgccaaagagactctcacaggattaaaaaataatttactatttggcacccaggacaacaatactattatggcagaagctgaaaaactattggctttattaaaggagagtaagtaa

SEQ ID NO: 1190 - DNA, 2490 bp, Streptococcus pneumoniae
ttgcaactagaaatatcaaatagaaagagagtttcgatgaaaattaataagaaataccttgttggttctgcggcagctttgattttaagtgtttgttcttacgagttgggactgtatcaagctagaacggttaaggaaaataatcgtgtttcctatatagatggaaaacaagcgacgcaaaaaacggagaatttgactcctgatgaggttagcaagcgtgaaggaatcaatgctgagcaaatcgtcatcaagataacagaccaaggctatgtcacttcacatggcgaccactatcattattacaatggtaaggttccttatgatgcgattttcagtgaagaattactcatgaaagatccaaactataagctaaaagatgaggatattgttaatgaggtcaagggtggatatgttatcaaggtagatggaaaatactatgtttaccttaaggatgctgcccacgcggataacgtccgtacaaaagaggaaatcaatcgacaaaaacaagaacatagtcaacatcgtgaaggtgggactccaagaaacgatggtgctgttgcctttgcacgttcgcaaggacgctatactacagatgatggttatatctttaatgcttctgatatcatagaggatactggtgatgcttatatcgttcctcatggagatcattaccattacattcctaagaatgagttatcagctagcgagttggctgctgcagaagccttcctatctggtcggggaaatctgtcaaattcaagaacctatcgccgacaaaatagcgataacacttcaagaacaaactgggtaccttctgtaagcaatccaggaactacaaatactaacacaagcaacaacagcaacactaacagtcaagcaagtcaaagtaatgaggatgttgatagccttctgaaacaactttatgccttgccactcagcaaacgacacgtagaatctgatggccttgtctttgatccagcacaaatcacaagtcgaacagctagaggtgttgcagtgccacacggagatcattaccacttcatcccttactctcaaatgtctgaattggaagaacgaatcgctcgtattattccccttcgttatcgttcaaaccattgggtaccggattcaagactagaacaaccaagtctacaaccgactccggaacctagtccaggcccgcaacctgcaccaaatcttaaaatagactcaaattcttctttggttagtcagctggtacgaaaagttggggaaggatatgtattcgaagaaaagggcatctctcgttatgtctttgcgaaagatttaccatctgaaactgttaaaaatcttgaaagcaagttatcaaaacaagagagtgtttcacacactttaactgctaaaaaagaaaatgttgctcctcgtgaccaagaattttatgataaagcatataatctgttaactgaggctcataaagccttgtttgaaaataagggtcgtaattctgatttccaagccttagacaaattattagaacgcttgaatgatgaatcgactaataaagaaaaattggtagatgatttattggcattcctagcaccaattacccatccagagcgacttggcaagccaaattctcaaattgagtatactgaagacgaagttcgtattgctcaattagctgataagtatacaacgtcagatggttacatttttgatgaacatgatataatcagtgatgaaggagatgcatatgtaacgcctcatatgggccatagtcactggattggaaaagacagcctttctgataaggaaaaagttgcagctcaagcctatactaaagaaaaaggtatcctacctccatctccagacgcagatgttaaagcaaatccaactggagatagtgcagcagctatttacaatcgtgtgaaaggggaaaaacgaattccactcgttcgacttccatatatggttgagcatacagttgaggttaaaaacggtaatttgattattcctcataaggatcattaccataatattaaatttgcttggtttgatgatcacacatacaaagctccaaatggctataccttggaagatttgtttgcgacgattaagtactacgtagaacaccctgacgaacgtccacattctaatgatggatggggcaatgccagtgagcatgtgttaggcaagaaagaccacagtgaagatccaaataagaacttcagagcggatgaagagccagtagaggaaacacctgctgagccagaagtccctcaagtagagactgaaaaagtagaagcccaactcaaagaagcagaagttttgcttgcgaaagtaacggattctagtctgaaagccaatgcaacagaaactctagctggtttacgaaataatttgactcttcaaattatggataacaatagtatcatggcagaagcagaaaaattacttgcgttgttaaaaggaagtaatccttcattgttatgtaaggtcaaacttatctaa

SEQ ID NO: 1191 - DNA, 1140 bp, Streptococcus pneumoniae
atgacagaaatgcttaaaggaatcgcagcatctgacggtgttgcagttgcaaaagcatatctactcgttcagccggatttgtcatttgagactattacagtcgaagatacaaacgcagaagaagctcgccttgatgccgctctacaggcatcacaagacgagctttctgttattcgcgagaaagcagtaggtacgctcggtgaagaagcagctcaagtttttgatgctcacttaatggttcttgctgacccagaaatgatcagccaaatcaaggaaactatccgtgcgaagaaagtgaatgcagaagcaggtctgaaagaagttacagatatgtttatcactatctttgaaggcatggaagacaacccatacatgcaagaacgcgcagcggatatccgcgatgtgacaaaacgtgtattggcaaaccttcttggtaaaaaattgccaaacccagcttctatcaatgaagaagtgattgtgattgcacatgacttgacaccatctgatacagctcaattggacaaaaactttgtaaaagcttttgtaaccaacatcggtggacgtacaagccactcagctatcatggcacgtacacttgaaattgcagctgtattaggtacaaacaacatcactgaaatcgttaaagacggtgacatccttgctgttaacgggatcactggtgaggttattatcaacccaactgatgaacaagcggcagaatttaaagcagctggtgaagcttatgcgaaacaaaaagctgaatgggcgctcttgaaagatgctcaaacagtgactgctgacggtaaacacttcgagttggctgctaatatcggtactccaaaagacgttgaaggtgttaacaacaacggtgcagaagctgttggactttaccgtacagagttcttgtacatggattctcaagacttcccaactgaagatgagcagtatgaagcatacaaggctgttcttgaaggaatgaacggtaaacctgttgtcgttcgtacaatggatatcggtggagataaggaacttccttacttcgatatgcctcacgaaatgaacccattccttggattccgtgctcttcgtatctctatctctgagactggagatgctatgttccgcacacaaatccgtgct

SEQ ID NO: 1192 - DNA, 138 bp, Streptococcus pneumoniae
tcagcaccttggccaacaccaagactcataacacccataattgatttaaggttaactgatttacctttgtactcaagagtgatatctgaagcaaatttgctagcagtttgtaccaacaatgttgctggacgtgcgtga

SEQ ID NO: 1193 - DNA, 264 bp, Streptococcus pneumoniae
atggcttctaaagatttccacgtagtggcagaaacaggtattcacgcacgtccagcaacattgttggtacaaactgctagcaaatttgcttcagatatcactcttgagtacaaaggtaaatcagttaaccttaaatcaattatgggtgttatgagtcttggtgttggccaaggtgctgacgtaactatctcagctgaaggtgcagatgcagatgacgctatcgctgcaatctcagaaacaatggaaaaagaaggattggcataa

SEQ ID NO: 1194 - DNA, 219 bp, Streptococcus pneumoniae
atggtaaccgtttattctaaaaacaattgtgtccaatgtaaaatgaccaagcgtttcttggacagtaataatgtctcttatcgtgaaatcaatcttgatgagcaacctgagtacgtcgatcaagttaaagagctcggttttagcgcagctcctgttatccaaacaccaactgaagtcttttcaggtttccaaccaggaaaactgaaacaattagcataa

SEQ ID NO: 1195 - DNA, 2160 bp, Streptococcus pneumoniae
atgggattaaaacatcttgaagacgtgacttacttccgtcttaataacgaaattaaccgtcctgttaatggacaaatcatgcttcataaagataaggaagccttggatgctttctttaaagaaaatgtagttccaaacactatggtttttgattcaatcaaagacaaaatcaattacctcattgaacacaactacatcgaaacagcctttatcaagaaataccgtccagagttcttggaagaattggctcaatttatcaaagaccaaaacttccaattcaagtcattcatggcagcttataaattttacaatcaatatgccttaaagactaatgacggtgaatactatcttgaaaatatggaagaccgtgtcttcttcaacgccctttatttcgctgatgggaatgaagctgttgcaatcgatattgccaatgaaatcatccaccaacgctaccaacctgctactccttccttcttgaatgctggacgtgctcgtcgtggggagttggtatcttgtttcctaatccaagtgacggatgatatgaactctatcggacgttctatcaactcagctcttcaactttcacgtattggtggtggtgtgggaattaccctcagcaaccttcgtgaagctggtgcacctatcaaaggctatgaaggagctgcttcaggtgtcgttcctgttatgaagctttttgaagacagcttctcttactccaaccaattggggcaacgtcaaggtgctggtgttgtctacctcaacgtctttcacccagatatcatcgctttcctttcaactaagaaagaaaacgctgatgaaaaagtacgtgtcaagactctgtcacttggtgttgtagtacctgataaattctacgaattggctcgtaaaaatgaagaaatgtacctcttcagcccttactctgtagaaaaagaatacggtgtgccattcaattacatcgacattactgaaaaatacgatgaattggtcgcaaatccaaatattcgcaagacaaaaatcaaggcgcgggatttggaaactgaaatctctaaattgcaacaagagtctggctatccttatgtagtcaacatcgatacggctaaccgtgcaaatcctgttgatggaaagattatcatgagtaacttgtgctctgagattcttcaagttcaagaaccaagcttgatcaacgatgctcaagaattccttcaaatgggaacagatgtttcatgtaacctgggttcaaccaacgtggttaacatgatgacttcacctgattttggtcgttctatccgtgctatggttcgtgcccttactttcgttacagatagttcacatatcgtagctgtaccaacgattgaccatggaaatagccaagcccacacctttggtctcggtgccatgggactgcacagctaccttgcccaacaactcattgaatatggttcacctgagtctgttgaatttacaagcatctactttatgcttatgaactactggaccttggtagagtcaaacaatattgcgcgtgaacgtggtattaccttccacaactttgaaaaatcagactatgctaacggaagttactttgacaagtatgtaactggtgaatttgttccaacatcagaccgtgttaaagaactcttcaaaaatgtttttatccctggtgttgctgattgggctgaacttcgcgacaaggttcaagaagatggtctttaccaccaaaatcgccttgctgtagcgccaaatggttctatcagctatatcaacgacgtttctgcttctatccacccgattacgcaacgtatcgaagaacgccaagagaagaaaattggtaaaatctactaccctgctgctggcttgtctacagaaaccattccttactacacttctgcctacgatatggatatgcgtaaagtcatcgatgtttacgctgctgcgactgaacacgtggatcaaggactttcactcaccctcttcatgcgtagtgacattccaaaaggcctttacgaatggaagagggaaaataaacaaacgacacgtgacttgtccatccttcgtaactatgcctttaacaagggaatcaagtctatctactacgtccgtacctttacagatgacggtggagaagtcggcgccaaccaatgtgaaagctgtgtgatttag

SEQ ID NO: 1196 - DNA, 189 bp, Streptococcus pneumoniae
tttgtcgatgacatcttcgatggcattccagttaatggctttgtagtaagtttccatttaaaatctctttctgtgtttagtattgcgaactcacaattatttctactttaccataattctataggagtatcgcacaaaaagtcggaagcccgacttttaaaatgttacataaattatgttatgacatag

SEQ ID NO: 1197 - DNA, 963 bp, Streptococcus pneumoniae
atggaaacttactacaaagccattaactggaatgccatcgaagatgtcatcgacaaatcaacttgggaaaaactgacggagcaattttggctcgatacacgtattcccttatcaaacgacttggatgactggagaaagctatctaacaaagagaaagacttggtcggaaaagtttttggtggtttaacccttcttgacactatgcaatctgaaactggggttcaagcccttcgcgcagacatccgtacaccacatgaggaagctgttttcaataacatccaatttatggaatctgtccacgctaaatcttactcatcaatcttttctaccttgaatactaaggctgagattgaagaaattttcgaatggaccaataccaatccttacctacaaaagaaggctgagattgtcaacgaaatctacctaaacggcagcccacttgaaaagaaagttgccagcgtcttcctcgaaaccttcctcttctactctggtttcttcactcccctctactatctcggtaacaacaaactagccaacgttgcagaaatcattaaattgattattcgtgacgagtctgttcacggaacctacattggttacaaattccaacttggtttcaatgaattgcctgaagaagagcaagaaaaactcaaagaatggatgtacgacctactctatactctttatgaaaatgaagaaggctacacagagagtctttatgacggtgttggttggactgaagaggttaaaaccttccttcgctacaatgccaataaagctctcatgaacatgggacaagatccacttttcccagattcagctgaagatgtcaacccaatcgttatgaacggtatttcaacaggaacttccaaccatgacttcttctctcaagtcggaaatggttaccttcttggcgaagttgaagccatgcaagacgatgactataactacggtttagactaa

SEQ ID NO: 1198 - DNA, 762 bp, Streptococcus pneumoniae
atgctcaaacaagaaaaattaaccaaaattttagagatagtaaatagtaaaggaaccataacagttaaacagattatggacgaaatagccgtttcagatatgactgcaaggcgctatttacaggaattagctgataaagatttgctgattcgtgtgcatggtggagctgaaaaacttcgaaccaactcccttttgactaatgagcgatcaaatattgaaaaacaagccctccaaacggcagaaaaacaagaaatagcccattttgcaggcagtctagtagaagaaagagaaactattttcattggaccaggaacaacattagagttttttgcgcgtgagttgcctattgacaatatccgcgtcgtaaccaacagtctacctgtttttctgattttaagcgaacgaaaattaacagatttgattttaataggtggaaattatcgcgatattacaggtgcttttgttggtacattgaccctacaaaatctctctaatctccaattttctaaagctttcgttagctgtaatggtattcaaaacggagctctagctacttttagcgaggaagagggagaggctcaacgcatcgctttaaataattctaataaaaaatatttactcgcagatcatagtaagttcaataagtttgatttttatactttttataatatatcaaatcttgatactattgtttcagattctaaactaagtgattcaatcctttttaagctatctaaacacattaaagtcatcaagccttaa

SEQ ID NO: 1199 - DNA, 252 bp, Streptococcus pneumoniae
atgttcaaagattttatccaatctatttatgaaaaagtttatattataaatttcgaaaaatgctctcaaataccgtgtttgacgagtgaagaattgaaaagtcttggaaaatggtatgtctcgactggtaaagaatggatttgtcattcagatgctgatctggaagaatttaaaaatctatttttaaattttatcaatcctgaagaatgggatactatctcctttgattcagattttatgccgtttcaataa

SEQ ID NO: 1200 - DNA, 1416 bp, Streptococcus pneumoniae
gtgaaaaaaatgacaaaaacacttccaaaagactttattttcggtggcgcaacagctgcttatcaagcagaaggtgctacacatactgatggaaaaggaccagttgcttgggataaatatcttgaggataactactggtacactgccgaaccagctagtgatttttacaatcgatatccagttgacctcaagctagcagaagagtatggtgtcaatggtattcgaatttctattgcttggtcacgtattttcccgactggttacggccaagtaaatgctaaaggtgttgagttttatcataatttatttgcagagtgtcacaaacgtcatgttgagccttttgtaactcttcatcactttgacactccagaagctctccactcaaatggagacttcttaaaccgtgaaaatatcgaacattttgtagactacgctgccttctgttttgaagaatttccagaagtaaactattggacaacctttaatgaaattggaccaatcggtgatggtcaatatttggttgggaaattccctccaggtatccagtacgaccttgccaaagtctttcaatcacaccacaatatgatggtgtctcatgcacgcgcggtaaaattgtacaaagagaaaggctataaaggggaaattggtgttgttcacgccctgcctactaaatatcctctagatcctgaaaatccagcagatgttcgtgcagctgagttggaagatatcatccacaataaattcatcttagacgcaacttatctaggtcgctattcagctgaaaccatggaaggtgtcaaccatatcttattagtcaatggtggtagtttggatcttcgtgaagaagattttacagcattagaagctgcaaaagacttgaatgatttcctaggaatcaactactatatgagtgactggatggaagcctttgatggagaaactgaaattatccataatggtaaaggtgaaaaaggaagctctaagtatcaaatcaaaggtgttggtcgtcgtgtagctcctgactatgtaccacgcacggattgggattggattatctaccctcaaggtttgtatgaccaaatcatgcgcgtgaagaaagattatcctaactataagaaaatctacatcactgaaaatggtcttggatataaagatgagttcgttgataacactgtttacgatgatggtcgtattgattacgtgaaacaacacttggagatcttgtctgatgcgattgcagatggagctaatgtaaaaggttacttcatttggtcattaatggatgtcttctcatggtcaaacggttatgagaaacgttatggtctcttctacgtagattttgaaactcaagaacgttatcctaagaaatcagctcactggtacaagaaagtagcggaaactcagattatagactag

SEQ ID NO: 1201 - DNA, 1695 bp, Streptococcus pneumoniae
atggataagttaataatttttattgagaaaggaaagcctttctttgaaaaattatcgagaaatatatacttaagagcgataaaagatggttttatttccagtatgccagcagtattattctcaagtatttttatactaatagctgctgtgcccaatatttttgggtttaaatggtctgatgaacagttagcttttattttgaaaccttacaactactcaatgggaattttagctctcttagtagctgggacaactgcaaaatcgttaacagattcagttaatacacgtagtatggagaaaaccaaccaaatcaactacatgtcaacttttttagcagctgttgttggattgttaatactggcagctgatccaattgaaggtggatttgctaatggtcttttaggtactagaggattacttactgcatttttggcagcttttattacagtaaatatctataaagtatgtattaaaaataatgtaaccattagacttcctgaagaggttccaccaaatattgcacaagtttttaaagatgttattccgtttgccttatctgttctttcaatatatggattggatttaattgttagaaatatttttggtacaaatgtagcagaatctgttggtaaaatattagcccctctattttcagctactgatggttatatcggtttagctattgtatttggtgcttatgctttcttttggtttgttggaattcatgggccatctgttgtagaacctttaattgtagctatcagttatgcaaatatagaagctaatgttcagcttgtgcaagctggtatgcacgcagataaaattttaaatccagttactcaaacttttgttgtaacaatgggtggtactggtgcaacactagtagttccatttatgtttatgtggttatgtaaatcaaaaagaaatagaattgtcggacgtgcgtctgtagttcctactttctttggcgtaaatgaaccaatcctatttggtgctccaattgttttaaatcctatcttctttattccgtttgttactgctcctattatcaatgtttggattatgaaattttttgtagatgttctacaaatgaatagtttcagtattattttaccttggacaacacctgctccaattggtattgttatgggaacggcgctggctccattgtcattcgtcttggctataactttaatcattatcgacactttaatctattatccatttgttaaagtttatgaccatcaaattttagaagaagaacggaaaggaaactcttcatctgaattgaaagaaaaagttgctgcaaacttcaacactgtaaaagcggatgctattcttgaaaaagcgggtgtcgatgcagcacaaaataccatcactgaagaaacaaatgtcctcgttctctgtgctggtggaggtacaagtggactccttgcaaatgctttgaataaggcagcagcagaatacaatgtccctgtgaaagcaacagcaggcggctatggtgctcaccgtgaaatgttgccagagtttgatttggttatccttgctcctcaagttgcttcaaactttgaagatatgaaggcagaaacagataagctcggtattaaacttgctaagacagaaggcgctcaatacatcaaattaactcgtgatggaaaaggtgccctagcattcgtacaagagcaattcgattaa

SEQ ID NO: 1202 - DNA, 318 bp, Streptococcus pneumoniae
atgaatagagaagaagtaacattgttaggttttgaaatcgtagcctatgctggcgatgctcgttcaaaactattggaagccttgaaggctgctgaagctggtgattttgaaaaagcggacgctctggtagaggaagctggtagctgtattgcagaggctcaccacgcgcaaacaagtctattgactaaggaagcttctggtgaggacttagcgtatagtgtgaccatgatgcatggtcaagatcacttgatgacaactatcttgttaaaagacctaatgcaccatttaattgaactttacaagagaggagttaaataa

SEQ ID NO: 1203 - DNA, 837 bp, Streptococcus pneumoniae
atgtatcgaattctaaatccaatgaatcacaatgtctcgcttgtcagaaatgataagggagaagaggtgattgtaattggtaaggggattgcattcggaaagaagaagggggatttgattgctgaaaatcaggttgagaaaatctttcggatgaagaccgaagagtccagagaaaactttatggctcttctcaaagatgttccgcttgattttatcacagtgacctatgaaatcattgataagctatcaaagaaatatcattatccgattcaagagtatctctatgtaaccttgacagatcatatttactgttcttatcaagctctaactcaaggaaggtacaaggatagtaatctgccagatatttccgctaagtatcctgtcgcttttcaaatcgcaaatgaagcttttgaaatttaccgtcagaagctagcagatcattttcctgaggacgaaattattcggattgcttatcatttcattaatgctgaaggtgaaaatgaagtggaacttgtggagtcgattgataagaggaaagaaattctcaggaatgttgaagaagttttaacggactatgcaattcaacgaactaaaaagaataaccatttctatgatcgctttatgatccatttgaattatttcttggattatttagacagatctagagatgataaccaatcacttctggatatggaagatcatattaaacaatcctatccaaaagccttcgagattggttccaagatctatgatgtgattacgcaacatacgggtcttgatttgtataaaagtgaacgagtttatctagttctacatatccaacgtttattgtcataa

SEQ ID NO: 1204 - DNA, 810 bp, Streptococcus pneumoniae
atggaattgactaaatacccttcatctatgcttcttgaccctgagtatggacttccagcaactaaagctcttgatgaaaaagctggtcttctccttgcttatgaaaaaacaggttatgacacaacaagcacaaaacgcttgccagactgcttggatgtttggtctgcaaaacgtattaaagaagaaggtgcagatgcagttaaattcttgctttactatgatgtagatagctcagacgaactcaatcaagaaaaacaagcctacatcgaacgcatcggttctgagtgtgtggctgaagatatcccattcttccttgaaatccttgcttacgatgaaaaaattgcggatgcaggttctgtagaatacgcgaaagtaaaaccacacaaagttatcggcgctatgaaagtcttttcagacccacgctttaacattgatgtcttgaaagttgaagttcctgttaacattaaatatgttgaaggcttcgctgaaggtgaagtagtttatacacgtgaagaagcagcagccttcttcaaagcgcaagatgaagcaacgaacttgccatacatctacttgagtgctggtgtatcagctaaactcttccaagatactcttgtatttgctcatgaatcaggtgcaaactttaacggagttctttgtggccgtgctacatgggcagggtcagttgaagcttacatcaaagatggtgaagcagcagctcgcgaatggcttcgcacaactggatttgaaaacattgatgagctcaataaagttcttcaaacaacagcgacttcatggaaagaacgtgtgtaa

SEQ ID NO: 1205 - DNA, 810 bp, Streptococcus pneumoniae
aatgttacccgagtactttcagaatttggtgattctgttcttgctactggtttagtgggtggcaaacttggtgagtttttggttgaacatatcgatgatcaagtaaagaaagatttcttttctattcagggagaaactcgtaactgtatcgctattctccacggtgacaaccaaacagaagttcttgaaaaaggtcctgaagtattggaacaggaaggtcaagactttttggaacatttcaaaaaactcttggagtcagttgaagtagtagccatctcaggtagtctgccagctggccttccagttgattactatgcgagcttggtagagcttgctaatcaagctggcaagctagtagtcttggactgctctggtgcagcacttcaggcggttcttgaatcaccccataaaccgacagtaatcaaacccaataatgaggaattgtctcagcttctaggaagagaagtttctgaggatttggaggaattaaaagaagtccttcaagaatctttgtttacagggattgaatggattatcgtttcacttggtgccaacggtacttttgccaaacatggtgacactttctacaaggtagatattcctagaattcaggtggtaaatcctgttggatctggagactctactgtggcaggaatttcttcaggacttcttcacaaagaatcggatgcaggattactcatcaaggcaaatgtccttggtatgctcaatgctcaagaaaaaatgactggtcatgtcaacatggccaactatcaagctctatatgatcaattaatagtaaaagaggtataa

SEQ ID NO: 1206 - DNA, 489 bp, Streptococcus pneumoniae
atggatgggttcattgtgactgttaaaatcataggtcacctcttagtcgtggtattctccgcgatcccatttttcaaggaattctgtaaagaagtttgcgtctgtttgttgagcattgtgactttcaaggtgttcaattttcgcaatcaatttcttgttttcttcagatggtttgtattcagcatgaatgaaagcttcgatgatatcacacataagcaattcaccagtaatcttaccaccaaagccgataacgttagcgttcaattgctctttagcataaagggctgttgtcatatcacgaaccaaggcagaacgaacacctggaactttatttacagcgttgttgataccaacaccagtaccacagatacataccccaagatcagcttggccgctagttacagcttcccctacttttttaccaaagattgggtagtgagtccgtgtatggtcatatgtaccaaagtcaatgacttcatatccttttga

SEQ ID NO: 1207 - DNA, 516 bp, Streptococcus pneumoniae
atgagaattgcaattggatgcgaccacatcgtaacagatgaaaaaatggcggtttcagaatttttgaaatcaaaaggatatgaagtcattgactttggtacatatgaccatacacggactcactacccaatctttggtaaaaaagtaggggaagctgtaactagcggccaagctgatcttggggtatgtatctgtggtactggtgttggtatcaacaacgctgtaaataaagttccaggtgttcgttctgccttggttcgtgatatgacaacagccctttatgctaaagagcaattgaacgctaacgttatcggctttggtggtaagattactggtgaattgcttatgtgtgatatcatcgaagctttcattcatgctgaatacaaaccatctgaagaaaacaagaaattgattgcgaaaattgaacaccttgaaagtcacaatgctcaacaaacagacgcaaacttctttacagaattccttgaaaaatgggatcgcggagaataccacgactaa

SEQ ID NO: 1208 - DNA, 426 bp, Streptococcus pneumoniae
atgtctattgttatcggtgcagatgctgcaggtttgagattgaaagaagttgtgaaagacttcttagaaaaagaaaacttccaccttgtggatgttacagctgaaggtcaagactttgttgatgtgactctcgctgttgctgcagaagtaaacaaagaagaacaaaaccttggtatcgtgattgatgcttatggagctggtccatttatggttgcaactaagatcaaaggaatggttgctgcagaagtatctgacgaacgttcagcttatatgactcgtggccacaacaactcacgtatgatcactatgggggcacaacttgttggtgatgaattggctaaaaacatcgctaaaggatttgttaatggtaaatacgacggtggacgtcatcaaatccgggttgacatgttgaacaaaatgggctaa

SEQ ID NO: 1209 - DNA, 291 bp, Streptococcus pneumoniae
acatattgtatactcctttttattttttctatgctggattccagcagtgtattggctgtctttaaaaaacagtcaattagtcctcacaaacataatatactactattgtttgaagaagtcaatagtttgtgtttgtttttgttatttattttttacttttttataaaacttctatctcaaaccctaattcttcaacctgattggcttctaagagacaaacattcttcttatcttctaaatgatctccttcttcaaggaatgttgacaagccagaccatggttcaaaggtaa

SEQ ID NO: 1210 - DNA, 477 bp, Streptococcus pneumoniae
atgccttactttattggtggacatccaggatttaattgtcctctacttgatgatggagtctatgaagattattatctagagtctgagaaagaagagacttgctctgttccacgtcctttcccagaaacaggtatgttggatttccaagatagaagtccatggctagagggacaaaaagaaatagatcttagttatgatcttttcagcacagatgcagtgactttggatgaattgcaatctcgaacaattgcccttcgttctcttaaacatgataagggattgaaagtgcattttgcagaatttccaaacctcatcatctggtcaactttgaacaagggacctttcattacctttgaaccatggtctggcttgtcaacattccttgaagaaggagatcatttagaagataagaagaatgtttgtctcttagaagccaatcaggttgaagaattagggtttgagatagaagttttataa

SEQ ID NO: 1211 - DNA, 621 bp, Streptococcus pneumoniae
  unsure (116): n at each above location is unknown.
gtgcgagaatatcgaacttatgaacaaattgcggctgattttggtattcacgaaagcaactttatccgtcggagccaatgggttgaagtaactcttgttcaaagtggtgttacgtntcaagcactcctctcagctctgaggacacggtatgatatgatgcgacggaagtacaaatcaatcgccataaaaaaagaattagcgaatgattctggtaaaaagaaatgccacgctatgaaggctcaagcgattgtcacaagtcaagggagaattgtttctttggatatcactgtgaactattgtcatgatatgaagttgttcaaaatgagttgcagaaatatcggacaagctggtaaaatcttggctgacagtggttatcaaggactcatgaagatatatcctcaagtacaaactccacgtaaatccagcaaactcaagtcgctaatagctgaagataaagcctataaccatgcgctatctaaggagagaagcaaggttgagaacatctttgccaaagtaaaaacgtttaaaatgttttcaacaacctatcgaaatcatcgtaaacgcttcggattacgaatgaatttgagtgctggtattatcaatcatgaactaggattctag

SEQ ID NO: 1212 - DNA, 321 bp, Streptococcus pneumoniae
ttgacaatattatacttcctgcgaaacaaaatatggtatagtagttctatgaatgatgaagcaagtaaacaactaactgatgcacgatttaagcgtcttgttggtgttcagcgtaccacttttgaagagatgttagctgtattaaaaacagcttatcaacttaaacacgcaaaaggtggacgaaaacctaaattaagcctagaagaccttcttatggccactcttcatatgtgcgagaatatcgaacttatgaacaaattgcggctgattttggtattcacgaaagcaactttatccgtcggagccaatgggttgaagtaa

SEQ ID NO: 1213 - DNA, 303 bp, Streptococcus pneumoniae
atgattaaaattcttgctgcctgcggtgcaggtgttaactcaagtcaccaaattaaaagtgctctagaagaagaactttcaaaccgtggttatgatgttcactgtgatgcagtcatggtgaaagatgtaaacgaagaccttatgaaaggttacgatatctttacaccaatcgctgcaacagaccttggttttgaaccaggtatcccagttatcgaagctggtccaatcttattctgtatcccagcaatgagcgttccagtatttgacaatattatacttcctgcgaaacaaaatatggtatag

SEQ ID NO: 1214 - DNA, 444 bp, Streptococcus pneumoniae
gtgttttgcttagaagcggataatcaagaacaactctttgatcaggtagcaagcttgttggaagaacgagaaattgtcactcctacttatcgtgaagccttgatcacgcgtgaaaagtcatttccaactggtttagatatggaatttctaggaaaggacttgccaaatgtagcgattcctcacacagatattgttcacaatctggctgaaaaagttgtggtcgttcgattagagaaaccggtgactttccataatatgattgcgccaggtaaggaagtagaagtatccttgctcttctttatcatcaataattcaagttcaagtcaaacaaatattctggctcagttgatggactttttcacaggaaatggtcatcttgaagacctatcaaaaatttctgaaccagaaaaactttatgcttacattgctgaagcaaccgcttaa

SEQ ID NO: 1215 - DNA, 1293 bp, Streptococcus pneumoniae
atgaaaagcgacaaaaccatcattagaaagattcatatggaacaattacattttatcacaaaactgctcgatattaaagacccaaacatcaagattctagatatcatcaatatggatacccacaaagaaattatcgctaagctggattatgaggctccatcttgccctgattgtggaagtctaatgaagaaatatgactttcaaaaaccgtctaagatcccttacctcgaaacaactggtatgccttctagaattctccttagaaaacgccgtttcaagtgctatcactgttcaaaaatgatggttgctgagactcccctggtaaagaaaaatcaccaaatccctcgtatcatcaaccaaaaaattgctcaaaagttaattgaaaaaatttctatgactgatattgcccatcagctggccatttcaacttcaactgtcattcgcaagctcaatgactttcactttgagcatgatttttctcggcttccaaagattatgtcttgggatgagtatgccttcactaagggaaagatgagtttcattgcgcaagattttgataatcttaatattatcactgttcttgaaggcagaacacaagctgtcatccgaaatcactttcttcgctacgatagagccgttcgttgtcaagtgaaaatcattacgatggatatgtttagtccttactatgacttggctaaacagctttttccgtgtgctaaaatcgttctagatcgtttccatattatccaacatctcagccgtgccatgagtcgttttcgtgttcaaattatgaatcagtttgaacgaaaatctcatgaatacaaggctatcaaacgttactggaaactcatccaacaggatagtcgtaaattgagcgataaacgtttttatcgccctacttttcgcatgcacttaacaaataaagaaattcttgacaagattttaagctattcagaagacttgaaacaccactatcagatctatcaactcttactttttcactttcagaacaaagaccctgagaaatttttcggactcattgaggacactctgaagcaggttcatcctatttttcagactgtctttaaaacctttctaaagaacaaagaaaaaatcgtcaacgctcttcaattaccttattccaacgcaaaattggaagcgaccaataatctcatcaaacttatcaaacgaaacgcctttggatttcggaactttgaaaacttcaaaaaaaggatttttatcgctctgaacatcaaaaaagaaaggacgaattttgtcctttctcgagcttag

SEQ ID NO: 1216 - DNA, 189 bp, Streptococcus pneumoniae
ttggctcagatttccatccttcattttgatttcctatctattgacaagcatagtcacactgtctttaatactcttcgaaaatctcttcaaaccacgttagctctatctgcaacctcaaaacagtgttttgagcaacttgcggctagcttcctagtttgctctttgattttcattgagtataaggtatga

SEQ ID NO: 1217 - DNA, 1251 bp, Streptococcus pneumoniae
atgttaagttcaaaagatataatcaaggctcacaaggtcttgaacggtgtggttgtgaatactccactggattacgatcattatttatcggagaagtatggtgctaagatttatttgaaaaaagaaaatgcccagcgtgttcgctcctttaaaattcgtggtgcctattatgccatttcccagctcagcaaggaagaacgtgaacgtggggtagtctgcgcttctgcgggaaatcatgcgcagggagtagcctatacttgtaatgaaatgaaaattcctgctactatctttatgcccattactacgccacaacaaaagattggtcaggttcgcttttttggtggggattttgtaactattaaactagttggagatacctttgatgcctcagccaaagcagctcaagaatttacagtctctgaaaatcgtacctttattgatccttttgatgatgctcatgttcaagcaggtcaaggaacagttgcttatgagattttagaagaagctcgaaaagaatcgattgattttgatgctgtcttggttcctgttggtggtggcggtctcattgccggggtttctacctatatcaaggaaacaagtccagagattgaggttatcggagtagaggcgaatggagcgcgttccatgaaagctgcctttgaggctggaggtccagtaaaactcaaggaaattgataaatttgctgatgggattgctgtgcaaaaggtaggtcagttgacctatgaagcaactcgtcaacatattaaaactttggtaggtgtcgatgagggattgatttctgaaaccttgattgacctttactctaagcaagggatagtcgcagaacctgctggagcggctagtatcgcctctttagaggttttagctgaatatattaaggggaaaaccatttgttgtatcatttctggaggaaataatgatatcaaccgtatgccagaaatggaagagcgtgccttgatttatgatggtatcaaacattactttgtggtcaatttcccacaacgtccaggagctttgcgtgagtttgtaaatgatatcctggggccaaatgatgatatcacacgttttgagtatatcaaacgagctagcaagggaacaggcccagtattaattgggatcgctttagcagataagcatgattatgcaggtttgattcgtagaatggaaggttttgatccagcttatattaacttaaatggtaatgaaacgctttataatatgcttgtctga

SEQ ID NO: 1218 - DNA, 357 bp, Streptococcus pneumoniae
atgaatattaccaatttgttttctatcaagacaggatgtgatgaaactgataggcaactgcaaaaactattttttcagttggatttacaattgggagaattgacagatcaactaagaaaattagattctaattttgttcctcgtagtcaatttgtagacacgttggatttgaatgatgtagaatataaagaaattttaaactattttatcttccatcgtaatgatagtgaagaaagtttggtagaatggttatatgattggatttccacaaatcgttatgaacttcctaaagagttttcgattcgtatggctcataaataccatgaaagtgttactgaagttttcggagatgaataa

SEQ ID NO: 1219 - DNA, 234 bp, Streptococcus pneumoniae
aaaacattaacaaatatagttggtaaatcattaggacctaaatcagctgttagattcggagaagctttatcctatattgaaggtcctcttcgcagaataaatgagacgatagatggcggtttatatcaaatagagcaaatgattgcatctggattgaaagaatcgggtttaaatgactggactgcgaaaactttagcttcagctattcgtgggatattagatgtacttatttag

SEQ ID NO: 1220 - DNA, 267 bp, Streptococcus pneumoniae
ttgtataatgtaattacaccgtcggtaatagtgctagcagaccaaaataaagcagattggtcgtatgatgaaaatactgtaattaacatttatgatgatgctaattttgaagatggtaggttgcatatgacctttgaacaattcttcaaattggcacaaatagctagagaagaaggtcttgaaattcattctccgtttgagagagctggtgcgactaaatctgctcgttatatagcgaaatggattttgagaaataaaaaacattaa

SEQ ID NO: 1221 - DNA, 1023 bp, Streptococcus pneumoniae
atgacagttcaaatggaatatgaaaaagatgttaaagtagcagcacttgacggtaaaaaaatcgccgttatcggttatggttcacaagggcatgcgcatgctcaaaacttgcgtgattcaggtcgtgacgttattatcggtgtacgtccaggtaaatcttttgataaagcaaaagaagatggatttgatacttacacagtagcagaagctactaagttggctgatgttatcatgatcttggcgccagacgaaattcaacaagaattgtacgaagcagaaatcgctccaaacttggaagctggaaacgcagttggatttgcccatggtttcaacatccactttgaatttatcaaagttcctgcggatgtagatgtcttcatgtgtgctcctaaaggaccaggacacttggtacgtcgtacttacgaagaaggatttggtgttccagctctttatgcagtataccaagatgcaacaggaaatgctaaaaacattgctatggactggtgtaaaggtgttggagcggctcgtgtaggtcttcttgaaacaacttacaaagaagaaactgaagaagatttgtttggtgaacaagctgtactttgtggtggtttgactgcccttatcgaagcaggtttcgaagtcttgacagaagcaggttacgctccagaattggcttactttgaagttcttcacgaaatgaaattgatcgttgacttgatctacgaaggtggattcaagaaaatgcgtcaatctatttcaaacactgctgaatacggtgactatgtatcaggtccacgtgtaatcactgaacaagttaaagaaaatatgaaggctgtcttggcagacatccaaaatggtaaatttgcaaatgactttgtaaatgactataaagctggacgtccaaaattgactgcttaccgtgaacaagcagctaaccttgaaattgaaaaagttggtgcagaattgcgtaaagcaatgccattcgttggtaaaaacgacgatgatgcattcaaaatctataactaa

SEQ ID NO: 1222 - DNA, 501 bp, Streptococcus pneumoniae
atgagatgttgggggtgcagttccatgcgtagaatgttaacagcaaaactacaaaatcgttcaggagtcctcaatcgctttacaggtgtcctatctcgtcgtcaggttaatattgaaagcatctctgttggagcaacagaagatccgaatgtatcgcgtatcactattattattgatgttgcttctcatgatgaagtggagcaaatcatcaaacagctcaatcgtcagattgatgtgattcgcattcgagatattacagacaagcctcatttggagcgcgaggtgattttggttaagatgtcagcgccagctgagaagagagctgagattttagcgattattcaacctttccgtgcaacagtggtagacgtagcgccaagctcgattaccattcagatgacgggaaatgcagaaaagagcgaagccctattgcgagtcattcgcccatacggtattcgcaatattgctcgaacgggtgcaactggatttacccgcgattaa

SEQ ID NO: 1223 - DNA, 1701 bp, Streptococcus pneumoniae
atggagaaaatcagtttagaatctcctaagacggggtcggacctagttttggaaacacttcgtgatttaggagttgataccatctttggttatcctggtggtgcggttttgcctttttatgatgcgatatataattttaaaggcattcgccacattctagggcgccatgagcaaggttgtttgcatgaagctgaaggttatgccaaatcaactggaaagttgggtgttgccgtcgtcactagtggaccaggagcaacaaatgccattacagggattgcggatgctatgagcgatagcgttccccttttggtctttacaggtcaggtggcgcgagcagggattgggaaggatgcctttcaggaggcagacatcgtaggaattaccatgccaatcactaagtacaattaccaagttcgtgagacagctgatattccgcgtatcattacggaagctgtccatatcgcaactacaggccgtccagggccagttgtaattgacctaccaaaagacatatctgctttagaaacagacttcatttattcaccagaagtgaatttaccaagttatcagccgactcttgagccgaatgatatgcaaatcaagaaaatcttgaagcaattgtccaaggctaaaaagccagtcttgttagctggtggtggaattagttatgctgaggctgctacggaactaaatgaatttgcagaacgctatcaaattccagtggtaaccagtcttttgggacaaggaacgattgcaacgagtcacccactctttcttggaatgggaggcatgcacgggtcattcgcagcaaatattgccatgacggaagcggactttatgattagtattggttctcgtttcgatgaccgtttgacggggaatcctaagactttcgctaagaatgctaaggttgcccacattgatattgacccagctgagattggcaagattatcagtgcagacattcctgtagttggagatgctaagaaggccttgcaaatgttgctagcagaaccaacagttcacaacaatactgaaaagtggattgagaaagtcactaaagacaagaatcgtgttcgttcttatgacaagaaagagcgtgtggttcaaccgcaagcagttattgaacgaattggtgaattgacgaatggagatgccattgtggtaacagacgttggtcaacaccaaatgtggacagctcagtattatccctaccaaaatgaacgtcagttagtgacttcaggtggtttgggaacaatgggctttggaattccagcagcaatcggtgctaaaattgctaacccagataaggaagtagtcttgtttgttggggatggtggtttccaaatgaccaaccaggagttggctattttgaatatttacaaggtgccaatcaaggtggttatgctgaacaatcattcactcggaatggttcgccagtggcaggaatccttctatgaaggcagaacatcagagtcggtctttgatacccttcctgatttccaattgatggcgcaggcttatggtattaaaaactataagtttgacaatcctgagaccttggctcaagaccttgaagtcatcactgaggatgttcctatgctaattgaggtagatatttctcgtaaggaacaggtgttaccaatggtaccggctggtaagagtaatcatgagatgttgggggtgcagttccatgcgtag

SEQ ID NO: 1224 - DNA, 2037 bp, Streptococcus pneumoniae
atgactgtaaaaattaatacaaaagatggtcaaatcgaactaacagatgaagtgattgcaaccgtcgtaggtggagcagcaactgagatttttggtgtggtcggtatggctagtaaaaatgccctcaaagataatttccaagccctgctaggtaaggaaaattattctaaaggtgtcgtcgtaaaggcagccgaagatggcagtattgcagttgatgtatataccgtgttaagctacggaacaaagattagtgaagtgtcaaaaaacattcaagagcgtgttgcctttagctgtggaaaaccagcttggaattactgctcagactgtaaatgtctacattcaaaatatcaaagttgtaggagaataaccgtgtcaaaaattactactagcttatttcaagaaatggtgcaggctgcatcaactcgcttgaataagcaagctgaatatgtcaattcattaaacgtctttccagttccagatggagatactgggacaaatatgggaatgaccattgaaaatggtgctaaagaagttgcagacaagccagcttctacagttggagaagtagcgagcattcttgccaaagggcttttgatgggtgcgcgtgggaactcaggagtgattacgtctcagcttttccgtggattttcccaagctatcaaggataaagacgagttaacaggtcaagacttggctctggccttccaatcaggtgtggaagttgcctataaggcagtgatgaaacctgttgaaggaacgattttaacagtttctcgtggagctgctatcggtgctaagaaaaaagctgagcaaacagatgacgctgttgaagtcatgcgcgcagccttggaaggtgctaaaacagctctagctaaaacaccagacatgcttccagtattgaaagaagttggcgttgtggactcaggtggtcaaggattggtcttcatctacgaaggtttcctttcagcccttactggcgaatatattgcatctgaggactttgtagcgactcctgccaacatgagtgagatgatcaatgtagagcatcataagtctgtagctggtcacgtagcgactgaggacatcacgtttggttactgtactgaaatcatggtagctcttaagcaaggtccaacctatgctaaagattttgactacgatgaattccgtaactacttggatgagcttggggattctctcctcgttgttaacgatgatgaaattgtcaaagtccatgttcatacagaagatccaggacttgttatgcaagaaggtctcaaatatggtagcttggtcaaggtaaaagttgacaatatgcgtaatcaacacgaagcacaggttgagaaagaagctactcaagttatcaagtcggctgaagaaaaagagtatgctttgattgctgtggtggctggtaaaggtctagcagatatcttctgttctcaaggcgtggattatgttatcgaaggcggtcaaaccatgaacccttcaacagaagactttatcaaggctgttgaacaggtcaatgcccgtaacatcatcttcttgccaaacaacaagaacatcttcatggcagctcaatctgcggcagaagttttggagcaaccagcagtagtggtagaggctcgcactcttcctcaaggtatgacaagtcttcttgcctttgatccaagcaagtccattgaagaaaaccaagagcgtatgacagctgctcttagcgatgttgttagcggaagcgtcacaacagccgtgcgtgatacaacgatcgatggcttagaaatccatgaaaacgataatctaggtatggtggatggaaaaattcttgtgtcaaaccctgatatgcaccaaacattgactgaaaccttgaaacatatgttggatgaagacagtgaaatcgtaaccttctatgtcggtgaagacggaagcgaagaacttgccaatgaaatcgctcaagaaatcgtagaagaattcgaagacgttgaagtcgagattcaccaaggtcaacaacctgtttacccatacctatttagtgtggaataa

SEQ ID NO: 1225 - DNA, 189 bp, Streptococcus pneumoniae
atggctaaagtatgttactttacaggtcgtaagactgtatcaggaaacaaccgttcacacgcgatgaaccaaacaaaacgtgccgtaaaaccaaaccttcaaaaagttactgttcttatcgatggtaaacctaaaaaagtttgggcttcagctcgtgctttgaaatcaggtaaagttgaacgcgtttaa

SEQ ID NO: 1226 - DNA, 246 bp, Streptococcus pneumoniae
gggactatcatatgcggcttttttaggtattttattccaaagtatgtaagcgagtctcgtgtactgtatttggattcagatattgttgtaagaaaatcgatagatgagctgtgggatttggacttgacggctatacccttagctgcagttagagatgatttttatacacataattttaattctggtgttctgttaatcaacgatggcatgtggagagcagaaaatgtcacgcaagacctgatttaa

SEQ ID NO: 1227 - DNA, 198 bp, Streptococcus pneumoniae
gtgaaagaagagaaaaaagcgattgtcttaggtgcagataatgcttatatggataaagttgaaacaacaataaaatctctttgtgttcatcattataatcttaagttttatgtttttaatgatgaccttccgcgagaatggttccaattgatggaaaaaagactagagactttgaatagtgagattgtgaatgtttag

SEQ ID NO: 1228 - DNA, 1545 bp, Streptococcus pneumoniae
atgaatattcaagaagaaattaagaaacgtcgtacctttgccattatctcccacccggacgcggggaaaacaaccatcactgagcagttactctactttgggggtgagattcgtgaggctggtacggtaaaagggaagaaaacagggacttttgctaaatctgactggatggatatcgagaagcaacgtgggatttctgttacttcatctgttatgcaatttgactacgacggcaagcgcgtgaatatcttagacacgccagggcacgaggacttctcagaagatacctatcgtaccttgatggcggtggatgctgcggtcatggtcgtggactctgccaaggggatcgaggctcaaaccaagaaattgtttgaggttgtgaaacatcgtggcattccagtctttacctttatgaacaagctggaccgtgacggtcgtgagcctttggaactcttgcaagaattggaagaaatcttgggcattgctagctaccctatgaactggcctatcgggatggggaaagcctttgagggcttgtatgacctctataaccaacgtttagaactttataaaggggatgagcgttttgctagcctagaagatggagacaaactttttggtagcaatcctttctacgagcaagtcaaggatgacattgagcttttaaatgaagctgggaatgagttttcagaggaagctattctggctggagaattgacgcctgtctttttcggttcagccctgacaaactttggtgtgcagaccttccttgaaatcttcctcaagtttgctccagaaccacatggtcacaagaaaacagatggtgacattgtggatccttatgacaaggatttctcaggctttgtctttaaaatccaagccaacatggatcctcgtcaccgtgaccgtattgcctttgtccgtatcgtatcaggcgaatttgagcgcggcatgagtgtcaatctccctcgtactggtaagggggctaaactatctaatgttacccagtttatggcggagagtcgtgagaatgtgaccaatgccgtggcaggtgatattatcggggtttacgataccggtacttatcaggttggggataccttgacggttggaaaaaacaagtttgaatttgaaccattgccaacctttactcctgaaattttcatgaaagtttctgctaagaatgttatgaagcaaaaatccttccacaaggggattgagcaattggtgcaagaaggagccgttcagctttataagaattaccaaacaggtgagtacatgctgggagctgttggtcaactccagtttgaagtctttaaacaccgtatggaaggcgaatacaatgcggaagtggtcatgagcccaatgggtaaaaagaccgttcgttggatcaagcctgaggacttggatgaacggatgtcgtcaagtcgcaatatcttagccaaagaccgttttgaccaaccagtctttctctttgaaaatgactttgccctccgctggtttgcggacaagtatccagacgtagagttagaggagaagatgtga

SEQ ID NO: 1229 - DNA, 303 bp, Streptococcus pneumoniae
atgaaaattacgcaagaagaggtaacacacgttgccaatctttcaaaattaagattctctgaagaagaaactgctgcctttgcgaccaccttgtctaagattgttgacatggttgaattgctgggcgaagttgacacaactggtgtcgcacctactacgactatggctgaccgcaagactgtactccgccctgatgtggccgaagaaggaacaaaccgtgatcgcttgtttaaaaacgtacctgaaaaagacaactactatatcagggtgccagctatcctagacgatggaggagatgcctaa

SEQ ID NO: 1230 - DNA, 1467 bp, Streptococcus pneumoniae
atgacttttaacaataaaactattgaagagttgcacaatctccttgtctctaaggaaatttctgcaacagaattgacccaagcaacacttgaaaatatcaagtctcgtgaggaagctctcaattcatttgtcaccatcgctgaggagcaagctcttgttcaagctaaagccattgatgaagctggaattgatgctgacaatgtcctttcaggaattccacttgctgttaaggataacatctctacagacggtattctcacaactgctgcctcaaaaatgctctacaactatgagccaatctttgatgcgacagctgttgccaatgcaaaaaccaagggcatgattgtcgttggaaagaccaacatggacgaatttgctatgggtggttcaggtgaaacttcatactacggagcaactaaaaacgcttgggaccacagcaaggttcctggtgggtcatcaagtggttctgccgcagctgtagcctcaggacaagttcgcttgtcacttggttctgatactggtggttccatccgccaacctgctgccttcaacggaatcgttggtctcaaaccaacctacggaacagtttcacgtttcggtctcattgcctttggtagctcattagaccagattggatcttttgctcctactgttaaggaaaatgccctcttgctcaacgctattgccagcgaagatgctaaagactctacttctgctcctgtccgcatcgccgactttacttcaaaaatcggccaagacatcaagggtatgaaaatcgctttgcctaaggaatacctcggtgaaggaattaacccagaggttaaggaaaccattctaaatgccgctaaacactttgaaaaattgggtgctattgtcgaagaagtcagccttcctcactctaaatacggagttgccgtatactacatcatcgcttcatcagaagcttcatcaaacttgcaacgcttcgacggtatccgttacggctatcgcgcagaagatgcaaccaaccttgatgaaatctatgtaaacagccgaagccaaggttttggtgaagaagtgaagcgccgtatcatgctgggtactttcagtctttcatcaggttactacgatgcctactacaagaaggctggacaggtccgtacacttatcattcaagatttcgaaaaagtcttcgcggattacgatttgattttgggtccaactgctccaagtgttgcctatgacttggattctctcaaccatgacccagttgccatgtacttagccgacctattgaccatacctgtaaacttggcaggactgcctggaatttcgattcctgctggattctctcaaggtctacctgtcggactccaattgattggtcccaagtactctgaggaaaccatttaccaagctgctgctgcttttgaagcaacaacagactaccacaaacaacaacccgtgatttttggaggtgacaactaa

SEQ ID NO: 1231 - DNA, 639 bp, Streptococcus pneumoniae
atgaactttgaaacagtcatcggacttgaagtccacgtagagctcaacaccaattcaaaaatcttctcacctacttctgcccacttcggaaatgatcaaaatgccaacactaacgtgattgactggtctttcccaggagttctgccagttctcaataaaggggttgttgatgccggtatcaaggctgctcttgccctcaacatggacatccacaaaaaaatgcactttgaccgcaagaactacttctaccctgataatcccaaagcctaccaaatttctcagtttgatgagccaatcggttataacggctggattgaagtcgagctagaagacggtacgaccaagaaaattggtatcgaacgcgcccacttagaggaagacgctggtaaaaacacccacggtacagacggctactcttacgttgaccttaaccgccaaggggtacctttgattgagattgtatctgaagccgatatgcgttcgccagaggaggcctatgcttatctgacagcactcaaggaagttatccagtatgctggcatttctgacgttaagatggaggaaggttcgatgcgtgtggatgccaacatctccctcgtccttatggtcaagagaaattcggtaccaagactgaattga

SEQ ID NO: 1232 - DNA, 807 bp, Streptococcus pneumoniae
ttgaagaacctcaactccttctcaaacgttcgcaaggggcttgaatacgaagtccaacgccaggctgaaattcttcgctcaggtggtcaaatccgccaagaaacacgccgttacgatgaagctaacaaaacaaccatcctcatgcgtgtcaaggaaggggctgctgactaccgctacttcccagaaccagacctacccctctttgaaatttctgacgagtggattgaggaaatgcggactgagttgccagagtttccaaaagaacgtcgtgcgcgttatgtatctgaccttggtttatcagactacgatgctagtcagttgactgctaataaagtcacttctgacttctttgaaaaagctgttgccctaggtggtgatgccaaacaagtctctaactggctccaaggggaagtcgctcagttcttgaatgctgaaggtaaaacactggaacaaatcgaattgacaccagaaaacttggttgaaatgattaccatcatcgaagacggtactatttcatctaagattgccaagaaagtctttgtccatctagctaaaaatggcggtggcgcgcgtgaatacgtggaaaaagcaggtatggttcaaatttcagatccagctatcttgatcccaatcatccaccaagtctttgccgataacgaagctgctgttgccgacttcaagtcaggcaaacgtaacgccgacaaggcctttacaggattccttatgaaggcaaccaaaggccaagccaacccacaagttgcccttaaactacttgcacaggaattggcgaagttgaaagaaaactag

SEQ ID NO: 1233 - DNA, 1044 bp, Streptococcus pneumoniae
atggctacaatgaaggcagctcgctggcatgcagcgaaagatgttcgtattcaagaaatagaagttcctgaagtacttccgcaccaagtaaaagttgcagttaagttcacaggaatttgtggtactgacctccatgaatttttagatggacctatctttatcccaacagatgagcacgtctattctggtcaaaaagcaccggtaacactgggacatgaattttctggtgaaatcatagaagtcggaagcgatgttacccgtgttaaagttggtgatcgtgttgctgtggaaccaattctagctaaaaataacttagttggtgattataatttggatccaaaccttaattttgtcggtttggctgcagacggtggatttgccaaatattgtgttttagacggtgacttagtacatgtcattccagatagcttgagctatgagcaagctgctcttactgaacccgctgctgttgcagtctatgctgttcgtcaatcttctttgaaggctggcgatacagctgttgtctttggtttaggcccgattggtctattaattgtagaagctcttcgtgcagctggtgcttctaagatttatgctgttgaactatcacctgaacgtcaagcaaaagctgaagagttaggagctatcgttgtccgtccggaagaaggtgaaacagctgttgaagctattcatcgtttaacaaacggtggtgtagatgtttcttatgaagtaacgggtgtgccagtagttttaggacaagccttagctgccgtacataaagcaggtgagtgcatggtggtctctatctgggaacgagaagcaaatattaatccgaatgaatttgcaatccaagaaaagacactaaaaggaatcatcgcttatcgtcatatcttccctaaagtattagaattgatggaacaaggctacttctctgctgaaaaattagttactaagaaaattaaattggaaaatatcgtcgaagaaggctttatcgaattaactcaagataagtcacaaattaaaattttggtagaaccagaataa

SEQ ID NO: 1234 - DNA, 201 bp, Streptococcus pneumoniae
tactcttcgaaaatctcttcaaaccacgtcagcgtcacattaccgtatatatggttactgacttcgtcagttctatccacaacctcaaaacagtgttttgagcagcctgcggctagcttcctagtttgctctttgatttccattgagtatgagaagaaatatagtggatactctttaacattaaccactccacctgactag

SEQ ID NO: 1235 - DNA, 561 bp, Streptococcus pneumoniae
atgattgaagcaagtaaattaaaagctggtatgacctttgaaacagctgacggcaaattgattcgcgttttggaagctagtcaccacaaaccaggtaaaggaaacacgatcatgcgtatgaaattgcgtgatgtccgtactggttctacatttgacacaagctaccgtccagaggaaaaatttgaacaagctattatcgagactgtcccagctcaatacttgtacaaaatggatgacacagcatacttcatgaatacagaaacttacgaccagtacgaaatccctgtagtcaatgttgaaaacgaattgctttacatccttgaaaactctgatgtgaaaatccaattctacggaactgaagtgatcggtgtcaccgttcctactactgttgagttgacagttgctgaaactcaaccatctatcaaaggtgctactgttacaggttctggtaaaccagcaacgatggaaactggacttgtcgtaaacgttccagacttcatcgaagcaggacaaaaactcgttatcaacactgcagaaggaacttacgtttctcgtgcctaa

SEQ ID NO: 1236 - DNA, 390 bp, Streptococcus pneumoniae
atgggaattgaagaacaacttggcgaaatcgttatcgccccacgtgtacttgaaaaaatcattgctatcgctactgcaaaggtagagggtgttcactctttttcaaacagatcagtgtctgataccctttcaaaactttcactcggccgtggcatttatcttaaaaacgtggacgaagaactcacagcagatatctatctctaccttgagtacggagtaaaagttcctaaggtagcggttgctatccagaaagctgtcaaagatgccgtccgtaatatggctgatgtagaactcgctgctatcaatattcacgttgcaggtatcgtcccagataaaacaccaaaaccagaattgaaagatctatttgacgaggacttcctcaatgactag

SEQ ID NO: 1237 - DNA, 423 bp, Streptococcus pneumoniae
atgactagtccactattagaatctagacgccaactccgtaaatgcgcttttcaagctctcatgagccttgagttcggtacggatgtcgaaactgcttgtcgtttcgcctatactcatgatcgtgaatatacggatgtacaacttccagcctttttgatagacctcgtttctggtgttcaagctaaaaaggaagaactagataagcaaatcactcagcatttaaaagcaggttggaccattgaacgcttaacgctcgtggagagaaacctccttcgcttgggagtctttgaaatcacttcatttgacactcctcagctggttgctgttaatgaagctatcgagcttgcaaaggacttctccgatcaaaaatctgcccgttttatcaatggactgctcagccagtttgtaacagaagaacaataa

SEQ ID NO: 1238 - DNA, 570 bp, Streptococcus pneumoniae; identical to SEQ ID NO: 4

SEQ ID NO: 1239 - DNA, 783 bp, Streptococcus pneumoniae
atggaacaattacattttatcacaaaattactagacattaaagaccctaatatccagattttagacatcatcaataaggatacacacaaggaaatcatcgccaaactggactatgaagctccatcttgtcctgagtgcggaagtcaaatgaagaaatattactttcaaaaaccttctaaaattccttatcttgaaacaactggtatgcctactagaattctccttagaaagcgtcgtttcaagtgctatcattgttctaaaattatggttgctgaaacttctatcgtcaagaagaatcatcaaatccctcgtatcatcaaccaaaagattgctcaaaagttaattgaaaagatttctatgactgatattgcccatcagctttccatctcaacttcaactgtcattcgtaagctcaatgattttcactttaaacatgatttttcttgtctttctgagattatgtcttgggatgagtatgcttttacaaagggaaagatgagcttcattgcgcaagattttaacaagctcaatatcatcactgttcttgagggtagaacacaagctatcattcgaaatcactttcttcgctacgatagagttgtccgatgtcgcgtcaaaattattactatggatatgtttagtccttactatgacttggctaaacagcttcgctttcaaatttctaggctcaggctgaaacagtctcccagactgtttcactcccgaatgctaaaatcgtgttggatcgctttcacattgtacaacatcttagccgtgctatga

SEQ ID NO: 1240 - DNA, 834 bp, Streptococcus pneumoniae
ttggaagtacggcttccgaacagggtaatctttcaaaaaagtacgatgagaaacacaaagaaactaagacaatttggaatatttttgcttattattttactatctacctatttaccacaaacaattagattgtatgtgacgatcattttagggttaggagctgatgtctattctcttattttaacaatgggattagtgggaagtttccttctattaatttggaggttaaaaaagaaaaagatgctctttatctttgagaaaaagagctggaactggtcatttgtcttctacttatttgcaacttatgtggtttatcagattctcggtaatttttgggcacgctatgctcatttgattaatcataggaatattcatgatgagtattttaccgtggttctttcaaatggacaaccaacctttttatcgactatcttatcttttgtcctgcctgtaatcatcgatcctgtttttgaggagactcttgatagagggtattttatgaataccttctttcctaagtcaaagtactatttagatgtcatcttatcaggccttatctttgggcttagtcatttgatactatctcacagagatccaattagtttattatattatagtttgattggtttcttttttgcccttgtttatcgttctaccgacaatctgagattaacgattctctgccatagttttttaactttctcaatcatgcaaaacctatctggatttttgtttacaattatatctattatcatttttttagatagtgggaggcaaagaaaaaagtgtttgatatctatcaaacactttttctttttattgttggctctataa

SEQ ID NO: 1241 - DNA, 252 bp, Streptococcus pneumoniae
ttgactttcctgatagagttgttcacatcttatttcaaatcactatattttaagaaggtacttgcaatgacaggtacagaaacatttacagttatttcaactgaggacttggagcaaacttcaggtggtcttgctgtttgggaagatggatatagtagatggttatattatagagaatttgctccttatatgaggcaaggggcacttaattcttatatagatgcttggaagtacggcttccgaacagggtaa

SEQ ID NO: 1242 - DNA, 768 bp, Streptococcus pneumoniae
atgaatattgcaaaaatagtcagagaagcgcgtgagcagagtcgcttgacaaccttggactttgcgacaggcatttttgatgaatttatccaattacatggtgaccgttcttttcgtgatgatggtgcagttgttggtggtattggttggcttggagaccaagctgtaacagtggttggtatccaaaaaggcaagagtttgcaagacaacctcaaacggaattttggccaaccacatccagaaggctaccgaaaggcactgcggttgatgaaacaggctgagaaatttggccgtccagttgtgacctttatcaatacagcaggtgcttatcctggtgtcggagcggaagaacgtggtcaaggggaagctattgctcgcaatctcatggaaatgagtgacctgaaagttcctattatcgccattattatcggtgaaggtggttcaggcggggctctggctctagctgtcgcggaccgtgtctggatgctggaaaattctatctatgccattctcagtccagaaggctttgcttccattttatggaaggacggtactcgcgccatggaagcagcagaactgatgaaaatcacttcgcatgaactgttagaaatggacgtggtggataaggtgatttctgaagtaggactttctagtaaagaactgattaagagtgtcaaaaaagaactccaaacggagctggctagactttcacaaaaaccgctagaagagttgctggaagaacgctatcaacgatttagaaaatactaa

SEQ ID NO: 1243 - DNA, 864 bp, Streptococcus pneumoniae
atggctctatttagtaaaaaagataagtatattcgaatcaatcccaatcgttcggttagggaaaaacctcaagctaagccagaggttccagatgaattattttcccagtgtccaggctgtaagcataccatctatcagaaggatctgggaagtgaacgtatctgtccgcactgtagctatacctttcgtatttctgcccaagaacgcttggctttgacgattgatatgggaaccttcaaagaattgtttacagggattgaaagcaaggatcccttgcatttccctggttaccaaaagaaactggcatctatgcgtgaaaaaacaggtctgcatgaagccgttgtgacaggaactgctcttattaaaggtcagactgtggctcttgggattatggattctaactttatcatggcttctatgggtacggttgtaggtgaaaaaatcactcgtttgtttgagtatgcgactgtcgaaaaattgccagttgtcctattcacagcctctggtggagcccgtatgcaggaaggaatcatgagtctcatgcagatggctaagatctctgcggcggttaaacgccattcaaatgctggtctcttttacctgaccattttgacagatccaacgactggtggtgtgacagcttctttcgctatggaaggcgatatcattctggctgaaccacagagcttggttggttttgctggacgtcgtgtgattgaaaatacggttcgtgaaagcttgcctgaggatttccaaaaggcagaattcctattagaacatggctttgtggatgctattgtcaaaagaagagacttaccagatacgattgctagcctagtcagattgcatggagggagtcctaga

SEQ ID NO: 1244 - DNA, 1368 bp, Streptococcus pneumoniae
atgtttcgaaaaattttaattgccaatcgtggtgaaattgcggttcgtattatccgtgcggcacgtgaattggggattgcgacggtagcggtttattcaactgctgataaggaagctcttcatacgctgttggcagatgaagcagtttgtattggtcctggcaaggcaacagagtcttatctcaatattaatgcagttctatcagctgcagtcttgactgaggcagaagctattcaccctggttttggatttctcagtgaaaattccaaatttgcgaccatgtgtgaagaagtaggtatcaagtttatcggtccatctggtcatgttatggatatgatgggggataagatcaatgcgcgtgctcagatgattaaagcaggtgtgcctgttataccaggttcagatggagaagtgcataactctgaagaagctttgattgttgctgaaaaaattggctatcctgttatgctcaaggcttcagcaggtggaggtggtaaagggattcgtaaggttgaaaaaccagatgacctcgtttctgcctttgaaactgcctctagtgaggccaaggccaattatggcaatggtgccatgtacatagaacgggttatctatccagctcggcacattgaggttcaaatcctaggtgatgagcatggacatgtgattcacttgggtgaacgggattgttctcttcaaaggaataaccaaaaggttttggaagaaagtccctcgattgcaatcggaaaaacgctgcgtcatgaaataggtgctgctgctgttcgagcggcagagtttgttggctatgagaatgcaggaaccattgaatttcttcttgatgaagcaagtagcaatttctatttcatggagatgaatactcgtgttcaggtagaacatccagtaacagagtttgtttcaggtgttgatatcgttaaggaacagatttgcattgcggcaggtcagcctttgtctgttaagcaagaagatattgtcctacgcggtcatgccatcgagtgtcgtatcaatgcagaaaacccagcctttaactttgctccaagtccaggtaagattactaatctctatctgccaagtggtggagttggcttgcgcgtggattcagcagtttatccaggttataccattccgccttattatgatagtatgattgccaaaatcatagtacacggcgaaaatcgttttgacgccttgatgaaaatgcaacgtgccctctatgaattagaaattgaaggagtgcagaccaatgcagatttccagcttgacctcatttcagatcgcaatgtcattgctggggattatgatacttccttcttgatggaaaccttcttacctaaatatcaagaaaaagaataa

SEQ ID NO: 1245 - DNA, 423 bp, Streptococcus pneumoniae
atgatcgatattcaaggaatcaaagaagcccttccccaccgttatcctatgcttctagtggaccgtgtcttggaggtgagcgaggataccattgttgctatcaaaaatgtgaccatcaacgagcctttctttaacggccactttcctcaatacccagttatgccaggtgttctgattatggaagccttggcgcaaactgccggtgtgttggagttatcaaaacctgaaaataaaggaaaactggtcttttacgctggtatggataaggttaagttcaagaagcaagttgtaccaggcgaccaattggttatgacagcgacttttgtaaaacgtcgtggcaccatagctgtggttgaagcaaaggctgaagtggatggcaagcttgcagccagtggtacccttacttttgcaattgggaactaa

SEQ ID NO: 1246 - DNA, 486 bp, Streptococcus pneumoniae
atgaatttaaacgatattaaagacttgatgactcaatttgaccagtcaagtttgagagaattttcttataaaaatgggacggatgagttgcagtttagcaagaatgaagcgagacctgtgcctgaagttgcaactcaagtcgctccagcacccgttctagcaacaccgagtccagtagctcctacatctgctccagcagagactgtagcagaagaagttccagctccagctgaagcaagtgtggctagtgagggaaatcttgtagagagtccacttgttggagtggtttacttggctgctggaccagataaacctgccttcgttacagttggtgatagtgtcaaaaaaggtcaaacattggtaattatcgaagccatgaaagtcatgaatgaaatcccagctcctaaggatggtgtggtaacggaaattctcgtctctaacgaagaaatggttgagtttggtaaaggattggtacgtatcaaatga

SEQ ID NO: 1247 - DNA, 279 bp, Streptococcus pneumoniae
ctgttcttggtaaggaagtacctgtatcatcaaccaagtcttttacaggacatttgctgggggctgcggcgtgcagtagaagctatcgtcaccatcgaagctatgcgtcataactttgtaccaatgacagctgggacaagtgaagtatcagattatatcgaagctaatgtcgtttatggacaaggcttggagaaagaaattccatacgctatttcaaatacttttggttttggaggccacaatgcagttcttgctttcaaacgttgggagaatagataa

SEQ ID NO: 1248 - DNA, 1080 bp, Streptococcus pneumoniae
gtgaaaagaatgaaactaaatcgagtagtggtaacaggttatggagtaacatctccaatcggaaatacaccagaagaattttggaatagtttagcaactgggaaaatcggcattggtggcattacaaaatttgatcatagtgactttgatgtgcataatgcggcagaaatccaagattttccgttcgataaatactttgtaaaaaaagataccaaccgttttgataactattctttatatgccttgtatgcagcccaagaggctgtaaatcatgccaatcttgatgtagaggctcttaatagggatcgttttggtgttatcgttgcatctggtattggtggaatcaaggaaattgaagatcaggtacttcgccttcatgaaaaaggacccaaacgtgtcaaaccaatgactcttccaaaagctttaccaaatatggcttctgggaatgtagccatgcgttttggtgcaaacggtgtttgtaaatctatcaatactgcctgctcttcatcaaatgatgcgattggggatgccttccgctccattaagtttggtttccaagatgtgatgttggtgggaggaacagaagcttctatcacaccttttgccatcgctggtttccaagccttaacagctctctctactacagaggatccaactcgtgcttcgatcccatttgataaggatcgcaatgggtttgttatgggtgaaggttcagggatgttggttctagaaagtcttgaacacgctgaaaaacgtggagctactatcctggctgaagtggttggttacggaaatacttgtgatgcctaccacatgacttctccacatccagaaggtcagggagctatcaaggccatcaaactagccttggaagaagctgagatttctccagagcaagtagcctatgtcaatgctcacggaacgtcaactcctgccaatgaaaaaggagaaagtggtgctatcgtagctgttcttggtaaggaagtacctgtatcatcaaccaagtcttttacaggacatttgctgggggctgcggcgtgcagtagaagctatcgtcaccatcgaagctatgcgtcataa

SEQ ID NO: 1249 - DNA, 732 bp, Streptococcus pneumoniae
atgaaactagaacataaaaatatctttattacaggttcgagtcgtggaattggtcttgccatcgcccacaagtttgctcaagcaggagccaacattgtcttaaacagtcgtggggcaatctcagaagaattgctcgctgagttttcaaactatggtatcaaggtggttcccatttcaggagatgtatcagattttgcagacgctaagcgtatgattgatcaagctattgcagaactgggttcagtagatgttttggtcaacaatgcagggattacccaagatactcttatgctcaagatgacagaagcagattttgaaaaagtgctcaaggtcaatctgactggtgcctttaatatgacacaatcagtcttgaaaccgatgatgaaagccagagaaggtgctatcattaatatgtctagtgttgttggtttgatggggaatattggtcaagctaactatgctgcttctaaggctggcttgattggctttaccaagtctgtggcacgcgaggtcgctagtcggaatatacgagtcaatgtgattgctccaggaatgattgagtctgatatgaccgctatcttatcagataagattaaggaagctacactagctcagattccgatgaaagaatttgggcaggcagagcaggttgcagatttgacagtatttttagcaggccaagattatctaactggtcaagtggttgccattgatggtggcttaagtatgtag

SEQ ID NO: 1250 - DNA, 222 bp, Streptococcus pneumoniae
ttccccatcaaaccaacaacactagacatattaatgatagcaccttctctggctttcatcatcggtttcaagactgattgtgtcatattaaaggcaccagtcagattgaccttgagcactttttcaaaatctgcttctgtcatcttgagcataagagtatcttgggtaatccctgcattgttgaccaaaacatctactgaacccagttctgcaatagcttga

SEQ ID NO: 1251 - DNA, 921 bp, Streptococcus pneumoniae
atgactaaaacagcctttttatttgctggtcaaggtgcccagtatctagggatgggacgggatttctatgatcagtatccgattgttaaagaaacgattgatcgagcgagtcaggtgctcggttatgatttgcgttatctcatcgatacggaagaggacaaactcaatcagacccgctatacgcaaccagccattctagcgacttcggttgctatctaccgtttattgcaagaaaagggctatcagcctgatatggtcgctggtttgtctcttggagaatactctgccttggtggcaagcggcgccttggattttgaagatgcggttgccttggtagctaagcgtggagcctatatggaagaagcggctcctgctgactctggcaagatggtagcagttctcaatacgccagtagaggtcattgaagaagcctgtcaaaaagcttctgaacttggagtggttactccagccaactataacacacctgcacaaatcgtcattgctggagaagtggttgcagttgatcgagcggttgaacttttgcaagaagcaggtgccaaacgcttgattcctcttaaggtgtcaggtccctttcacaccgctctccttgagccagctagccagaaactagctgaaactctagctcaggtaagtttttcagattttacttgtcccctagtcggcaatacagaagctgctgtgatgcaaaaagaggacattgctcagctcttgacgcgtcaggtcaaggaacccgttcgtttctatgaaagtattggggtcatgcaagaagcaggcataagcaactttatcgagattggaccggggaaagtcttgtcaggttttgttaaaaaaattgatcaaactgctcacttagctcatgtggaagatcaagcgagtttagtagcacttttagaaaaatag

SEQ ID NO: 1252 - DNA, 975 bp, Streptococcus pneumoniae
atgaaaacgcgtattacagaattattgaagattgattatcctattttccaaggagggatggcctgggttgctgatggtgatttggcaggggctgtttccaaggctggaggattaggaattatcggtgggggaaatgccccgaaagaagttgtcaaggccaatattgataaaatcaaatcattgactgataaaccctttggggtcaacatcatgctcttatctccctttgtggaagatatcgtggatctcgttattgaagaaggtgttaaagttgtcacaacaggagcaggaaatccaagcaagtatatggaacgtttccatgaagctgggataatcgttattcctgttgttcctagtgtcgctttagctaaacgcatggaaaaaatcggtgcagacgctgttattgcagaaggaatggaagctggggggcatatcggtaaattaacaaccatgaccttggtgcgacaggtagccacagctatatctattcctgttattgctgcaggaggaattgcggatggtgaaggtgctgcggctggctttatgctaggtgcagaggctgtacaggtggggacacggtttgtagttgcaaaagagtcgaatgcccatccaaactacaaggagaaaattttaaaagcaagggatattgacactacgatttcagctcagcactttggtcatgctgttcgtgctattaaaaatcagttgactagagattttgaactggctgaaaaagatgcctttaagcaggaagatcctgatttagaaatctttgaacaaatgggagcaggtgccctagccaaagcagttgttcacggtgatgtggagggtggctctgtcatggcaggtcaaatcgcagggcttgtttctaaagaagaaacagctgaagaaatcctaaaagatttgtattacggagccgctaagaaaattcaagaagaagcctctcgctggacaggagttgtaagaaatgactaa

SEQ ID NO: 1253 - DNA, 225 bp, Streptococcus pneumoniae
atggcagtatttgaaaaagtacaagaaattatcgttgaagaacttggaaaagacgcatcagaagtaacacttgaatcaacttttgatgatttggacgcagattcattggacttgttccaagtaatctcagaaatcgaagatgcttttgatatccaaatcgaagcagaaaatgacttgaaaacagttggtgacttggttgcttacgttgaagagcaagcaaaataa

SEQ ID NO: 1254 - DNA, 567 bp, Streptococcus pneumoniae
ttggtaagtgaaacccttttaaagccagtcgattggtcggatcgatcaacagctgtgttgtttggagatggtgctgctggtgtcttgttagaagctagcgagcaagagcatttcttagctgagagtctcaatagcgatggaagtcgcagcgagtgtttaacttatgggcattcaggtttgcattctccattttcagatcaagaaagtgcagattcatttttgaagatggatggacgcacagtctttgattttgccattcgagatgtagccaagtctatcaagcagactattgatgaatctcctatagaggtgacagacttggattatctgctacttcatcaagccaatgaccgtattttggataagatggctagaaaaattggtgttgaccgagccaaacttccagccaatatgatggaatatggcaataccagtgcagccagtatcccgattttactttcagagtgtgtagaacaaggtctcatccctttagatggtagccagactgttcttctatcaggcttcggtggaggcttgacctggggcacgctcattcttacaatttag

SEQ ID NO: 1255 - DNA, 399 bp, Streptococcus pneumoniae
atggcttttgcaaaaataagtcaggttgctcattatgtgccagagcaagtggttacaaatcacgacttggctcagattatggataccaatgatgagtggatttcaagtcgaacgggaatacgacaaaggcatatttcaagaacagaatctaccagtgatttggctacagaggttgctaagaaactgatggcaaaagctggaataacaggagaagaactggattttatcatcctagctaccattactccagattcgatgatgccctctacagctgctcgtgttcaagctaatattggtgctaataaaacctttgcttttgacttaaccgcggcttgcaagggatttgtatttgctctttcaactgctgaaaagtttatcgcttctggtcgctttcaaaaa

SEQ ID NO: 1256 - DNA, 198 bp, Streptococcus pneumoniae
ttgcaaaagccattatttcaaatcctccaaaaattggtaaagattagtcaaacctttacccatgacagcaatttcttcctcgctcatgccatcaataattttttctaccatggccttgtggaagcgtttatgcagtctatgaatcaagcgacccttctttgtcaaatgcagatgcaccacacgacgatcctgttctga

SEQ ID NO: 1257 - DNA, 435 bp, Streptococcus pneumoniae
atggactaccaacgaatcaatgaatatttaacatctatatttaacaatgtccttgtaattgaggaagtgaacttgagaggtagtcgttttaaggatatctccatcaaagaaatgcatacgattgatgtcatcggtaaggctccagacgtgactccaagtcaagtgtcaaaagagttgatggtaactcttggaactgttacgacaagtttgaacaatttagagcgtaagggctacattgagcgagttcggtcagaacaggatcgtcgtgtggtgcatctgcatttgacaaagaagggtcgcttgattcatagactgcataaacgcttccacaaggccatggtagaaaaaattattgatggcatgagcgaggaagaaattgctgtcatgggtaaaggtttgactaatctttaccaatttttggaggatttgaaataa

SEQ ID NO: 1258 - DNA, 198 bp, Streptococcus pneumoniae
ctcaaacagaggatttcaaagaaggagtgcgagctcattcggagagaagaagacctaaatttacaggaaaataaaaaatacttgcatcattctttgaattttgatataattctttctgtcaaatgttttgattgtaaaagttttttgaagaaggagggatatgaaaaatggactaccaacgaatcaatgaatatttaa

SEQ ID NO: 1259 - DNA, 258 bp, Streptococcus pneumoniae
aaaggagccctgatggaacacattatttatcagcttgaagaggacttggcaatccttaccttgaaccgtcctgaggtcgcaaatggttttcatattcccatgtgtgaggagattttagaagctctgactttggcagaagaaaatccagctgtgcattttatcttaatcaatgccaatggaaaggtcttctcagttgggggagatttggtagagatgaagcgggcagtggatgaggatgatattccatcattgacaaaa

SEQ ID NO: 1260 - DNA, 228 bp, Streptococcus pneumoniae
atgaaaaccatttgcgacctcaggacggttcaaggtaaggattgccaagtcctcttcaagctgataaataatgtgttccatcagggctcctttttattttataagcagtttatactcttcgaaaatctctttaaaccgcgtcagcttccatctgcaacctcaaaacagtattttgagctgacttcggctagcttcctagtttgctctttgattttcattgagtgttaa

SEQ ID NO: 1261 - DNA, 1365 bp, Streptococcus pneumoniae
atgaaagttgttaaatttggaggtagttctcttgcctctgctagtcaattagaaaaagttttaaacatcgtcaaaagcgattcagagcgtcgttttgtagtcgtttctgcgcctggtaaacgcaatgctgaagatactaaggttacggatgccctgattaaatactaccgcgactatgttgcgggtaacgatattagcaagagccaaagctggattatcgaccgctatgctgctatggttagtgaattgggactaaaaccagctgtgctagaaaaaatttctaaaagcattcacaccttggccactcttcctattgaagaaaatgaatttctctacgatactttcctagcagccggtgaaaataacaatgccaaattgattgctgcctactttaaccaaaatggtatcgatgcacgctatatgcaccctagagaagctgggattgtggtcacaagtgaacctggtcacgctcgcatcattccatcaagttatgacaagattgaagaattgacaaacaccaatgaagtccttgtcattcctggtttctttggtgtcactaaggaaaatcaaatctgtactttctcacgtggaggatctgatattacaggttctatcattgctgctggtgtcaaagctgacctctatgaaaactttacggacgttgatggtatctttgcagcccaccctggtattatccaccaaccacactcgattcctgagttgacctaccgtgaaatgcgcgagttggcctatgcaggcttctcagtccttcatgacgaggctcttcttcctgcctaccgtggaaaaattcctctggttatcaagaataccaacaaccctgaccatccaggtactcgtatcgttctaaaacacagtaatgatgaatttccagttgtgggaattgctggtgactcaggctttgtcagcattaatatgtcgaaatacctcatgaaccgtgagattggatttggccgcaaggttctgcaaatcctggaagaacttaacatcggttgggaacatatgccaacaggtatcgacgatctttctatcattctccgttctcgccaactaactcccatcaaggaagaagaaatcctgcgtcagttggttcaaaaggctaaagtagatcatgcagaaatcgaacacgacctttctatcattatgattgttggtgaaaaaatgaagagccacatcggagtgactgctactgcgacacgcgctctatctgaaaacaaaatcaacatccagatgatgtctcaaggttctagtgaagtttctattatgtttgttgtcaataaagaccaagagaaagcagcaattaaagccctctacaatgccttttttggagaaagtaaggaagactaa

SEQ ID NO: 1262 - DNA, 372 bp, Streptococcus pneumoniae
atggcccaatcacttaacaaaacagtactcctcagtacgacaggcacttcctacctctctatcgctgggaaagttgggaaattccttgtcggagatcaggctttggaattttacccagatgtcaatgtcgaacaatttatccagattccttggagccatatcaatcagattggagccaatgtcactggatgcaaaatcagccgccacttcgaagtctttacagacaaaggaaaattcctctttgcttcaaaagactcaggtgccattctcaaaattgcacgcgacaaattgggcaatgacaaggtcgtcaaacttccgaccctgattcagacaattagccaaaaatttaaaaatctatttgcaaaaaaatag

SEQ ID NO: 1263 - DNA, 1125 bp, Streptococcus pneumoniae
  unsure (1023): n at each above location is unknown.
atgttagatatcaaacgtattcgtacagattttgaagctgtcgcagaaaaattagctacacgtggtgtagatgctgctgtcttgaatgaaatgaaagaaatcgatgctaaacgtcgtaacatcttggtcaaggttgaaactctcaaagcagaacgtaacacagtttctgctgagattgcccaagctaagcgcaacaaggaaaatacagatgacaagattgctgccatgcaaaatctatctgctgaggttaaagccttggatgctgaattggcagaaatcgatgctaaattgacagaatttacaacgactcttccaaatatcccagctgacagcgttcctgttggggctgacgaagacgacaatgtggaagttcgccgttggggtactccacgcgagtttgacttcgaacctaaagctcactgggatctcggtgaagaccttggtatccttgactgggaacgcggtggtaaggtaacaggcgctcgcttcctcttctataaaggcctcggtgctcgtttggaacgtgctatctacaactttatgttggatgaacatggaaaagaaggctatactgaagtcatcacaccttacatagtcaaccatgattctatgtttggtactggtcagtatccaaaatttaaggaagatacttttgaactcagcgataccaactttgtcttgattccaactgctgaagttcctctggcaaactactaccgtgatgaaatcttagacggcaaagatcttccaatctacttcactgctatgagtccgtcattccgttctgaggctggttctgccggtcgtgatacgcgtggcttgatccgtttgcaccaattccacaaggttgaaatggtcaaatttgccaaaccagaagaatcttacgaagaattggaaaaaatgacagccaacgctgaaaacattcttcaaaaactcaaccttccataccgtgtcgttgctctctctactggagatatgggcttctcagctgcgaagacttacgacttggaagtgtggattccncgacaaaacaattacgtgaaatctcaagctgttcaaacacagaagatttccaagcccgtcgtgcccaaatccgttaccgtgatgaagcagatggcaaggtga

SEQ ID NO: 1264 - DNA, 273 bp, Streptococcus pneumoniae
  unsure (106): n at each above location is unknown.
aaacattcttcaaaaactcaaccttccataccgtgtcgttgctctctctactggagatatgggcttctcagctgcgaagacttacgacttggaagtgtggattccncgacaaaacaattacgtgaaatctcaagctgttcaaacacagaagatttccaagcccgtcgtgcccaaatccgttaccgtgatgaagcagatggcaaggtgaaactccctccataccttgaacggttctggacttgcagttggacgtacagtggctgcaattcttga

SEQ ID NO: 1265 - DNA, 912 bp, Streptococcus pneumoniae
ttggaggttaggatgaaaaaactccccttagtattttcaggttgtttgctaggtttggcaggagctggaaatcttattttagatacgttgccggttctatcccatctttttagtctgactggtttggttttatggatttactttctaattctgcatctctttaattggaaagaaaccaagcaagaattgaccaagccccctcttttgtcaggaatggcaacctttcctatggctgggatgattttatcgacctatgtctttcgcgtattctcttatcttcctttggtagcacaagggatttggtggttttcatttctcttggatttgaccttgattgctggttttaccatcaagtttgcttgtccagggcggagggttcatgccactccaagttggacggttctctatgtggggatagcagtggctgccttgacctatcctctggtaggtattatcgaaattgcctatgcgaccttgagttttggttttctcttgaccttctatctctatccccttatttatagcgatttaaagaaacatccactcccactagccttgcttggacaagaaggaatctactgtgctcctttctctctactcttggcttctctagttcgagtaggaggaaccagcctgccgacttggggcttgattgtcatgattttggcttctcaatccttctttttctttgttttaactcgtatgcccaacattttaaaacaaggctttcaaccagccttctcagccctcaccttcccaaccattatcacagcgacctcgctcaagatggctcagggaattttgaaacttccatttctggattacctggtattggctgaaaccattatatgcctaactattttattctttgtactaggtgcttatctgatttggttacgaaaaaaggtctag

SEQ ID NO: 1266 - DNA, 207 bp, Streptococcus pneumoniae
aaggggatagagatagaaggtcaagagaaaaccaaaactcaaggtcgcataggcaatttcgataatacctaccagaggataggtcaaggcagccactgctatccccacatagagaaccgtccaacttggagtggcatgaaccctccgccctggacaagcaaacttgatggtaaaaccagcaatcaaggtcaaatccaagagaaatga

SEQ ID NO: 1267 - DNA, 549 bp, Streptococcus pneumoniae
atgacaacatttactatccatacagtagagtcagcaccagcagaagtgaaagaaattcttgaaacagtagaaaaagacaacaatggctatattcccaacctaatcggtctcttggccaatgccccgactgttttagaagcctaccaaattgtctcatctatccaccgtcgcaacagcctgacacccgttgagcgtgaagtggtgcaaatcacggcagccgtgaccaatggttgtgccttctgtgtcgcaggtcacacagccttttccatcaaacaaatccagatgaatgatgacttgattcaagctcttcgcaatcgtactccaattgaaacagatcctaaattggataccctagctaagtttaccttggcagttatcaataccaagggtcgtgtaggagatgaagccttgtctgagtttttagaagctggctacactcaacaaaatgccttggatgtggtttttggtgtcagcctagcaatcctctgtaactatgccaacaacttagctaatacaccaattaatccagaattgcaaccttatgcctaa

SEQ ID NO: 1268 - DNA, 1323 bp, Streptococcus pneumoniae
  unsure (448): n at each above location is unknown.
atgttagaattgcttaaatcaatcgatgattttgcttggggaccgcccctcttgattttattggtcggaacagggatttacctaaccatgcggctaggactcttgcaggttttgcgtctgcccaaggcctttcagcttatttttatccaggataagggacatggtgatgtatccagttttgcagctctgtgtacagccttggcatcaactgttggaacaggaaatatcataggagttgcgacggctatcaaggttggtggaccaggagctctattttggatgtggatggcggctttctttggaatggctaccaagtatgcggaaggactcttggccatcaaataccgcaccaaggacgaccatggtgcagtagcgggaggtcccatgcattatatccttctagggatgggagaaaagtggcgaccacttgctgttttgtttgcagtancaggagtattggttgctctcttgggaatcggaaccttcacccaagtcaactcgattacagaatctatccaaaatacaacgacgatttcgccagccatcacagctctcgtcttgtctgtctttgtagcgattgcagtctttggtggactcaagtctatttctaaggtttcaactactgttgttccttttatggccatcatttatatcttaggaactcttacagttattttctttaatatcggaaaaatccctggcacaatcgctttagtctttacctcagcttttagtccccttgctgcggtaggtggatttgctggtgctagcgttcggatggctattcaaaatggtgtggcgcgtggtgtgttctcaaacgaatctggtctgggttctgctcatattgcagctgcagctgccaagacaaatgaaccagtagagcaaggtttgatttccatgacaggaacctttattgataccctcatcatttgtactctaactggtttgaccatcttggtaactggagtttggagtggtgacttgaatggggttgccttgactcagtcagctttctcaacagtcttttcacactttggccctgccctcttgaccatcttccttgtgctttttgcctttacaacgattctaggttggaactattacggagaacgctgttttgagttcctctttggggttcgctttatctggctctaccgtgtggtttttgtgctcatggtcttgttaggaggatttatcgagttggatatggtctggattatcgcagatatcgttaacgccttgatggctctgccaaacttgattgccctcttggtcttgtcgccagtcgttattgctgaaactaaaaagtattttgacaaataa

SEQ ID NO: 1269 - DNA, 2337 bp, Streptococcus pneumoniae
atgaataagaaaatattagaaacattagagttcgataaggtcaaggccttgtttgagcctcatttgttgaccgagcagggcttggagcaattgagacagctggctccgactgccaaagcagataaaatcaaacaggcttttgctgagatgaaagaaatgcaggctcttttcgtcgagcaaccgcattttactattctctcaactaaggaaattgcaggagtctgcaagaggttggagatgggagcggatctcaatatcgaggagttcctactcttgaaacgcgtgcttcttaccagccgagaacttcaaagtttttacgccaatctggaaaatgtcagcttggaagaattagccctttggtttgagaaattacatgattttccgcaattacaaggaaatcttcaggcctttaatgatgcgggtttcattgaaaattttgccagtgaagaattggcgcgaatccgtcgaaaaatacatgatagcgagagtcaggtacgcgatgttttacaagacttgctcaagcaaaaagcgcagatgttgacggaaggaattgttgctagcagaaatggccgtcaggttttaccagtcaaaaacacctaccgcaataagattgcaggtgtcgttcatgatatttctgctagtggaaacaccgtctatatcgaaccacgtgaggtagtcaaactgagcgaagaaattgctagtctgcgagcagatgagcgctatgaaatgcttcgcattctccaagaaatttctgagcgtgtccgccctcatgcggctgagattgctaatgacgcttggattatcggtcatctggacttgattcgtgccaaggttcgatttatccaagaaagacaagcagtcgtgcctcagctgtcagaaaatcaagagattcaactgctccatgtctgccatcctttggtcaaaaatgccgtcgcaaatgatgtctattttggtcaagatttaacagctattgtcattacaggtcccaatacaggtgggaagaccatcatgctcaaaactctgggcttgacacaggtcatggcccagtcaggattgccgattttagcagacaagggaagtcgtgttggtatttttgaagaaatttttgctgatattggagatgagcagtctattgagcagagcttgtctaccttctctagccatatgaccaatatcgtggatattcttggcaaggtcaaccaacattcactcttacttttggatgagttgggggctggtactgatccccaagagggagcagcccttgccatggctattctggaggaccttcgcctgcgtcaaatcaagaccatggcgacgacccactatccagaactcaaggcctacggtattgagacagcctttgtgcaaaatgccagtatggagtttgatactgcaactcttcgcccgacctatcgctttatgcagggtgttcctggccgaagtaatgcctttgaaattgccaaacgtctaggcctatctgaagttatcgtaggagatgccagtcagcagatcgatcaggacaatgacgtcaatcgtatcattgagcaactagaagagcagacgctggaaagccgcaaacgcttggacaatatccgtgaggtggagcaagaaaatctcaagatgaaccgtgtgctaaaaaaactctacaacgagcttaatcgtgaaaaggaaaccgagcttaacaaggcgcgtgaacaggctgctgagattgtggatatggccctaagtgaaagtgaccagattctcaaaaatctccacagtaaatcccaactcaagccccacgaaatcattgaagccaaagccaagttgaaaaaattggctcctgaaaaagtggacttgtctaaaaacaaggtccttcaaaaggccaagaaaaaacgagctccaaaggtgggagatgatatcgtggttctcagttatggtcagcgtggtaccttgaccagtcaactcaaggacggtcgctgggaagcccaagttggcttgattaagatgaccttggaagagaaagagtttgatcttgttcaagcccagcaagaaaaaccagtcaagaagaaacaggtcaatgttgtgaaacgaacttctgggcgaggacctcaagctagactggatcttcgaggcaagcgctatgaagaagccatgaatgagctagatgccttcatcgaccaagccttgcttaacaatatggctcaagttgatatcatccatggtatcggaacaggagtcatccgtgaaggagttaccaaatacttgcaaagaaacaaacatgtcaagagtttcggctatgccccacaaaatgctggaggcagtggtgcgactattgtcacttttaaaggatag

SEQ ID NO: 1270 - DNA, 753 bp, Streptococcus pneumoniae
atggatagaggctatgaaagttacaatctcatggctcattttcaagaaaaaggttggctttatatcatccgtattcgagatggaaaacaatccatgccttcctccttcaacttgccaaatacggagtgttttgatcaaaaagtttctctaaaattatcacgaaagcaaactaatcagctcaaaaaactttatcgtgattttcccaatgactatcattttattccacacaattctatttttgattttcttccagaaacaagtcgaaaacaagatcctgtaacactctatgaacttccttttcgtatggtgcgtttagaagtggaagaaggaaaatacgaaactttagtgacgaatacagactattcagtccaagaattaaaaaatctctacgccagtagatggggcatagagactagttttcgtgacctgaaatacagtattggcttggtcaattttcacgccaaaaagaagggagggattctccaagaaatctttgctcgctttacaaattttaacttttgtcgttgggtaacctcgcaagttgccatcgacagtagtcacaaaaaacaaagatataaagtgtgtttctcagatgcggcttatgcctgccgtttgttttttaacggttccctttcttccctccagttgaaaaactacctcaagaaacagttatctattattcgaccgaatcgaaaatattcaagaaagataaaagctcaatcggtagttgatttcatctatagagtaacataa

SEQ ID NO: 1271 - DNA, 195 bp, Streptococcus pneumoniae; identical to SEQ ID NO: 728

SEQ ID NO: 1272 - DNA, 546 bp, Streptococcus pneumoniae; identical to SEQ ID NO: 729

SEQ ID NO: 1273 - DNA, 549 bp, Streptococcus pneumoniae
atgatttcattccttcttctattggtcttggtttggggattttatatcggctatcggagaggcctgctcttacaggtttattacctgatttcagccatggcatcggcttttatggctggccagttttataaggggcttggagagcaattccatttattgctcccttatgcaaattcgcaggaaggtcaggggactttctttttcccatcggatcaactctttcagctggataaggtcttttatgcaggtatcggctacttgcttgtatttgggattgtctatagcattggtcgtttgcttggtcttctcttacacttgattcctagcaaaaaactgggtggtaagttgttccaagtttcagcaggtatcttgtccatgttggtgaccttatttgtcttgcaaatggccttgacaatcttggcgaccatccccatggcagttatacaaaatcctcttgaaaagagtatcgtcgcaaaacacatcatccagagcataccgataacaaccagttggctcaaacaaatctgggtgacaaatttaatcggataa

SEQ ID NO: 1274 - DNA, 312 bp, Streptococcus pneumoniae
gtgaattttatggcaaatctaaatcgattcaaatttacattcgggaaaaaatcgttaaccttgacaagcgaacatgacaacctttttatggaggaaatcgctaaggttgcgacagaaaaataccaagcaattaaagaacaaatgcctagcgcagatgatgaaacaatcgctcttttgttggcagtcaactgtttatcaactcagctcagccgtgagattgaatttgacgataaggagcaagagctagaagaactccgtcacaagcttgtgacttgtaagcaagaacagagcaagattgaggattccttatga

SEQ ID NO: 1275 - DNA, 882 bp, Streptococcus pneumoniae
atggcaagtatcacactcacaccaagcgaaaaggatattcaggcttttcttgaacactatcaaaccagtctggctcctagcaagaatccctatatccgctactttttgaaactacctcaagcaacggtttctatctatacttctggaaaaatcttgcttcagggtgaaggggctgaaaaatacgccagtttctttggctatcaagctgtagagcaaaccagcggacaaaatcttcctttaattgggacagatgaggtgggaaatggttcctactttggtgggcttgcagttgtggctgcctttgtcacacctgaccagcacgactttttacgaaaactcggtgtgggggattctaagactctgaccgaccaaaagatccgtcagattgctcctattctcaaggaaaaaattcagcaccaggcactccttctctcacccagcaagtacaacgaggtcatcggagaccgctacaatgctgtttcggttaaggttgccctccataatcaggctatctatctcctccttcaaaaaggtgttcagcctgagaaaattgtgattgatgcctttaccagtgctaaaaattatgacaagtacttggcacaagaggccaatcgtttcagcaatcctatcagcttagaagaaaaggctgagggcaaatacttgtctgtcgcagtttcttctgtcattgcgcgtgatctctttctggaaaatcttgaaaatctgggacgagaactgggttatcagcttccaagtggagctggaacggcttctgacaaggtggctagccagattttgcaagcctatggtatgcagggactcaacttctgcgccaaattgcactttaaaaacactgaaaaagcgaaaaaacgcttagaaaggtaa

SEQ ID NO: 1276 - DNA, 615 bp, Streptococcus pneumoniae
atgaattcatttaaaaatttcttaaaagagtggggactgttcctcctaattctgtcattactagctttaagtcgtatctttttttggagcaatgttcgcgtagaaggacattccatggatccgaccctagcggatggcgaaattctcttcgttgtaaaacaccttcctattgaccgttttgatatcgtggtggcccatgaggaagatggcaataaggacatcgtcaagcgcgtgattggaatgcctggcgacaccattcgttacgaaaatgataaactctacatcaatgacaaagaaacggacgagccttatctagcagactatatcaaacgcttcaaggatgacaaactccaaagcacttactcaggcaagggctttgaaggaaataaaggaactttctttagaagtatcgctcaaaaagcccaagccttcacagttgatgtcaactacaacaccaactttagctttactgttccagaaggagaataccttctcctcggagatgaccgcttggtttcgagcgacagccgccacgtaggtaccttcaaagcaaaagatatcacaggggaagctaaattccgcttctggccaatcacccgtatcggaacattttaa

SEQ ID NO: 1277 - DNA, 279 bp, Streptococcus pneumoniae
ttggtgattctcggcctcttaggtttcttaaaatgttccgatacgggtgattggccagaagcggaatttagcttcccctgtgatatcttttgctttgaaggtacctacgtggcggctgtcgctcgaaaccaagcggtcatctccgaggagaaggtattctccttctggaacagtaaagctaaagttggtgttgtagttgacatcaactgtgaaggcttgggctttttgagcgatacttctaaagaaagttcctttatttccttcaaagcccttgcctga

SEQ ID NO: 1278 - DNA, 2367 bp, Streptococcus pneumoniae
atggaagtttatttttcaggaactattgaacggattatttttgaaaatcccagcaatttttatcgcatcctcctcctagaaatcgacgatacggacgcagaggattttgatgattttgaaatcattgtcacaggaaccatggctgatgtaattgagggcgaagactatactttttgggggcaaattgtccagcactccaagtatggagaacaactgcaaatcagtcgttatgatcgcgcaaaaccaactagtaagggcttggtcaagtacttttcaagtagccatttcaaggggattggtctcaagacagctcagaaaatcgtggatacctatggcgaaaataccattgacgaaattttgcaacacccagaaaagttagaaggcatcgcaggactctctgccaaaaatcgcgaggctttcgtctccactctccgtctcaactacggaacggagatgattttggccaaactagccaactacggcattcccaacaaactagcctttcagattcaagacttttacaaggaagaaacccttgatgtggttgaaaattatccctaccaactggttgaggatatcaagggtttgggctttaccattgctgaccaactagctgaggaactaggcatcgaaagtcaggctcctgaacgcttccgcgccggtctagttcacagtctttttcagacctgtatggaaacaggggacacctatgttgaagcacgggatttgctggaacaaacccttactctccttgagtcttcccgtcccgtggaactagaccccagccaagttgcccaagagctctcctacctgatcgaagaagacaaggttcagcagattgataccaagatctttgacaacagcctctttttcgctgaggaaggtatccgcagtcacttgattcgtatccttgaaaaaggaaaacagaagagccaagatttagaaactattcaaaagcatatcactactgtcgagcaagaactggggattgagtatgataacattcaaaaacaagctatttgtgacgctatccagaacaaggtctttatcctgacaggtgggcctggtactggtaagacaactgttatcaatggaatcatcgctgtttatgcccttttagaaggacttgacttcaggaagaaaaacaatctgcccattcttcttgctgctccaactggtcgagctgctcgtcgcatgaatgaattgacaggtttgcctagcgcgaccatacatcgccacttgggaatgacaggtgacgatgataccagtcatctggaagattacctagatgctgactttatcatcgtggatgaattctctatggtggatacttggctggccaatcaactcttctccaatatctcttctaacagtaagatcctcatcgtaggtgacagtgatcagctaccttctgtcagtcctggacaggttctagcggatctgcttcatattcctttgattcctcagactcgcttggaaaaaatttatcgacaaagcaaagaatcaaccatcgtcaccctagctagtcagattcgacagggcatcttgccagctgatttcacccaaaaaaaagctgaccgttcctactttgaaattgctagtggccatattcctgccaccattgaaaaaatcttaggtgccgccctcagaaatggtattcctgcccgtgatatccaagttctggctcctatgtaccgagggacggcagggattgatgctatcaatcagctcatgcaagacctgctcaatcccccacaaaaagatcaactcagttttgaagctcctcagtgccactatcgtaagagagacaaggtcattcatttggttaacgatgctgaaatcaatgtctttaatggggatttaggagctatcacagacctgattcctggtaaatacaccgaatcgaaacaagacgagattgtcattgattttgatggtaatgaagtctcttacccccgtaacgaatggtacaagattcgcttggcctatgccatgagtattcataagtctcagggaagtgagttcccagttgtcatcctaccgattactagtgctagccgacgtatgctggagcgaaatctcatctacacagccattacacgtgccaaaagcaaactcatcttactaggcgaattacaagccttcgactatgctacccaacacatcggaactgcccgaaaaacctatctgattgaacgcttcagtgatctactggagaatgttgaagaaaagcaacaagctgtctctgaaacagtcacatcaagtgcctctgaacaatcctacatcctaaccgaagaaaactgggaccgcatcccagccatgattgggattacagacacagacctcaaagagatttttggaaaatag

SEQ ID NO: 1279 - DNA, 1284 bp, Streptococcus pneumoniae
atgtctgtatcatttgaaaacaaagaaacaaaccgtggtgtcttgactttcactatctctcaagaccaaatcaaaccagaattggaccgtgtcttcaagtcagtgaagaaatctcttaatgttccaggtttccgtaaaggtcaccttccacgtcctatcttcgataaaaaatttggtgaagaatcactttaccaagacgttatgaacgctcttttgccaaacgcttatgaagcagctgtaaaagaagctggtcttgaagtggttgcccaaccaaaaattgacgtaacttcaatggaaaaaggtcaagactgggttatcgctgctgaagtcgttacaaaacctgaagtaaaattgggtgactataaaaaccttgaagtatcagttgatgtagaaaaagaagtaactgacgctgatgttgaagagcgtatcgaacgcgaacgcaacaacctggctgaattggttatcaaggaagctgctgctgaaaacggcgacactgttgtgatcgacttcgttggttctatcgacggtgttgaatttgacggtggaaaaggtgaaaacttctcacttggacttggttcaggtcaattcatccctggtttcgaagaccaattggtaggtcactccgctggcgaaaccgttgatgttatcgtaacattcccagaagactaccaagcagaagaccttgcaggtaaagaagctaaattcgtgacaactatccacgaagtaaaagctaaagaagttccagctcttgacgatgaacttgcaaaagacattgatgaagaagttgaaacacttgctgacttgaaagaaaaataccgcaaagaattggctgctgctaaagaagaagcttacaaagatgcagttgaaggtgcagcaattgatacagctgtagaaaacgctgaaatcgtagaacttccagaagaaatgatccatgaagaagttcaccgttcagtaaatgaattccttgggaacttgcaacgtcaagggatcaaccctgacatgtacttccaaatcactggaactactcaagaagaccttcacaaccaataccaagcagaagctgagtcacgtactaagactaaccttgttatcgaagcagttgccaaagctgaaggatttgatgcttcagaagaagaaatacaaaaagaagttgagcaattggcagcagactacaacatggaagttgcacaagttcaaaacttgctttcagctgacatgttgaaacatgatatcactatcaaaaaagctgttgaattgatcacaagcacagcaacagtaaaataa

SEQ ID NO: 1280 - DNA, 1137 bp, Streptococcus pneumoniae
atgaaacattctgttcattttggtgccggtaatatcggtcgtggttttataggtgaaattctatttaaaaatggtttccatattgattttgtggatgtcaataatcagataatttatgctctaaatgaaaagggcaagtatgaaattgaaattgcacagaaaggacagtctcgtatagaagtaactaatgtggctggcattaatagcaaagaacatcctgagcaagtcattgaagcgattcaaaagacggatattattactactgcaatcggacctaatatactcccttttatcgctgaacttctagccaaaggaatcgaagctcgccgagttgcaggaaatacacaggcattggatgttatggcctgtgaaaatatgattggcgggtctcaatttctttatcaagaagtcaagaaatatttaagtccggaaggtttgacatttgctgataactacataggttttccaaatgctgcagtagacaggattgttccaacacaaagtcacgaagattccctttttgttatggtcgagccctttaatgaatgggtcgtggaaaccaagcgtcttaaaaatccagatttacgtctaaaagatgtgcattatgaagaagatttagaaccctttattgagcgaaaacttttttcagtcaattctggacatgcaacttcagcttacattggtgcgcattatggtgccaagacaattttggaagctcttcaaaatcctaatatcaaatctcggattgaatctgtattagctgaaattcggagtctcttgattgccaaatggaactttgataaaaaagaattggagaattatcacaaagtcattatagaacggtttgaaaatcctttcatagtggacgaggttagtcgcgtagctcgtactccaatccgaaaattaggctataatgaacgattcatccggccgatacgtgaattgaaagaactcagtttgtcatataaaaacctacttaaaacagttggctatgcctttgactatcgcgatgtaaatgatgaagaaagtattcgattaggtgaattgttggctaaacaatcagtcaaagatgttgttatacaagttacaggtttagacgaccaagaattgattgagcaaattgtagagtatatttaa

SEQ ID NO: 1281 - DNA, 438 bp, Streptococcus pneumoniae
atgaaacttgaaaaacatttgattaagcttaataaacaattttctaacaaggaggaagctatttgttattgtgggcaagttctttatgagggtggatatgttaatgaagactatattgaagccatgattgagcgagataaagagctatctgtttacatgggtaactttatcgccataccgcatggaacagatgcagcaaaaaaggatgtcctcaagtctggtattacagtcgttcaagtccctagaggggttgattttgggaatgtatctaaccctcaagtggcaacggttctttttggtattgctggtattggtaatgaacacttagaaattattcagaaaatttctatcttctgtgcagatgtagataatgttcttaaactagcagatgctcagtcaaaagaggaagtattgcgcttatttgatgctgttgaataa

SEQ ID NO: 1282 - DNA, 1956 bp, Streptococcus pneumoniae
atgctattaaccaaacgagaagaacaattattgaaggctttcctacatgtagggaagctttcaatgcaagatatgactgaaatcttacaggtttcatctagaacaatttatcgaactttatcagatttgacagatagcatggagcaatatggaatcgaaataacgaagcatgggaaatactatattttgactggagagttggatgatttgccgacagaacttgaagtgttagttgagtatagtccccaagaaagacaagagttgattacctatcgccttctgactgagagtggttttgtcaccaatgaagcattgcaagagtgcacgaaagtcagtaatgtaactattattcaggatatttcagatattgataagcgtcttttagactttgatctgaaaattgaacgacaaaaaggttatcggatttctggtgattcagttggtaagagaagatttttggctattttactgacaaactgtatctcagtagcagatttttcaaccggtaattttgggagctttgatattttagaagcagatagaactaggctggccagtcagattgttaataagcaactgtcaggttttccagatatggatgctaggatgaagatgttttttgcgatcttgttatctcttataggtcaggagcaaaacattgaaaattcacctaatactagtaagcaggctttggaaatttctcaaaaaatttttcaagcttactctaagcagactgcacaattttatagtattcaggaaattatctattttgcgagcatcttggatgaattaatcattaaacgtcaggacaatccgctctttacggagaaatttgatggtgaatttttctacaatatttcaaatctgattgatacggtttccatgtataccaagattgacttttttaaggacaaggttttattcaattttcttttccatcatattcggctcagtttaggcgtccctatcctttttcagagtgaaaatttgccagaatctgtccagattttagttgaaaggaataaatttctttatacagtcatcagtcttttagtgaatgatatttttccgaaatatcttcatacagactatgagtatggcatgattgccctacattttatctctagcttaggccgtagtccagagatttatccagtccgtgttttgcttttaacggatgaacgtcgggtcactagagatttattagtcagtaaaattaagagtgttgctccttttgtagagttgatagatattcagtctctagtagattaccacagtattgatctcagtcagtatgattatattttatctaccaagccgctgactaatcaggaaatcgatgtaatttctagttttccaaccgtcaaagaattgcttgaattacaggaacgacttcagtatgtacaggcacatcgtacaattgtcgcgcgtgatgctatcgctccagagaaaagttatgacttgcaagattatttaatatctagtagtcagcttttgagtcaattcgagttggttcaattggagaataatcaatcatttgagcatacggtagaacaaatcatccaatatcagaagaatgtgagtgacagagattacctaacaagaaaattgttatctcacttccagaatagtcctatggctattcctaatactggtctggtgcttttacatagtcagtctagcaaagtaacaacaaatagttttactatgtttgaactcaaactacctatctccgcattgtcaatgaaacgagaggaagaagaggtcaaaaggtgtctgctaatgctaatgtctaaagaagctagcgaggaagcgagagatttaatgacagctatcagtcagtcgattattgaaaatcatctttatacagagatttacaagacgggaaatcaatccattatttatcagatgctaaatactatttttaacgaaaaaattaagaaattggagaactaa

SEQ ID NO: 1283 - DNA, 1788 bp, Streptococcus pneumoniae
gaaaaggaggatgatctaatggaagaaaaagtatcattgaaagtcagggttcaaaaactagggacatcgctttcaaatatggttatgcccaatattggagcatttattgcttggggagtattgactgccctttttatcgctgatggttatctgccaaatgaacagttagctactgttgttggtcctatgttaacgtatttattgccaatcctgattggttacacaggtggatatatgatccatggccaacgtggtgccgttgtaggagctattgctactgttggtgcaatcacaggttctagtgttcctatgtttatcggagctatggtaatgggcccactgggaggatggactatcaagaaatttgatgagaagttccaggaaaaaattcgtcccggatttgaaatgttagttaataacttctcagctggtctcgttggttttgcattattgcttttggctttctacgcaatcggtccagtcgtatcgactcttactggagctgttgggaatggtgttgaggctattgtcaatgctcacctccttcctatggctaatattatcatcgaaccggctaaagtccttttcctcaataatgccctcaatcatggcatttttactcctctgggagtagaacaggtagctcaagctggtaagtcaattctcttcctattggaagctaatcctggaccaggcctgggaattctattaacttatgctgtattcggtaaaggttctgctaaatcttcttcttggggggcaatggttattcatttcttcggagggattcatgaaatttactttccttatgttatgatgaagcctactctatttttagctgctatggcaggaggtatctctggaacttttacttttcaactcttagacgctggtcttaaatctccagcttcaccaggttctattattgcgattatggctacggcgccaaaaggtgtttggccccatctaaatgttcttttaggtgttttagtggcagcagttgtttctttccttgtagcagcccttattcttcatgcagacaagtcaactgaggattcgctcgaagctgctcaggcggctacccaagcagctaaggctcagtctaaaggtcagttagtatcaacttctgttgatgcagttgtttcgacagactcagtggaaaaaatcattttcgcctgcgatgctggtatgggaagctctgctatgggagctagtattcttcgagataaggttaaaaaagcaggtctagagattccagtatctaatcaggcaatctcaaatttgcttgatacaccaaaaacattaattgttactcaggaagaactgacaccaagagctaaagacaagagtccaagtgctattcatgtttctgttgataatttcttagcgtcccctcgttatgatgaaattgtagcttcattaacaggagcttctccaatagcagaaattgaaggagatataccaacttcagcaccagtagatagtcaggaaattgaccttaaccatattgatgctgtagtagttgcttatggtaaagcacagggaactgcaactatgggctgtgaaacgattcgggctatctttagaaacaagaatattcgtattccagtttctactgccaaaatttcagaattaggtgaatttaattctaaaaatataatgattgtaacaactatttctttacaggcagaagtgcagcaagcagcaccgaattctcaatttcttattgtggatagtttagtaacaacaccagaatatgacaaaatggctgctagaatgtacaaatag

SEQ ID NO: 1284 - DNA, 201 bp, Streptococcus pneumoniae
ttgagctacctgttctactcccagaggagtaaaaatgccatgattgagggcattattgaggaaaaggactttagccggttcgatgataatattagccataggaaggaggtgagcattgacaatagcctcaacaccattcccaacagctccagtaagagtcgatacgactggaccgattgcgtagaaagccaaaagcaataa

SEQ ID NO: 1285 - DNA, 573 bp, Streptococcus pneumoniae; identical to SEQ ID NO: 19

SEQ ID NO: 1286 - DNA, 834 bp, Streptococcus pneumoniae
atgactgagttttcgttagatcttcttctaaaagtcattaaactagctcgttcgacctactactatcacttgaaacagctagacaaaacagataaggaccaagagcttaaagctgaaattcaatccatttttatcgaacacaagggaaattatacttatcgccgggttcatttagaactaagaaatcgtggttatctggtaaatcataaaagagttcaaggcttgatgaaagtactcaatttacaagctaaaatgcgacagaaacgaaaatattcttctcataaaggagacgttggcaagaaggcagagaatctcattcaaagccaatttgaaggctctaaaacaatggaaaagtgctacacagatgtgacagaatttgccattccagcaagtactcaaaagctttacttatcaccagttttagatggctttaacagcgaaattatcgcctatcatctttctacttcgcccaacttagaacaagtacaaacaatgttggaacaggcattcacagagaagcactacgagaatacgattctccatagtgaccaaggctggcaatatcaacacgattcttatcatcggttcctagagagtaagggaactcaagcatccatgttacgcaagggaaacagccaagacaacggtatgatggaatctttctttggcattttaaaatcggaaatgttttatggctatgagaaaacatttaaatcacttaatcaattggaacaagccattatagactatattgattattacaacaacaagagaattaaggtaaaactaaaaggacttagccctgtgcaatacagaactaaatccttcggataa

SEQ ID NO: 1287 - DNA, 1023 bp, Streptococcus pneumoniae
atgaagctttttaaaaaaatgatgcaagtcgtactagccacatttttcttcggtttgctagggactagtacagtatgtgcagatgattctgaaggatggcagtttgtccaagaaaatggtagaacctactacaaaaagggggatctaaaagaaacctactggagagtgatagatgggaaatactattattttgatcctttatccggagagatggttgtcggctggcaatatatacctgctccacacaagggggttacgattggtccttctccaagacaagagattgcttttagaccagattggttttactttggtcaagatggggtactacaagaatttgttggcaagcaagtgttagaagcaaaaactgctacaaataccaacaaacatcatggggaagaatatgatagcccagcagagaaacgagtctattattttgaagatcagcgtagttatcatactttaaaaactggttgggtttatgatgatggggactggtattatttgcagaaggatggtggctttgattctcgcatcaacagattgacggttggagagctagcacgtggttgggttaaggattaccctcttacctatgatgaagagaagctcaaacctgctccatggtactacctagatccagcaactggcatcatgcaaacaggttggcaacatcttggtaataaatggtactatctccgttcatcaggagctatggcaactggctggtatcaagatggttcaacttggtactatttagatgctgaaaatggcgatatgaaaactggttggcaaaaccttgggaacaaatggtactatctccgttcatcaggagctatggcaactggttggtatcaggaaggttcgacttggtactatctaaatgcaagtaatggagatatgaaaacaggctggttccaagtcaatggtaactggtactatgcctatgattcaggtgctttagctgttaataccacagtaggtggttactacttaaactataatggtgaatgggttaagtaa

SEQ ID NO: 1288 - DNA, 294 bp, Streptococcus pneumoniae
atgaacgaaatttgtcatttatttatttattcggttcttaaaggttactctcttgaaggatggaagaaaataaatggtagttggtactattatagacaacatgataaacaaacgggttggcaggagataaatgatacttggtattatttagacagttccggtaagatgcttacagattggcaaaaagtaaatggaaaatggtattatctcaattcaaatagagcaatggttacaggtagccaaactatcgatggtaaagtttataacttcgcttcatctggtgagtggatttga

SEQ ID NO: 1289 - DNA, 657 bp, Streptococcus pneumoniae
ttgattaaaattgataatactttacagtatccgtattcgacttcagctatggttttatctaagtattatggagtagccgatggaatgaatgtagaagggaggggaagtgcgaattttattaaagataatgtgttaattacagcggctcacaactactacagacatgactatgggaaagaagcggatgatatttatgttcttccggctgttagtccaagtcaagaaccatttggaaagatcaaagtaaaggaagttcgttatttgaaggaatttagaaatttaaattctaaggatgcaagggaatatgacttggctttattaattctagaaaagcccattggtgcaaaattagggactttgggtcttcctactagtcaaaaaaatttgacaggaataactgtgactatcacaggctatccatcatataattttaaaatttatcaaatgtatacagataaaaaacaagttttaagtgatgatggcatgttcttggattaccaagttgatactttagaggggtctagtggatctacagtttatgatgctagtcaccgtgtagtaggagtgcatactttaggagatggagctaatcaaattaacagtgcagttaaattaaatgaacgaaatttgtcatttatttatttattcggttcttaa

SEQ ID NO: 1290 - DNA, 240 bp, Streptococcus pneumoniae
atgaagaaaactgtttataaaaaattgggtatttcaattattgcgagtactttattggctagccagttatcgacagtatctgctttgagtgttatttctagtacaggtgaagaatatgaggtaagtgagacactagaaaaaggtccaggatctaatgattcttcattatctgagatttcaccaacatatggttcatactaccaaaagcaatcagaagtattatcggtaatgatgatttga

SEQ ID NO: 1291 - DNA, 273 bp, Streptococcus pneumoniae
ttgagtataaaatggagcctattagataatatctggctgagacgtgtcgctattgaccaccagttgttaagaaaagagaagaccaatactcaattaatggaaaaaattctacttcataacttgaaccaaacagaattttttatcaataaagccattggctggactctgcgagcctactccaaaacgaaccccacttgggtagcatgctttattgatgaaaacaaggaaagaatggctgaacttagtatcaaagaagcaagcaagtacctctag

SEQ ID NO: 1292 - DNA, 255 bp, Streptococcus pneumoniae
gtggctgctaactatttgaaagcaatgcagtcttatctaaaggaaaccgatttgcctaagctagagcagttagtcgtgacaaaatcctggtgggacacggtagatatcctagatcgagtagtagggagtttggtgtatgaacaccctgaactagaagaaataatcttaatactcttcgaaaatctcttcaaaccacgtcagctctatctgcaacctcaaaacagtgttttgagcaatctgcggctagcttcctag

SEQ ID NO: 1293 - DNA, 633 bp, Streptococcus pneumoniae
atgaaaattttactagtagatgaccatgaaatggtccgtttgggtttgaaaagctactttgacctccaagacgatgtagaagttgtgggtgaggcgttcaacgggtctcaagggattgacttggccttggaactgcgtccagatgtcattgtcatggatattgtcatgcctgagatgaatgggattgacgcgaccttagcaatccttaaagaatggcctgaagccaagattttgattgtgacctcttatttggacaatgaaaaaatcatgccagtcttagatgctggtgccaaaggctatatgctcaagacttctagtgcagatgaattgcttcatgccgtcagtaaggtagctgctggcgagctggccattgagcaagaggttagcaagaaggttgaataccaccgcaatcatatggaacttcatgaagaattgactgcgcgtgagcgagatgttctccaactcatcgccaagggctacgaaaatcagcgcatcgcagatgacctctttatctctctcaagacggtcaagacccacgtgtccaacattcttgccaaacttgaagtcagcgatcgtacccaggcggctgtctatgcctttcagcaccatttggtggggcaagaggagttttag

SEQ ID NO: 1294 - DNA, 996 bp, Streptococcus pneumoniae
atgaaaaaacaagcctatgtcattattgctctcacctccttcctatttgtcttttttttctcccacagcttgctggaaatacttgattttgactggtctatctttttgcacgatgtcgaaaaaacagaaaaatttgtctttttattgttggttttcagcatgtccataacctgtctcttagccctgttttggcgagggatcgaagagctttctctaagaaaaatgcaggctaatctcaagcgtttattggcagggcaagaagtggttcaggttgcagatccagatttggatgccagtttcaagtccttatcaggtaaacttaaccttttgacagaagctcttcaaaaagctgaaaatcatagccttgctcaggaagaggaaatcatcgagaaagaacggaagcgaattgctcgggatttgcacgatacagtcagtcaggagttgtttgcggcccacatgattttatcgggtatcagtcagcaggctttgaaattggatagagaaaagatgcagatccagttgcagagtgtcacagctattttagaaactgcccagaaggatttgcgggttttgctcttgcatttgcgaccagttgaactggagcagaagagcttgatagaagggattcagattctcttaaaagagcttgaggacaagagtgatcttagggttagtctcaagcagaatatgacgaaattgcctaagaaaatcgaggagcatatcttccgtatcctgcaagagttgattagcaatacgctccgccatgcccaggcatcttgcctagatgtctacctctatcagacagatgttgaattgcaactgaaggtggtggacaatgggattggtttccggttagggagcttagacgacttgagttatggactgcgaaatatcaaggagagggttgaagatatggctggaacagttcaactcttgacagctcccaagcaagggctggcagttgatatccgtattcccctgttagataaggaatga

SEQ ID NO: 1295 - DNA, 699 bp, Streptococcus pneumoniae
atgagaaaatttaaaatctttttatttatcgaagcctgtcttctgacaggagctctgattttgatggtatcagagcatttttcgcgttttctgctgatactattcctctttttgcttttgattcgctactacactggtaaagagggaaataatcttcttttagtagcggcaaccattctcttctttttcatcgttatgctcaatccttttgtgattctagctatttttgttgcggttatctatagcctctttcttctttacccgatgatgaaccaggaaaaagagcagaccaatttggtttttgaagaggtcgtgacggttaagaaggagaaaaatcgttggtttggaaatcttcatcatttttcaagctaccagacttgccaattcgatgatatcaatctctttcgcttcatgggcaaggacactattcatctggagagggtcatcttaaccaatcatgacaatgtcattatcctcagaaagatggtaggaacgaccaaaatcatcgtacctgtagatgtggaagtcagtctcagcgttaactgtctctatggggatttgacttttttcaaccagcccaagcgagccctccgcaatgaacactatcatcaagaaacaaaagactatctcaagagtaacaagagtgtcaagattttcttgaccactatgattggtgatgtggaggtggttagaggatga

SEQ ID NO: 1296 - DNA, 1011 bp, Streptococcus pneumoniae
atgacgacaaatcgtaaggacgagcatatcctctatgcccttgagcagaaaagttcctataatagctttgatgaggtggagctgattcattcttccttgcctctttacaatctggatgaaatcgatctttcgacagagtttgctggtcgaaagtgggactttcctttttatattaatgccatgactggtggaagtaataagggaagagaaatcaatcaaaagctggctcaggtggcggaatcctgtggtattttatttgtaacgggttcttatagcgcagccctcaaaaatccaacggatgattctttttctgtcaagtctagtcatcccaatctcctccttggaaccaatattggattggacaagcctgtcgagttaggacttcagactgtagaagagatgaatcctgttctattgcaagtgcatgtcaatgtcatgcaggaattactcatgcccgagggagaaaggaagtttagaagctggcaatcgcatttagcagattatatcaagcaaattcccgttcctattgtcctcaaggaagtgggctttggaatggatgccaagacaatcgaaagagcctatgaattcggtgttcgtacagtggacctatcgggtcgtggtggcaccagctttgcctatatcgaaaaccgtcgtagtggccagcgtgattacctcaatcaatggggtcagtctaccatgcaggcccttctcaatgcccaagaatggaaagataaggtcgaactcttggttagtggaggggttcggaatccgctggatatgattaagtgcttggtttttggtgctaaggctgtgggattgtcacgaaccgttctggaattggttgaaacctacacagttgaagaagtgattggcattgtccaaggctggaaagcagatctacgcttgattatgtgttcccttaactgtgccaccatagcagatctacaaaaagtagactatcttctttatggaaaattaaaagaagcaaaggatcagatgaaaaaggcgtaa

SEQ ID NO: 1297 - DNA, 1008 bp, Streptococcus pneumoniae
atgattgctgttaaaacttgcggaaaactctattgggcaggtgaatatgctattttagagccagggcagttagctttgataaaggatattcccatctatatgagggctgaaattgctttttctgacagctaccgtatctattcagatatgtttgatttcgcagtggacttaaggcctaatcctgactacagcttgattcaagaaacgattgctttgatgggagacttcctcgctgttcgcggtcagaatttaagacctttttccctaaaaatctgtggcaaaatggaacgagaagggaaaaagtttggtctaggttctagtggcagcgtcgttgtcttggttgtcaaggctttactggctctctataatctttcggttgatcagaatctcttgttcaagctgactagcgctgtcttgctcaagcgaggagacaatggttccatgggcgaccttgcctgtattgtggcagaggatttggttctctaccagtcatttgatcgccagaaggtggctgcttggttagaagaagaaaacttggcgacagttctggagcgtgattggggattttttatctcacaagtgaaaccaactttagaatgtgatttcttagtgggatggaccaaggaagtggctgtatcgagtcacatggtccagcaaatcaagcaaaatatcaatcaaaattttttaagttcctcaaaagaaacggtggtttctttggtcgaagccttggagcaggggaaagccgaaaaagttatcgagcaagtagaagtagccagcaagcttttagaaggcttgagtacagatatttacacgcctttgcttagacagttgaaagaagccagtcaagatttgcaggccgttgccaagagtagtggtgctggtggtggtgactgtggcatcgccctgagttttgatgcgcaatcaaccgaaaccttaaaaaatcgttgggccgatctggggattgagctcttatatcaagaaaggataggacatgacgacaaatcgtaa

SEQ ID NO: 1298 - DNA, 1035 bp, Streptococcus pneumoniae
ttgtatcatagccttggtaaccaatttgacacacgcacaagaactagcagaaagattagaagagaaaggagctgttcagacatggatagagagcctgtaacagtacgttcctacgcaaatattgctattatcaaatattggggaaagaaaaaagaaaaagagatggtgcctgctactagcagtatttctctaactttggaaaatatgtatacagagacgaccttgtcgcctttaccagccaatgtaacagctgacgaattttacatcaatggtcagctacaaaatgaggtcgagcatgccaagatgagtaagattattgaccgttatcgtccagctggtgagggctttgtccgtatcgatactcaaaacaatatgcctacggcagcgggcctgtcctcaagttctagtggtttgtccgccctggttaaggcttgtaatgcttatttcaagcttggattggatagaagtcagttggcacaggaagccaaatttgcctcaggctcttcttctcggagtttttatggaccactaggagcctgggataaggatagtggagaaatttaccctgtagagacagacttgaaactagctatgattatgttggtgctagaggacaagaaaaaaccaatctctagccgtgacgggatgaaactttgtgtggaaacctcgacgacttttgacgactgggttcgtcagtctgagaaggactatcaggatatgctgatttatctcaaggaaaatgattttgccaagattggagaattaacggagaaaaatgccctggctatgcatgctacgacaaagactgctagtccagccttttcttatctgacggatgcctcttatgaggctatggactttgttcgccagcttcgtgagaaaggagaggcctgctactttaccatggatgctggtcccaatgttaaggtcttctgtcaggagaaagacttggagcatttatcagaaattttcggtcagcgttatcgcttgattgtgtcaaaaacaaaggatttgagtcaagatgattgctgttaa

SEQ ID NO: 1299 - DNA, 879 bp, Streptococcus pneumoniae
atgacaaaaaaagttggtgtcggtcaggcacatagtaagataattttaataggggaacatgcggtcgtttacggttatcctgccatttccctgcctcttttggaggtggaggtgacctgtaaggtagttcctgcagagagtccttggcgcctttatgaggaggataccttgtccatggcggtttatgcctcactggagtatttggatatcacagaagcctgcattcgttgtgagattgactcggctatccctgaaaaacgggggatgggttcgtcagcggctatcagcatagcggccattcgtgcggtatttgactactatcaggctgatctgcctcatgatgtattagaaatcttggtcaatcgagctgaaatgattgcccatatgaatcctagtggtttggatgctaagacctgtctcagtgaccaacctattcgctttatcaagaacgtaggatttacagaacttgagatggatttatccgcctatttggtgattgccgatacgggtgtttatggtcatactcgtgaagccatccaagtggttcaaaataagggcaaggatgccctaccgtttttgcatgccttgggagaattaacccagcaagcagaagttgcgatttcacaaaaagatgctgaaggactgggacaaatcctcagtcaagcgcatttacatttaaaagaaattggagtcagtagccctgaggcagactttttggttgaaacgactcttagccatggtgctctgggtgccaagatgagcggtggtgggctaggaggttgtatcatagccttggtaaccaatttgacacacgcacaagaactagcagaaagattagaagagaaaggagctgttcagacatggatagagagcctgtaa

SEQ ID NO: 1300 - DNA, 330 bp, Streptococcus pneumoniae
atgacacgcaaagtatatgatactgatttaaacgatcaagaatgggctaagattgaaccctatttctccaaacaccgcacctataaatggccgaaacgagtacttgttaatgagactttgtacgtcactaaaacaggttgtcaatggcgcatgctccctcacgactttcctctttacttaatggtatggagtttctttcgtcgttctatgacgacaggttggttccaggtcaatggcagatggtactacgcttatagctcaggtgccttggcagtgaatacgaccgtagatggctattctgtcaactataatggtgaatgggttcggtaa

SEQ ID NO: 1301 - DNA, 876 bp, Streptococcus pneumoniae
ttgtaccccccagaactggattctaaaatactctctatcatcaagaaggcagtgacaattagaacgacacatacatatgaatatcaatactcactgctatttggtgatgcaggctatctatggttactcctacatttattttctatcagtaaaaatcaatactatctacaattagcaaacgtcaccgctaaaaaattaatagagaattatgatactctagaggaaatagactttgcattgggaaaatctggtgtcctattatcattaataaaatactatcaatttaccaatgacaatactcttaaaattttcatccacaatagtataggggaaatttatcattatttcctacaaagagatacagccaaagaaagcattttagactatagctttgctcatggatattgtggaattgcatatgctttatttgcctattctaaagtcttagaaccttctatgttctataatgatctccatacattccatactgaattaaaaaaattattagaaaaagttacttctaatactgaaaatttaggaaatttacaactttcttggtgcaaaggaatttccggaataatcttatatctttgtatgtacgattgtgacggaaacaaagatattattagtaaatatcaagaatttgtttttaaccatcatctaaaaatgatgacaggatattgccacggaataactagcttactacaaaccactgtctacaatcaaaacaaattactgatgaaaaaaatccaacaggtaattttagcatgttctgaacgagatgatcacggtttactgatgtttcaaggagatagtggtaaagcagatttgtttgacttcggaataggaagcatggggtatattggtgtctattaa

SEQ ID NO: 1302 - DNA, 1233 bp, Streptococcus pneumoniae
atgaaattattttggacaaacaacatatatagacagttgctgctaaacagctgtttttcatcattcggcgacagtattttctacctcgccattatcaattatgtggctcagtacaatttcgctccgctagcgattttactgatttccatttcagagatggttcccctactatcgcaactctttctcgggattctaggagattttcaagaaaatagagtcaaacacgcactctggattgccaaaatcaaaatcctgctctacgctattttgacagtatttctcgtcttgtcgcccttttcattagtttcagtcattatgattgtcatcatcaacctcatctctgacaccttgagctacctgtctgcctacatgatgaacgccctctacatcagtgtaattaaggacgacctgcatgatgccatggggttcaggcagtctctgatgagggttgtccgtattgtcgccaatctggctggcgcattccttatcaatgttataagtattcaaactatttcccttatcaacactctgacttttgtcattgcctttttgggcctgtatgttattcgacataccttgtatgaggttgaaaaaagaattgaaatgtcacatacagcactgagttttaagaaatattttcaacatcttaaacagtcgctggctgtgctcctgaggttaaaagataccgtcatactactgtttctgacgaccagtatgattgccatcttggatgtgtcccctcggctgattgccctccgcttcatccaacagacactagcacaactgagcattgggcaactcctcgccctgctctccatcatcatgtcttgtggagctatccttggcaatatgaccagcagtaatctatttaaaaatatccgtttcacgcacctcttggttttctgtgagatttccctattgactctaataactagtatcctttgtcaagcctatatcgtaattttcatgaccagtttcatcagttctacgattatcggcattctcagccctcgcctacaagcagctgtctttgcccatatccccagtgacaagatggggacggtgggctctgctctgagcacagtggacattctcgccccgtccctgctctccctattagccctatccatagcatcgggcgtttcggtgcagttagcattgatatttttgtatcttattttaattgctcttatcttttgtcaatggttagtcaagttcaacactcataactaa

SEQ ID NO: 1303 - DNA, 999 bp, Streptococcus pneumoniae
atgaagcttttgaaaaaaactatgcaagctggactaacagtaattttctttggtttgctagctacgaatacagtatttgcagataactctgaagtatggcagtttgtccaagaaaacggtagaacctattacaaaaagggggacctcaaagaaacctactggcgagtgattgatggtaagtactattattttgattctctatctggagagatggttgtcggctggcaatatatcccgtttccatctaaaggtagtacaattggtccttacccaaatggtatcagattagaaggttttccaaagtcagagtggtactacttcgataaaaatggagtgctacaagagtttgttggttggaaaacattagagattaaaactaaagacagtgttggaagaaagtacggggaaaaacgtgaagattcagaagataaagaagagaaacgttattatacgaactattactttaatcaaaatcattctttagagacaggttggctttatgatcagtctaactggtattatctagctaagacggaaattaatggagaaaactaccttggtggtgaaagacgtgcggggtggataaacgatgattcgacttggtactatttagatccaacaactggtattatgcaaacaggttggcaatatctaggtaataagtggtactacctccgttcctcaggagcaatggccactggctggtatcaggaaggtaccacttggtattatttagaccagccaaatggcgatatgaaaacaggatggcaaaaccttgggaacaaatggtactatctccgttcgtcaggcgccatggtgactggctgggtgaaagatgactcaacttggtattacctaaatgcaggtaatggagacatgaagacaggttggttccaggtcaatggcagatggtactacgcttatagctcaggtgccttggcagtgaatacgaccgtagatggctattctgtcaactataatggcgaatgggttcggtaa

SEQ ID NO: 1304 - DNA, 1113 bp, Streptococcus pneumoniae
ttgcagttgtgtaactgcttttttgaggagtttttatatattgacatacaatctagtttttactacaatcgttttaggaggatatataaaatgaagcttttgaaaaaaatgatgccaatcgcattagcagtctttttctttggtttgctagcgacaagtacagtatttgcagataccatgggtggccgatttgttgataaggataatagaaaatattatgtaaaagatgatcataaagcaatctattggcataaaatagacggtaaaacttactattttggtgatattggagagatggttgtcggttggcaatacttagaaattcatggaacaggttatcgtgatgatttatttgataatcgtccagtcttcgaaattggccttcaggagaagtggtactattttggacaagatggtgctttgctagaacaaacagataaacaagtactagaggcaaaaacgtctgaaaatacaggaaaagtatacggtgaacaatatcctctatctgctgaaaagaaaacttattattttgataataattatgctgtaaagacaggctggatttatgaagacggcaattggtattatttaaataagctaggaaattttggcgatgattcttacaatccactaccaattggtgaagttgctaagggttggactcaagattttcatgttactattgacattgatagaagcaaacctgctccatggtactacctagatgcttcaggtaagatgcttacagattggcaaaaagtaaacggaaaatggtattattttggctcctctggttctatggcaacaggttggaaatatgtacgaggcaaatggtattacttagataataaaaatggtgatatgaaaacaggatggcaataccttggtaacaagtggtactacctccgttcatcaggagctatggtaactggctggtatcaagatggttcaacttggtactatttagatgctgaaaatggtgatatgaaaataggttggacaaaagtaaatggaaaatggtattatctcaattcctctggagcaatggttacaggtagtcaaactatcgatggtaaagtttataacttcgcttcatctggtgagtggatttaa

SEQ ID NO: 1305 - DNA, 690 bp, Streptococcus pneumoniae
atggggaaacggattttattacttgagaaagaacgaaatctagctcattttttaagtttggaactccagaaagagcagtatcgggttgatctggtagaggaggggcaaaaagccctttccatggctcttcagacagactatgatttgattttattgaacgttaatctgggagatatgatggctcaggattttgcagaaaaattgagtcgaactaaacctgcctcagtcatcatgattttagatcattgggaagacttgcaagaagagctggaagttgttcagcgttttgcagtttcatacatctataagccagtctttatcgaaaatctggtagcgcgtatttcggcgatcttccgaggtcgggacttcattgatcaacactgcagtctgatgaaagttccaaggacctaccgcaatcttaggatagatgttgaacatcacacggtttatcgtggtgaagagatgattgctctgacccgccgtgagtatgaccttttggcgacacttatgggaagtaagaaagtattgactcgtgagcaattgttggaaagtgtttggaagtatgaaagtgcgaccgagacaaatatcgtagatgtctatatccgctatctacggagcaagcttgatgttaaaggccaaaaaagctacattaaaaccgtgcgtggtgttggttacaccatgcaagaatag

SEQ ID NO: 1306 - DNA, 1374 bp, Streptococcus pneumoniae
ttgcccttaatattgaatctcgtggttacacagttgctatctacaaccggtagtaaagaaaaaacggaagatgtgattgcttgccatcctgaaaagaactttgtaccaagctatgacgttgaaagttttgtaaactcaatcgaaaaacctcgtcgtatcatgctgatggttcaagctggacctggtacagatgctactatccaagcccttcttccacaccttgacaagggtgatatcttgattgacggaggaaacactttctacaaagatactatccgtcgtaatgaagaattggcaaactcaggtatcaactttatcggtactggagtttctggtggtgaaaaaggtgcccttgaaggtccttctatcatgcctggtggacaaaaagaggcctacgaattggtttcggatgttcttgaagaaatctcagctaaagcaccagaagatggcaaaccatgtgtgacttatatcggtcctgatggagctggtcactatgtgaaaatggttcacaacggtatcgagtacggtgatatgcaattgatcgcagaaagctatgacttgatgcaacacttgctaggcctttctgcagaggatatggctgaaatctttactgagtggaacaagggtgaattggatagctacttgatcgaaatcacagctgatatcttgagccgtaaagacgatgaagaccaagatggaccaatcgtagactacatccttgatgctgcaggtaacaagggaactggtaaatggacgagccaatcatctcttgaccttggtgtaccattgtcactgattactgagtcagtgtttgcacgctacatttcaacttacaaagaagaacgtgtacatgctagcaaggtgcttccaaaaccagctgccttcaactttgaaggagacaaggctgaattgattgaaaaaatccgtcaagccctttacttctcaaaaatcatttcatacgcacaaggatttgctcaattgcgtgtagcctctaaagaaaacaactggaacttgccatttgcagatatcgcatctatctggcgtgatggctgtatcatccgttctcgtttcttgcaaaagattacagatgcttacaaccgcgatgcagatcttgccaaccttcttttggacgagtacttcttggatgttactgctaagtatcaacaagcagtgcgtgatatcgtagctcttgcggttcaagctggtgtgccagtgccaactttctcagcagctattacttactttgatagctaccgttcagctgaccttccggctaacttgatccaagcacaacgtgactactttggtgctcacacttaccaacgtaaagacaaagaaggaaccttccactactcttggtatgacgaaaaataa

SEQ ID NO: 1307 - DNA, 1395 bp, Streptococcus pneumoniae
atgagtaaaaaaagacgaaatcgtcataaaaaagaaggtcaagaaccgcaatttgattttgatgaagcaaaagagctaacagttggtcaagctattcgtaaaaatgaagaagtggaagcaggagtcttgcctgaggattccattttggacaagtatgttaagcaacacagagatgaaattgaggcggataagtttgcgactcgtcaatacaaaaaagaggagttcgttgaaactcagagtctggatgatttaattcaagagatgcgtgaggctgtagagaagtcagaagcttcttcggaggaagttccatcttctgaagacatcttactacccttgcctctggacgatgaggagcaaggcttggatcctctattgctagatgatgaaaatccaacagaaatgactgaagaagtggaagaggagcaaaacctttctcgtctggatcaagaggactcagaaaagaaaagtaaaaaaggctttattttgaccgttttggcgcttgtatcagtaattatttgtgtcagtgcttattatgtctaccgtcaagtgaatcgctcgaccaaggaaattgaaacttctcaatcaactacagccaatcaatcagatgtggatgattttaatacactttatgacgccttttacacagatagcaataaaacggctttgaaaaatagccagtttgataaactgagtcaactcaaaaccttgcttgataagctggaaggtagtcgtgaacatacacttgccaaatctaaatatgatagtctagcaacgcaaatcaaggctattcaagatgtcaatgcacaatttgaaaaatcagctattgtggatggtgtgttggatacccatgccaaagctaaatcggatgctaaatttacagatattaaaactgggaatacggagcttgataaagtgctagataaggctatcagtcttggtaagagccagcaaacaagtacttttagctcaagttcaagtcaaactagcagctcaagctctagtcaagcaagctcaaatacgacaagtgagccaaaaccaagtagttcaaatgagactagaagtagtcgcagtgaagtcaatatgggtctctcgagtgcaggggttgctgttcaaagaagtgccagtcgtgttgcctataatcagtctgctattgatgatagtaataactctgcctgggattttgcggatggtgtcttggaacaaattctagcgacttcacgttcacgtggctatatcactggagaccaatatatccttgaacgtgtcaatatcgttaacggcaatggttattacaacctctataagccagatggaacctatctctttacccttaactgtaagacaggctactttgtcggaaatggcgctggtcatgcggatgacttggactactaa

SEQ ID NO: 1308 - DNA, 1158 bp, Streptococcus pneumoniae
atgaaaaaagaatttaatttaattgcaactgtggcagcagggcttgaggctgtcgttggtcgtgaagtgcgagagttgggctacgattgtcaggttgaaaatggacgtgttcgttttcaaggagacgtgagagctattatcgaaaccaacctttggcttcgggcagcagatcgtatcaaaattatcgtaggaacgttcccagctaagacttttgaagagctatttcagggagttttcgctttggattgggaaaattatttaccacttggagctcggttcccgatttcaaaagctaaatgtgttaagtccaaacttcacaatgagcccagtgttcaggctatttctaagaaagctgttgtcaagaaattgcagaaacactatgctcgcccagaaggggttcctctgatggagaatggcccagagtttaagattgaggtctctattctcaaagatgtggcaactgtcatgattgatacgaccgggtctagcctctttaaacgtggttatcgtaccgaaaaaggtggcgctcctatcaaggaaaatatggcagcagccattttacaactttctaattggtatccagacaagactttgattgatccgacctgtggttcggggactttctgtattgaggcagttatgattgctagaaagatggcgccaggtcttcgtcgctcttttgcatttgaggaatggaactggatcagcgatcgcttgattcaagaagtgcgcacagaagcggctaaaaaagtagaccgtgagcttgagctggatatcatgggctgtgatattgatgctcgcatggtggaaattgctaaggccaatgctcaggcagctggtgttgcaggagacattacttttaagcagatgcgcgtgcaggatttacgttccgataaaatcaatggagtaatcatttccaatccgccttatggtgaacgtttgtcagatgatgcaggggtgaccaagctctatgctgagatggggcaagtatttgcaccgctgaaaacttggagcaaatttatcctgactagtgatgaagcttttgaaagcaagtatggtagccaagcagataagaagcgtaagttatacaacggaaccttgaaagtggatctatatcaatattttggtcagcgtgtcaaacggcaagaggtaaaatag

SEQ ID NO: 1309 - DNA, 330 bp, Streptococcus pneumoniae
atggcaagtattattttttcagcgaaagatatttttgaacaagagtttggacgtgaagtccgtggctataataaagtagaagttgacgagtttttagacgatgtcatcaaggactatgaaacctatgctgccttggtcaagtcacttcgtcaggaaattgcggatttgaaggaagaattaactcgtaaaccgaaaccttcaccagttcaagcagaaccccttgaagcggcaattacaagttctatgacgaattttgatattttgaaacgcctgaatagattggaaaaagaagtttttggtaaacaaattttagataactcagatttttaa

SEQ ID NO: 1310 - DNA, 528 bp, Streptococcus pneumoniae
atggctacagctttggttttaggctattctgcttttgatttgggtttattttctgataaggatcctcgtcttaaattgattaaaaaagcgatacgtaaagatttagaggctatggcagcagatggggtgtcttggcttgtgtttacaggaagtttgggttttgaatattgggttttagaggttgctcaggagatgaaaaccgaatacggtttccagttggccaccatttttgcttttgaaacccatggggaaaattggaatgaaggcaatcagatgaaactgagtcgctttaagcaggtagactttgtcaaatatgcttatcctcgctatgaacacaaggggcagttaagagattaccagcagtttttgctggaaaacacgactagttcctatcttttttatgatgaagaaaatgaaacaaaactagcttatttttaccaaaagatgaaaaatcaagaggactattttataaagagattaacatttgatcaattaaatgaacttgctgaaaatttttccgaaaattga

SEQ ID NO: 1311 - DNA, 597 bp, Streptococcus pneumoniae
atggtcaactatccacataaagtttcatcacaaaaaagacaaacatctctttctcaacccaaaaatttcgcaaatcgaggaatgtcttttgaaaagatgatcaatgctaccaacgactactatttgtctcagggcttggctgttatacataagaaaccaactcctattcaaatcgtacaagtggactatccacaacgaagtcgtgccaagattgttgaagcctattttcgacaagcttcaacgacggactattctggcgtttataatggatattacatcgactttgaagtcaaggaaacaaaacaaaaacgtgcgattccgatgaaaaattttcatccacatcagattcagcatatggaacaagtccttgcccaacaaggaatctgctttgtccttcttcacttttcttctcagcaagaaacctacttattgccggcattcgatttgattcgcttctatcatcaagataagggacaaaaatcaatgccacttgaatatattcgagaatatggatatgaaatcaaggctggtgccttccctcaaattccttatctcaatgttatcaaagaacatttattaggtggtaaaacaagatga

SEQ ID NO: 1312 - DNA, 2160 bp, Streptococcus pneumoniae
atgaacaaaccaacgattctgcgcctaatcaagtatctgagcattagcttcttaagcttggttatcgcagccattgtcttaggcggaggagtttttttctactacgttagcaaggctcctagcctatccgagagtaaactagttgcaacaacttctagtaaaatctacgacaataaaaatcaactcattgctgacttgggttctgaacgccgcgtcaatgcccaagctaatgatattcccacagatttggttaaggcaatcgtttctatcgaagaccatcgcttcttcgaccacagggggattgataccatccgtatcctgggagctttcttgcgcaatctgcaaagcaattccctccaaggtggatcaactctcactcaacagttgattaagttgacttacttttcaacttcgacttccgaccagactatttctcgtaaggctcaggaagcttggttagcgattcagttagaacaaaaagcaaccaagcaagaaatcttgacctactatataaataaggtctacatgtctaatgggaactatggaatgcagacagcagctcaaaactactatggtaaagacctcaataatttaagtttacctcagttagccttgctggctggaatgcctcaggcaccaaaccaatatgacccctattcacatccagaagcagcccaagaccgccgaaacttggtcttatctgaaatgaaaaatcaaggctacatctctgctgaacagtatgagaaagcagtcaatacaccaattactgatgggctacaaagtctcaaatcagcaagtaattaccctgcttacatggataattacctcaaggaagtcatcaatcaagttgaagaagaaacaggctataacctactcacaactgggatggatgtctacacaaatgtagaccaagaagctcaaaaacatctgtgggatatttacaatacagacgaatacgttgcctatccagacgatgaattgcaagtcgcttctaccattgttgatgtttctaacggtaaagtcattgcccagctaggagcacgccatcagtcaagtaatgtttccttcggaattaaccaagcagtagaaacaaaccgcgactggggatcaactatgaaaccgatcacagactatgctcctgccttggagtacggtatctacgattcaactgctactatcgttcacgatgagccctataactaccctgggacaaatacccctgtttataactgggataggggctactttggcaacatcaccttgcaatacgccctgcaacaatcgcgaaacgtcccagccgtggaaactctaaacaaggtcggactcaaccgcgccaagactttcctaaatggtctcggaatcgactacccaagtattcactactcaaatgccatttcaagtaacacaaccgaatcagacaaaaaatatggagcaagtagtgaaaagatggctgctgcttacgctgcctttgcaaatggtggaacttactataaaccaatgtatatccataaagtcgtctttagtgatgggagtgaaaaagagttctctaatgtcggaactcgtgccatgaaggaaacgacagcctatatgatgaccgacatgatgaaaacagtcttgacttatggaactggacgaaatgcctatcttgcttggctccctcaggctggtaaaacaggaacctctaactatacagacgaggaaattgaaaaccacatcaagacctctcaatttgtagcacctgatgaactatttgctggctatacgcgtaaatattcaatggctgtatggacaggctattctaaccgtctgacaccacttgtaggcaatggccttacggtcgctgccaaagtttaccgctctatgatgacctatctgtctgaaggaagcaatccagaggattggaatataccagaggggctctacagaaatggagaattcgtatttaaaaatggtgctcgttctacgtggaactcacctgctccacaacaacccccatcaactgaaagttcaagctcatcatcagatagttcaacttcacagtctagctcaaccactccaagcacaaataatagtacgactaccaatcctaacaataatacgcaacaatcaaatacaacccctgatcaacaaaatcagaatcctcaaccagcacaaccataa

SEQ ID NO: 1313 - DNA, 204 bp, Streptococcus pneumoniae
tcaggggttgtatttgattgttgcgtattattgttaggattggtagtcgtactattatttgtgcttggagtggttgagctagactgtgaagttgaactatctgatgatgagcttgaactttcagttgatgggggttgttgtggagcaggtgagttccacgtagaacgagcaccatttttaaatacgaattctccatttctgtag

SEQ ID NO: 1314 - DNA, 5304 bp, Streptococcus pneumoniae
atgaataaaggattatttgaaaaacgttgtaaatatagtattcggaaattttcattaggtgttgcttctgttatgattggagctgcattctttgggacaagtccggttcttgcagatagcgtgcagtctggttccacggcgaacttaccagctgatttagctactgctcttgcaacagcaaaagagaatgatgggcgtgattttgaagcgcctaaggtgggagaagaccaaggttctccagaagttacagatggacctaagacagaagaagaactattagcacttgaaaaagaaaaaccggctgaagaaaaaccaaaagaggataaacctgcagctgctaaacctgaaacgcctaagacggtaacccctgaatggcaaacggtagagaaaaaagaacaacagggaacagtcactatccgagaagaaaaaggtgtccgctacaaccaactatcctcaactgctcaaaatgataacgcaggtaaaccagctctgtttgaaaagaagggcttgaccgttgatgccaatggaaatgcaactgttgatttaaccttcaaagaagattctgaaaagggcaaatcacgctttggtgtcttcttgaaatttaaagataccaataataatgtttttgtcggttatgacaaggatggctggttctgggagtataaatctccaacaactagcacttggtatagaggtagtcgtgttgctgctcctgaaacaggatcaacaaaccgtctctctatcactctcaagtcagacggtcagctaaatgccagcaataacgatgtcaatctctttgacacagtgactctaccagctgcggtcaatgaccatcttaaaaatgagaagaagattcttctcaaggcgggctcttatgacgatgagcgaacagttgttagcgttaaaacggataaccaagagagggtaaaaacagaggatacccctgcccagaaagaaacaggtccggttgttgacgatagaaaggtgacttatgatacgatccagtctaaggtacttaaggcagtaattgaccaagccttccctcgtgtcaaggaatacaccttgaatggacatactttgccaggacaggtgcaacaattcaaccaagtctttatcaataaccaccgaatcacccctgaagtcacttataaaaaaatcaatgagacaacagcagagtacttgatgaagcttcgcgatgatgctcacttaatcaatgcggaaatgacagtacgcttgcaagttgtggacaatcaattgcactttgatgtgaccaagattgtcaaccacaatcaagtcactccaggtcaaaagattgatgacgaaagaaaactactttcttctattagtttcctcggcaatgctttagtctctgtttctagtgatcaaactggtgctaagtttgatggggcaaccatgtcaaacaatacgcatgtcagcggagatgatcatatcgatgtaaccaatccaatgaaggatttggctaagggttacatgtatggatttgtttctacagataagcttgctgctggtgtttggagtaactctcaaaatagctatggtggtggttcgaatgactggactcgtttgacagcttataaagaaacagtcggaaatgccaactatgtaggaatccacagctctgaatggcaatgggaaaaagcttataagggcattgttttcccagaatacacgaaggaacttccaagtgctaaggttgttatcactgaagatgccaatgcagacaagaaagttgattggcaagatggtgccattgcttatcgtagcattatgaacaaccctcaaggttgggaaaaagttaaggatatcacagcttaccgtatcgcgatgaactttggttctcaagcacaaaacccattccttatgaccttggatggtatcaagaaaatcaatctccacacagatggtcttgggcaaggtgttctccttaaaggatatggtagcgaaggccatgactctggtcacttgaactatgctgatattggtaagcgtatcggtggtgtcgaagacttcaagaccctaattgagaaggctaagaaatatggagctcatctaggtatccacgttaacgcttcagaaacttatcctgagtctaaatacttcaatgaaaaaattctccgtaagaatccagatggaagctatagctatggttggaactggctagatcaaggtatcaacattgatgctgcctatgacctagctcatggtcgtttggcacgttgggaagatttgaagaaaaaacttggtgacggtctcgactttatctatgtggacgtttggggtaatggtcaatcaggtgataacggtgcctgggctacccacgttcttgctaaagaaattaacaaacaaggctggcgctttgcgatcgagtggggccatggtggtgagtacgactctaccttccatcactgggcagctgacttgacctacggtggctacaccaataaaggtatcaacagtgccatcacccgctttatccgtaaccaccaaaaagatgcttgggttggggactacagaagttatggtggtgcagccaactatccactgctaggtggctacagcatgaaagactttgaaggctggcaaggaagaagtgattacaatggctatgtaaccaacttatttgcccatgacgtcatgactaagtacttccaacacttcactgtaagtaaatgggaaaatggtacaccggtgactatgaccgataacggtagcacctataaatggactccagaaatgcgagtggaattggtagatgctgacaataataaagtagttgtaactcgtaagtcaaatgatgtcaatagcccactataccgtgaacgtacagtaacgctcaacggacgtgtcatccaagatggttcagcttacttgactccttggaactgggatgcaaatggtaagaaactttctactgataaggaaaagatgtactacttcaatacgcaggccggtgcaacaacttggacccttccaagcgattgggcaaagagcaaggtttacctttacaagctaactgaccaaggtaagacagaagagcaagaactaactgtaaaagatggtaaaattaccctagatcttctagcaaatcaaccatacgttctctatcgttcgaaacaaaccaatcctgaaatgtcatggagtgaaggcatgcacatctatgatcaaggatttaatagcggtactttgaaacattggaccatttcaggcgatgcttctaaggcagaaattgtcaagtctcaaggggcaaacgatatgcttcgtattcaaggaaacaaagaaaaagttagtctcactcagaaattaactggcttgaaaccaaataccaagtatgccgtttatgtcggtgtcgataaccgtagtaatgccaaggcaagtatcactgtgaatactggtgaaaaagaagtgactacttataccaataagtctctcgccctcaactatgtaaaagcctacgcccacaatacacgtcgtaacaatgctacagttgacgatacaagttacttccaaaacatgtacgccttctttacaactggatcggacgtctcaaatgttactctgacattgagtcgtgaagctggtgatcaagcaacttactttgatgaaattcgtacctttgaaaacaattcaagcatgtacggagacaagcatgatacaggtaaaggcaccttcaagcaagactttgaaaatgttgctcagggtatcttcccatttgtagtgggtggtgtcgaaggtgtcgaagacaaccgcactcacttgtctgaaaaacacgatccatatacacaacgtggttggaacggtaagaaagttgatgatgttatcgaaggaaattggtcactcaagacaaatggactagtgagccgtcgtaacttggtttaccaaactattccgcaaaacttccgttttgaagcaggtaagacctaccgtgtaacctttgaatacgaagcaggttcagacaatacctatgcttttgtagtcggtaagggagaattccagtcaggtcgtcgtggtactcaagcaagcaacttggaaatgcatgaattgccaaatacttggacagattctaagaaagccaagaaggcaaccttcctcgtgacaggtgcagaaacaggggatacttgggtaggtatctactcaactggaaatgcaagtaatactcgtggtgattctggtggaaatgccaacttccgtggttataacgacttcatgatggataatcttcaaatcgaagaaattaccctaacaggtaagatgttgacagaaaatgctctgaagaactacttgccaacggttgccatgactaactacaccaaagagtctatggatgctttgaaagaggcggtctttaacctcagtcaggccgatgatgatatcagtgtggaagaagcgcgtgcagagattgccaagattgaagccttgaagaatgctttggttcagaagaaaacggctttggtagcagatgactttgaaagtttggatgcgccagctcaaccaggtgaaggcctagagaatgcttttgatggcaatgtgtctagtctatggcatacatcttggaatggtggagatgtaggcaagcctgcaaccatggtcttgaaagaaccaactgaaatcactggacttcgttacgttccacgtggatcgggttcaaatggtaacttgcgtgatgtgaaacttgttgtgacagatgagtctggcaaggagcatacctttactgcaactgattggccagataacaataagccaaaagacattgattttggtaagacaattaaggctaagaaaattgtccttacaggtactaagacttacggagatggtggcgataaataccaatctgcagcggaacttatctttactcgtccacaggtagcagaaacacctcttgacttgttaggctatgaagcagctttggctaaggctcagaaattaacagacaaagacaatcaagaggaagtagctagcgttcaggcaagcatgaaatatgcgacggataaccatctcttgacggaaagaatggtggaatactttgcagattatctcaaccaattaaaagattctgctacgaaaccagatgctccaactgtagagaaacctgagtttaaacttagctctttagcttccgagcaaggtaagacgccagattataagcaagaaatagctagaccagaaacacctgaacaaatcttgccagcaacaggtgagagtcaatctgacacagccctcttcctagcaggtgttagcctagccctatctgctctctttgtagtaaaaacgaagaaagactag

SEQ ID NO: 1315 - DNA, 1983 bp, Streptococcus pneumoniae
atgaaaagttcaaaactatttgcccttgcgggcgtgacattattggcggcgactactttagctgcatgctctggatcaggttcaagcactaaaggtgagaagacattctcatacatttatgagacagaccctgataacctcaactatttgacaactgctaaggctgcgacagcaaatattaccagtaacgtggttgatggtttgctagaaaatgatcgctacgggaactttgtgccgtctatggctgaggattggtctgtatccaaggatggattgacttacacttatactatccgtaaggatgcaaaatggtatacttctgaaggtgaagaatacgcggcagtcaaagctcaagactttgtaacaggactaaaatatgctgctgataaaaaatcagatgctctttaccttgttcaagaatcaatcaaagggttggatgcctatgtaaaaggggaaatcaaagatttctcacaagtaggaattaaggctttggatgatcagacagttcagtacactttgaacaaaccagaaagcttctggaattctaagacaaccatgggtgtgcttgcgccagttaatgaagagtttttgaattcaaaaggagatgattttgccaaagctacggatccaagtagtctcttgtataatggaccttatttgttgaaatccattgtgaccaaatcttctgttgaatttgcgaaaaatccgaactactgggataaggacaatgtgcatattgacaaagttaaattgtcattctgggatggtcaagataccagcaaacctgcagaaaactttaaagatggtagccttacagcagctcgtctctatccaacaagtgcaagtttcgcagagcttgagaagagtatgaaggacaatattgtctatactcaacaagactctattacgtatctagttggtacaaatattgaccgtcagtcctataaatacacatctaagaccagcgacgaacaaaaggcatcgactaaaaaggctctcttaaacaaggatttccgtcaggctattgcctttggttttgatcgtacagcctatgcctctcagttgaatggacaaactggagcaagtaaaatcttgcgtaatctctttgtgccaccaacatttgttcaagcagatggtaaaaactttggcgatatggtcaaagagaaattggtcacttatggggatgaatggaaggatgttaatcttgcagattctcaggatggtctttacaatccagaaaaagccaaggctgaatttgctaaagctaaatcagccttacaagcagaaggagtccaattcccaattcatttggatatgccagttgaccaaacagcaactacaaaagttcagcgcgtccaatctatgaaacaatccttggaagcaactttaggagctgataatgtcattattgatattcaacaactacaaaaagacgaagtaaacaatattacatattttgctgaaaatgctgctggcgaagactgggatttatcagataatgtcggttggggtccagactttgccgatccatcaacctaccttgatatcatcaaaccatctgtaggagaaagtactaaaacatatttagggtttgactcaggggaagataatgtagctgctaaaaaagtaggtctatatgactacgaaaaattggttactgaggctggtgatgagactacagatgttgctaaacgctatgataaatacgctgcagcccaagcttggttgacagatagtgctttgattattccaactacatctcgtacagggcgtccaatcttgtctaagatggtaccatttacaataccatttgcattgtcaggaaataaaggtacaagtgaaccagtcttgtataaatacttggaacttcaagacaaggcagtcactgtagatgaataccaaaaagctcaggaaaaatggatgaaagaaaaagaagagtctaataaaaaggctcaagaagatctcgcaaaacatgtgaaataa

SEQ ID NO: 1316 - DNA, 234 bp, Streptococcus pneumoniae
cctaagctaaattttaaaaagcgagggtggttattttctcaaagttttgaaggagctaaagcaacagctattattatgagtttgttggaaacagctaaacgtcatcaattaaatagcgagaaatatctattctatcttctagaatgtcttccaaacgaggaaactctcgtaaacaaagaggttttagaggcttatttaccatggactaaagttgtacaagaaaagtgcaaataa

SEQ ID NO: 1317 - DNA, 450 bp, Streptococcus pneumoniae; identical to SEQ ID NO: 802

SEQ ID NO: 1318 - DNA, 174 bp, Streptococcus pneumoniae
ttgcccttcctagttttgaacctgctaaaactgactgacgccggcactaagcaaagaagtcttccattaagggctggagatgttcttgacgtttctgtagtcgttcatcagctggcaaagcctcccagtctctttccagggaaaataactgatcacaataagctaaacctttag

SEQ ID NO: 1319 - DNA, 258 bp, Streptococcus pneumoniae
ttggtaaactgcgaaccgctagaagcttatcgtcaactggaagaagctgaacttgttggatgttgggcacatgtgagaaggaagttttttgaagcgacccccaagcaagcagataaatcatccttaggagctaaaggtttagcttattgtgatcagttattttccctggaaagagactgggaggctttgccagctgatgaacgactacagaaacgtcaagaacatctccagcccttaatggaagacttctttgcttag

SEQ ID NO: 1320 - DNA, 429 bp, Streptococcus pneumoniae; identical to SEQ ID NO: 801

SEQ ID NO: 1321 - DNA, 852 bp, Streptococcus pneumoniae
atgattttaattacaggggcaaatggccaattaggaacggaacttcgctatttattggatgaacgtaatgaagaatacgtggcagtagatgtggctaagatggacattaccaatgaagaaatggttgagaaagtttttgaagaggtgaaaccgactttagtctaccattgtgcagcctacaccgctgttgatgcagcagaggatgaaggaaaagagttggacttcgccatcaatgtgacggggacaaaaaatgtcgcaaaagcatctgaaaagcatggtgcaactctagtttatatttctacggactatgtctttgacggtaagaaaccagttggacaagagtgggaagttgatgaccgaccagatccacagacagaatatggacgcactaagcgtatgggggaagagttagttgagaagcatgtgtctaatttctatattatccgtactgcctgggtatttggaaattatggcaaaaacttcgtttttaccatgcaaaatcttgcgaaaactcataagactttaacagttgtaaatgatcagtacggtcgtccgacttggactcgtaccttggctgagttcatgacctacctagctgaaaatcgtaaggaatttggttattatcatttgtcaaatgatgcgacagaagacacaacatggtatgattttgcagttgaaattttgaaagatacagatgtcgaagtcaagccagtagattccagtcaatttccagccaaagctaaacgtccgctaaactcaacgatgagcctggccaaagccaaagctactggatttgttattccaacttggcaagatgcattgcaagaattttacaaacaagaagtgagataa

SEQ ID NO: 1322 - DNA, 1050 bp, Streptococcus pneumoniae
atgactgaatacaaaaatattatcgtgacaggtggagctggctttatcggttctaactttgtccattatgtttacgagaactttccagatgttcacgtgacagtcctagataagttgacttatgctggaaaccgcgcgaatattgaggaaattttaggtaatcgtgttgagttagttgttggtgacattgctgatgcggagttggtagacaagttggctgctcaagcagatgctatcgttcattatgcagcggaaagccacaatgataattcgctcaatgatccatcgccatttattcatactaacttcattggaacctatactcttttagaagctgctcgtaagtatgatattcgcttccaccatgtatcgacagatgaagtttatggggatctccctttacgcgaagatttgccaggtcatggagaagggccgggtgagaaatttacggctgaaaccaagtacaatccaagctcgccttactcatcaaccaaggcagcctcagatttgattgtcaaagcctgggtgcgttcttttggagtcaaggcaacgatttccaactgttcaaataactacggtccttatcaacatatcgaaaaattcatcccacgtcagattactaacatcctaagtggtatcaagccaaaactttacggtgaaggtaaaaacgttcgtgactggattcataccaatgaccattcttcaggagtttggacaatcttgacaaaagggcaaatcggtgaaacctacttgattggggctgatggtgagaagaacaataaggaagttttggaacttatccttaaggaaatgggacaagctgcggatgcctatgatcatgtgactgaccgtgcaggacatgaccttcgctatgcgattgatgctagcaagctccgtgatgagttggggtggaaacctgaatttaccaactttgaagctgggctcaaggcaacaatcaagtggtatacagataaccaagaatggtggaaagcagaaaaagaagctgttgaagccaattatgctaagactcaggagattattacagtataa

SEQ ID NO: 1323 - DNA, 597 bp, Streptococcus pneumoniae
atgtcagataatttttttggaaaaacacttgcagtgcgtaagattgatgctataccaggactgctagagtttgacattcccgttcatggagacaatcgtggttggtttaaggaaaacttccagaaggaaaagatggagccacttggctttcctgaaagcttctttgctgcagggaaattgcaaaacaacgtcagcttttctcgcaaaaatgttcttcgaggattgcatgcagaaccttgggacaagtatatctctgttgcagacgatgggaaggttttaggatcttgggttgatctacgcgagggtgaaacctttgggaatacctatcagacagtgattgatgcgagtaagggaatctttgttcctcgaggcgtagctaatggcttccaagttttatcagatacagtgtcatatagctatctggtcaatgattactgggctcttgaactcaaacccaagtatgcctttgtgaactacgctgatccaagccttggtattgaatgggaaaatattgcagaagcagaggtttcagaagcagataaaaatcatccactacttaaggatgtaaaacctttgaaaaaagaagatttggaataa

SEQ ID NO: 1324 - DNA, 870 bp, Streptococcus pneumoniae
atgaaaggtattattcttgcaggcggctcaggtacccgcctgtacccacttactcgggctgcgtcaaaacagctgatgccggtttatgataaacctatgatttattatccgttgtcgacattaatgttggctggaattaaagatattttgattatctcaactcctcaagatttgccccggtttaaggacttgctcttggatggttccgaatttgggatcaagctttcctatgcggaacaacctagtcccgatggacttgctcaggcttttcttatcggtgaagaatttatcggtgacgatagtgttgccttgattttgggcgacaatatctatcatggacctggtttgagcaaaatgcttcaaaaggcagcccagaaagagaaaggtgcgactgtttttggctaccaagtgaaggatccagagcgttttggtgtggtcgagtttgatacagacatgaatgccatttccatagaagaaaaaccagagaatcctcgctccaactatgccgtgaccggtctgtatttctatgataatgatgttgtagaaattgctaaaggtattaaaccaagtgcacgtggcgagttagaaattacagatatcaacaaggcttacctaaatcgtggtgacctttctgttgagctgatggggcgtggttttgcctggttggatacgggaacccatgaaagcctgctagaagcttctcagtatatcgaaacagttcaacggatgcagaatgttcaagttgcaaacttggaagaaattgcctatcgcatgggctatatcagttgtgaagatgtgctcgagttggcgcaacctctgaagaagaatgaatacggacaatatttgctccgtttgattggagaagcatag

SEQ ID NO: 1325 - DNA, 1428 bp, Streptococcus pneumoniae
gtggggagtatagttatgaaattgaagtttcttataacaaatttgtttcatgttcttttgtctaatctgattacaattcttacatcagttatagttgtactaattttaccaaaaattatgggagtaactgagtatagttattggcaactatatattttttacctaacatatattggtttttttcatctgggatggattgatggaatttatcttaaatatggcggattagagtaccagaacttagataagaaacagttttattctcaaatacttcaattttccagttttttaattttaatttcttttctattatttggttttaacttattgactgtgacagatcaaaatgcaaaatatatttataacatgactattattagtatgatagttacaaatttaagaatgttattcgtttatattttgcagatgacaaatcgattaaaggatagttccatcattctaatcagtgatcgcgttatatatgttattcttttattcctgtttattatatttaaatggcatgaatacaaggtaatgatttgggcagatgttttgggaaggacattttctctcctactttctttttggatttgtaaagatattgtttttcaatccttatccgagtttatattggatctgagagagtcttttgacaatatccgtgttggaatcaatttaatgttatccaatattgcaagtagtatgattattggtattgttcgaatgggaattcaatggaattggaatatcgaaacattcgggaaagtatcactgacgctaagcatctctaatttattaatgacttttattaatgcgattggtttagttgtttttcctttgttaaaacggacaaaaacggaaaatttatctaaaatttattccaacttaagaaatgttttgatgcttatcatgttcgcgattttgctcatttactatcctttaaaaattgtattagacctctggttgccagcctatcaagatgccttgattttcatgacccttattttccctatgtcagtctatgaaggaaaaatggcattggtcattaatacttacttaaaggcattaagaatggagagagatattctcaaaataaatactttgattatgttgttcagtatgttagttaccctaataactactctattattaaatagtttagagctgactgttgtatcgatagttgttttgctagctttacgtagcgtaatagcagaactaattctatctaaaaaactggatgtttcggttaagaaagatattgtattagaatttcttttgacgattgtctttatttcttcaagttggtacttaccgatttggcccgcagtaatagtttatttgttagcgtatactttatacttgtatctaaagcgtaaagatataaaaatgtatatagaatattttagaaagaaaatatttgaataa

SEQ ID NO: 1326 - DNA, 285 bp, Streptococcus pneumoniae
actattactgcgggccaaatcggtaagtaccaacttgaagaaataaagacaatcgtcaaaagaaattctaatacaatatctttcttaaccgaaacatccagttttttagatagaattagttctgctattacgctacgtaaagctagcaaaacaactatcgatacaacagtcagctctaaactatttaataatagagtagttattagggtaactaacatactgaacaacataatcaaagtatttattttgagaatatctctctccattcttaatgcctttaagtaa

SEQ ID NO: 1327 - DNA, 1344 bp, Streptococcus pneumoniae
atgcttttaaatttcttattcatatttatttttctattaattatcattacatttatattatttgagggagatttgtttcaacccgcagtaattttaacacttgcttattttatttcgattgcaagtgctctagttaatagaaatgtttggggaacagaactccatttcaaaacctttggtttgatattgctaggggttgctacatttattatagtttccttgttgacaaaattgtcgtacaaacctaaagtggagggaatttcgtataaagaattaaaagaaataaatccttcaaagataatatatggcattcttctgattctaaatcttgttatgctatttctttatatccatgaaattcagaaagtggtactgttttcaggtagaggtttttctaatattacagatttgataagtaactataggtacctatcttattattcaaatgaagtagaagatcgtgtaagtggaatgattaatcaactagctaaaattattccagcgactacatttgtttctttatatatatttataaataattattttataacgaagcaaataaagaaaaatttcatttatttgattccaatagctatattctttgtctatgcaatcattagtggtggtagactgccccttataaggttagttattggaactctgttgatattgtatatatactctgtgtacgggagtcataaatctcaacttaccagaagttttaaaatgattactcgctctctttttgcatttcttatgttgatagttttattctttcttttaaaatttgtattagggcgttcttctcaggaagattttatcagttacatcactcgttatatgggaggctcaattcaactatttgatttatttgttatagatccgatacgacgtaacaaagaactaggtgcagaaactttttcgggaatttatgagatgcttgcaaaattaggatttgataataatattataaaaggcttagaatggagaatatcgcctaattattattctttagggaatgtgtatactgcaattagacgctattattcagactttggtgtaattggtattgtaatttgtcagagttttacagcatggttgtatactttaggttatgaaaaaattagacatcattctttagttacaaatggtcaaagatttaggttgattctattagcagcttcattttatccattatttttaaatagtatcgaggatgtgttttatatttcaatggttaccattggatatggaatccaaattgttatcttttatctggttttttgggttcttctgaaagttcaggttgactttaacaaaggtaaattaaggataaatagatga

SEQ ID NO: 1328 - DNA, 987 bp, Streptococcus pneumoniae
atgggaaaatcagttgcaattttaatgaccacttataatggtgagagatatttgtcacaacagattgatagtattaggtctcaaacatttaccaattggacgctttttattagagatgatggatcaaaagataagacagtagaagtaatacagaggtattctaagatagatgatagaattagattagttgaaaatccctcaaagtttcatggagcttattataatttttttaatctaattgaatacgttaaaaacaattatcaatttgattattactttttttgtgatcaagatgatatttggaaagagcacaagctagaaatacagctgttaagattttctaaggatgaaatgccagagatggtttactctgatatgtcaacgattgatgccaataataagttgatagatattagtataaataacataatggggattgaattaccgaacataaataatttgtattttattcatgcctatatctgggggtgtacggcaggctttaatcatgcattgttagagatggttccttcagttgatattgataaagattatttatatatagaaaaactgtctcatgataattattttgcaaagtttgcactagagtatgggaaggtgttgttctgccctgagcaactggtcttgtatcgaagacacggacataatgtaacaactagtcatcattttaaattatctccgctaaatattctcagaaaggctattttgggtttcaatgaattggcacttacacatgctggggtatataatcaaactctttatatgctaaaaaaagcttctgaaaaaagtcctttaagtgatagactgcttgaaattcaggaagtaatcaaaattggaggattaaaaggtgtgagatatttctgtcagaatcgaatttctcgaaagcaactcgtaagaaccatcggcttatataccatcatgctttttggcacctataaaaaatatattatgaaagaactctcataa

SEQ ID NO: 1329 - DNA, 726 bp, Streptococcus pneumoniae
atgataatgtcaatatataaactttataaagatattgaaagaaaaacgatgtcgcctgctaaaaaagcaatggctaaaaatgattattttgcgttttatgttggaagaccgttatcctatcttttaacagttccttttttaaaaacgaatattactcccaatcaagtatcttatttatctatagcccctttgattcttggatttctgacaatgacatttacaactaatttcattctattattgctggcatggtttctattttttttatggaacttactagatggagtagatgggaacttagctagatatcgggagcaatactcgaaggatggaagtgtagtagatgcaatggcaggctatgtggctatggtgctgacgtattttggtgcaggaatagtagcaactcatctaaatggctcagatatgtatgtgattttgggtgctttatctggaatttctttgatttttccaagattggtgatgcataagtatatcaacacagtagcacgaaatgagtctgtcaataacattaaagataaatcaaattttagtactataaaactactggctttaaatatgacatcaattacaggtattcctcaggttttactactagtaacgattttaacaaatcagtgggaattttttactttagtatatttcacgattaattttttattaatgatattttcgttatattcattatttaaaaaggagaatgtttag

SEQ ID NO: 1330 - DNA, 558 bp, Streptococcus pneumoniae
ttgaaagttcaagaaaaattgaaattattaaaagagtttataaaaatatgttctaaaaataaaatgaagtattttgcttctggaggtagtctattggaagctgcaagatacaaaggttttattccttggaatgatgatatggctctaggtttaccaagaaagcattttgaaaagtttataaatgaaatagattttgaaaaatataataaaaattatattttagaaagttcggaaatgaatttaggtatttttcaatataaattaaaatctgctattttaattttagggaaatcgtatgacgtatgtttgaatttatttctgttagacaggatgtcagaattggttattgatggtgagtcaggttttaaagtcccactatataatttagaagtggctgtagatagaagtagaagtattattgagaatagagaactagccaatgagttaggtagtgttgctttccaaagagttcaatctatatttgaaataaaagaaaaagtgtcagagctagagaatatattcatgagtttaggagaagatgataatgtcaatatataa

SEQ ID NO: 1331 - DNA, 945 bp, Streptococcus pneumoniae
atggatatagtatatgcgacagataataattttgtagatgtattgagtgcatctatcaagtcgctttacactactaattcagatttggatttaaatttatggattattgctgataaagtttcggatagaaataaagaaaagataaatagattatcaaaacaatttgcgcagagagaaattaattggatagagaacgttgagattccatttaaattacatttagataggggatcaattagttcatttagcagattatttctgggaagtgttcttccatcttcaatgagtaaagttctctatcttgatagtgatattattgtaatggattctttacgaagtattcttgatattgattttaaagataaaattctctatggggtaaatgatacttttaataaagaatacaagcaggtgttggggataccaatcgacaaaccaatgtttaatgctggagttatgctgattaatttagagttatggagaaataataacgtcgaagaaaaatttttgcaagtaattcaaaagtttaatggtactatattacaaggtgatttaggagttttaaatgcagttttatataactcatttggtgtacttcctccagaatataattatatgaccatatttgaagatttgacttatgaagaaatgatagtttttaaaaaaccaattaactattattcaaaagaagaaattaaaaatgctagagaacgtatagtcttgcgccatttcacaacgtgttttctatcactcagaccttggcaagaaaatagtgaggtggcgcatgtggaaatatttaaaaaatactatagaggaacatacaaacaagtatctccatctaagttatcaagaatttataaaattttaccgaaaaaaatgtcgctctatttactaggttttattcaatcaaaagtgcgtccaaaactgtatagaattttgaaataa

SEQ ID NO: 1332 - DNA, 1368 bp, Streptococcus pneumoniae
atgaatggaaaactagtaaagccttcattggccatagtccagagttttcttgttattttattggcttatctacttagcactgtgagagaaacagagattgtttcaacaacagctattgtactttatatcctccactattttgccttttatatcagtgattatggacaggatttctttaaaaggggatatttgattgaacttgtccagacattgaaatatatcctattctttgcgctagcgattagtatttctaattttttcttagaagatcgatttagtatttccagaagaggcatgatttacttcctcctattacatgttctcttagtctatgtgctaaaccgatttatcaagtggtattggaagcgggcttatcccaactttaaaggaagtaagaagattctcctacttacagcaacttctcgtgtcgaaaaggtattggatagactaatagaatcagatgatgttgttggggagttggtagccgtcagtgttttagataaaccagattttcagcatgattatttaaaggttgtagcagagggggagatcgtaaactttgcgactcatgaggtggtcgatgaagtctttatcaatcttccaagtgaaaaatacaatattggagagcttgtctctcagtttgaaacgatgggagttgatgtaacagtcaatctaaatgctttcgattgtatcttggcacataacaagcaaatttgtgagatggcaggactaaacgttgtgactttttctacaacattttataagactagccatgtgattgctaagcgggttattgatattatcggttccctggtaggtttgatactatgtggtctagtcagtattgtactggttcctttgattcgaaaggatgggggctctgctatttttgctcagacgcgtattgggaaaaatggtcgccatttcactttttacaagtttcgctctatgtgtgtggatgctgaggagaaaaaaagagaactcatggaacaaaataccatgcagggtggaatgtttaaggtggatgaggatccacgtatcacgaaaattggtcattttatacggaagacgagcttggacgagctaccacagttttacaatgttctaaagggagatatgagtttggtagggacacgaccaccaacagtggacgagtatgagcactataccccagaacaaaaacgtcgcctaagttttaaacctggcataacaggtctatggcaggtcagcggacgaagcgagatcaagaatttcgatgaggttgtcaaattagatgtggcctatatagacggttggacaatttggaaagatattgaaattttattgaagacagttaaagttgtattgatgaaggatggagcgaagtag

SEQ ID NO: 1333 - DNA, 681 bp, Streptococcus pneumoniae
atgccaacgttagaaatctcacaggtgaaattagaacttgcgaaaaaggcagaggaatattataatgctttgtgcacgaacctacagttaagtggagatgatttgaaagtattttctatcacttctgtgaaaccaggagaaggaaaaacaacgacttccaccaatatcgctcgggcttttgcgcgtgcaggttacaaaacgttgctgattgatgcagacatgcgtaactccgtgatgtcaggtgtctttaaatcaagggaaaggattaccgggctaacagaatttctatcagggactacagacctgtcacagggactttgtgataccaatattgagaatctctttgtgattcaggctggctctgtgtcaccaaatccgacagcccttcttcaaagtaggaatttcagtacaatgcttgaaaccgtgcgtaaatattttgactatatcgtcgtagacactgctcctgtcggtgtcgtgattgatgcggctatcattacgcagaaatgtgatgcttctattttagtgacgaaggcaggcgaaacaaagcgacgggatattcaaaaagcgaaagaacagatagaacaaactgggaagccgtgtttaggagttgtgttgaataaattcgatacttcagtagacgaatacggttcttatggaagttatgggaaaaagaaaaaatag

SEQ ID NO: 1334 - DNA, 696 bp, Streptococcus pneumoniae
atgatgaaagaacaaaacacgatagaaatcgatgtatttcaagtacttaaaaccttgtggaaacacaagttaataattttattagtggcgcttgtgacaggggcgggagcttttgcatatagcacttttattgttaaaccagaatatacgagcaccacgcgtatttacgtcgtcaaccgtaatcaagaaggtaagtcgggactgacgaatcaggacttgcaggcaggaacttatctggtaaaagactaccgcgaaattatcctttcgcaagatgtattggaaaaggtagcgacaaatttgaaattggatatgccagcaaaagcgttaactagcaaagttcaagtgactgtaccaaccgacactcgtatcgtctcaatctctgtcaaggataaagaaccagaggaagccagtcgcattgctaattctctacgagaagttgctgcaggaaagatcgtcgctgtaacgcgagtatctgatgtaacgacgcttgaagaagcgcggccagctacgactccctcttctcccaatgttcgacgtaacaccttagttggttttcttggaggagccgtcgtaacagtaattactgttcttttgattgagttgctcgatacccgtgtgaaacgtcctgaagaagttgaagaggtgctgcaagtgccacttctaggagtcgttccagatttggataaaatgaaatag

SEQ ID NO: 1335 - DNA, 780 bp, Streptococcus pneumoniae
ttgcatctgtcaaaacggctattcaggacgtgttggagggcagatgaaatgattgatattcattcgcacattgtctttgatgtagatgatggtcccaagtcaagagaggaaagtaaggctctcttgacagaagcctacaggcagggggtgcgaaccattgtctctacctctcaccgtcgcaagggcatgtttgaaactccagaagagaagatagcagaaaactttcttcaggttcgggaaatagctaaggaagtcgcgagtgacttggtcattgcttatggggctgaaatttactacacgccagatgttttggataagctggaaaacaatcggattccgaccctcaataatagtcgttatgccttgatagagtttagtatgaacactccttatcgcgatattcatagtgccttgaataaaatattgatgttgggaattactcccgtcattgcccacatagagcgctatgatgttcttgaaaataatgaaaaacgcgttcgagagctgatcgatatgggctgttacacgcaaataaatagttcacatgtcctcaaatccaaactttttggagaaccttataaattcatgaaaaaaagagcgcagtatttcttggagcgtgatttggttcatatcattgcaagtgatatgcataatgtggacggcagacccccccatatggcagaagcatatgaccttgtttcccaaaaatacggagaagcgaaggctcaggaactttttatagacaatcctcgaaaaattgtaatggatcaactaatttag

SEQ ID NO: 1336 - DNA, 1455 bp, Streptococcus pneumoniae
gtgttaatcatgagtagacgttttaagaaatcaggttcacagaaagtgaagcgaagtgttaatatagttttgttgactatttatttattgttagtttgttttttattgttcttaatctttaagtacaatatccttgcttttagatatcttaatctagtggcaactgcctttgttctactagttgccttaatagggctactctcgattatctataaaaaagctgaaaagtttaccatttttctgttggtgctctctattcttgtcagctcagtgtcgctctttgcagtacagcagtttgttggactgaccaatcgtttaaatgcgacttctaattactcagaatattcgctcagtgtcgctgttttagcagatagtgagattgagaatgttacgcaactgacgagtgtgacagcaccgactgggactgataatgaaaacattcaaaaactactagctgatatcaaatcaagtcagaatatcgatttgacggttaatcaaagttcgtcttacttgtcagcttacaggagtttgattgcaggagagactaaggccattgtcttaaatagtgtctttgaaaatatcattgaatcggagtatccagatcacgcatcgaagataaaaaagatttataccaagggattcattaaaaaagtagaagctcctaagacgtctaagaatcagtctttcaatatctatgttagtggaattgatacttatggtccaattagttcggtgtcgcgttcagatgtcaatatcttgatgactgtcaatcgagataccaagaaaattctcttgaccacaacgccacgtgatgcttatgtaccaatcgcagatggtggaaataatcaaaaagataaattgactcatgcgggcatttatggagttgattcgtccattcacaccttagaaaatctctatggagtggatatcaattactatgtgcgattgaacttcacttcgtttttgaaattgattgatttgttgggtggggtagatgtttataatgatcaggaattcacagctcttgctaataaaaaacactattctattggtaatgtccatttagattcagaagaggcactcgcttttgttcgtgagcgctattccctagcggatggtgatcgtgaccgtgggcgcaatcaacaaaaggtgattgtggctatccttcaaaaattaacttcgaccgaagtactgaaaaattatagtacgatcattgatagcttgcaagattctatccaaacaaacatgccacttgagaccatgataaacttggtcaatgctcagttagaaagtggtggaacgtacaaagtaaattcgcaagacttgaagggtaggggacggacggatcttccttcctatgcgatgccagatagtaacctctatgtgatggaaattaacgacagtagccttgcatctgtcaaaacggctattcaggacgtgttggagggcagatga

SEQ ID NO: 1337 - DNA, 1074 bp, Streptococcus pneumoniae
atgaaaaggatccaactgaatatgaatgaaacgaaaaaatatcttgtgataaaagctatagcccaaggaaagaaaacaaagaaacgggcctgtgtcgaactcaatctttctgaaagacaaatcaatcgtctgctactagcctatcaacagaaagaaaaagaagccttcagacacggaaacagaaatcgaaaaccaaaacatgcaatccctgatgaaatcaaagaacgtatcctaaagaaatacctctcctatcaaacatataaaccaaatgtccgtcatttctgtgaattgctagctgaagaagaaggaattcagctctctgatacaactgttagaaaaatactctataagaaaaatatcctgtcgcctaagtctcacagaaagacaaagaagagagtaagaaaacaagctaaactgaaccccaagcaacccctagacaatccaatcttaccgacagctgaaaacttcctggaagaccctaaaaaggtacatcctagtagacccagaaaaaaatttgctggagaactcatccaaatggatgccagccctcatgcctggtttggagtagaaacctctaacttacacctagccattgatgatgcttctggcaatatcctaggcgcttattttgacaaacaagagaccttgaatgcttactatcatgtcctcgaacaaatcttagccaaccacggcattcctcttcaaattaaaacagataagagaactgtttttacctatcaagcctccaactctaagaaaatggaggacgacacccatacacaatttggatacgcctgtcaccaactgggaattctccttgagacaacctctatccctcaagctaaagggagagtcgaaagactcaatcagacactacaatctcgcctgcctatcgaactggaacgaaacaatattcataccttggaagaagccaatacctttctaccttcctatatccaaacctttaatgaacagtttggaaacaagacaaaactctctgtctttgaggaggctcctaagccctctgaacgaaatctcattctagctagactggcgggagagagtcgtcgatag

SEQ ID NO: 1338 - DNA, 360 bp, Streptococcus pneumoniae
ctagactggcgggagagagtcgtcgatagtggacaccatatccgattccaaaatcgttgctatatccctaccgagcaaggaaaagaagtctatttcatcagaaagacaaaagcattagttataaaagcatttgatggtgacatctacctcaatatcgctgacaaaatctatcacacaaaggagctactaaatcatgaactctattcgaaaaactttgaacaagaaccagaacaaaaaaaagaaagacgcaagtatatccctccacaaacccatccgtggaaactcacatctttcaaacaatatcttcataaaaataaaaaggattatgaagagtttaaaggaggatttttcagtacgtgc

SEQ ID NO: 1339 - DNA, 951 bp, Streptococcus pneumoniae
atgaactctattcgaaaaactttgaacaagaaccagaacaaaaaaaagaaagacgcaagtatatccctccacaaacccatccgtggaaactcacatctttcaaacaatatcttcataaaaataaaaaggattatgaagagtttaaaggaggatttttcagtacgtgctgaaaaatatgagaactatcaggagacatttcaagggcctaacagtttttccaaaaccgatccagatgccacttttatgcggatgaaggaagatcatatgaaaaatggtcaactcaaggctgcttataatcttcaaatcgctacggaaaaccaatttgttcttcactatgatgtcttttcaaatccgacagataccaagactcttctgccattccttgaaacctatccgcatgacttgaagacagttgtcgcagatgctggatatggaagtgaagagaacctccttcgtttagatgaaaaggaggtaaaccatctgattaaatatgccatgtttgataaggaacagaagagaggctataaacagtcagctagaaacttagcgaattggcactataatgacaaggaggatagctatacacatcctgatggctggtattatcgttttcaccataccaaacatcagaaaacacagacagactttcaacaagaaatcaaggtttactacgccgacgaacctgaatcagcccctcaaaagggactgtatatgaacgaaggctatcaaaacttgaaggcgaaagaatgtcaagcgcttttatctccccaaggtagacagattttcgctcaacgcaagattgatgtggaacctgtctttgggcagataaaggcttgtttgggttacaagagatgtaatctgaggggcaagcgtcaagtgagaattgacatgggattggtacttatggccaataacctcctaaaatacaataagagaacgactcaaaattaa

SEQ ID NO: 1340 - DNA, 537 bp, Streptococcus pneumoniae
atgaaattaacttatgatgataaagttcagatctatgaacttagaaaacaaggatatagcttagagaagctttcaaataaatttgggataaataattctaatcttaggtatatgattaaattgattgatcgttacggaatagagttcgtcaaaaaagggaaaaatcaatactattctccagaactaaaacaagaaatgattgataaagttttacatgcaaactggtctcaagatagagtttctctcaaatatgctctcccaaatcgtggtatgcttccaaattggctggcgcaatataagaaaaacgggtatactattgttgagaaaacaagagggagaccagctaaaatggaacgtaaacgaaagaaaacttgggaagaaatgacagaattagaacgacttcaagaggagaatgaacgcttacggactgaggtggcttacttaaaaaagttaaaagagttagaggaaagggacgaagccctagagcgagaaaggcagaaacagttagagaaatggtttcaggaggatttcgactag

SEQ ID NO: 1341 - DNA, 483 bp, Streptococcus pneumoniae
atggtttcaggaggatttcgactagattttcttcttgaaacagcacgtttagctcgctcgacttactattatcagttgaaacaactggatggggttgataaagataaagagattaaaaccgaaattcaggccatttataatgaacataaaggcaactatggctatcgtcgaatccatttagaactaagaaatcgtggttttgtggtgaatcataagaaagttcaacgtctgatgaaagttcttggtttaacagctcgaattcgtcggaaacgaaagtattcctcctaccaaggagagattggcaagaaagcagagaatctcattcaacgtcagtttgaagcaaccaaaccaatggaaaagtgctatacggatgtgacagagtttgccattccaaatagcacacagaaactctatttatcgcctgttttagatggctttaacagcgaaatttcgcctataatctttcaacttcaccaaacttag

SEQ ID NO: 1342 - DNA, 834 bp, Streptococcus pneumoniae; identical to SEQ ID NO: 600

SEQ ID NO: 1343 - DNA, 1611 bp, Streptococcus pneumoniae
atgcaagaaaaatggtggcacaatgccgtagtctatcaagtctatccaaagagttttatggatagtaatggagatggagttggtgatttgccaggtattaccagtaagttggactatctagccaagctaggaatcacagcaatttggctttctcccgtttatgacagccctatggatgataatggctatgatattgctgattatcaagcgattgcggctatttttggaaccatggaggacatggatcagctgattgcagaagctaagaagcgtgacattcgtatcatcatggacttggtggttaatcatacctcagatgaacatgcttggtttgtcgaagcctgtgaaaatactgacagccctgagcgagactactatatctggcgcgatgaacccaatgacctagattctatctttagtgggtctgcttgggaatacgatgaaaagtcaggtcaatactatctccactttttcagcaaaaaacagccggatctcaactgggaaaatgaaaaacttcgccagaaaatttatgagatgatgaacttctggattgataaaggtattggtggtttccgtatggatgttattgacatgattggcaaaattcctgacgagaaggtagtcaataatggtcctatgctccatccctatctcaaggaaatgaatcaggcgacctttggagataaggatctcttgacagtaggggagacttggggagcaacgccagagattgccaagctctactctgatccaaaggggcaagaattgtctatggtcttccagtttgaacatatcggtcttcagtatcaggaaggtcagcctaaatggcactatcaaaaagagctgaatatcgctaagttaaaagaaatcttcaacaaatggcagacagagttaggagttgaggacggctggaattccctcttctggaacaaccatgacctccctcgtattgtctcaatctggggaaatgaccaagaataccgcgaaaaatctgccaaagcctttgcaatcttgcttcatcttatgagaggaactccttatatctaccaaggtgaggagattgggatgaccaactatccgtttgaaacactggatcaagtagaagatattgaatctctcaactatgcgcgtgaggctcttgaaaaaggtgttccgattgaagaaatcatggacagtatccgtgttattggacgtgacaatgcccgtacccctatgcaatgggacgagagcaaaaacgctggtttctcaacaggtcaaccttggttggcggttaatccaaattacgagatgatcaatgtccaagaagcgctggcaaatccagattctattttctatacctatcagaaactggtccaaattcgcaaggagaatagctggctagttcgagctgactttgaattgcttgatacggctgataaggtctttgcttatatacgtaaggatggcgaccgtcgcttcctagtcgtggctaatttatccaatgacaaacaaaacttttcagtagatggaaaagttagatctgtcttgattgaaaacactgcggctaaagaagtacttgaaaaacaggtcttggctccatgggatgctttctgtgtggaaatgactgattag

SEQ ID NO: 1344 - DNA, 1485 bp, Streptococcus pneumoniae
atgaaaaaccaagcttttagttctgagcaatatttaaatctacaacgcgaccacatcttagagcgcattatccaattggacggcaagctttacatagagtttggtggcaaaatgttagaagatttccacgctgctcgtgtccttcctggttatgaacctgacaacaaaatcaagctcttgcaagaattgaaagagcaggttgaggttgtgattgccattaatgctagtaacattgaacattccaaagcacgtggcgacttaggcatttcttatgaccaagaagttcttcgtttgattgacaaattcaatgaattagggatttttgttggttccgttgtcattacacaatacactggccaacccgctgcagatgccttccgcaaccaacttgagaaaaacggaattgattcttatcttcattatccaatcaaaggatatccgacggatatggatcacatcatttcctcaaaaggcatgggcaaaaacgactacatcaaaaccagtcgcaacttgattgtcgtaaccgctcctggacccggttctggaaaattggcaacgtgtatgtccaatatgtaccacgaccaaatcaatggcatcaagtctggctacgctaaatttgaaaccttccctgtttggaatcttccccttcatcatccagttaacttggcttatgaagctgccacagctgaccttgatgatgtcaacatgattgaccccttccatcttcaaacctatggagaaaccactgtcaactacaaccgtgatatcgaaatcttcccagtgctcaagcgcatgttggaacgtattctcggaaaatcaccatacgcttcaccgacagatatgggtgtcaacatggttggtttcgctattacagatgacgaggctgctgtcgaagcttctaaacaagaaatcatccgccgttactatcaaacagttcttgacttcaaagctgaaaaagttggcgaagctgccgtcaagaaaattgagttgctcatgaacgacctcggtatcacacctgcagaccgtaaggttgctgtcgttgcgcgccaaaaagcagaagaaactggtggaccagccctagcctttgaattgccaaatggggaaatcgtcactggtaagaactcagaactctttgggcctacagccgctgccttgatcaacgccatcaaaaaatcagctgacatcgctaaagaagtaaaactaatcgagcctgaagttgttaagccaatccaaggtcttaaaatcgatcatctcggtagccgcaatccacgccttcattcaaatgaaattctgattgcacttgctatcacagctacagaaaatcctgatgctgcccgcgctatggaagaactcggcaacctcaaaggaagcgaagcccactcaaccatcatcttgactgatgaagacaagaatgtccttcgtaaactgggtatcaacgtaacctttgacccatactaccaatacgaccgcttatatcgtaagtaa

SEQ ID NO: 1345 - DNA, 483 bp, Streptococcus pneumoniae
atgtcaaaagaagttattgtcgaaagttttgaacttgaccacaccattgtcaaagcaccctatgttcgcttgattggggaagaaacaggaccaaaaggagacatcatctccaattatgatattcgcttggtgcaaccaaacgaagactctatccctactgccggccttcacactatcgagcacctcttagccaaactcatccgtacccgcattgacggcatgattgactgttcaccatttggttgccgcacaggcttccacatgattatgtggggacgtcacaccagtgctaaaatcgcagctgttatcaaggattcgctcaaggaaatcgctgaaactactacttgggaagatgtcccagggacaaccatcgaatcttgcggaaactacaaggaccacagcctcttctctgctaaagaatgggcaaaactcatcttggaacaagggatttcagatgatgcctttgaacgtcatgtgatttaa

SEQ ID NO: 1346 - DNA, 2106 bp, Streptococcus pneumoniae
atgaataacaactttaataattttaataacatggatgatttatttaaccaattgatgggtggtatgcgaggatatagttctgaaaatcgccgttacttaattaatggacgcgaagtcacacctgaggaatttgctcactatcgtgcgactggtcaattaccaggaaatgcagaaactgatgtgcaaatgccacaacaggcatcaggtatgaaacaagatggtgtccttgcaaaactaggtcgaaacttaacagcagaagcgcgtgagggcaagttggaccctgttatcggacgaaacaaggaaattcaagaaacatctgaaatcctctcacgccgcaccaagaacaatcctgttttggtcggagatgcaggtgttggtaagacagcagttgtcgaaggtctagcgcaagccattgtgaacggagatgttcctgctgctatcaagaacaaggaaattatttctattgatatctcaggtcttgaggctggtactcaataccgtggtagctttgaagaaaatgtccaaaacttggtcaatgaagtgaaagaagcagggaatattatcctcttctttgatgaaattcaccaaattcttggtgctggtagcactggtggagacagtggttctaaagggcttgcggatattctcaagccagctctctctcgtggagaattgacagtgattggggcaacaactcaagacgaataccgtaacaccatcttgaagaatgctgctcttgctcgtcgtttcaacgaagtgaaggtcaatgctccttcagcagagaatacttttaacattcttcaaggcattcgtgacctctatcaacaacaccacaatgtcatcttgccagacgaagtcttgaaagcagcggtggattattctgttcaatacattcctcaacgtagcttgccagataaggctattgaccttgtcgatgtaacggctgctcacttggcggctcaacatccagtaacagatgtgcatgctgttgaacgagaaatcgaaacggaaaaagacaagcaagaaaaagcagttgaagcagaagattttgaagcagctctaaactataaaacacgcattgcagaattggaaaggaaaatcgaaaaccacacagaagatatgaaagtgactgcaagtgtcaacgatgtggctgaatctgtggaacgaatgacaggtatcccagtatcgcaaatgggagcttcagatatcgaacgtttgaaagatatggctcatcgcttgcaagacaaggtgattggtcaagataaggccgtagaagttgtagctcgtgctatccgtcgtaaccgtgctggttttgatgaaggaaatcgcccaatcggcagcttcctctttgtagggtctactggggttggtaagacggagcttgctaagcaattggcactcgatatgtttggaacccaggatgcgattatccgtttggatatgtctgaatacagtgaccgcacagctgtttctaagctaattggtacaacagcaggctatgtgggttatgatgacaatagcaataccttaacagaacgtgttcgtcgcaatccatactctatcattctcttggatgaaattgaaaaggctgaccctcaagttattacccttctcctccaagttctagatgatggtcgtttgacagatggtcaaggaaatacagtaaacttcaagaacactgtcattattgcgacctcaaatgctggatttggctatgaagccaacttgacagaagatgcggataaaccagaattgatggaccgtttgaaccccttcttccgtccagaactcctcaaccgctttaatgcagtcatcgagttctcacacttgactaaggaagacctttctaagattgtagatttgatgttggctgaagttaaccaaaccttggctaagaaagacattgacttggtagtcagtcaagcggctaaagattatatcacagaagaaggttacgacgaagtcatgggggttcgtcctctccgtcgagtggttgaacaagaaattcgtgataaggtgacagacttccacttggatcatttagatgctaaacatctggaagcagatatggaagatggcgttttggttattcgtgagaaagcctaa

SEQ ID NO: 1347 - DNA, 240 bp, Streptococcus pneumoniae
ttgttctttgattttcattgtgtatttaaacacaaaaacaccctaaaacatcagggtgccattcttacatcaaatataaaattgctagggtcaggagacttgctagaagcccaactccccaaaagaagaagtcaaccttccactcgctccaaggatttcctttaccagacaatcccccaagctcaaaatggtgatgtacaggcgtcatacggaaaatacgtttaccacctgtcagtttga

SEQ ID NO: 1348 - DNA, 981 bp, Streptococcus pneumoniae
atgtttatttccatcagtgctggaattgtgacatttttactaactttagtaggaattccggcctttatccaattttatagaaaggcgcaaattacaggccagcagatgcatgaggatgtcaaacagcatcaggcaaaagctgggactcctacaatgggaggtttggttttcttgattacttctgttttggttgctttctttttcgccctatttagtagccaattcagtaataatgtgggaatgattttgttcatcttggtcttgtatggcttggtcggatttttagatgactttctcaaggtctttcgtaaaatcaatgaggggcttaatcctaagcaaaaattagctcttcagcttctaggtggagttatcttctatcttttctatgagcgcggtggcgatatgctttctgtctttggttatcaagtgcatctagggattttctatattgttttcgctcttttctggctagtcggtttttcaaacgcagtaaacttgacagacggtgttgacggtttagctagtatttccgttgtgattagtttgtctgcctatggagttattgcctatgtgcaaggtcagatggatattcttctagtgattctggccatgattggtggtttgctcagtttcttcatctttaaccataagcctgctaagatctttatgggtgatgtgggaagtttggctttaggtggaatgctggcagctatctctatggctctccaccaagaatggactctcttgattatcggaattgtgtatgtttttgaaacaacttctgttatgatgcaagtcagttatttcaaactgacaggtggtaaacgtattttccgtatgacgcctgtacatcaccattttgagcttgggggattgtctggtaaaggaaatccttggagcgagtggaaggttgacttcttcttttggggagttgggcttctagcaagtctcctgaccctagcaattttatatttgatgtaa

SEQ ID NO: 1349 - DNA, 2253 bp, Streptococcus pneumoniae
atgaagtggacaaaaagagtaatccgttatgcgaccaaaaatcggaaatcgccggctgaaaacagacgcagagttggaaaaagtctgagtttattatctgtctttgtttttgccatttttttagtcaattttgcggtcattattgggacaggcactcgctttggaacagatttagcgaaggaagctaagaaggttcatcaaaccacccgtacagttcctgccaaacgtgggactatttatgaccgaaatggagtcccgattgctgaggatgcaacctcctataatgtctatgcggtcattgatgagaactataagtcagcaacgggtaagattctttacgtagaaaaaacacaatttaacaaggttgcagaggtctttcataagtatctggacatggaagaatcctatgtaagagagcaactctcgcaacctaatctcaagcaagtttcctttggagcaaagggaaatgggattacctatgccaatatgatgtctatcaaaaaagaattggaagctgcagaggtcaaggggattgattttacaaccagtcccaatcgtagttacccaaacggacaatttgcttctagttttatcggcctagctcagctccatgaaaatgaagatggaagcaagagcttgctgggaacctctggaatggagagttccttgaacagtattcttgcagggacagacggcattattacctatgaaaaggatcgtctgggtaatattgtacccggaacagaacaagtttcccaacgaacgatggacggtaaggatgtttatacaaccatttccagccccctccagtcctttatggaaacccagatggatgcttttcaagagaaggtaaaaggaaagtacatgacagcgactttggtcagtgctaaaacaggggaaattctggcaacaacgcaacgaccgacctttgatgcagatacaaaagaaggcattacagaggactttgtttggcgtgatatcctttaccaaagtaactatgagccaggttccactatgaaagtgatgatgttggctgctgctattgataataatacctttccaggaggagaagtctttaatagtagtgagttaaaaattgcagatgccacgattcgagattgggacgttaatgaaggattgactggtggcagaatgatgactttttctcaaggttttgcacactcaagtaacgttgggatgaccctccttgagcaaaagatgggagatgctacctggcttgattatcttaatcgttttaaatttggagttccgacccgtttcggtttgacggatgagtatgctggtcagcttcctgcggataatattgtcaacattgcgcaaagttcatttggacaagggatttcagtgacccagacacaaatgattcgtgcctttacagctattgctaatgacggtgtcatgctggagcctaaatttattagtgccatttatgatccaaatgatcaaactgctcggaaatctcaaaaagaaattgtgggaaatcctgtttctaaagatgcagctagtctaactcggactaacatggttttggtagggacggatccggtttatggaaccatgtataaccacagcacaggcaagccaactgtaactgttcctgggcaaaatgtagccctcaagtctggtacggctcagattgctgacgagaaaaatggtggttatctagtcggggtaaccgactatattttctcggctgtatcgatgagtccggctgaaaatcctgattttatcttgtatgtgacggtccaacaacctgaacattattcaggtattcagttgggagaatttgccaatcctatcttggagcgggcttcagctatgaaagactctctcaatcttcaaacaacagctaaagctttggagcaagtaagtcaacaaagtccttatcctatgcctagtgtcaaggatatttcacctggtgatttagcagaagaattgcgtcgcaatcttgtacaacccatcgttgtgggaacaggaacgaagattaaaaacagttctgctgaagaagggaagaatcttgccccgaatcagcaagtccttatcttatctgataaagtagaggaagttccagatatgtatggttggacaaaggagactgctgagacccttgctaagtggctcaatatagaacttgaatttcaaggttcgggttctactgtgcagaagcaagatgttcgtgctaacacagctatcaaggacattaaaaaaattacattaactttaggagactaa

SEQ ID NO: 1350 - DNA, 318 bp, Streptococcus pneumoniae
atggcagaaaaaatggaaaaaacaggtcaaatactacagatgcaacttaaacggttttcgcgtgtggaaaaagctttttacttttccattgctgtaaccactcttattgtagccattagtattatttttatgcagaccaagctcttgcaagtgcagaatgatttgacaaaaatcaatgcgcagatagaggaaaagaagaccgaattggacgatgccaagcaagaggtcaatgaactattacgtgcagaacgtttgaaagaaattgccaattcacacgatttgcaattaaacaatgaaaatattagaatagcggagtaa

SEQ ID NO: 1351 - DNA, 951 bp, Streptococcus pneumoniae
atgacaaaagaatttcatcatgtaacggtcttactccacgaaacgattgatatgcttgacgtaaaacctgacggtatctacgttgatgcgactttgggtggagcaggccatagcgagtatttattaagtaaattaagtgaaaaaggccatctctatgcctttgaccaggatcagaatgccattgacaatgcgcaaaaacgcttggcaccttacattgagaagggagtggtgacctttatcaaggataacttccgtcatttacaggcacgtttgcgcgaagctggtgttcaggaaattgatggaatttgttatgacttgggagtgtctagtcctcaattggaccagcgtgagcgtggtttttcttataaaaaggatgcgccactggacatgcggatgaatcaggatgctagtctgacagcctatgaagtggttaatcattatgactatcatgatttggttcgtattttcttcaaatacggtgaggataaattctctaaacagattgcgcgtaagattgagcaagcgcgtgaagtgaagccgattgagacaacgactgagttagcagagattatcaagttggtcaaacctgccaaggaactcaagaagaagggtcatcctgctaagcagattttccaggctattcgaattgaagtcaatgatgaactgggggcggcagatgagtccatccagcaggctatggatatgttggctctggatggtagaatttcagtgattacctttcattccttagaagaccgcttgaccaagcaattgttcaaggaagcttcaacagttgaagttccaaaaggcttgcctttcatcccagatgatctcaagcccaagatggaattggtgtcccgtaagccaatcttgccaagtgcggaagagttagaagccaataaccgctcgcactcagccaagttgcgcgtggtcagaaaaattcacaagtaa

SEQ ID NO: 1352 - DNA, 195 bp, Streptococcus pneumoniae
atgaatcgtgtgaaagaatttcgcaaggaactgggcatttcccagctcgagctcgccaaggatatcggtgtctcgagacagaccatcaatatgattgaaaacgacaagtacaatccaactctggaactctgtctcaatctcgcccgcagcctccaaactgacctcaacagtctcttttggaaggaagatttttaa

SEQ ID NO: 1353 - DNA, 426 bp, Streptococcus pneumoniae
ttgagggtatttataggccagaaggagtggaataagatttccgaaaatcatcagataaaagaggacgataaagacttggttcccaatactatcggcctcacgccgtttgtattcgtcaaggggaccagaaataccgtatgtgcgtttgatcagtttttcagtgaaggtttcttttttcatgagtttgctccttttttaaaaatcttccttccaaaagagactgttgaggtcagtttggaggctgcgggcgagattgagacagagttccagagttggattgtacttgtcgttttcaatcatattgatggtctgtctcgagacaccgatatccttggcgagctcgagctgggaaatgcccagttccttgcgaaattctttcacacgattcatctggtctcctttctgatttgtgtcgtatatatttga

SEQ ID NO: 1354 - DNA, 282 bp, Streptococcus pneumoniae
atgaaaaaagaaaccttcactgaaaaactgatcaaacgcacatacggtatttctggtccccttgacgaatacaaacggcgtgaggccgatagtattgggaaccaagtctttatcgtcctcttttatctgatgattttcggaaatcttattccactccttctggcctataaataccctcaagaagtggctctaatctatcctcctctgattttagtgattgccctcatcgctgctggctatgtcacctaccaaatgaaaaaaaacaggcatcacagtcattga

SEQ ID NO: 1355 - DNA, 255 bp, Streptococcus pneumoniae
atgctgaatgagaaagaaagcaagcaactacactacccaggtctgaaagcaggtttgttctttggtctatggatgttttttataactcctcttctcagtatactcatagatgaaggtcaggactattttcattctcttctcactataagaaatggtgtatcaagtattctcggttctattttcttcggagcgagcatacagtttctcatctcccgtcgcattgcaaaaactaagaaaaatcaagatgaggattag

SEQ ID NO: 1356 - DNA, 243 bp, Streptococcus pneumoniae
atgaaaaaagaaaagaaacagttacgttatcctggtctgaaagcaggttcgatttatggaacagtgatattttttataattccactcattgataccctaacaagtgaaaatccaaattttatcagttctcttctaaatacaaaacatatttttaaaactatgctgggagctttctttttcggagtgatgatacatattgtcgactcacttcgtattgcaagagctaaaaaagaccaggattag

SEQ ID NO: 1357 - DNA, 336 bp, Streptococcus pneumoniae
atgaaatcactagctagactactgaacattcatgtttttatcagtattttccttttctttgcccttatttcaggagctgtttctcatacagttttactactcctactcctctttcttcctgcgctcaataaaggacttgagaaaatacaatcaaaacggatacctgtcctcaacgcagccctcttctttctcctcatatcctttccacaacttttaaccaaccctgtccaatggaaattttcaatattcctagtcgtaaccatcatttcaagtttggcctacttctataacttttatcaagtagttaaagaagtagatcaaaaacagttgatttag

SEQ ID NO: 1358 - DNA, 192 bp, Streptococcus pneumoniae
acattcatgtttttatcagtattttccttttctttgcccttatttcaggagctgtttctcatacagttttactactcctactcctctttcttcctgcgctcaataaaggacttgagaaaatacaatcaaaacggatacctgtcctcaacgcagccctcttctttctcctcatatcctttccacaacttttaa

SEQ ID NO: 1359 - DNA, 1002 bp, Streptococcus pneumoniae
ttggagaagaaactgaccataaaagacattgcggaaatggctcagacctcgaaaacaaccgtgtcattttacctaaacgggaaatatgaaaaaatgtcccaagagacacgtgaaaagattgaaaaagttattcatgaaacaaattacaaaccgagcattgttgcgcgtagcttaaactccaaacgaacaaaattaatcggtgttttgatcggtgatattaccaacagtttctcaaaccaaattgttaagggaattgaggatatcgccagccagaatggctaccaggtaatgataggaaatagtaattacagccaagagagtgaggaccggtatattgaaagcatgcttctcttgggagtagacggctttattattcagccgacctctaatttccgaaaatattctcgtatcatcgatgagaaaaagaagaaaatggtcttttttgatagtcagctctatgaacaccggactagctgggttaaaaccaataactatgatgccgtttatgacatgacccagtcctgtatcgaaaaaggttatgagcattttctcttgattacagcggatacgagtcgtttgagtactcggattgagcgggcaagtggttttgtggatgctttaacagatgctaatatgcgtcacgccagtctaaccattgaagataagcatacgaatttggaacaaattaaagaatttttacaaaaagaaatcgatcccgatgaaaaaactctggtatttatccctaactgttgggccctacctctagtctttaccgttatcaaagagttgaattataacttgccgcaagttgggttgattggttttgacaatacggagtggacttgcttttcttctccaagtgtttcgacgctggttcagccctcctttgaggaaggacaacaggctacaaagattttgattgaccagattgaaggccgcaatcaagaagaaaggcaacaagtcttggattgtagtgtgaattggaaagagtcgactttctaa

SEQ ID NO: 1360 - DNA, 1902 bp, Streptococcus pneumoniae
atgaaagaagaaagaagacaattttttgaaagaatcgatggaaaccaatgtcgtgattatatcttgtcgcactgttcaaaagactatgagaaagtcaagagttcccttgaacgcttgatggacaatcgttttatgtttgatagtccttgggatatggagccttgttcaaaaatccatcaaaaccagccgatggtatgggatcaagtatttgaagatgatccagaatgggcttatatgctcaatcgacaagaatatctcttgcagtttatgatagggtatgtggtagaaggagataaggactatattcaaaagtgcaagttctttctatttgattggattgagcaggtgagagaattttctcctcaatccttgatgactagaaccttggatacgggtattcgttcctttacttggttgaaactactcttgcttctcttgaaatttgacttgctagaggagaaagaactagagaaaattttggtcagtctagaaaagcagattgactttatgaaaagctactatcgcgccaagtacacccttagtaactgggggattttacaaacaattccgatgcttgctatctatcatttcttttcagataagatggacctagaagaagcttaccattttgcttcagaggagttgaaacagcaaattgagacacagattttaggagatggaagccagtttgaacagtcgattctctatcatgtagaggtttataaagccttgctggatttgtgtctcttgcttccagacttgcaagatagttaccaagagttgctggaaaagatggcgacctatattcaaatgatgacaggcttagatggacggactttggcttttggtgatagcgattctacagaaacgacagaaatgttgagcctgtctgctgtggttttgaacaaggaagaccttcttaacggtctggatgttaaagttgatttgcttagcctcttgttcctggggcgagaaaaggtcaagcgactgcaggaatttgaaaggagagcttggcagcctaagtccatgatctttgaagactctggacatgtctgcattaaggatgaacatcgttatctatttttcaaaaatggtccgctaggaagtgcccatagccatagtgacgagaatagtttttgcttacagtatcaaggccaacctattttcatagatgctgggcgttattcttatcgggagatatatgaacgttatctcttaaagagtgcttggagtcattcgacctgcattgtagatgggaaagctccggaaagaatcacgggatcctgggaatatgaatactatcctcactccctgttttgtcaccataaagaaagggagggagtgcattatattgagggggcttattggtcagcagaacctgatttgccttatcttcacaagagaaaaatcctcatgttggtagaggatgtctggctcttggtagatgacatcaggtgtcaaggtcagcatgaggcgttgactcagtttatccttgacaaggatgtgacctatcaagatgggaaaatcaatcagttgagactatggagtgaagttgattttgatttggaagataccatcatttctcctaaatacaatgagcttgaaagaagtagcaaactcaccaagcgccaattctttgagaatcagatgctggattataccatcattgcgcatgagagttttgaaatcatccgtcattctgtctaccagacagatgatcgtgaagtggaaaatgctctggcttttgaagtgaaaaatgacgaaacagacaagctgattctgttattaagcgaggatatttgtgtaggtgaaaaattgtgcctcgttgacggaacaaaaatgcgtggaaaatgtctagtatatgataaaataaatgagagaatgattcgcttgcagtgctag

SEQ ID NO: 1361 - DNA, 294 bp, Streptococcus pneumoniae
atggatacaacattgttttatggaatagtgattgtcttggcagtgagtccccttttactgtcaagctttcattctattcgtcagcaaaagttgcttcgcaaacagatggagcaacgacaagagtatttagcttctttaacatctggtgatgaagtgttgttattgtctggaattcatggaaaaatcatttctatccaagatgacttggtctccttgcagattgcaaaaggtgtggtcatctatgtagaaaaggaaagtgtaatgggaaagacaaaagaactgctttttaagtag

SEQ ID NO: 1362 - DNA, 819 bp, Streptococcus pneumoniae
atgactggatctaacaaattaacaaaacgtgattatcttaaaacgtctttgcgggcattcttttgtcaaaatggatttaactatagtaactatcaagggttgggatatgccaatgtgatgtatcctgctttgaaaaaacactatggagaggatcaggaaggtttctaccaagccttggaagaaaactgtgaattctataataccaacccacacttcctgccttttattaccagcttgcaccttgtaatgttggaaaatggccgtccggcaaaagaaacacgtagtatcaagatggccttgatgggaccattggcaggtattggggattctctttctcaattctgtttagctccattgttctcaaccatcgcagcttcgtttgctcaaaaaagcttggttgtcggtccaatcttgttcttccttgcgatgaatacgattttaacagcgattaaattgtcaactggtctgtatggatacaaactaggaacaactgtgattgataaactaagcgaacagatggcaacgatttctcgtattgccaatattatcggtgtaaccgtaattgctggtttggcagcgacatctgttaagattatggtgccgattacctttgctgcaggggaagttaaagcagacgctaaacaaagtatcgtaagtattcagggaatgcttgataaggttgctccagctcttctaccagccctatttacacttttagtttactacttgatcaaagaaaagaaatggacaacatataaactcgttattttaacagttatcatcggaattatcggaagctggcttaagattatagcttaa

SEQ ID NO: 1363 - DNA, 780 bp, Streptococcus pneumoniae
atgtcgattaatgtatttcaagcgattttaattggattatggacagctttctgttttagtggaatgctgttaggaatttacaccaatagatgtattgttctgtcatttggtgtcggaattattctaggtgatctgcctactgctcttgcaatgggagctattggtgaattggcttatatgggattcggtgttggtgctggaggtactgttccaccaaacccaatcggacctggtatctttggtaccttgatggctatcactagtgctggtaaagtcagtccagaagcggctcttgccctctctactccgattgctgtggcgattcaattcttacaaactttcgcctacactgtacgtgctggtgcgcctgaaacagcgatgaagcacttgaaaaaccataatttgaagaaattcaagttcactctaaatgcaacaatttggttgtttgcctttattggatttaccttgggttgcttgggtgccctttcaatggataccttgttgaaactcgtagactacattccaccggtattgcttacaggtttgacagttgctggtaaaatgctcccagctatcggttttgcgatgatcttgtcagtgatggctaagaaagagttgattccctttgtcttgttgggatatgtttgtgcagcttatctaaacatcccaacaattggtattgcaattgtaggtactatctttgctttgattgaattttataacaagccaaaaacagcggatcatgtggtagaggaggaagcacacgatgactggatctaa

SEQ ID NO: 1364 - DNA, 492 bp, Streptococcus pneumoniae
atgacaatgccaaatattattatgacccgtatcgatgaacggttgattcatggacaaggacaactttgggtaaaatacctaggttgtaatacggtcattgttgccaatgacgaagtaagcacggacaagatgcaacaaactctgatgaaaacagttgtgccagactcagttgccatgcgtttcttccctttgcaaaaggtgattgatatcattcacaaggctaatcctgctcaaacgatctttatcgttgtaaagaatgtgaaggatgctttaaccttggtagaaggtggtgtccctatcaaagaaatcaatattgggaacattcacaatgctactggtaaagagcaagtgacacgctccatcttcctaggtgaagaggacaaggtggccctcaaggaattgagccaaactcatcaagtaacatttaatacgaaaacaactccaacaggaaatgatggagctgttcaagtcaacattatggactatatttaa

SEQ ID NO: 1365 - DNA, 1008 bp, Streptococcus pneumoniae
atggataacacggaatggaccaatggtttctggacaggagaactgtggttggcttatgaatacagtcaacaggatgcatttaaaaacatcgctcataaaaatgttctttctttcctggatcgtgtcaataagagagtagaattggatcaccatgatctcggcttcttgtacacaccgtcttgtatggctgaatataagataaatggagatggagaggctagagaagcaaccttgaaagctgcagataagttgattgaacgctatcaagaaaaaggtggttttattcaagcttggggagacttgggcaagaaagagcattaccgtttgattatcgactgcttgctcaatatccaactcttattctttgcttatcaagaaacaggcgatcaaaaatactacgatattgcagaaagtcatttctatgcttcagctaataatgtaatccgtgatgacgcttcgtccttccacaccttctattttgatcctgagacaggtcaaccctttaaaggtgtaacgagacaagggtatagtgatgattcatgctgggcacgtggtcaatcatggggagtctatggtattcctttgacttatcgtcacttaaaagacgagtcctgctttgacttgtttaagggtgtgaccaattatttcttgaatcgtctgccaaaagatcatgtgtcctattgggatttgatttttaatgatggtagtgatcaatcacgagattcttcagcaacagctatcgccgtctgtgggattcatgaaatgctaaaacatctcccagaggtggatgctgacaaagatatttataaacatgctatgcatgccatgcttcgttccttgatcgaacattatgcaaatgatcaatttacccctggtgggacaagtctcctccacggtgtgtactcatggcattcaggtaaaggagtggatgaaggcaatatctggggtgactactattacctagaagcccttatccgtttctacaaagactggaacctatattggtag

SEQ ID NO: 1366 - DNA, 438 bp, Streptococcus pneumoniae
ttggatattgagcaagcagtcgataatcaaacggtaatgctctttcttgcccaagtctccccaagcttgaataaaaccacctttttcttgatagcgttcaatcaacttatctgcagctttcaaggttgcttctctagcctctccatctccatttatcttatattcagccatacaagacggtgtgtacaagaagccgagatcatggtgatccaattctactctcttattgacacgatccaggaaagaaagaacatttttatgagcgatgtttttaaatgcatcctgttgactgtattcataagccaaccacagttctcctgtccagaaaccattggtccattccgtgttatccatgattggatagacattatcaaaggtagctggtgtcgggaaatcttccttgaaatagtcaaggttgagttgctaactgccgaataa

SEQ ID NO: 1367 - DNA, 435 bp, Streptococcus pneumoniae
atgaaaattgtacttgtagggcatggacattttgctacagggatttatagttctttacaattgattgcaggcaatcaagaaaatgtggaggcgattgactttgtggaaggaatgtcagcagatgaactcaagcaaaaaatcttacttgcaatttcaaatgaagaagaagttttaatcctaagtgatctcttgggaggatcgccattcaaggtttcttctaccataatgggagaaaatccagccaaaacaatgaatgttctctcgggtttgaacttagccatgttaatggaagcagtctttgctagaatggctcatagctttgatgaagttgttaataaatcagtagtggcggcccagggcggagtcgtaaatggtaaagaattgttttcaacggatgcagaggaagaggaagaagatttcgaatcgggtatttaa

SEQ ID NO: 1368 - DNA, 654 bp, Streptococcus pneumoniae
atgacaaatacatcattctcaattgagcagttttctttaaaaggaaaaattgctctcatcaccggcgcttcttatggaattggatttgctattgccaaatcctacgctgaagccggcgctactattgtctttaacgatatcaatcaagatctggtcaataaagggattgaagcttatcgtgaagttggcatcgaagcccatggatatgtctgtgacgtgacagacgaggacggtatccaagccatggtcaagcaaatcgaacaagaggttggtgtcattgacatcctcgttaataacgctggtattatccgccgagttccaatgtgcgaaatgagcgccgctgatttccgtaaggtcatcgatattgacttaaacgcaccatttatcgtttcaaaggcagttattccttctatgataaagaaagggcatggaaagattatcaatatttgttcgatgatgagcgaactgggacgtgaaacagttagcgcttatgctgctgctaaagggggcttgaaaatgttgacccgcaacattgcgtctgaatacggtggagccaatatccaatgtaacggaattggaccgggttatattgccactcctcaaacagcacctcttcgtgagttgcaagaagagtggttctcgccacccatttga

SEQ ID NO: 1369 - DNA, 375 bp, Streptococcus pneumoniae
atgtggccattgacaaaattgctggcatcactagcgagaaagacagcagggcccatcaaatcttcaggatttccccaacgtgcagcaggtgtttttgcaatgatgaactggtcaaatgggtggcgagaaccactcttcttgcaactcacgaagaggtgctgtttgaggagtggcaatataacccggtccaattccgttacattggatattggctccaccgtattcagacgcaatgttgcgggtcaacattttcaagccccctttagcagcagcataagcgctaactgtttcacgtcccagttcgctcatcatcgaacaaatattgataatctttccatgccctttctttatcatagaaggaataactgcctttga

SEQ ID NO: 1370 - DNA, 294 bp, Streptococcus pneumoniae
cccgcaacattgcgtctgaatacggtggagccaatatccaatgtaacggaattggaccgggttatattgccactcctcaaacagcacctcttcgtgagttgcaagaagagtggttctcgccacccatttgaccagttcatcattgcaaaaacacctgctgcacgttggggaaatcctgaagatttgatgggccctgctgtctttctcgctagtgatgccagcaattttgtcaatggccacatcctatatgtagatggcggtatcttagcctacatcggaaaacaacctgagtaa

SEQ ID NO: 1371 - DNA, 642 bp, Streptococcus pneumoniae
atgaaaatcgcattaatcaatgaaaatagtcaagctagcaagaatcacattatttacgatagtctaaaagaagcgacagataaaaaaggctaccaattatttaactatggtatgcgtggagaagaaggagaaagtcaattaacttatgtgcagaacggactaatggctgccatccttttaaatacaaaggcagttgactttgttgttaccggctgtggtacgggtgtaggggctatgcttgctttaaacagcttccctggtgttgtctgtggtctagcagtggacccaactgacgcttacctttattctcaaatcaatggtggtaacgccttgtctatcccttatgccaaaggatttggctggggggcagaactgaccctcaaattgatgtttgaacgcttatttgctgaagaaatgggcggtggctacccaagagaacgtgtaatccctgaacaacgcaacgctcgtatcttaaacgaggtgaaacaaatcacccacaatgatttgatgaccatccttaaaataatcgaccaagacttcctcaaagacaccatctctggcaaatacttccaagaatacttctttgaaaactgccaagatgatgaagttgctgcttatttgaaagaagtattagccaagtaa

SEQ ID NO: 1372 - DNA, 1002 bp, Streptococcus pneumoniae
atgacgaaaatattactgtttggagaaccattaattcgaatctcaccattagatgccaccagtatcggcgatcatgttgccagttcgacttattttggcggatcagaaattaacatcgcttgtaatttgcaagccctgggtatctcaacgaaagtctttaccgcactccctgccaacgagattggagatcgttttctcacattcttgaaacagcaccaaatcgataccagttcaatctgtcggcttggcgatcgaatcggcctctactatttggagaacggctttggttgtcgtcaaagtgaagttttctacgatcgtaagcatacgagtatcagccagattcggccaaacatgctagatatggattctctctttcaggggattagccattttcattttagtggaatcaccgtagctatcggtcaagaggtccgtgcgatccttctcctactcttggaagaagccaagcgccgaggaattgtcgtttcaatggatctcaatctgagaacaaagatgatttcagtcctagaagccaagtatgaattttctaagtttgcacgttttactgactattgcttcggtattgatcctctcatgattgatgaccaaaatctagagatgtttccaagagacagtgctagcctagaagaggtggaaaatcgcatgcgacttttaaaagaagcctatggtttcaaggccattttccataccctccgatctagtgatgagcaagacaaaaatgtctatcaagcctatgctctggaagaacgatttgaagagtctgtccaactaaaaactgcagtctatcaacgaattggtagcggggatgcctttatatctggtgccctttaccaactactccatcattcctccctaaaaactaccattgactttgcagttgcgagcgcaactctcaaatgcactcttccaggagaccatctctccacttccgcaactagtattgaaaatttactggcaaatgcacaagatatcattcgttag

SEQ ID NO: 1373 - DNA, 630 bp, Streptococcus pneumoniae
atgaccaaatcagatacgattattgaactaaaaaaacagaaaattgtcgctgtcattcgaggaaatacaaaggaagaaggactacaagcctcgattgcttgtatcaagggcggtatcaaagctattgaaatcgcctataccaatcagtatgcaggacaaatcatcaaggaacttgtagacttgtatcaggacgatcagagtgtttgtatcggtgcaggtactgtgcttgatgccgtaactgctagagatgccattctagctggagcaaattacgttgtttctccatctttccatgctgaaactgcgaaaatgtgcaatctctacagcacaccgtacattccaggctgtattaccctcacagagatcacgactgcacttgaagccggtagtgaaatcatcaaactcttcccaggtagtactctcagtccagcatatatctctgcagtcaaggcaccgatcccacaagtttccgtaatggtaaccggaggagtcggcctaaacaacatccctcaatggttcgctgctggtgcagatgccgttggaattggtggcgaactcaataaactcgcttcccaaggcaactttgaccgcatcagcgagattgcccaacagtatattacactcagataa

SEQ ID NO: 1374 - DNA, 354 bp, Streptococcus pneumoniae
gtggaggtgttctatcacattgtgttcacccctaagtatagacgaaaagtcatctataatcaatatagaagtagtttaggcgaaatatttcatcgcttgtgtagttataaaggtgttgaaatgatcgagggtcacttaatgccagaccatgtacacatgttagtcagtattccgtcgaggctaagtgtttcaagttttatggggtatttaaaaggcaaaagtgcactcatgatgtttgacaaacacgccaatctcaagtacaagtttgggaatcggcatttctgggcggaaggttattatgtaagtccagtagggcttaatgaagccacaattaagaaatatagtcaagattaa

SEQ ID NO: 1375 - DNA, 3237 bp, Streptococcus pneumoniae
ttgattttacaatatgtttattggagtgtatacatgcaaacaaaaacaaagaagctcattgtgagtttgtcttcacttgttttatcaggatttttattaaaccattatatgacagttggagcggaagaaacgactacgaatactattcagcaaagccagaaggaagttcagtatcagcaaagggatacaaaaaatttagttgaaaatggtgattttggtcagacggaggacggaagcagtccgtggacaggaagcaaagctcaggggtggtcaacttgggtagaccagaagaatagttctgcagatgcctcaactcgagtcattgaggctaaggatggggctatcactatctcaagccctgagaaattaagggcagcggttcaccgtatggttcctattgaagctaagaaaaagtataaactgcgtttcaagattaaaacagataataaagtcgggattgccaaagttcgtatcattgaggaaagtggtaaggacaagcgattgtggaattctgcaacgacgtcaggaacaaaggactggcagaccattgaagcagactatagcccgactttagatgttgataaaatcaagctggagttattctatgaaacaggaactgggactgtttcctttaaggatattgagctggtagaggtagcagaccagctttctgaggattctcaaacagataaacagcttgaggaaaagattgatttaccaattggaaaaaaacatgttttttctcttgcggactatacttataaggtagaaaatcctgacgttgcttcagtcaaaaatggaattttagaacctcttaaggaagggacaaccaatgtcattgtcagtaaagatggcaaggaagtgaaaaagattcctttgaagattctagcctctgttaaggatgcatacacagcccgtttggatgactggaatggcatcatcgctgggaatcaatactatgattctaaaaatgaacagatggccaaattaaaccaggaattggaaggaaaggtagctgatagcctatctagtatttcaagtcaggcggaccgcacctatttgtgggaaaaattttcaaattataaaatgtctgcaaatctgactgccacttatcggaaattggaggagatggccaagcaagtgaccaatccttcttctcgttattatcaagatgaaactgtcgttcgaacagtcagggattccatggaatggatgcataaacatgtctacaatagtgaaaagagcattgttgggaactggtgggattatgaaatcggtacacctcgtgccatcaacaataccttgtctctgatgaaagaatacttctctgatgaggaaattaaaaaatatacagatgtaattgaaaaatttgtaccagaccccgaacatttccgaaagacgactgataacccatttaaggctctaggtggaaacttagttgatatgggaagagtaaaagtaatagctggtttactgcgtaaagatgatcaagaaatttcttctaccattcgctcgattgagcaagtgttcaagttggtagaccaaggtgaaggtttttatcaagatggatcctatatcgaccacaccaatgttgcctatacgggtgcttatgggaatgttttgattgatggcctgtctcaactgttgccagtcattcaaaagaccaagaatccaatcgataaagataaaatgcaaaccatgtaccactggattgataaatcgtttgctcctttgctggtgaatggagagctgatggatatgagtcgtggacgctcgatcagtcgtgcaaatagcgaggggcacgtggccgcagtagaagtactaagagggattcaccgaatagcggatatgtctgaaggagaaaccaaacaacgtttgcagagtcttgtgaagaccattgttcaatcggatagttattatgatgtctttaagaatttgaagacttataaggatatcagtttgatgcaatccttgttaagtgatgcaggagtcgcaagtgttccaagaacaagttacctatctgcctttaacaagatggataaaacagccatgtacaatgcagagaaagggtttggatttggcttgtcactcttttccagtcgtaccttgaattacgaacacatgaacaaggaaaataaacgtggttggtatacgagtgatgggatgttctatctttacaatggcgatttgagtcactatagcgatggctactggccaacagttaatccatataagatgcctggtacaacagagacggatgctaagagagcggatagcgatacaggtaaagttttaccgtctgctttcgttggaacgagcaaactagatgatgccaatgcgacagcaaccatggatttcaccaactggaatcaaacattgactgctcataagagctggtttatgctgaaggataagatcgcctttttaggaagcaatatccaaaacacttcaacagatactgctgcaactacaattgaccagagaaaactggaatcaagtaatccatataaagtctatgtcaatgataaagaagcctcccttacagaacaagaaaaggattatcctgaaacccaaagtgtctttttagaatcgtccgattcgaaaaagaatattggttactttttctttaagaagagttcaatcagtatgagtaaggctttgcaaaagggagcctggaaggatatcaatgaaggacagtcagacaaggaagttgaaaatgaatttcttacgattagtcaggctcataagcaaaatggagattcttatggctatatgctcatccctaacgtggatcgtgccaccttcaatcaaatgataaaagagttagaaagtagcctcatcgaaaataacgaaacccttcagtctgtttatgatgctaaacaaggagtttggggcattgtgaaatatgatgattctgtctctactatttccaaccaattccaagttttgaaacgtggagtctataccattcgaaaagaaggggatgaatataagattgcctactataatcctgaaacccaggaatcagctccagatcaggaagtctttaaaaagctagagcaagcagctcagccacaagtacagaattcaaaagaaaaggaaaaatctgaagaggaaaagaaccattcggatcaaaagaatctccctcagacaggagaaggtcagtcaatcttggcaagtctagggttcttgctacttggggcattttatctattccgtagaggaaagaacaactaa

SEQ ID NO: 1376 - DNA, 477 bp, Streptococcus pneumoniae
atgacttcactttatgatttttccgttttgaaccaaaacaaccaagcaactcccttggatagctatcgtggcaaagttctcttgattgtcaacactgctactggatgtggtttaacgccccagtaccagggacttcaagaactctatgaacgctatcaagatcagggcttcgaaatattggatttcccttgcaatcagtttatgggacaagcacccggcagcgcagaggaaatcaacgccttctgtagcctacattttcaaaccaccttcccacgttttgccaagattaaggtcaacggtaaggaagcagaccctctctatgtctggttaaaagaccataaatctggcccactaggaaaacgaatcgaatggaatttcgctaagtttctcattagtcgtgatgggcaagtctttgaacgcttttcttcaaaaacagacccaaaacaaattgaagaggcgatacaaactctactataa

SEQ ID NO: 1377 - DNA, 2214 bp, Streptococcus pneumoniae
ttgaaaatttttaagggagagttttatcgaatctctgtattaacagacaagctagtaaggttagaatactctcaaactggaagttttgaggatagaacgacacaacttatctataatagagattttggccaagtttcgttagattatatcgagacatcaaacgtactagatattatgacggactattttcatctgcactttaataaaggagaatttaacgccgaaaatttatttatagaattaaaaggaaattttgccgtatatggtagtcgctggtattttggtgaatctattgaaacgttaaaaggaacagctcggactctggataaggcagatggagcaatctcgttagaagatggaattattagccgaaatggtatagccttattggatgattctcaaggatttatttgggatgaacaatctggttatattgagagagaaaatcaaattgacctgtatttctttgcctatgggcatgattatagaggagcaatcagagatttttaccatttgactggttcaacacccttgttgccaagatatgctttaggcaattggtggagtagatattggccttatacgtcggatgaatacttggatttaatagacagatttgaaacagagaaaattccattatctatcggtgtgttagatatggattggcatataactgacattccagctcgctttggaagtggctggacaggatatagttggaatagaaacttaataccaaatccagaacagttattgcaacaacttcatgatagaaagctaaagctctccttaaatgtccatcctgctgatgggatacgggcttatgaagaagcttatcctcaaatcgcaaaacggttggggttaaatgtagaactagaagaacctgctatttttgatttttttaatccctcttttagggaagcctactttaaagatgttcattatgaactagaaaagcagggagtagatttttggtggattgactggcaacaagggacacaaggtatgctagatccactttggcttttaaaccattatcactatcaggatagttgtaaaaatgcagaaggtggtttgattttatcaagatatgcaggtcctggtagtcaccgctaccctgttggtttttcaggggacactattattagttggaattccttaagatttcaaccctattttacagcgacagcatctaatatcggttatagttggtggagtcatgatatcggtggacatatgttgggggattatgacgaagagctacaaactagatggctacagtttggtgtttttagtccgattactcgattacatagttctagaagtccttttaatagtaaagaaccttggttcttttcagaaacaacatctaagattatgaagaaataccttcgtttgagacatcagatgattccctatctatataccatgaatgtaaagacacatgaggaaggtgccccattaatcagtccaatctattatttctatccagagaatgatgagagctataatgttccaaaccaatacttttttggaacagaactgatggtggctcccattgtagaaaagatggatttgacattccaatctgcaaaagtagatgtatggttccctgaaggtgaatggtatgacttcttttcagagaaaaaatacacaggtggtgtgaagttaagtgtttatagggacatctcgactacgcctgtgtttgcaaaaagtggtgcaatcattcccttggttggttctgagataggtatgggtgttgatttacctgaagttgtagattggtatgtattcccaggaaaacaacattcttttgaaatgcttgaagatcaaaatggtcaaagatataaaacaagattatcaatcgattgggaaatgggaatggtagagttagcattacaaggagattctagtatcgttccaagcaatagaaaacatagaattcattttaaaggaacgaatgtgtctataattgaattgccaaataagaatgatacagctaaatttgaatggaaagataataaaaggacatctttaaatgacgaagtttttagactactaaagacagcttctcttccatatgaattaaaagatagattgttaaatcaattcatcaatgcgaaaaactctcatgacttaatgaatatcttgcatcatcaggataaggaattgagagggcgtttgttggaaatgatatttactagccaaaactaa

SEQ ID NO: 1378 - DNA, 183 bp, Streptococcus pneumoniae
ttgcttttttactattgtatcgtattctacgataacatactttactttattgtttttttaaataacagcagttccctgtttatcaactattcgaactactttctattttgcttcataccctacatagcgaaaaaatatgaaaaagcagagaagaatatcttaaaaagacctcttcactgctaa

SEQ ID NO: 1379 - DNA, 1347 bp, Streptococcus pneumoniae
atggatcaacaaaacgggttgtttggttttcttgaaaaccatgttatgggaccaatgggcaaacttgctcagtttaaagtagtacgtgctatcacggctgcaggtatggctgctgtaccatttactattgtaggatcaatgtttttggtattcagtattttgccacaagctttctcattttggccaattgtggcagatattttctctgcttcatttgataaattcagatcactttacatggttgcaaactatgcgactatgggttctctatctctttatttcgttctatcacttgcatatgaattgacaaaaatttatgcagaggaagaagaactcaatatgaatcctcttaatggtgccttgcttgccttgatggcttttgtcatgacagtaccgcaaatcatttttgatggtggaatgatgaagactgtgacaagtctaaaagaaggtgcagtaattgcagatggatgggcaatgggaaatggagtcgcacgttttgggacaacagggatttttaccgcaatcattatggcaattgtgactgttcttatttatcgtatgtgtgttaaacataattgggttattaaaatgcctgaagctgttccagaaggagtttctcgtggatttaccgctttggttccgggatttgttgttgcatttgttgttatctttatcaacggtcttcttgtagcaatgggaacagatatttttaaagtcattgcaattccatttggttttgtatccaatctgactaattcgtggattggtttaatgattatttatctattgactcaactactttggattgtaggtatccacggtgcgaacattgtttttgcatttgttagtccaattgctcttgccaacatggctgaaaatgctgctggcgggcacttcgctgttgcaggtgaattttctaatatgtttgtaattgcaggtggttctggtgcaactttaggactatgtttatatattgcttttgcctctaaatctgaacagcttaaagcaataggacgagcatctgtagttccagccttatttaatattaatgaaccattaatttttggattacctattatctataatccagccttggctataccatttattttagcaccaatggttactgctactatttattacgtagcgaattctctaaactttattaagccaattatcgcacaggttccatggccaactccagtagggattggagctttcttagggacagcagatcttcgagctgtattagttgctctagtatgtgcatttgcagcattcctagtctatcttccattcatccgtgtatatgatcaaaaattggtgaaagaagagcaaggtatctaa

SEQ ID NO: 1380 - DNA, 507 bp, Streptococcus pneumoniae
atggataaaaaagaacgacaaaagattgaacaacaacgtcgagagatggctctaactaatactttttttaatcgatatcttcttctacgttattcaatagcactcttcttttttgggaatatttattggcttttgaatcagtttattaatccctcgcctattattattttccccattatgctcatagtattttctattttagcaactgttgaacaatttaaactctatggaaataggaaagaaaagttgggaataacactaatgtttgttagaatacaaatgcttatttcaataggattacttgttttaacttggacaagttggtttaagaatctttttccgatttttgaaaataaccaagtagcacgtttatttgtttttgtagttcttctattaggtttagttctgagtttgttagacattagaagaattaaaaaaatttataaacgaacagataaggtttatcaacaatttgtccaattggaaaagaactcacttagtttataa

SEQ ID NO: 1381 - DNA, 315 bp, Streptococcus pneumoniae
atgaatcaagaggaactgcaggttgcagcatttgaaattatcctgcattcgggaaatgcaaggtcagaaatacatgaagcatttgcaaaaatgagagaaggtagttttgatgatgcagaaagtaaattaaatcaatcaaatgagataattcttgaagcgcatcatgcacaaaccaaactcttgcaagaatacgcaagtggagtggaaattaaaattgaaattatcatggtacatgctcaagatcatttaatgaccactatgacattattagaagtagcaaaggaaatgttagctctttataagaaagttaactaa

SEQ ID NO: 1382 - DNA, 1980 bp, Streptococcus pneumoniae
atgaatgtgttaaacattaaagagaaagatatccttcaatttttaataaaaaataaggaacgttttgttacaagcaaagaactagcagaatatttatcctgttcagatagaactgtccgtaatgtactgaaattaattgagaagacaatgattattcaaggagtccggttgatttcaaaacaaggtcaagggtatcaaatattttttgagaatcaaggcgcttaccaggagtttagacaaacttatgaactggaagaagactatacgaaaactgcggtttcaaaaggtgatgatcgtttagtatttatcttaaataaattattatttgagcaagttccagttctttttgatgatttagctgatgaactttacgttagtcgttcaacattatctcatgatttcagaaagatacgagtgatgttatcagagtataatttgtccattgagagtagggcgaataaaggagtttatgtctcaggcgaggaacgtgataaacgacgttttatcataaattatttcctagagaatcaattttttaaaacaatacattgctatgtaaaatttaacttttttgatcaaactgttccattagaagaatttgctagaattgttttggatgaatgccaagaggccaacctaaaactatctgattttgtactacagaatttagtagttcacatagcattgtctgtgattcgtttaaaatccggatttgaaataaaaaatatagactgtcagatgactgatgatgcaacagagagaaaggttgcccaaagaattctttctaaagtaagagaagtaacaaatcaggaatttccagttcaggaaatagactacattactttgcatttgttagctaagagtcaacaatgtcaaaaaaatcagaagaatatttctgaagaagttttaaaaaaatctttatttaaaacatttcagaatttaggattagatgatatgtataacttttcttcagatttccaactaattgaaggattgataactcatctaatgacactacaagtacgtttagaaagccggattaccttaaataaccctttagtagatgaaattaaacagaattatagtgatatattctttatgactagagaaattcttgcaaatatggacaagttcttggagtggacaatatcagatgatgaagtagcatatgtaagtcttcactttttagctgctatggaacgtagcaaagagagtactaagtttaatattcttgctatttgtgcaacaggatttggtgcagcccaaatgttaagaaatcgtttggaaacggagtttgggaagcgagtagaagttgttgatgtaataggctattatgaattgaatcaagaaaaacttaaaggaatagattttatagtgtcagctgttgatttatcaaatctatattttcaaatcccagtttttaaagttagtgtgtttcttaagagtgatgagatggaaatgattagaaaagctatggatcagatgcaagtttctagttatgtaccatcatcaaagattaacaaatttgaaaacaacggctttagacagtattttagtaaagaaaattttttaatatgtactgaatcagacaaggtaaatttacttgaaaagatggttgagggtttatctgttggtgaatcaaatgagtttgaacaatctttactttatggaattaaacagcgcgaagaattaagttcagttgttttttctgaaaaaattgcagttccgcatcctattcagccctttggtacagagggaaaggtttcggttgcaatctgtaaagattcgttactctgggataatcaaagttcatatgtccagctagtatttcttctatctccatcaatatatgggaacgaaggtttggcaactgtgactaaaaagatagtctctctgacagagaatgatgagttgcaaaatcagctaatatcttgcaataactttgaagattttattaacatatttgagaagataaaatag

SEQ ID NO: 1383 - DNA, 342 bp, Streptococcus pneumoniae
ttggatttaagaaaaggagaaaatattatggcaaaagctttaattatttgtgcagcaggaatgtcttcatcacttatggcacagaaaacaacagagtttctaaaaggaaaagggaaagatattgtagttgatgctattagtgctactgaaggagggaaagctatcgcagcagcagcttttgatttgtatcttgtcagccctcaaacaaaaatgtactttaagcaatttgaagaggctggttctaaagcaggaaaaccagttgtacaaatacctcctcaagcctatattcctattccaatgggaattgaaaaaatggctaatttgattcttgagaatatttga

SEQ ID NO: 1384 - DNA, 240 bp, Streptococcus pneumoniae
atgattggaagtattgcagcaattttaacaacatttgcatttttaccacaagtttttcgtgtagttaagacaaaggacacaggatctattgctctaggtatgtatgttatgcaagttattggtattgcattgtggcttgctcatggtattcgtataggagacttgcctttgattttagctaatagtgtttcatttctactttcaggaataattttattttataaattgaagtataaataa

SEQ ID NO: 1385 - DNA, 1479 bp, Streptococcus pneumoniae
ttgaggtttataataagagtatcaaagtcaggaggaaaaaagatgactacttttaaagatggatttttatggggtggtgctgttgctgctcatcaacttgaaggtggatggcaagaaggtggcaagggaattagtgttgctgatgttatgactgctggtcgtcatggagtagctcgtgaaattactttgggagttttagagggtaaatattatccaaatcatgaggcgatagatttttatcatcgttataaagaagatatagcactttttgctgaaatgggattcaagtgcttccgtacctctattgcatggacacgtatctttccaaaaggtgatgagttagagccgaatgaagaaggattacagttttatgataatctttttgatgaatgcttaaagaatggtattgaacctgtcatcactctatctcattttgaaatgccttatcacttagtgaccgaatatggtggttggaaaaataggaaattgattgatttctttgctcgttttgcagaagtcatatttaaacgttacaaagataaggttaaatattggatgactttcaatgaaatcaataatcaagcgaattatcaggaagattttgcaccatttactaactcaggtattgtatatgaggaaggtgataatagagaggcaattatgtatcaagcagcacattacgaattagttgcttctgcacgagctgtaaaaattggtcatgagattaatccagattttcaaataggttgtatgattgcgatgtgtccaatttatccagctacttgcaatcctaaggatatcttaatggcaatgaaagctatgcaaaagcgttattattttgctgatgtgcatgttttaggtaaatatcctgagcatattttcaagtattgggaacgaaaaggtatttcagttgattttactgcccaggataaagaagatttacttggtgggactgtagattacattggtttcagttactatatgtcctttgctatcgactctcatcgtgaaaataatccttattttgattatcttgaaacagaagatttagtgaaaaataattatgttaaggcttctgaatgggagtggcaaattgatccagaaggtttgcgttatgcgttaaattggtttacagaccactatcacttaccactctttattgttgaaaatggttttggagctatagataaagttgcagcagatggtatggtacatgatgattatagaattgaatatctaggtgcccatattcgtgaaatgaaaaaggctgtagttgaagatggtgttgatttaatgggttatactccatggggatgtattgatttagtttcagctggtaccggtgaaatgcggaaacgttatggctttatttatgtagataaagatgacaatgggaagggaagttataatcgttccccgaaaaaatcttttggctggtataaggaagttatttcatctaacggtgaatcagtagaatag

SEQ ID NO: 1386 - DNA, 366 bp, Streptococcus pneumoniae
ttgaaggatgattttggaggatataagatgacattgactattcatgtatattataaaggtgatggagatagtgcaataaagtttgcaagagaaatgcttgatagtggccttgttgaagaaattagaaatcaaaaaggtaacttgaaatacgaatattttttaccaattgaaaaagagggaactattctccttattgatcagtggataaatcaagaaactttagataaacattatcaatcaaagacaatgcagaaaatcttagatttaagaaaaaaatatcacttgcagatgcaagttgaacgttatatagaagatgattctgggatgccagaaagcgataagtcgtttatagacacagggaattag

SEQ ID NO: 1387 - DNA, 207 bp, Streptococcus pneumoniae
atggataatgcaagattccatagaatgggtaagctagaactcttgtgtgaagagtttgggcataaacttttacctcttcctccctactcatctgagtacaatcctattgagaaaacatgggctcatatcaaaaagcacctcaaaaaggtattaccaagttgcaataccttttatgaggctcttttgtcttgttcttgtttcaattga

SEQ ID NO: 1388 - DNA, 393 bp, Streptococcus pneumoniae
atgtcacaagcacaatatgcaggtactggacgtcgtaaaaacgctgttgcacgcgttcgccttgttccaggaactggtaaaatcactgttaacaaaaaagatgttgaagagtacatcccacacgctgaccttcgtcttgtcatcaaccaaccattcgcagttacttcaactgtaggttcatacgacgttttcgttaacgttgtaggtggtggatacgctggtcaatcaggagctatccgtcacggtatcgctcgtgcccttcttcaagtagacccagacttccgcgattcattgaaacgcgcaggacttcttacacgtgactcacgtaaagttgaacgtaagaaaccaggtcttaagaaagctcgtaaagcatcacaatttagtaaacgttaa

SEQ ID NO: 1389 - DNA, 447 bp, Streptococcus pneumoniae
atgaacaaaacaacatttatggctaaaccaggccaagttgaacgtaaatggtacgtagttgacgcaactgatgtaccacttggacgtctttctgcagtagttgctagcgtacttcgcggaaaaaacaaaccaacatttacaccacacactgatacaggtgacttcgtgattgttatcaatgctgaaaaagttaaattgactggtaaaaaagcaactgataaaatctactacactcactcaaaccacccaggtggattgaaacaaatctctgcaggtgaacttcgttctaaaaatgcagtacgtttgattgagaaatcagttaaaggtatgcttccacacaatacacttggacgcgctcaaggtatgaagttgaaagtatttgttggagctgagcacactcatgctgcacaacaaccagaagttcttgacatttcaggacttatctaa

SEQ ID NO: 1390 - DNA, 366 bp, Streptococcus pneumoniae
ttgataacaatcacgaagtcacctgtatcagtgtgtggtgtaaatgttggtttgttttttccgcgaagtacgctagcaactactgcagaaagacgtccaagtggtacatcagttgcgtcaactacgtaccatttacgttcaacttggcctggtttagccataaatgttgttttgttcatgatttctcctatatatagttcgatttttgtttacggtgatgggtgttccttcccatcgaaaagtatttggaaggttccggggcctttcaaatggggtaaacaataccgcctactatcataccaaatttcacccctaaaagtcaatagatatgaaaaatatttttcggtaacttctcaaagtaactga

SEQ ID NO: 1391 - DNA, 318 bp, Streptococcus pneumoniae
atggcttttaccaatacccacatgcggtctgctagttttggcattgttaccagcttgcctgatgacatcattgactctttttggtatattatcgaccatttcttaaaaaatgtctttgaattggaagaagaactcgagtttcaattgcttaataaccaaggaaagattaccttccacttttcaagtcaacacctccctacagccattgattttgactttaaccatcctttcgaccctcgttatcccccaagagtactggttttagacatggacggtagagaaactatcctcctcccagaagaaaatgacctattttaa

SEQ ID NO: 1392 - DNA, 393 bp, Streptococcus pneumoniae
ttgacaaactgcgagctcgtgggcatctatattctcaaagagtccagtgtcttagcgacggagccttggggtggagtggagcaggatagctttgccaatcaagtggttgaggtggaaacctggctaccagcacaagacttgttagaaaccttgttagccattgagtcagagctgggacgggtgagagaagtgcattggggacctcgtttgattgatttggacttgctctttgtggaggaccagatcctttatacagacgacctcatattgcctcatccttacatagcggaacgcctttttgtccttgagtccttacaggaaattgcgcctcattttatccatccgatattaaaacaaccgatccgtaacttgtatgatgctttgaaaaaatag

SEQ ID NO: 1393 - DNA, 510 bp, Streptococcus pneumoniae
atggatcaactgcagattaaggatttggaaatgtttgcctatcatggtctttttcctagtgagaaagaattggggcagaaatttgtcgtttcagccatcctatcctatgatatgaccaaggcagctacagacttggatttaacagcctctgtccattacggagaattgtgtcagcagtggacgacttggtttcaggaaacgagtgaagatttgattgaaacggtagcctataaactggtggaacgtacctttgagtcttatcctcttgtccaagaaatgaagttggaactgaaaaaaccttgggcaccggtgcatttgtcactagatacttgctcggtaaccattcatcgccgcaagcaacgagcctttatcgccctaggaagcaatatgggagataaacaagcaaacttgaagcaagccattgacaaactgcgagctcgtgggcatctatattctcaaagagtccagtgtcttagcgacggagccttggggtggagtggagcaggatag

SEQ ID NO: 1394 - DNA, 555 bp, Streptococcus pneumoniae
atggatacacaaaagattgaagcggctgtaaaaatgattatcgaggctgtaggagaggacgctaatcgcgagggcttgcaggaaacacctgctcgtgtagcccgtatgtatcaagagattttttcaggtcttggtcaaacagcagaggaacatttgtcaaaatcctttgaaattattgacgataatatggtggtagaaaaggatatctttttccataccatgtgtgaacaccacttcttgccattttatggtagagcgcacattgcctacattccagatggtcgtgtggcaggcttgtctaagctagcccgtacggttgaagtttattcgaaaaaaccacaaattcaagaacgtttgaatatcgaagtggccgatgccttgatggactatctaggtgctaaaggagcctttgttgtcattgaggcggaacatatgtgtatgagtatgcgtggtgttagaaaaccaggcactgcaaccttgacgacagtagctcgtggtctatttgaaacagataaggacctccgcgaccaagcttatcgtttaatggggctataa

SEQ ID NO: 1395 - DNA, 1323 bp, Streptococcus pneumoniae
atgaaagaaattgaaaacaatcagtggattgctaactaccggacggatcaaccgcattttggcttggaacgaatggtggaactgttagctttgcgtggcaatccccatctcaaactcaaggtcctccatatcggaggaactaacggcaagggctcgactattgcttttttgaaaaagatgctagaaaagctagggctgagagttggcgtgtttagctcgccctatctcattcattacacagaccagattagcatcaatggggaatcgatctcagaagtgaggctagaagctctcatggcagactatcagtctttgctggagggagaagcggtcgccaatttacagggcacaaccgagtttgagattatcacagccctagcctatgactactttgcctcagagcaagtagatgtggctatcatggaagttggcatgggtggacttttggatagtaccaatgtctgtcagcccattttgacaggaattacaactattggcttggatcatgtggccctacttggtgacaccttggaggccatagcagagcagaaggcaggtattatcaaacaagggatgcccttggtaacagggcgtattgctccagaagccttggctgtgattgaccgcattgcggaagggaaagatgcgccgagacttgcctacgggacagattatcaggttcgtcatcaagaaagtgtggtgacaggggaagtctttgactatacaagtgctgtcagacaaggtcgcttccagactagcctgcttggtttgtaccaaatagagaatgctgggatggccatagctttacttgatactttttgtcaagaagatggtcgagagctagcaagcaatgattttcttggtcaagccttggaagaaacaagttggccagggcgtttggaaatcgtgtcaagagatcccttgatgattttggatggagcccacaatccccatgctatcaaggccttgttggtaaccttgcaagaacgttttgcggattatcataaggaaatcctcttcacttgtatcaaaaccaaggccttggaggatatgttggacttgctgggagccatgccagataccgagcttactctaacacattttgcggatagtcgggcgacggatgaaaacgtgctgaaagaggcagctaagtctagaaatctcagctaccaagattggcatgattttctagagcagaatttgacagataaaaaagaagagaaacaaacagttaggattgtcacaggttccttgtatttcttgagccaagtgagggcctatctgatggagaggaagaacgagaatggatacacaaaagattga

SEQ ID NO: 1396 - DNA, 981 bp, Streptococcus pneumoniae
atgatgaaaagccttgagggagtgatcgatatgtcaagtaaagccaatcatgcaaagacagctatttgcggaattatcaatgtaaccccagattccttttcggatggtggtcaattttttgctcttgagcaggcactccagcaggctcgtaaattgatagcagaaggagccagcatgctagatatcggtggagaatcaactcggccgggaagtagctatgttgaggttgagatagaagaggaaatccagcgtgttgttccagtgatcaaagctattcgcaaggaaagtgatgtcctcatttctattgatacttggaaaagtcaggtggcagaggctgctttggctgctggtgctaatctagttaatgatatcactggtctcatgggtgatgaaaaaatggcccatgtgatagctaaagatggagcgaaagtggtcattatgtttaatcttgttatggctcgacctcagcatcctagctcgctcatattccctcattttggatttaatcaagcttttacagaggaagagttagctgactttgaaacattgccaatcgaagagttgatggagactttctttgaaagagcactagcgagagcaaatcaagctggaattgcacaagaaaatatcctgttggatccaggaatcggctttgggctgactaagaaagaaaatttgcttcttttacgagacctggataaactacatcagaagggctatccaatctttcttggagtgtcgcgcaagaggtttgtcatcaatatcctagaagaaaatggttttgaagtcaatcctgagacagaacttggtttccacaattgggacacagcttcggctcatgtaactagtatcgctgcgagacagggtgtagaagtggtgcgcgtgcatgacgtagctagtcacaagatggcggttgaaattgcctccgctattcgtctggctgatgaagcggaaaatttagatttaaaacaatataaataa

SEQ ID NO: 1397 - DNA, 708 bp, Streptococcus pneumoniae
atgaaagataagacgatttggcaagaggttttaaacagagggaaatgggtgctcatccttttggtagcttttgttttatctcaatttcccataggactggctttgtttttagcaaacaaacagtttccgattttacagtcagggctcttagtaggtgctctatccatagtcgttttgattgtattcattattggtgcacgaaaaacacaacttgctacttttaatctatccttttttaaggcaaaagacttggctcgcttggtactgagttatctggtgatttttgcgacaaatctcttgggttcactcctgcttcgactaacaaatgaggtaacaaccaataaccaatcaatactgaatggtatagttcagaatagctccttgatttcaacttttttcctgctagtcttgattgcaccaatttgtgaagaaattttgtgtcgtgggattattccaaaaaagatcttccgcggaaaagaaaaacttggctttgttgttggtgcaattgtctttgccttgctccatatgccaaccaatctaccttctgtgattatttatggagggatgtcaacggttttgacttggacagcctataagactgagcgtttggagatgtccattttgcttcatatgattctcaatggtattgcattttgtttgttggccttattggtattgattagtagaaatctaggtctatcattctaa

SEQ ID NO: 1398 - DNA, 186 bp, Streptococcus pneumoniae
ttggtgcaatcaagactagcaggaaaaaagttgaaatcaaggagctattctgaactataccattcagtattgattggttattggttgttacctcatttgttagtcgaagcaggagtgaacccaagagatttgtcgcaaaaatcaccagataactcagtaccaagcgagccaagtcttttgccttaa

SEQ ID NO: 1399 - DNA, 1482 bp, Streptococcus pneumoniae
atgataaatgatataattctattattgttcgtaaaaattaaaaggagattgatgatggacaaattatttaaactaaaagagaacggtacagacgttcgtacagaggttctcgctggtttaacaactttctttgcaatgagctatattctctttgtaaacccacaaatactttcacaaacaggaatgcctgctcagggcgtcttcctagcgacgattattggtgcagtagcgggtaccttgatgatggctttttatgctaacttaccttatgcccaagcgccaggtatgggactcaatgccttctttacctttacagttgtattcgggcttggttattcttggcaagaagccctagctatggtcttcatctgtgggattatttcattgattattaccttgacaaatgttcgtaaaatgatcattgaatcgattcccaatgctcttcgctcagctatttcagctggtatcggtgtcttccttgcctatgtagggattaagaatgctggacttttgaaattcacgattgatccaggcaactatactgttgtaggagaaggggctgacaaagctcaagcaacgattgcagcaaactcttcagcagttccaggattggtcagctttaataatccagctgttttagtggctcttgcaggacttgccattactatcttctttgtcatcaaagggattaaagggggaattattctctctatcttgacaacaactgttcttgctattgcagttggtttggttgatttgtctagtatcgattttgctaataaccatgttggtgcagcttttgaagatttgaagacaatctttggtgcagctcttggttcagaaggtttgggagctttggtttcagatacagctcgcttgcctgaaactctgatggccattcttgccttctcattgacagatatttttgacacaattggtaccttgatcggtacaggtgaaaaagttggtattgtagcgacaaatggtgaaaatcaccaatcagccaaattggataaggctctttactctgatttgattggaacgacagtcggtgccattgcaggtacttcaaacgttacaacctatgttgagtctgcggcgggtatcggcgctggtggccgtactgggttgacagccctagtggttgcgatctgttttgctctatctagcttctttagcccacttctagcgattgttcctacagctgcaacagcaccaattttgattattgtcggaatcatgatgctttctaacttgaaaaatatcccttgggatgatatggctgaagcggttcctgctttcttcacatctatctttatgggattcagctactctatcacacaagggattgctgttggtttcttgacatataccttgacaaaagttgtcaaaggtcaagccaaggatgtgcacgtgatgatttggattttggatgccttgtttatccttaactatatcagtatggcgctatctatggtataa

SEQ ID NO: 1400 - DNA, 813 bp, Streptococcus pneumoniae
atgacgaaaaaaattattgcagttgacctggatggaaccctgctcaactcagacagtcaaatttctgactttaccaaaagaaccatcaaaaaagttgctgaaaaaggccatcaggttattattacgacaggtcgcccttaccgtatgtcaaaagatttttaccgtgaactgggcttagacactcctatgattaacttcaacggatcccttactcatttaccagaccaagtttgggattttgaaaagtgtttgactgtagacaaaaaatatctgctagatatggttcaacgttcagaggacattcaagccgattttatcgctggagaatatcgtaaaaaattctacattacaaatcccaatgaagaaattgccaatcccaaactatttggtgtagaagctttccagcctgaagatcaattccagcctgaattggtgaccaaggaccctaactgtatcctcttgcagaccagagccagtgacaaatatgccttggcaaaagacatgaacgccttctaccagcatcaactttctatcaacacctggggaggtccgctcaatatccttgaatgtaccccaaaaggtgtcaacaaggcctttgctttggactacttgctcaagataatgaatcgtgacaaaaaagatttgattgcctttggagatgaacacaatgataccgaaatgctcgcttttgctgggaagggttatgccatgaaaaatgccaatccagagctactcccttatgcagatgagcaaatttccctttccaacgaccaagatggggttgccaaaaccctacaagacttattcttataa

SEQ ID NO: 1401 - DNA, 933 bp, Streptococcus pneumoniae
atgaaagctgttgttgtaaatccagaaagcactggtgttgctattgaagaaaaagtactccgtccacttgaaactggggaagcacttgtagaagttgaatactgtggcgtttgccacaccgacctccacgttgctcatggtgactttggtcaagtcccaggacgtgttcttgggcacgaaggtatcggtatcgttaaagagattgctccagatgtgaaaagccttaaagtcggtgaccgcgtcagcgttgcttggttctttgaaggatgtggcacttgcgaatactgtacaactggtcgcgaaaccctttgccgtacagtgaaaaatgctggctactcagtagacggtggtatggctgaacaatgtatcgtaactgctgactatgctgtcaaagttcctgacggacttgatccagcccaagcttcttctatcacatgtgctggagtaacaacctataaagctatcaaagaagcaaaagttgaaccaggccaatgggttgttctttacggtgctggtggacttggtaacctcgctgttcaatacgctaaaaaagtattcaatgctcatgttatcgcagtcgatatcaacaatgacaaacttgcccttgcaaaagaagtaggcgctgacattgtgattaacggcctcgaagttgaagatgtagctggactcattaaagaaaaaactgatggaggagctcattcagctgtcgtaactgctgtgtctaaagttgccttcaaccaggctgttgactccattcgtgctggtggtcgcgtcgtcgctgttggtcttccttctgaaatgatggaactcagcatcgttaaaacagtcctagatggaatccaagtcatcggttctcttgtcggaactcgtaaagacttagaagaagccttccaatttggtgcagaaggtctggtagtcccagttgttcaataa

SEQ ID NO: 1402 - DNA, 999 bp, Streptococcus pneumoniae
atgacaataatgagtatcggaatcattattgcgagccacggcgaatttgctgcgggtattcatcagtcaggatctatgatctttggtgaacaagaaaaggttcaagttgtgacctttatgccaaatgaaggtcctgatgatctatacgctaagtttaataacgctgttgctgcatttgacgcagaagatgaggttctagttttagctgacctttggagtggttctccatttaaccaagctagtcgcgtgatgggagaaaatcctgagcgtaagtttgccatcatcacaggacttaacttaccgatgttgattcaagcctacacagagcgcctcatggacgctgctgcaggtgtagaaaaagtcgctgctaatatcattaaagaagccaaggatggcatcaaagctcttccagaagagctaaatccagttgaagaagttgcaagcgctgcagctgctccagttgcccaagctgctatcccagaaggaactgttatcggagacggtaaattgaaaatcaatcttgcccgtcttgacacacgtctacttcacggtcaggttgcaactgcttggactccagattcaaaagcaaatcgtatcatcgttgcttcagataacgtggctaaagacgaccttcgtaaagaattgattaaacaagcagctccaggtaatgtcaaggctaacgtggttccaattcaaaaactgattgagatttcaaaagacccacgttttggagaaacacatgcccttatcttgtttgaaacacctcaagatgcccttcgtgccatcgaaggcggcgtgccaatcaagactcttaacgttggttctatggctcactcaacaggtaaaacattggtcaataccgttttgtctatggacaaagaagatgttgcgacatttgaaaaaatgcgtgacttgggtgttgaatttgatgtccgtaaagtaccaaatgattctaaaaaagatttgtttgacttgattaacaaagccaatgtcaaataa

SEQ ID NO: 1403 - DNA, 804 bp, Streptococcus pneumoniae
atgtctattatttctatggttttagtagtcgttgtagccttctttgcaggtcttgaaggcatcctcgaccagttccaatttcaccaaccacttgtagcctgtacccttattgggcttgtaacaggtcacttggaagcagggattatcctcggtggatcgcttcaaatgattgcccttggttggtcaaatatcggtgctgctatcgctcctgatgctgcacttgcttctgtcgctgctgccattatcatggttcttggtggtgactttaccaagactggtatcggtgttgcccaagcggttgctatccctcttgccgtagctggacttttcttgacaatgattgttcgtacaatttcagttggtttggttcatactgcagatgctgccgctaaaaaaggtgacttcggcgctgtggagcgtgcgcatttcattgcgctactcttccaaggacttcgtatcgcgcttcctgcagctcttctccttatggtaccaactgaaactgtacaaagtatccttagtgccatgccagactggctcaaagatggtatggctatcggtggtggtatggtcgttgccgttggttacgccatggttatcaacatgatggcaactcgtgaagtatggccattcttcgctcttggtttcgttctcgctgctgtgtcagatattactctaatcggattcggtgctatcggtgttgctatcgctcttatctaccttcacctttctaaaactggtggaaatggtggcggaggagccgcaacttctaacgacccaatcggcgatatcctagaagactactaa

SEQ ID NO: 1404 - DNA, 912 bp, Streptococcus pneumoniae
atgactgaaaaacttcaattaactaaatcagatcgtaaaaaagtttggtggcgttcaaccttcttacaagggtcttggaactttgaacggatgcaaaacttgggctgggcttatacactcattccagctatcaaaaaactctatactaaaaaagaagatcaaatcgctgctcttgagcgtcaccttgagttcttcaacactcatccatacgtagctgctccagtcatgggggttactcttgcgcttgaagaagaacgtgctaacggtgtggaaatcgatgacgctgctatccaaggggtcaaaatcggtatgatgggacctcttgctggtatcggtgacccagtattctggtttacagtacgcccaatccttggatctctcggtgcttcacttgcccttactggcaatatcttgggtccactcctcttctttgttgcatggaacttgattcgtatgtcattcttgtggtatgttcaagagattggatacaaggctggatcagaaatcactaaagatatgtctggtggtatccttcaagatatcactaaaggagcttctatccttgggatgttcattcttgctgtccttgttcaacgctgggtaaatattaaatttgctttcgatgtttctaaagttcaactagatgaaaaggcttatatccattgggataaattgccagaagggtctaaaggtatccaagaagcattcgcacaagtaggacaaggattgtctcaaactcctgaaaaagttactactttccaacaaaacttggatatgttgattcctggattatcaggactactccttactttactttgcatgtacttacttaagaaaaaagtatctccaatcactattatccttgccctcttcgcagtgggtattgtggcacatgttcttcacatcatgtaa

SEQ ID NO: 1405 - DNA, 1335 bp, Streptococcus pneumoniae
atgaacgcgattcaagaatcatttactgataaactatttgccaactatgaagcaaatgtaaaataccaagcgattgaaaatgctgctagccacaacggaatttttgcagctctggaacgtcgtcaaagccatgtagacaacacacctgttttctcattggatataaccaaggacaaggtcactaaccagaaagcgtctggtcgttgctggatgtttgcggctctcaacaccttccgccacaaactcatctcgcaatacaaattggagaactttgagttgtcacaagcccacactttcttctgggataagtatgagaaatcaaactggttcttggagcaagtcattgcgacttcagaccaagaattgactagccgcaaggttagcttcttacttcaaacacctcaacaagatggtggtcaatgggatatggtcgtttccctctttgaaaaatacggtgtcgtgcctaagtcagtttatcctgagtctgtttcatctagcagcagtcgtgagctaaatgcgatccttaataaattgcttcgtcaagatgctcaaatcttgcgtgacttgcttgtttctggtgcagatcaagcgactgttcaagctaagaaagaagacctcttgcaagaaatctttaactttcttgctatgtcattaggacttccaccacgcaagtttgactttgcttatcgcgataaagataacaactacaaaagtgaaaaaggaatcacaccacaagagttttacaagaaatatgtcaatcttcctttagaagactacgtttctgttatcaatgctccaactgctgataaaccttacggaaaatcttacacagttgagatgttggggaatgtggttggtagccgtgcagttcgttacatcaacgttccaatggagcgcttgaaagaattggcgattgcccaaatgcaagcaggtgagactgtttggtttggttctgatgtcggccagctcagtaaccgtaaggctggcatccttgcgacagatgtttatgactttgaatcaagcatggacattaaacttactcaagacaaggctggacgtttggactatagcgaaagcttgatgacccacgccatggtcttgacaggtgttgacttggacgaaaatggtaaatcaaccaagtggaaggttgaaaactcatggggagacaaggtcggtacagatggttactttgttgcctcagacgcttggatggacgaatacacataccaaatcgttgttcgtaaggaattgctgacagcagaagaacaagctgcctatggagcagaaccaattgtacttgcaccatgggatccaatgggagccttggctgaataa

SEQ ID NO: 1406 - DNA, 723 bp, Streptococcus pneumoniae
atgagattagataaatttttagttgcctgtgcggtgggaagtcggactgaggtcaaaaacttgctcaaggctgggcgcgtgactgtaaatggtaaaaaagaaaaatcagctaaattgcagattgatgaaaaaatagatgagattcgctttgatgggcaagtgttggagtatgaagagtttgtctactacatgatgaacaagcccaaaggagttatatcagcgactgaggatcccaagcacagaaccgttctggacttgttggatgacttggcgcggagtaaggaaattttcccagtaggacgcttggatattgacacgcatggtcttttgctcttgaccaatgatggtcagctggctcatgttcttctttcgcccaagcgtcatgtggacaagacttatctggcacaagtcaagggaatcatgacccaagaagatgtggagatatttgctgagggtattcctctcaaagactttacctgtcaacccgctatactggagcttgtatccatagatacagaaaagaatcaaagccaaatccgtgtgaccattgcagaagggaagtttcatcagatcaagcgtatggtgggctactgtggcaaggaagtggtggacttgcaacgattgactatgggaactttagtattagatgagaacctggaacgaggggaatggcgtcgcttgaccaaggaagaattagaaattctccgcgctaatattatttaa

SEQ ID NO: 1407 - DNA, 411 bp, Streptococcus pneumoniae
  unsure (48),(49),(51): n at each above location is unknown.
ttgtactctcttcaaaccacttcagattcactttgccgtaggtgtggnngntatgcttcgtcagttctatctgcaacctcaaaacagtgttttgagctgacttcgtcagttctatctacaacctcaaaacggtgttttgagctgacttcgtcagttctatctacaacctcaaaacggtgttttgagctgacttcgtcagttctatctgcaacctcaaaacagtgttttgagcaacccgcagctagtttcctagtttgctctttgattttcattgagtataacacaaaaggtagcccatcagctacctttttcttatgcttcctcaatcaagcgagtatgttctctcttgatacagcgattcatcacgatatcatcacatccaccatcacgcaaaatctctttcgcttctaa

SEQ ID NO: 1408 - DNA, 231 bp, Streptococcus pneumoniae
atgaaaatcaaagagcaaactaggaaactagccgcaggttgctcaaagcactgctttgaggttgcagatagaactgacgaagtcagctcaaaacactgttttgaggttgcagatagaactgacgaagtcagtaacatatatacgggcaaggcgacgttgacgcggtttgaagagatttttgaagagtatgaaacgaaaaggaggttggtcattgtaccagcctccttttga

SEQ ID NO: 1409 - DNA, 231 bp, Streptococcus pneumoniae
atgttaggaagtatgttcgttggtctcctagtgggatttttagcaggtgctatgaccaatcgtggagagcgaatgggatgttttggaaaaatgtttctcggttggatcggagcctttctaggtcacttgctctttggaacttgggggccagttttatcaggaacagctattatcccagctgttttaggtgccatgattgtcttagctattttttggagacgaggaagttaa

SEQ ID NO: 1410 - DNA, 1242 bp, Streptococcus pneumoniae
atggttttaccaaattttaaagaaaatctagaaaaatatgcgaaattgttggttgcgaacggaattaacgtgcaacctggtcacactttggctctctctattgatgtggagcaacgtgaattggcacatctaatcgtgaaagaagcttatgccttgggtgcgcatgaggtcatcgttcagtggacagatgatgtgattaaccgtgagaaattcctccatgccccgatggagcgtttggacaatgtgccagaatacaagattgctgagatgaactatctcttggagaacaaggctagccgtcttggagttcgttcatctgatccaggtgccttgaacggagtggacgctgacaagctttcagcttctgctaaagctatgggacttgccatgaagccaatgcgaatcgcaactcaatctaacaaagttagctggactgtagcagctgcagcaggacttgagtgggctaagaaagtcttcccaaatgctgcgagcgacgaagaagcagttgatttcctttgggaccaaattttcaaaacttgccgtgtctacgaagcagatcctgttaaggcttgggaggaacatgcagccattctcaagagcaaggccgatatgcttaataaggagcaattttcagcccttcactacacagcgccaggaacagatttaacacttggtttgccaaagaaccacgtttgggaatcagctggtgctgtcaatgcacagggcgaagaattcttgccaaatatgccgacagaagaggtcttcacagcgcctgacttccgtcgtgcagatggttatgtcacttctacaaaaccgcttagctacaacggaaatatcattgaaggcattaaggtgacctttaaggatggacaaatcgtagatatcactgctgagaagggtgatcaggttatgaaagaccttgtctttgaaaatgcgggtgcgcgtgccttgggtgaatgtgccttggtaccagatccaagtccaatttctcagtcaggcattaccttctttaacacccttttcgatgaaaatgcgtcaaaccacttggctatcggtgcagcctatgcgactagcgttgttgatggagcggagatgagcgaagaggagcttgaagctgcagggcttaaccgttcagatgttcacgtagactttatgattggttctaaccaaatggatatcgatggtattcgtgaggatggaacgcgagtacctcttttccgtaatgggaattgggcaaattaa

SEQ ID NO: 1411 - DNA, 180 bp, Streptococcus pneumoniae
tttattttaatctattttaagggggttctcatgaaactaagaatatttgcggaagataagccggctaagaaggtatttgaatatcaattagaacttgctgatcgtacaattcttctatcgacagcactcttgtcaggtgctattgctttagcaggaatcttttctgctttgaaagaaaaa

SEQ ID NO: 1412 - DNA, 231 bp, Streptococcus pneumoniae
attaaaataaatcactgtgactgcctgtcctcagcaaatttaaaatcaattccgacttatctactttataaaccaaaagccaatctggctgggtatggcattcacgaactccttgaaaatgcttggatgccgtcaatgaatgatcacgatatctggcaggatgttctttttcttgaaccagaaaattcaaaacttcttctaataattctgccttcaaaccacgcttcatag

SEQ ID NO: 1413 - DNA, 279 bp, Streptococcus pneumoniae
gtgcttaagattcgttatcataaacagtttaaaaaagattttaagttggctatgaagcgtggtttgaaggcagaattattagaagaagttttgaattttctggttcaagaaaaagaacatcctgccagatatcgtgatcattcattgacggcatccaagcattttcaaggagttcgtgaatgccatacccagccagattggcttttggtttataaagtagataagtcggaattgattttaaatttgctgaggacaggcagtcacagtgatttattttaa

SEQ ID NO: 1414 - DNA, 264 bp, Streptococcus pneumoniae
atgtcaaagatgagtatgagcatccgtctggatagtgaggttaaggagcaggcccaacaggtgtttagtaatctgggaatggatatgacaacagctattaatattttccttcgtcaggcaattcaatatcagggattaccttttgatgttagactagacgaaaatcggaagttgctccaagtgttaacggatttagaccaaaatcgtaatatgagccagtcttttgaatcagtctcagatttgatggaggacttacgtgcttaa

SEQ ID NO: 1415 - DNA, 4392 bp, Streptococcus pneumoniae
atgtcaaatagttttgaaattttgatgaatcaattggggatgcctgctgaaatgagacaggctcctgctttagcacaggctaatattgagcgagttgtggttcataaaattagtaaggtatgggagtttcatttcgtattttctaatattttaccgattgaaatctttttagaattaaagaaaggtttgagcgaagaattttctaagacaggcaataaagctgtttttgaaattaaggctcggtctcaagaattttcaaatcagctcttgcagtcctactatagggaagctttctctgaaggtccatgtgctagtcaaggttttaagtccctttatcaaaatttgcaagttcgtgctgagggtaatcagctatttattgaaggatctgaagcgattgataaggaacattttaagaagaatcatcttcctaatttagccaaacaacttgaaaagtttggttttccaacttttaactgtcaagtcgagaagaatgatgtcctgacccaagagcaggaagaggcctttcatgctgaaaatgagcagattgttcaagctgccaatgaggaagcgctccgtgctatggaacaactggagcagatggcacctcctccagcggaagagaaaccagtctttgattttcaagcgaaaaaagctgcagctaaacccaagctggataaggcggagattactcctatgatcgaagtgacgacagaggaaaatcgtctggtatttgaaggggttgtttttgatgtggagcaaaaagtgactagaacaggtcgtgttttaatcaactttaaaatgacggactatacttcaagtttttctatgcaaaagtgggttaaaaacgaggaagaggcccagaagtttgacctcatcaagaagaattcttggctccgagttcgagggaatgtggagatgaataacttcacacgcgatttgactatgaacgtacaggatctgcaggaagttgttcactatgagcggaaggatttgatgccagaaggtgagcgtcgggttgagtttcatgctcatactaacatgtcgactatggatgctttgccagaggtcgaagagattgttgcaacagctgctaagtggggacacaaggcggttgctatcacggaccatgggaatgtccagtcctttccacatggctataaggcggctaagaaagcgggaatccagctgatctatgggatggaagccaatatcgtggaggaccgtgtccctatcgtctataacgaagtggagatggacttgtcagaagcaacctacgtggtctttgacgtggaaacgacgggactttcagctatctataatgacttgattcaggttgcggcctctaagatgtacaaggggaatgttattgctgaatttgatgaatttatcaatcctgggcatcccttgtcagcctttactacagagttaactggaattacagatgatcatgtcaaaaatgccaaaccactagaacaagttttgcaagaattccaagaattttgcaaggatacggtcctagttgcccacaatgctacctttgacgttggctttatgaatgctaattatgagcggcatgatcttccaaagattagtcagccagttattgatacgctggagtttgctagaaacctctatcctgagtataaacgccatggtttggggcctttgaccaagcgttttggtgtggccttggaacatcatcacatggccaactacgatgcggaagcgactggtcgtctgcttttcatctttatcaaagaggtagcagaaaaacatggtgtgaccgatttagctagactcaacattgatctaatcagtccagattcttacaaaaaagctcggatcaagcatgcgaccatctatgtcaagaatcaggtaggtctaaaaaatatctttaagctggtttccttgtctaataccaagtattttgaaggagtgccacggattccgagaacggttctagatgcccatcgagagggcttgattttaggttcagcctgttcagagggtgaagtttttgacgtggtcgtttctcaaggtgtggatgcggcggttgaggtggccaagtattatgactttatcgaggtcatgccaccggctatctatgcgcccttgattgccaaagagcaggtcaaggatatggaggaactccagaccattatcaagagtttgatagaggttggagatcgccttggcaagcctgttctggctacgggaaatgttcactatatcgaaccggaagaagagatttatcgtgaaattatcgtccgtagtttgggacagggtgcgatgattaaccgaactatcggtcatggtgaacatgcccaaccagcaccacttccaaaggctcattttcgaacgactaatgagatgttggatgaatttgcctttttgggagaggaactggctcgtaaactggttattgaaaacaccaatgccttggcagaaatatttgaacccgttgaagtcgttaagggtgatttgtatacgcctttcatcgacaaggctgaagaaacagttgctgagttgacctataagaaagcttttgagatttatggaaatccgctgccagatattgttgatttgcggattgaaaaagaattaacatccatactggggaatggatttgctgtgatttatctggcatcgcagatgctggtgcaacgttctaatgaacggggttatttggttggttctcgtgggtctgtcggatctagtttcgttgcgaccatgattgggattacggaggtcaatcctctctctcctcactatgtctgtggtcagtgtcagtacagtgagtttatcacagatggttcgtacggttcaggatttgatatgccccataaggactgtccaaactgtggtcacaaactcagtaaaaacggacaggatattccgtttgagaccttccttggttttgatggggataaggttcctgatattgacttgaacttctcgggagaagatcagcctagcgcccacttggatgtgcgtgatatctttggtgaagaatatgccttccgtgcgggaacggttggtacggtagctgccaagactgcctatggatttgtcaagggttacgagcgagattatggcaagttttatcgtgatgcagaagtagaacgcctcgctcaaggagcggcgggtgtcaagcggacaacaggccaacacccggggggaatcgttgttattccgaactacatggatgtctacgattttacgcctgtccagtatccagcagatgatgtcacggctgaatggcagaccactcactttaacttccacgatatcgatgagaacgtcctcaaactcgatgtactgggacatgatgatccgaccatgattcgaaaacttcaggatttgtctggtattgaccctaataaaattcctatggatgacgaaggcgtgatggcactcttttctgggactgatgtgctaggggtaacacctgaacaaattggaacgcctacgggtatgttggggattccagagtttggaacaaatttcgtacgtggaatggtagacgaaacccatccgacaacctttgcggaattgcttcagctgtctggtctgtcccacggtactgacgtttggttggggaatgctcaggatctgattaagcaaggaatagcggacctatcgactgttatcggttgtcgggacgacatcatggtttacctcatgcatgcgggtctggaacctaagatggcctttaccattatggaacgggtacgtaagggtttgtggctaaagatttcagaagaggagagaaatggctatatcgaagccatgaaggctaataaggtgccagagtggtatatcgaatcctgtgggaaaattaagtacatgttccctaaggcccatgcggcagcctacgttatgatggccttgcgtgtagcttacttcaaggttcaccatcctatttattactactgtgcttacttctccattcgtgctaaggcttttgatatcaagaccatgggtgcgggcttggaggccatcaagcgcagaatggaagaaatctctgaaaaacggaagaacaatgaagcctctaatgtggaaatcgatctctatacaactcttgagattgtcaatgagatgtgggaacgaggtttcaagtttggcaaattagatctctaccgtagtcaggcgacagagttcctcatcgacggggatacccttatcccaccatttgtagcaatggatggtctgggagagaacgttgccaagcaactggtgcgggcgcgtgaagagggagaattcctctctaaaacagaactacgcaagcgtggtggactctcatcaaccttggttgaaaagatggatgagatgggtattcttggaaatatgccagaggataaccagttgagtttgtttgatgagttgttttaa

SEQ ID NO: 1416 - DNA, 2082 bp, Streptococcus pneumoniae
atggcacgcgaattttcacttgaaaaaactagtaacatcggtatcatggctcacgtcgatgccggtaaaacaacaactactgagcgtattctttactacactggtaaaatccacaaaatcggtgaaactcacgaaggtgcgtcacaaatggactggatggagcaagagcaagaacgtggtatcacgatcacatctgctgcgacaacagctcaatggaacaaccaccgcgtaaacatcatcgacacaccaggacacgtggacttcacaatcgaagtacaacgttctcttcgtgtattggatggtgcggttaccgttcttgactcacaatcaggtgttgagcctcaaactgaaacagtttggcgtcaagcaactgagtacggagttccacgtatcgtatttgccaacaaaatggacaaaatcggtgctgacttcctttactctgtaagcacacttcacgatcgtcttcaagcaaatgcacacccaatccaattgccaatcggttctgaagatgacttccgtggtatcattgacttgatcaagatgaaagctgaaatctatactaacgaccttggtacggatatccttgaagaagacatcccagctgaataccttgaccaagctcaagaataccgtgaaaaattgattgaagcagttgctgaaactgacgaagaattgatgatgaaatacctcgaaggtgaagaaatcactaacgaagaattgaaagctggtatccgtaaagcgactatcaacgttgaattcttcccagtattgtgtggttcagccttcaaaaacaaaggtgttcaattgatgcttgatgcggttatcgactaccttccaagtccacttgacatcccagcaatcaaaggtattaacccagatacagacgctgaagaaactcgtccagcatctgacgaagagccatttgcagctcttgccttcaagatcatgactgacccattcgtaggtcgtttgacattcttccgtgtttactcaggtgttcttcaatcaggttcatacgtattgaatacttctaaaggtaaacgtgaacgtatcggacgtatccttcaaatgcacgctaacagccgtcaagaaatcgacactgtttactcaggtgatatcgctgctgccgttggtttgaaagatactacaactggtgactcattgacagatgaaaaatctaaaatcatccttgagtcaatcaacgttccagaaccagttatccaattgatggttgaaccaaaatctaaagctgaccaagacaagatgggtatcgcccttcaaaaattggctgaagaagatccaacattccgcgttgaaacaaacgttgaaactggtgaaacagttatctcaggtatgggtgaacttcaccttgacgtccttgttgatcgtatgcgtcgtgagttcaaagttgaagcgaacgtaggtgcgcctcaagtatcttaccgtgaaacattccgcgcttctactcaagcacgtggattcttcaaacgtcagtctggtggtaaaggtcaattcggtgatgtatggattgaatttactccaaacgaagaaggtaaaggattcgaattcgaaaacgcaatcgtcggtggtgtggttcctcgtgaatttatcccagcggttgaaaaaggtttggtagaatctatggctaacggtgttcttgcaggttacccaatggttgacgttaaagctaagctttatgatggttcatatcacgatgtcgactcatctgaaactgccttcaagattgcggcttcactttcccttaaagaagctgctaaatcagcacaaccagctatccttgaaccaatgatgcttgtaacaatcactgttccagaagaaaaccttggtgatgttatgggtcacgtaactgctcgtcgtggacgtgtagatggtatggaagcacacggtaacagccaaatcgttcgtgcttacgttccacttgctgaaatgttcggttacgcaacagttcttcgttctgcatctcaaggacgtggtacattcatgatggtatttgaccactacgaagatgtacctaagtcagtacaagaagaaattattaagaaaaataaaggtgaagactaa

SEQ ID NO: 1417 - DNA, 357 bp, Streptococcus pneumoniae
accatcataaagcttagctttaacgtcaaccattgggtaacctgcaagaacaccgttagccatagattctaccaaacctttttcaaccgctgggataaattcacgaggaaccacaccaccgacgattgcgttttcgaattcgaatcctttaccttcttcgtttggagtaaattcaatccatacatcaccgaattgacctttaccaccagactgacgtttgaagaatccacgtgcttgagtagaagcgcggaatgtttcacggtaagatacttgaggcgcacctacgttcgcttcaactttgaactcacgacgcatacgatcaacaaggacgtcaaggtgaagttcacccatacctga

SEQ ID NO: 1418 - DNA, 450 bp, Streptococcus pneumoniae
accacacaatactgggaagaattcaacgttgatagtcgctttacggataccagctttcaattcttcgttagtgatttcttcaccttcgaggtatttcatcatcaattcttcgtcagtttcagcaactgcttcaatcaatttttcacggtattcttgagcttggtcaaggtattcagctgggatgtcttcttcaaggatatccgtaccaaggtcgttagtatagatttcagctttcatcttgatcaagtcaatgataccacggaagtcatcttcagaaccgattggcaattggattgggtgtgcatttgcttgaagacgatcgtgaagtgtgcttacagagtaaaggaagtcagcaccgattttgtccattttgttggcaaatacgatacgtggaactccgtactcagttgcttgacgccaaactgtttcagtttgaggctcaacacctga

SEQ ID NO: 1419 - DNA, 432 bp, Streptococcus pneumoniae
atgaatctcattggttgcaaccgcaacctgcttcgattccctattttctctgggactttcttaacgctttcgcatcctatcttaccaacggaagtgtgcgaatgcacggttagcttcagccatacggtgagtatcttcacgtttcttaactgctgcaccagtgttgttagcagcatccaagatttcttttgcaagacggtcttgcattgtgtgttcaccacgaagacgagcgattgttaccaaccaacgaagtccaagtgttgtacgacgttctggacgaacttcaactgggacttggtagttagaaccaccaacacgacgtgcacgtacttcaagtacaggcatgatgttttccatagctgtttcaaatacttcaagtgcatcgttgccagtagcttctttgatttgctcaaaagcaccgtaaacgattga

SEQ ID NO: 1420 - DNA, 471 bp, Streptococcus pneumoniae
atgagtcgtaaaaatagagctccaaaacgtgacgtattgccagatccgctatacaattcacaactagttactcgtcttatcaaccgcgttatgcttgatggtaaacgtggtactgctgcttcaatcgtttacggtgcttttgagcaaatcaaagaagctactggcaacgatgcacttgaagtatttgaaacagctatggaaaacatcatgcctgtacttgaagtacgtgcacgtcgtgttggtggttctaactaccaagtcccagttgaagttcgtccagaacgtcgtacaacacttggacttcgttggttggtaacaatcgctcgtcttcgtggtgaacacacaatgcaagaccgtcttgcaaaagaaatcttggatgctgctaacaacactggtgcagcagttaagaaacgtgaagatactcaccgtatggctgaagctaaccgtgcattcgcacacttccgttggtaa

SEQ ID NO: 1421 - DNA, 414 bp, Streptococcus pneumoniae
atgcctacaattaaccaattggttcgcaaaccgcgtaaatcaaaagtagaaaaatctaaatcaccagctttgaacgttggttacaatagtcataaaaaagttcaaacaaacgtttcttcaccacaaaaacgtggtgttgcaactcgtgttggaacaatgacacctaaaaaacctaactcagcccttcgtaaattcgctcgtgtacgtttgagcaaccttatcgaagttactgcctacatcccaggtatcggacacaacttgcaagagcacagcgtggtgcttcttcgcggtggacgtgtaaaagaccttccaggggtacgttaccatatcgtccgtggtgcacttgatactgcaggtgttaacgatcgtaaacaaggccgttctaaatacggtactaaacgtccaaaagcataa

SEQ ID NO: 1422 - DNA, 3615 bp, Streptococcus pneumoniae
gatacagcagctggctctggtaagaacgaaagtgatatttcttcacctagaaatgcaaacgcttccctagagaaaacagaagaaaaacctgctgcaagcccagccgatccagcaccacaaactggacaagatcgttcaagtgagccaactacttctactagtccagtaacaactgaaactaaggcagaagagcccatcgaagataactacttccgtatccatgtcaaaaaacttcctgaagaaaacaaggatgctcaaggactatggacttgggacgatgttgaaaaaccatctgaaaactggccaaacggagctttgtccttcaaggatgccaagaaagatgactacggctattacctagatgtcaaattaaagggagaacaagccaagaaaattagcttcctcatcaacaatacagctggaaaaaatctaaccggcgataaatctgtagaaaaactagttccaaaaatgaacgaagcttggttagaccaagattacaaggttttctcttacgagccacagcctgcaggaactgttcgcgtcaactactaccgcacagatggcaactatgacaagaaatctctctggtactggggagatgtaaaaaatccaagtagcgctcaatggcctgacggaacagactttacggctacaggcaaatatggccgctatatcgacattcctcttaatgaagccgcaagagaatttggatttttattactagatgagagcaaacaaggagacgacgtgaaaatccgtaaagaaaattataagttcacagatttgaaaaatcatagccaaattttcctaaaagacgatgatgaatcgatttacacaaatccatactatgtccatgatatccgtatgacaggagcccaacacgtaggcacttctagcattgaaagtagcttttcaacacttgtcggtgctaaaaaagaagatatcctcaaacactccaacatcactaatcacctaggaaacaaggtaactattaccgatgttgcaatcgatgaagctggtaagaaagtgacctacagcggagatttctctgacacaaaacatccttatactgttagctacaattccgaccaattcactaccaaaacaagctggcgcctgaaagatgagacatacagctatgatggcaaactgggagctgacctaaaagaagaaggaaaacaagttgatttgaccctttggtcaccaagtgctgataaggtttctgttgttgtctacgacaagaatgaccctgacaaagtagttggaactgtcgctctcgaaaaaggggaaagaggaacttggaaacaaactctagacagcacaaacaaactcggaatcacagatttcactggctactattatcaataccaaatcgagcgtcaaggtaaaactgttcttgcactcgatccttacgctaaatctcttgctgcttggaatagcgacgatgccaagattgacgatgcccataaagtggctaaagccgcctttgtagatccagctaaactcggacctcaagacttgacttatggtaagattcacaatttcaagactcgtgaagacgccgttatctacgaagctcatgtgcgtgacttcacttcagatcctgccattgcaaaagacttgaccaaaccatttgggacttttgaagccttcattgaaaaactagactatctcaaagacttgggtgtaacccatatccagctccttccagtcttgtcttactactttgtcaatgaattgaaaaaccatgaacgcttgtctgactatgcttcaagcaacagcaactacaactggggatatgaccctcaaaactacttctccttgactggtatgtactcaagcgatcctaagaatccagaaaaacgaatcgcagaatttaaaaacctcatcaacgaaatccacaaacgtggtatgggagctatcctagatgtcgtttataaccacacagccaaagtcgatatctttgaagacctagagccaaactactaccactttatggatgccgatggcacacctcgaactagctttggtggtggacgcttggggacaacccaccatatgaccaaacggctcctagttgactctatcaaatacctagttgatacctacaaagtggatggcttccgcttcgatatgatgggagaccatgacgccgcttctatcgaagaagcttacaaggctgcacgcgccctcaatccaaatctaatcatgttaggcgaaggttggagaacctatgccggtgatgaaaacatgcctactaaagctgctgaccaagattggatgaaacataccgatactgtcgctgtcttttcagatgacatccgtaacaacctcaaatctggttatccaaacgaaggtcaacctgcctttatcacaggtggcaagcgtgatgtcaacaccatctttaaaaatctcattgctcaaccaactaactttgaagctgacagccctggagatgtcatccaatacatcgcagcccatgataacttgaccctctttgacatcattgcccagtctatcaaaaaagacccaagcaaggctgagaactatgctgaaatccaccgtcgtttacgacttggaaatctcatggtcttgacagctcaaggaactccatttatccactccggtcaggaatatggacgtactaaacaattccgtgacccagcctacaagactccagtagcagaggataaggttccaaacaaatctcacttgttgcgtgataaggacggcaacccatttgactatccttacttcatccatgattcttacgattctagcgacgcagtcaacaagtttgactggactaaggctacagatggtaaaacttatcctgaaaatgtcaagagccgtgactatatgaaaggtttgattgcccttcgtcaatctacagatgccttccgacttaagagtctccaagatatcaaagaccgtgtccacctcatcactgtcccaggccaaaatggtgtggaaaaagaggatgtagtgattggctaccaaatcactgctccaaacggcgatatctacgcagtctttgtcaatgcggatgaaaaagctcgcgaatttaatttgggaactgcctttgcacatctaagaaatgcggaagttttggcagatgaaaaccaagcaggatcagtcggaattgccaacccgaaaggacttgaatggactgaaaaaggcttgaaattgaatgcccttacagctactgttcttcgagtctctcaaaatggaactagccctgagtcaactgcagaagagaaaccagactcaaccccttccaagcctgaacatcaagacccagctccagaagctagacctgattctactaaaccagatgccaaagtagctgatgcggaaaataaacctagccaagctacagctgattcacaagctgaacaaccagcacaagaagcacaagcatcatctgtaaaagaagcggttcaaaacgaatcggtagaaaactctagcaagaaaaatatacctgcaaccccagatagacaagctgaacttccaaatacaggaatcaaaaacgaaaacaaactcctatttgcaggaatcagcctccttgcgctccttggtctcggtttcttactaaaaaataaaaaagagaactaa

SEQ ID NO: 1423 - DNA, 924 bp, Streptococcus pneumoniae
ttggacgtatatgggattggcgagcaccatcgggcggattttgcagtatcagccccagagattgtcctggccgctggggcagtcaataccaagaaaatccgtttgaccagtgcagtcagcattctgtcaagcatggacccgattcgtttgttccaacagtatgccactatcgatgctttgtcaaatggacgatcggagattatggctggaaggggctctttcacggaatctttccctctgtttggttatgacttgaaagactacgactctctttttgatgagaaattagacttgcttcagttagtcaatgaaaagaccaagttagactggcaaggtcgattgactcaaacgattgctggtaaagaagtttatcctcgtccagttcaggacaaattgcccatgtggatagctacaggtggtcatgtcgaatcaacagtgaagattgctcaggctggtctaccgattgtatatgctattattggtggtaatccacgttattttaaaaagttgattcaggcttatcgtgagattggaagcgaagcgggtcatgctgacaaagacttgaaagtgggagcccattcttgggggtggattgcggaagatggtgagcaggcggtgaaagattatttccatccgactaagcaagtggtggatgctatttccaaagaccgtccgcactggcaggaattgcgttatgagcaatatttggagcaggtagggccaaatggcgccatgtttgttggcaatccagatcaggtggccgaaaaattgattcgcatgatagaggatttaggattggaccgcttcatgcttcatctaccgcttggttctatgcctcatgaccaggttctgagagctattgaactcttcggaacacaagttgcacccaaagtacgagcttattttgctatgaaagaggcttaa

SEQ ID NO: 1424 - DNA, 1809 bp, Streptococcus pneumoniae
atgtgtggaattgttggtgttgttggaaacacaaatgcaactgatattttgattcaagggcttgaaaagcttgaataccgtggctatgattctgcgggaatttttgtcctagatggtgctgataaccatttggtgaaggcggttggtcgtattgcagaattgtctgccaagacagctggtgttgagggaacaactggtatcggacatactcgttgggctactcacggaaaaccaactgaggacaatgctcacccacaccgctctgagacagaacgttttgtcttggtgcataatggggtgattgagaactatcttgaaatcaaggaagaataccttgcaggtcaccacttcaaggggcagacagatactgaaatagccgttcatttgattggaaaatttgcggaagaagaagggctctcagttcttgaagcctttaaaaaagctcttcatattatccgtggttcatatgcctttgccttgattgactctgaaaatccagatgtcatctatgtagcgaaaaacaaatctccacttttgattggtcttggggaaggctacaatatggtctgctcagatgctatggctatgattcgtgaaaccaaccaatacatggaaattcatgaccaagagttggtaatcgtcaaggctgatagcgtggaagttcaagactatgatggtaacagtcgtgaacgtgctagctatactgcggaacttgacttgtcagatatcggtaagggaacttatccttactacatgcttaaggaaattgatgagcaaccaactgttatgcgtaaactcattcaagcctacacggatgatgctggtcaagtagtggttgctcctgctatcattaaggctgttcaagacgcagaccgcatctacatccttgcagctggaacatcttaccatgcaggatttgcttctaagaaaatgttggaagaattgacagatacaccagttgaacttggaatctcatctgagtggggctacggtatgccacttctcagcaagaaaccactcttcatctttatcagccaatctggtgaaacagcggatagtcgtcaagttttggtcaaggctaatgaaatgggaattccaagcttaacagtgacaaatgttccaggttcaaccctctcacgtgaagccaactataccatgctccttcacgcaggacctgaaattgccgtggcatcaactaaagcctatacagcgcaaatcgcagcccttgccttccttgcaaaagcagtcggagaagcaaatggtaatgctaaagcgcaagcctttgacctggttcatgaattgtcaatcgtagctcagtctattgaatcaactctttcagagaaagaaaccattgaagccaaggttcgtgaacttcttgaaacaactcgtaacgccttttacatcggacgtggtcaagattactacgtagccatggaagcaagtctcaaactcaaagagatttcttatatccagtgtgaaggttttgcggcaggagaactcaagcacggaaccattgccttgattgaagaaggaacgcctgttttggctctcttgtcagatccagttcttgccaaccatactcgtggaaatatccaagaggtcgcagcccgtggtgccaaagtcctcactatcgcagaagagaatgtagccaaagataccgacgatatcgtccttacgaccgtacatccatacctctcaccaatttcaatggtcgtaccaacgcaattagtcgcttactttgcaaccctccaccgtggcctcgatgtggacaaaccacgtaaccttgccaagtcagtaacggtagaataa

SEQ ID NO: 1425 - DNA, 1380 bp, Streptococcus pneumoniae
atgctaagatttccaaaggattttgtctggggatcctctacttctggaccgcagacagaaggacgtgtagctggtgacggtaagggagacaatctctgggattactggttccaagtggagccaaatcgttactataatgggattggttcagataagacatcgactttttatgaaaattgggagcgggatattgagcttttgttagagactggtcacacagcctttcggacttctattcagtggtcacggatttttccacaaggctgtggaaaagtcaacactcaaggtgtggatttttatcgtaaggtctttgaggctattaaggctaaaggaattcgtctgttagtcaatctctatcattttgatttaccttttgcccttcaagaggatggtgatggttgggaaaataaggcgacagtctcagcctatgaagactatgctcgtttttgttttgagacttatggagatttagtggatcaatggattacctttaacgagcccatcgttcctgtagaatttggttatttttatgatgcccattatccacataaggtggatgcagagccagctgttaaggtagcctatcatacacaattggccagcagccgggctgttaaggcttgccatgaacttttgcctgattccaagattgggattgtcctcaacttgacaccggcttatccacgtagccagcatcctgctgatgtcaaggcagctcgtattgcggccctttttcaggcccaatctttcttagatccatctgtcttggggacttatccacaggagttggtagaaatcttgcatgaacacggtcttttacctgatgctacagaggaagagttggaactcattcgtgataatacggtggacttccttggtgtcaactactatcaacctttgcgtgttatggctcctcgatttgctaagcatccagagagtccactcttaccagaacatttttacgagccttatgtgatgcctggacgtaaaatcaattctcaccgtggttgggagatttatgagcaagggatttatgacatcgcccaaaatatcaaggaaaattatggcaatattgagtggatgttgactgagaatggtatgggtgttgaaggggaagaaaaattccgtcaagatggaatgattcaagatgattaccgtattgactttgtaaaaggtcatcttcgtgaacttcaccgtgccattgaagatggtgccaactgtaagggctacttgatttggacctttattgactgctggtcatggctcaacagctataaaaatcgctatggtttggtcgaattagacttggaaacgcaagaacgtcgtctgaagaaatcaggccactggttcaaagaattaagcgataataatggattttaa

SEQ ID NO: 1426 - DNA, 1041 bp, Streptococcus pneumoniae
aaatggcaacaaacgagtacaaaccaagcaaccgtgttgtcgctgaagaagaagttactcgtgttgcaacgccagatgttaaatcaattgatgaagttgcagccttcctcaatgttccagaagaacaaacgattaaaaccctcttctacattgcagatggcgagcttgttgcagccctttctagttggaaatgaccaactcaacgaagtcaagttgaaaaatcacttgggagcagatttctttgacgttgctagcgaagaagaagtggcgaatgttgttcaagcaggatttggttcacttggaccagttggtttgccagagaatattaaaattattgcagatcgtaaggtacaagatgttcgcaatgcagttgtcggtgctaacgaagatggctaccacttgactggtgtgaacccaggccgtgattttactgcagaatatgtggatatccgtgaagttcgtgagggtgaaatttccccagatggacaaggtgtccttaactttgcgcgtggtattgagatcggtcatattttcaaactcggaactcgctattcagcaagcatgggagcagatgtcttggatgaaaatggtcgtgctgtgccaatcatcatgggatgttacggtatcggtgtcagccgtcttctttcagcagtgatggagcaacacgctcgcctctttgttaacaaaacgccaaaaggtgaataccgttacgcttggggaatcaatttccctaaagaattggcaccatttgatgtgcatttgattactgtcaatgtcaaggatgaagaagcgcaagccttgacagaaaaacttgaagcaagcttgatgggagctggttatgaagtcttgacagatgaccgtaacgaacgtgtcggtgttaaatttagcgatagtgacttgattggtcttccaatccgtatcactgttggtaaaaaagcggccgatggcattgtagaagttaagatcaaggcaactggtgacaccattgaggttcatgcagataacgtgcttgaaacgcttgaaatcctaagcaagaaataa

SEQ ID NO: 1427 - DNA, 1008 bp, Streptococcus pneumoniae
atgaaacaaagtaaaatgcctatcccaacgcttcgcgaaatgccaagcgatgctcaagttatcagccatgctcttatgttgcgtgctggttatgttcgccaagtttcagcaggtgtttattcttatctaccacttgccaaccgtgtgattgaaaaagctaaaaacatcatgcgccaagaattcgaaaagattggtgctgttgagatgttggctcctgcccttcttagtgcagaattgtggcgtgaatcaggtcgttacgaaacctatggtgaagacctttacaaactaaaaaaccgtgaaaaatcagactttatcttaggtccaactcatgaagaaacctttacagctattgtccgtgattctgttaaatcttacaagcaattgccactcaacctttatcaaattcagcccaagtatcgtgatgaaaaacgcccacgtaatggacttcttcgtacacgtgagtttatcatgaaggatgcttatagtttccacgctaactatgatagtttggatagtgtttatgatgagtacaaagcagcctatgagcgtattttcactcgtagtggtttagacttcaaggctattattggtgacggtggagccatgggtggtaaggatagccaagaatttatggccattacatctgctcgtacagaccttgaccgctgggttgtcttggacaagtcagttgcctcatttgacgaaattcctgcagaagtgcaagaagaaatcaaggcagaattgctcaaatggatagtctctggtgaagataccattgcttactcaagtgagtctagctatgcagctaacttagaaatggcaacaaacgagtacaaaccaagcaaccgtgttgtcgctgaagaagaagttactcgtgttgcaacgccagatgttaaatcaattgatgaagttgcagccttcctcaatgttccagaagaacaaacgattaaaaccctcttctacattgcagatggcgagcttgttgcagccctttctagttggaaatga

SEQ ID NO: 1428 - DNA, 1260 bp, Streptococcus pneumoniae
atgctcggaattttaacctttattctggtttttgggattattgtagtggtgcacgagttcgggcacttctactttgccaagaaatcagggattttagtacgtgaatttgccatcggtatgggacctaaaatctttgctcacattggcaaggatggaacggcctataccattcgaatcttgcctctgggtggctatgtccgcatggccggttggggtgatgatacaactgaaatcaagacaggaacgcctgttagtttgacacttgctgatgatggtaaggttaaacgcatcaatctctcaggtaaaaaattggatcaaacagccctccctatgcaggtgacccagtttgattttgaagacaagctctttatcaaaggattggttctggaagaagaaaaaacatttgcagtggatcacgatgcaacggttgtggaagcagatggtactgaggttcggattgcacctttagatgttcaatatcaaaatgcgactatctggggcaaactgattaccaattttgcaggtcctatgaacaattttatcttaggtgtcgttgttttttgggttttaatctttatgcagggtggtgtcagagatgttgataccaatcagttccatatcatgccccaaggtgccttggccaaggtaggagtaccagaaacggcacaaattaccaagatcggctcacatgaggttagcaactgggaaagcttgatccaagctgtggaaacagaaaccaaagataagacggcaccgactttggatgtgactatttctgaaaaggggagtgacaaacaagtcactgttacacccgaagatagtcaaggtcgttaccttctaggtgttcaaccgggggttaagtcagattttctatccatgtttgtaggtggttttacaactgctgctgactcagctctccgaattctctcagctctgaaaaatctgattttccaaccggatttgaacaagttgggtggacctgttgctatctttaaggcaagtagtgatgctgctaaaaatggaattgagaatatcttgtacttcttggcaatgatttccatcaatattgggatttttaatcttattccgattccagccttggatggtggtaagattgtgctcaatatcctagaagccatccgccgcaaaccattgaaacaagaaattgaaacctatgtcaccttggccggagtggtcatcatggttgtcttgatgattgctgtgacttggaatgacattatgcgactcttttttagataa

SEQ ID NO: 1429 - DNA, 804 bp, Streptococcus pneumoniae
atgacccaggatttacagaaaagaaccttgtttgcagggattgccctggctattttcctaccaattttaatgattgggggcctcttgcttcagatagcaatcggaatcatagccatgctagccatgcatgaacttttgaagatgagaggtctagagaccatgacgatggagggcctcttgaccctctttgcaacctttgcattgaccattcccttggagaattacctgacttttttgccagttgatgggaatgtggttgcctatagtgttttgatttcaatcatgttaggaacgaccgtttttagcaagtcttatacgattgaggatgcggttttccctcttgctatgagcttctacgtgggctttggatttaatgctttactagatgctcgtgttgcaggtttggacaaggctctcttagccttgtgtatcgtctgggcgacagacagtggtgcctatcttgttgggatgaactatgggaaacgaaagttagcaccaagggtatcgcctaataaaacccttgagggtgccttgggtggtattttaggagcaattttagtaaccattatctttatgatagttgacagtacagttgctcttccatatggaatttacaagatgtcagtctttgctattttctttagcattgctggacaatttggtgatttactagaaagttcgatcaaacgtcattttggtgttaaggattctgggaaatttatccctggacatggtggtgttttggatcgtttcgatagtatgttgcttgtatttccaatcatgcacttatttggactcttttaa

SEQ ID NO: 1430 - DNA, 777 bp, Streptococcus pneumoniae
ttgaataggaataagatcatgtttggattttttaagaaagataaggctgtggaagtagaggttccgacacaggttcctgctcatatcggcatcatcatggatggcaatggccgttgggctaaaaaacgtatgcaaccgcgagtttttggacataaggcgggcatggaagcattgcaaaccgtgaccaaggcagccaacaaactgggcgtcaaggttattacggtctatgctttttctacggaaaactggacccgtccagatcaggaagtcaagtttatcatgaacttgccagtagagttttatgataattatgtcccggaactacatgcgaataatgttaagattcaaatgattggggagacagaccgcctgcctaagcaaacctttgaagctttaaccaaggctgaggaattgactaagaacaacacaggattgattcttaattttgctcttaactatggtggacgtgctgagattacacaggcgcttaagttgatttcccaggatgttttagatgccaaaatcaatccaggtgacatcacagaggaattgattggtaactatctctttacccagcatttgcctaaggacttacgagacccagacttgattatccgtactagtggagaattgcgtttgagcaatttccttccatggcagggagcctatagtgagctttattttacggataccttatggcctgattttgacgaagcggccttgcaggaagctattcttgcctataatcgtcgtcatcgccgatttggaggagtttag

SEQ ID NO: 1431 - DNA, 573 bp, Streptococcus pneumoniae
atgaatacagtgaaaaataagcaagaaatcttagaggcttttagagaaaatccagatatgatggccattctgacgatcatccgagaccttggtctgaaagactcgtggttggcagcaggttctgtcagaaatttcatttggaatcttttgtcagacaaatccccttttgatcatgaaacagatatagatgtgattttctttgatccagatttttcttatgaggaaaccttattactgaagaaaaagctgagagaggattttcctcagtaccagtgggaattgaaaaatcaggtctatatgcatcagcacagtcctcacactgcttcctataccagttctcgtgatgctatgagtaagtatccagaacggtgtacggcagttggactgcgcttgaatgaagaatcagattttgaactctatgtaccttatggtttggaggatattttgaattttcaagttcgtccaactcctcatttcttagaaaatgaagaccgaatggaactctatcaaacacgtttatccaagaaaaattggcaggagaaatggaaaaatttgatttttaaaaatacttaa

SEQ ID NO: 1432 - DNA, 999 bp, Streptococcus pneumoniae
atgagtagaattttagataatgagataatgggggatgaggagttagtagaacgcacgctccgtcctcagtatttacgtgaatatatcggacaggataaggtcaaggaccagctacaaatctttattgaagctgccaaaatgcgggatgaagcgctggatcatgtgctcttatttgggcctccaggtctcgggaaaacgaccatggcctttgttattgccaacgaactgggagtcaatcttaagcagacgtcgggtccagtcattgaaaaagccggagatctggtagctattttgaatgagttagagcctggggatgtactttttattgatgagatccatcgtttgccaatgtcagtggaagaggtgctttatagtgctatggaggacttctacatcgatattatgattggggctggtgagggtagtcgtagtgttcatttggagttaccaccttttaccttgattggtgcgacgactcgggctggtatgctctccaatccgctacgggcacgttttgggattacaggccatatggagtattatgcccatgctgacttgacagaaattgtcgagcggacggcagatatttttgagatggaaatcactcatgaggcagcatctgagttggccctacgtagtcgtgggacccctcgtattgccaatcgtctcctcaagcgcgtgcgcgattttgcccagataatggggaatggggtaattgatgatattattaccgataaggctttgactatgctggatgttgaccatgaaggtttggactatgtggatcaaaaaatccttcgtaccatgattgagatgtacagtggaggacctgttggtctaggaactctttctgtgaatatcgccgaagagcgtgagacagttgaagacatgtatgagccttacttgattcaaaaaggttttatcatgcggacacggtctggacgggtggcgactgctaaggcatatgagcacttaggttatgaatacagtgaaaaataa

SEQ ID NO: 1433 - DNA, 105 bp, Streptococcus pneumoniae
atgactggacccgacgtctgcttaagattgactcccagttcgttggcaataacaaaggccatggtcgttttcccgagacctggaggcccaaataagagcacatga

SEQ ID NO: 1434 - DNA, 417 bp, Streptococcus pneumoniae
atgattactattaaaaagcaagaaattgtcaagctagaggatgttttgcatctctatcaggctgtcggttggacaaattatacccatcaaccagagatgctggagcatgccttatcgcattcattagtaatttatctggcacttgatggtgatgctgtggtgggcttgattcgtttggttggagatggattctcatcagtttttgtacaggatttgattgttttaccaatctatcagcgtcaagggattggtagtgccctaatgaaagaggccttaaaagattacaaagatgcttatcaagtccagctggtgacagaagagacagaaaaaaacgtgggattttatcgttctatgggctttgaaatcttatccacctataattgtatagggatgacttgggcgaatcgagaaaaataa

SEQ ID NO: 1435 - DNA, 696 bp, Streptococcus pneumoniae
atgccagtaaatgaatatggtcagatgattggtgagtcaatggaaggttatacacccggtgcactgccttctattgatttcttagaagggcgttatgctaggatagaggctctctcggtagaaaaacatgcggaggatttgctagctgtttatggcccggatactcctcgggagatgtggacctatctttttcaggagccagtagcagatatgggggagctggttagccttttaaatcagatgttggctcgtaaggaccgtttttactatgcaatcatagacaaggcgactggtaaggctttgggaactttttctctcatgcgcattgaccagaataaccgagtaatagaagtcggagcagtcactttttctccagagctaaggggtacacggataggaactgaggctcagtatctcctagctcgctatatttttgaggagctaaactatcgtcgctacgagtggaaatgcgatgccttaaatctgccatccagacgagttgcggagcgtttgggatttgtctatgaaggaaccttccgccaggcggtggtttataaggggcgtacgagagatacggattggttgtctatgattgatatggactggcctcaagtcaaagatcgtttggaaacatggctgcgtcctgaaaattttgataaaaatggacagcagtacaagagcttgagagaactttaa

SEQ ID NO: 1436 - DNA, 192 bp, Streptococcus pneumoniae
aggattcctaccttatttcacaacgatattaacgagtttagttggctcaaacagtttgggaaactgtttgaggttggaaatcagcaaataaattggttattttacaacaatattaaccaatttatttggtacactaatcactttcacgatttccttaccgtcaatttctgctttgactttttcatccgctag

SEQ ID NO: 1437 - DNA, 2502 bp, Streptococcus pneumoniae
atgagtttttacaatcataaagaaattgagcctaagtggcagggctactgggcagaacatcatacatttaagacaggaacagatgcatcaaaacctaagttttatgcgcttgatatgttcccttatccgtctggagctggtctgcacgtaggacacccagaaggttatactgcaaccgatatcctcagtcgttacaaacgtgcgcaaggctacaatgtccttcacccaatgggttgggatgcttttggtttgcctgcagagcaatacgctatggatactggtaatgacccagcagaatttacagcggaaaacattgccaacttcaaacgtcaaatcaatgcgcttggattttcttatgactgggatcgtgaagtcaatacaacagatccaaactactacaagtggactcaatggattttcaccaagctttacgaaaaaggcttggcctatgaagctgaagtgccagtaaactgggttgaggaattgggaactgccattgccaatgaagaagtgcttcctgacggaacttctgagcgtggaggctatccagttgtccgcaaaccaatgcgccaatggatgctcaaaatcacggcttacgcagagcgcttgctcaatgacttagatgaactagattggtcagagtctatcaaggatatgcaacgcaactggattggtaaatcaactggtgccaatgtaactttcaaagtaaaaggaacagacaaggaatttacagtctttactactcgtccggacacacttttcggtgcgactttcactgtcttggctcctgaacatgaattagtagacgctatcacaagttcagagcaagcagaagctgtagcagactataaacaccaagccagccttaagtctgacttggctcgtacagaccttgctaaggaaaaaactggtgtttggacaggtgcctatgccatcaaccctgtcaatggtaaggaaatgccaatctggattgcggactatgttcttgctagttatggaacaggtgcggttatggctgtgcctgcccacgaccaacgtgactgggaatttgccaaacaatttgaccttccaatcgtcgaagtacttgaaggtggagatgtcaaagaagctgcctacacagaggatggcctgcatgtcaattcagacttcctagatgaactcaacaaagaagacgctattgccaagattgtggcttggttggaaaaaaaaggctgtggtcaggagaaggttacctaccgtctccgcgactggctctttagccgtcaacgttactggggtgagccaattccaatcattcattgggaagatggaacttcaacagctgttcctgaaactgaattgccgcttgtcttgcctgtaaccaaggatatccgtccttcaggtactggtgaaagtccactagctaacttgacagattggcttgaagtgactcgtgaagatggtgtcaaaggtcgtcgtgaaactaacaccatgccacaatgggctggttcaagctggtactacctccgctatattgacccgcacaatactgagaaattggctgatgaggacctcctcaaacaatggttgccagtagatatctacgtgggtggtgcggaacatgctgtacttcacttgctttatgctcgtttctggcataaattcctctatgacctcggtgttgttccgactaaggaaccattccaaaaactctttaaccaagggatgattttgggaacaagctaccgtgaccaccgtggtgctcttgtggcaaccgacaaggttgaaaaacgtgatggttccttctttcatatagaaacaggggaagagttggagcaagcgccagccaagatgtctaaatcgctcaagaacgttgttaacccagatgatgtggtggaacaatacggtgccgatacccttcgtgtttatgaaatgtttatgggaccactcgatgcttcgattgcttggtcagaagaaggtttggaaggaagccgtaagttccttgaccgagtttaccgtttgattacaagtaaagaaatccttgcggaaaacaatggtgctcttgacaaggcttacaacgaaacagtcaaagctgttactgagcaaattgagtctctcaaattcaacacagctattgcccaacttatggtctttgtcaatgctgctaacaaggaagataagctttatgttgactatgccaaaggctttattcaattgattgcaccatttgcacctcacttggcagaagaactctggcaaacagtcgcagaaacaggtgagtcaatctcttatgtagcttggccaacttgggacgaaagtaaactggttgaagacgaaatcgaaatcgttgtccaaatcaaaggtaaagtccgtgccaaactcatggtcgctaaagacctatcacgtgaagaattgcaagaaattgctctagcggatgaaaaagtcaaagcagaaattgacggtaaggaaatcgtgaaagtgattagtgtaccaaataaattggttaatattgttgtaaaataa

SEQ ID NO: 1438 - DNA, 1089 bp, Streptococcus pneumoniae
atgagaatttttgctagtccttctagatatattcagggggaaaatgccttgtttgaaaatgccaaatcaattttggatttgggaaattaccctattctattatgcgatcagttggtttatgatattgttggaaaacgatttgaagattacctacataggtatggtttccatattgttctggcgctatttaatggtgaagcttctgacaatgaaatcaatcgagttgttgccttggctgagaaagaaaattgtgatagtattatcggtcttggtgggggaaagacgattgatagcgcaaaagctattgcagatttgattgaaaagcctgttattattgctccaacaattgcatcgaccgacgcacctgtatctgctttatctgttatttatacagatgaaggtgcatttgatcattatctattttattctaaaaatccagatttagttttggttgatacaaaagttatttcacaagcccctaagcgtttattagcgtctggtattgcagatggtttagcaacttgggttgaggcgcgtgcggttatgcaggcaaatggaaaaactatgttgggacaacagcaaacattggctggagttgcaattgcgaagaaatgtgaagaaacgctgtttgcagatggtttacaggctatggcagcttgtgaagctaaagtggtgacaccagcattagaaaatattgttgaagctaatactttattgagtggtctaggttttgaaagtggaggattagctgcggcgcatgcaattcataatggttttactgcattgacaggtgacattcatcatttaacacatggtgaaaaagtagcttatggaactttagtacaactattattggaaaatagacctaaagaagaacttgataagtatattgagttttacaaaaaaattggtatgccaacaactctaaaagaaatgcatttggatcaagttggatatgatgatttaataaaagttggtaaacaagcaactatggagggtgagacaattcatcagatgccgtttaagatttcgccttcagatgttgctcaagctattatcgctgtagatgcctatgtaaattcaaaataa

SEQ ID NO: 1439 - DNA, 669 bp, Streptococcus pneumoniae
atggaatttatgcttgacacattaaatttagatgagattaaaaagtggtctgaaattttgccgctagctggggtaacttcaaatcccactattgcaaaaagagagggttctattaatttttttgaacgaatcaaagatgtaagagaattgattggctctacaccctctattcatgttcaggtgatttctcaagattttgaaggcatcttaaaggatgctcatgaaattcgaagacaagcaggagatgatatatttatcaaagtacctgttactccagctggattacgtgcaataaaggtgctaaaaaaagagggctaccatatcactgcaacagctatttatacagttattcagggattattagctatcgaagtaggagcggattacctagctccatattataatagaatggaaaatctgaacattgattcaaattctgtcattcgtcaattagctcttgctattgatagacagaactctcctagtaagattttagctgcatcctttaaaaatgtagcacaagtaaataatgctttagctgcaggtgcgcatgctgttacagcaggagcagatgtttttgaatcagctttcgccatgccatctatccaaaaggcggttgatgatttttctgacgattggtttgttattcaaaatagtcgttccatttag

SEQ ID NO: 1440 - DNA, 2448 bp, Streptococcus pneumoniae
gtgcttacgatggtaaatacagaagtagcaagaacaacaatcaagacagaatattttggcagccttactgaaaggatgaacaaatatcgagaagatgttttaaataaaaaaccttatattgatgctgagagagcagttctagcaacacgcgcctatgaacgatacaaggaacaacctaatgtcctaaaacgtgcatatatgctgaaagaaattttggaaaatatgactatctatattgaagaagaatctatgattgcgggaaatcaagcttcttccaataaagatgctcctatttttccggaatatacgctagaatttgttctcaatgagttggatctttttgaaaagcgtgatggagatgttttctatattacagaagaaacaaaagaacaacttagaagtattgctccgttttgggaaaataataatttacgtgctagagctggtgccttattacctgaagaagtgtctgtttatatggaaacaggattcttcggtatggaaggtaagatgaattctggagatgctcacttagcagttaactatcagaaacttttgcaatttggtttaagaggttttgaagagcgggctcgtaaagcgaaagtagctctagatttaacagatccagcaagtattgataaatatcatttttacgactctatatttattgtaatcgatgctattaaagtatatgcaaagcgctttgttgctcttgctaaaagtttagccgaaaatgcaaatcctaaacgtaagaaagaattacttgagattgcagatatttgctctagagtcccatatgaaccggcaactacttttgcagaagctattcaatcagtttggtttattcaatgtattttacaaattgaatctaatggccactctctttcatatggccgttttgatcaatatatgtatccatatatgaaggctgatttagaaagtggtaaagaaacagaagatagcattgttgaacgtctgacaaatctttggattaagacaattacaatcaataaggttcgcagtcaatcacatacattttcttcagcaggaagtcctctatatcaaaatgttacaattggtggacagactcgagataagaaggatgctgttaacccattatcttatttggtattaaaatcagttgcacaaacccatctaccgcaacctaatctaactgtacgttaccatgcaggtttagatgctcgtttcatgaatgagtgtattgaagtgatgaaacttggttttggtatgcctgcatttaataatgatgagattattattccttcttttattgcaaaaggagtattggaagatgatgcttatgattacagtgccattggatgtgttgaaacggcagttccagggaaatggggctatcgttgcacaggtatgagttatatgaacttccctaaggttctacttatcacgatgaatgatggaattgatccggcttcgggtaaacggtttgcaccaagctttggtcattttaaggatatgaagaacttttctgaattagaaaatgcttgggataaaacactaagatatttgacacgaatgagtgttattgttgaaaattctattgatttatcattggaacgagaagttcctgatattctatgttcagcattgactgatgattgtattggtcgtggaaaacaccttaaagaaggtggagcagtatatgattatatatcaggattgcaagttggaattgcaaatttgtcggattcattagctgcaattaaaaaattggtgtttgaggaagaacgtataagcccaagtcagctttggcatgcactggaaacagattatgccggagaagaaggtaaggtcattcaagaaatgttgattcatgatgcacctaagtatggtaatgatgatgattatgctgacaaattggttactgctgcttatgacatttatgttgatgaaattgctaaatatcctaatacacgttatggaagagggcctattggaggaattcgttattcaggaacatcttctatatcagccaacgtagggcagggacgtggaacattagcaactccagatggacgcaacgcgggtacaccgttagcagagggttgttcaccatcacataatatggatcaacacggccctacatctgttttaaaatctgtttcaaaattaccaacagatgaaatcgtaggtggggttctcttaaatcagaaagtaaatcctcaaacgttagccaaagaagaagataaattaaaactaattgctttgttacgaacattctttaatcgtttacatgggtaccatattcaatacaatgttgtttccagagagacgctgattgacgctcagaaacatcctgaaaaacacagagacttaattgttcgtgttgcaggatactctgcattcttcaatgttctttctaaggcaacccaagatgacattataggacgtactgagcatactttgtaa

SEQ ID NO: 1441 - DNA, 1281 bp, Streptococcus pneumoniae
cagaaaatcattgcaccgatgatgaagtttgtgaatatgcgtggcattatagctctaaaagatgggatgttagcaattttgccattgacagtagttggtagtttgttcttgattatgggacaattgccgttcgaaggattaaataagagcattgctagtgtttttggagctaattggacagagccgtttatgcaagtatattcaggaacttttgctattatgggtctaatttcttgtttttcaattgcctattcttatgctaagaatagcggagtagaggctttaccagctggagttctatctgtatctgcattctttattttgctaagatcatcttatatccctaaacaaggtgaggcgattggggacgctattagtaaagtttggtttggaggccaaggaattatcggtgctatcattataggtttggtagtaggaagtatttataccttctttataaagagaaaaattgttattaagatgccagaacaagttccacaagctattgccaaacagtttgaagcaatgattccagcatttgtaattttcttatcttctatgattgtatatattttagcgaagtcattgactaatggcggaacattcatagaaatgatttattctgctattcaagttccgttgcaaggtttaactggatctttgtatggtgctattggaattgcattctttatatcatttttgtggtggtttggtgttcatgggcaatcggtagtaaatggagtagtgacagctctgcttttatctaatcttgatgctaataaagctatgttagcctctgctaatctatcattagaaaatggtgcacatattgttactcaacaatttttagattcatttttaattctatcaggttcagggattacgtttggtcttgtagttgccatgctttttgcagcaaaatcaaaacaataccaagccttaggaaaagttgcagcttttccagcaatatttaacgtaaatgagccagttgtatttggatttccgattgtcatgaatccagttatgtttgtacctttcattcttgttcctgtacttgcagctgtgatagtatatggagctattgcaacaggtttcatgcagccattctcaggggtaacattgccttggagtacaccagctattttatcaggatttttggtgggtggatggcaaggagttattactcagctggtgatattagcgatgtctacattggtttattttccattctttaaagtacaggatcgtttagcttaccaaaatgaaatcaaacaatcttag

SEQ ID NO: 1442 - DNA, 309 bp, Streptococcus pneumoniae
atggtgaagattggtttgttttgtgcagcaggtttttctactggtatgcttgtaaataatatgaaaattgcagcgcaagctagtggagttgaggcagaaatagaggcgttttctcagtctaaattagcggattatgcgccaaatatagatgttgcactattgggtccacaagttgcttatacattagataaatcaaaagaaatttgtgataagtgtgatgttccgatagctgttattccgatgatggactatggtatgttagatgggaaaaaagtattagatttggccctatctttgattagtgggtaa

SEQ ID NO: 1443 - DNA, 321 bp, Streptococcus pneumoniae
atggaaattattgttccagatcaaattatcatgggtttaattttatatgctggcgatgcgaaacaacatatttataaagcattagattacataaagaacggtacatgtgaacgatgtgaagaagaaatccagttagctgatgccgccttattagaagctcataatctacaaacaaaattcttggcacaggaagcgtctggtacaaagacagaaattacagctctctttgttcattcacaagatcatctcatgactagtatgacggagattaatttaatcaaagaaattattagtttgagaaaagaacttcataaaaaataa

SEQ ID NO: 1444 - DNA, 981 bp, Streptococcus pneumoniae
atgaatcaagataggaataaactgctttctaaaattgcttatctgtattatattgaaaacttaaatcagtcacaaatagcagcaaaattaggaatttatagaacctctattagtagaatgttaacagaagcaaggaatgtaggaattgttaaaattgaaatagagaattttgatacaaatatgtttaagttggaaaattatgtaaaagaaaaatacagtttggaaagtttagaaattattccaaatgaatttgatgatactccaacaattttatctgaaagaatttctcaagttgcagcaggcgtccttaggaatctaattgatgataatatgaaaattggcttttcttgggggaaaagtttaagtaatttagtagatttaattcacagtaaaagtgtccgaaatgttcacttctatcctctagcaggtggtcctagtcacatacacgctaaataccatgtgaatacactgatttatgaaatatctagaaaatttcatggagagtgtacatttatgaatgcaacgattgtgcaagaaaataaattgttagcagatggtattttgcaatcaagatattttgaaaatttgaaaaatagttggaaagatttagatatagctgtagtcggaattggtgattttagcaataaaggaaaacatcaatggttagacatgcttacagaggatgactttaaagaattgaccaaagttaaaactgtaggagaaatttgttgtcgattttttgattcaaaaggtaaagaagtctatgaaaacttacaggaaagaacgatagcaatctctttggaagatttaaaaaatattcctcaaagtttagctgttgcttacggtgatacgaaagtatcttcgattctttctgtcttgcgtgctaatttagtaaatcatttgattacagataaaaatacaattttaaaagttttggaagaagatggtgatttgacttttagagagattctaggtgagtga

SEQ ID NO: 1445 - DNA, 747 bp, Streptococcus pneumoniae
atgaaaagattggaacaaattattaaattagtatcagaacatgaaaagatcgacgttaatacattatcggaaaaattaaatgtatcgaaagtaacgattagaaaagatttagataaattagagtcaaaaggtttattacacagagagcatggatatgctgtattaaatagtggagatgacttaaatgtacgtttgtcaattaactatgaaattaagagaaaaattgttcaggaagcagtaaaattggtgtcagataatgaaacaataatgatagaatctggatcgacctgtgctttacttgctgaggaaatttgcaagcaaaaaagaaatgttacgattgtaacaaattcattttttatagcaaattttgtgagagcttatgattcatgtcgtattattgttcttggtggagagtttcagaaggattcacaggttactgtgggacctttattaaaagaaatgatacagacttttcatgtgcgtcaagcttttgttgggacagatggctacgataaagagatgggctttacaggaaaagatttaatgcgcagtgaggtagttcaatatatttcagcagcgtcggataaagtcattgtactaactgactcaagtaaatttgataaaaggggtacagtaagaagatttgctttaagtcaagtctatgaagtaataacagacgaaaaactttctaaacaaaatatagctacattagaaaatgctgggataatggttaaggtagtttcgtaa

SEQ ID NO: 1446 - DNA, 777 bp, Streptococcus pneumoniae
atggaaatatctaaaggaattatttttaatattcaacacttttcaattcatgacggcccgggtattcgtacaactgtttttttaaaaggatgtcctctgcgctgtccatggtgttctaatcctgaatctcaaagaatgaaacctgaaaaaatgaaagatgctcaacgagagaaattcaccttagtcggtgaagaaaagactgtagaagaaattattacagaggtattaaaagacaaagaattttacgaagaatccggtggaggtttaactttatcaggaggtgaaatatttgctcagtttgaatttgctaaagccatcttaaaatcagctaaagaacatcacatacacactgccattgaaactactgcctttgttgatcatgaaaaatttattgatttaattcaatatgtggattttatctacacagacctaaaacattataattctataaaacataaaaaagtgactggggtttttaatcaaatgattattaaaaacattcattatgctttttctcaaaataaaactatcgttttaagaatcccagttattcctaattttaacaatagtttagaggatgcagaaaaattcgctactctatttaactcattaaatatcgaccaagttcaactactcccttttcatcaatttggtgaaaacaaatatcgtttattaaatcggaaatatgaaatggatggaatcaacgcacttcatcctgaagatcttattgattatcaaaaggtatttctgaaccaccatattaattgttatttctag

SEQ ID NO: 1447 - DNA, 249 bp, Streptococcus pneumoniae
ctatttgcagataacaagcatctatataaggttatcaaagaagacttccccatgactctaaatgaatatatcttacaatatcgcctgaaacaagctatagataagatggctgaatctcccaactcccctttaagcgctatctctgaccaagttggattttcagactataaatattttgccaaagtatttaaaaagcatctccatatttccccaaaggaattgaaattactcggaagaatagtaaaatag

SEQ ID NO: 1448 - DNA, 195 bp, Streptococcus pneumoniae
atgaacatcgaaggatatagcgaccttctcaaacctgaactaaaaggaaaaatcgcaactgctgacccagcaaactcttctagcgcctttgctcaattaacaaatatgctacaagctcaaggtggttacaaagatgataaggcttggtcttatgtaaaagatcttttcacacttattgatggtatagtaaaatga

SEQ ID NO: 1449 - DNA, 369 bp, Streptococcus pneumoniae
atgactgttggtctctcttatgaagatccagcagttaaactcttaaatgacggagctaacattaaggtagtctatccaaaagaaggaaccgtcttcctacctgctagtgctgctatcgttaaaaaatctaaaaatatggaaaatgccaagaaatttatcgattttattatctctcaagaagtacaagatacacttggtacaaccactactaaccgtcctgttcgtaaaaatgctaaaacaagcgaaaacatgaaaccaattgacaaaatcaaaacactcactgaagattatgattatgtcatcaagaataaatcagatatcgttaagaaatacaacgaagtctttacagatatccaatctaaacagtaa

SEQ ID NO: 1450 - DNA, 954 bp, Streptococcus pneumoniae
atgagtgagatcgaaattattaacgccaaaaaaatctaccacgatgtctctgttattgagaatttgaacattacaattccaaaaggaagtctctttacccttcttggagcttcaggatgtgggaaaacgacccttcttcgtatgattgcaggtttcaacagtatcaaagatggagaattttacttcgatgatacaaaaatcaataatatggaacccagcaaacgcaatatcgggatggttttccaaaactacgctattttcccacatttgactgtccgagacaacgttgcttttggtcttatgcaaaagaaggttccaaaagaagaattgattcaacagaccaacaagtatcttgaactcatgcaaattgctcaatatgcggatcgaaagcccgataaactcagtggtggacaacaacaacgtgtcaccttggcatgcgccttagcggttaatccaagtgttctcctcatggacgagccacttagtaatctggaggccaaacttcgcttggatatgcgtcaagccatccgagaaatccaacacgaagtgggaattacaactgtttatgtaacccacgaccaagaagaagccatggctatttcagaccaaattgctgttatgaaagatggggtgatccaacaaatcggccgaccaaaagaactctatcataaaccagctaatgagtttgtggcaacctttatcggacgcacaaatattatccctgccaatcttgaaaaacggagcgacggcgcttatatcgtcttttcagatggctatgcccttcgaatgccagctcttgatcaggttgaggagcaagctattcatgtaagcattcgtcccgaagagtttatcaaagatgaatctggagatattgaaggaactattagtgatagcgtctatcttggactaaatacgaagtatttcattgagacaggttttgcctcaaaaatttaa

SEQ ID NO: 1451 - DNA, 627 bp, Streptococcus pneumoniae
atggaatgtaaaaaactaaatatttggacagcttcctctttcttcatctttcttacctatcttgtctttctcgtttatcctatcgttaccgtgctaaagcaagcacttatacatgaaggacaattctcactagctaattttgtcactttctttagtaaagtctactactctgagacactagtcaacagtttcaaggtttccattaccgctactgtcacttccttagttgtaggaaccctattagcttatctcttctctatgtatgacttcaaggggaagaaatttctacaaatattgattatcattgcttccatgtcagctcctttcgtaggagcctactcctgggttctcttgctgggacgaaatggggtcatcactaaatttttgacaaatgcccttcatcttccagctatcgatatttatggattcaaaggaattgtacttgtctttacactgcaactattcccactggtatttctatatgttgctgaaacaatgaacagtattgacaattctctacttgaagctgctgaaagcatggggtccttcggatttaaacctatcgtaacggttgttttacctctcctagttccaaccttactagcagctccttgcttgtatttatga

SEQ ID NO: 1452 - DNA, 771 bp, Streptococcus pneumoniae
atggctgccatttatgcaacagtctacggaattatctttatctctgttttacctcaaatctacttaatttatacctctttcctaaaaacatcaggtatggtatttgttaaaggttattctccaaacagttacaagctagctttcaatcgtatgggatctgctattttcaataccattcgtatccctttgattgccttagttctagttgttctatttgcgacatttatctcctacctagccgttagaaaacggaatttgtttacaaacttaattgacaacctcagtatggtaccttatattgtaccaggaaccgttctagggattgccttcatttcttccttcaatactggtctatttggaagtggatttcttatgattacagggactgctttcatcttgattatgtctctatctgtcagaagattaccttatactattcgctcatctgttgctagcttacaacaaatagcaccaagtattgaagaagctgctgaaagcttaggaagtagtcgtctcaatacctttgctaagattacaactccaatgatgctatctggtatcatttctggagccatcttatcttgggtcacactgatttcagaactctctacttctatcctctatcctcctctacaatgtcaaaacaagaacaatgactgtagctatttatacagaggttctcagaggaaattacggtgtagccgcagccttgtcaactatcctgactgttctaacagtaggttccttgctcttgtttatgaaaatctctaa

SEQ ID NO: 1453 - DNA, 198 bp, Streptococcus pneumoniae
tttcagaactctctacttctatcctctatcctcctctacaatgtcaaaacaagaacaatgactgtagctatttatacagaggttctcagaggaaattacggtgtagccgcagccttgtcaactatcctgactgttctaacagtaggttccttgctcttgtttatgaaaatctctaaaagcaatagcattacactttag

SEQ ID NO: 1454 - DNA, 750 bp, Streptococcus pneumoniae
atgggtggcttttattttatcattcatgatataatagaagcaaacggaggacggaaaatggtaaaagtacgattgtatttggtacgtcatggcaagaccatgtttaacacgattggtcgcgcgcaaggttggagcgatactcccttaactgctgaaggtgaacgagggattcaagagttaggaatcggtttgcgagaatctgatctacagtttgagcgcgcttattcgagtgattctggtcgtaccattcagaccatgggaattatacttgaagaacttggcttgcaggggaaaatcccttatcgcatggacaagcgtatcagagaatggtgtttcggtagttttgatggagcctatgatggcgatcttttcatgggcattattcctcgtatctttaatgtggaccacgttcaccaattgtcttatgctgaactggctgagggcttggtagaggtcgatacagctggttgggctgaaggttgggaaaaactcagtggccgaatcaaggaaggctttgaaataattgcaaaagaaatggaagatcaaggtggaggtaacgcccttgttgtcagccatggaatgactattggaaccattgtttatctgattaatggcatgcatccgcatggtctagataatggtagcgtgacgattcttgaatatgaggacggtcagtttagggttgaagttgtcggtgaccgtagttaccgagagctaggacgtgagaagatggaagaaggctctatttaa

SEQ ID NO: 1455 - DNA, 1338 bp, Streptococcus pneumoniae
atggatattagacaagttactgaaaccatcgccatgattgaggagcaaaacttcgatattagaaccattaccatggggatttctcttttggactgtatcgatccagatatcaatcgtgctgcggagaaaatctatcaaaaaattacgacaaaggcggctaatttagtagctgttggtgatgaaattgcggctgagttgggaattcctatcgttaataagcgtgtatcggtgacacctatttctctgattggggcagcgacagatgcgacggactacgtggttctggcaaaagcgcttgataaggctgcgaaagagattggtgtggactttattggtggtttttctgccttagtacaaaaaggttatcaaaagggagatgagattctcatcaattccattcctcgcgctttggctgaaacggataaggtctgctcgtcagtcaatatcggctcaaccaagtctggtattaatatgacggctgtggcagatatgggacgaattatcaaggaaacagcaaatctttcagagatcggagtggccaagttggttgtattcgctaatgctgttgaggacaatccatttatggcgggtgcctttcatggtgttggggaagcagatgttatcatcaatgtcggagtttctggtcctggtgttgtgaaacgtgctttggaaaaagttcgtggacagagctttgatgtagtagccgaaacagttaagaaaactgcctttaaaatcactcgtatcggtcaattggttggtcaaatggccagtgagagactgggtgtggagtttggtattgtggacttgagtttggcaccaacccctgcggttggagactctgtggcacgtgtccttgaagaaatggggctagaaacagttggcacgcatggaacgacggctgccttggccctcttgaacgaccaagttaaaaaaggtggagtgatggcctgtaaccaggtcggtggtctatctggtgcctttatccctgtttctgaggatgaaggaatgattgctgcagtgcaaaatggctctcttaatttagaaaaactagaagctatgacggctatctgttctgttggattggatatgattgccatcccagaagatacgcctgctgaaactattgcggctatgattgcggatgaagcagcaatcggtgttatcaacatgaaaacaacagctgttcgtatcattcccaaaggaagagaaggcgatatgattgagtttggtggtctattaggaactgcacccgttatgaaggttaatggggcttcgtctgtcgacttcatctctcgcggtggacaaatcccagcaccaattcatagttttaaaaattaa

SEQ ID NO: 1456 - DNA, 360 bp, Streptococcus pneumoniae
ttgagtattttcgttagaattatgctatactatttgaaaagaatcctgtttaatgttaaggtttcttattttaagaagaattggagtttgcttatgaaagcgattataactgttgttggtaaagataaatctggaattgttgcaggtgtttctggtaaaattgcagaattaggattgaatattgacgatatctctcaaactgtcttggatgaatattttacgatgatggctgttgtatctagtgatgaaaagcaagattttacctatcttcgtaatgaatttgaagcttttgggcaaactttgaatgtaaaaatcaatattcagagtgcagcgattttcgaagctatgtataatatctag

SEQ ID NO: 1457 - DNA, 387 bp, Streptococcus pneumoniae
atggcttaccgtaaactaggacgcactagctcacaacgtaaagcaatgcttcgcgatttgacaactgaccttttgatcaacgaatcaatcgtgacaactgaagctcgtgctaaagaaatccgtaaaactgttgaaaaaatgattactctaggtaaacgtggtgatttgcatgcacgtcgtcaagcagctgctttcgtacgtaatgaaatcgcatctgaaaactatgatgaagcaactgataagtacacttctactacagcacttcaaaaattgttctcagaaatcgcacctcgttatgctgaacgtaacggtggatacactcgtatccttaaaactgaaccacgtcgtggtgatgcagcgccaatggcgatcatcgaattagtataa

SEQ ID NO: 1458 - DNA, 936 bp, Streptococcus pneumoniae
atgatcgagtttgaaaaaccaaatataacaaaaattgatgaaaataaagattatggcaagtttgtaatcgaaccacttgaacgtggctacggtacaactcttggtaactctcttcgtcgtgtacttctagcttctctaccaggagcagctgtgacatctatcaacattgatggtgtgttacatgagtttgacacagttccaggtgttcgtgaagacgtgatgcaaatcattctgaacattaaaggaattgcagtgaaatcgtacgttgaagacgaaaaaatcatcgaactggatgttgaaggtcctgctgaagtaacagctggtgacattttgacagatagcgatattgaaattgtaaatccagatcattatctctttacaattggtgaaggttcttctctaaaagcgactatgactgttaacagtggtcgtggatatgtacctgctgatgaaaataaaaaggataatgcaccagttggaacacttgctgtagattctatttatacaccagttacaaaagtcaactatcaagtggaacctgctcgtgtaggtagcaatgatggtttcgacaaattaacccttgaaatcttgacaaatggaacaattattccagaagatgctttagggctttcagcacgtattttgacagaacatcttgatttgtttacaaatcttactgagattgctaagtcaactgaagtgatgaaagaagctgatactgaatctgacgaccgtattttagatcgtacgattgaggaactggacttgtctgtgcgttcatacaactgtttaaaacgtgccggtatcaatactgtgcatgatttgacagaaaaatctgaagcagagatgatgaaagtacgaaatcttggacgcaagagtttggaagaagtgaaactcaaactcattgatttgggtcttggattaaaagataaataa

SEQ ID NO: 1459 - DNA, 402 bp, Streptococcus pneumoniae
atgtcacagctgctcctggtagagaagctagaagtacacgacgaagagagttaccaagagttgtaccgtagccacgttcaagtggttcgattacaaacttgccataatctttattttcatcaatttttgttatatttggtttttcaaactcgatcatttagttactccctcttaaacgaaaagcagtgtaatgcgatgattatacacggcgacgttttggaggacgagcaccattgtgtgggcactggagtcacatcacgaattgctgttacttcaagaccagcggcagcaagcgcacgaatagctgactcacgaccagaacctggaccttttacagtaacttcaactgatttaagaccgtgttcttgtgcagatttagcagcagcttcagaagccatttga

SEQ ID NO: 1460 - DNA, 423 bp, Streptococcus pneumoniae
ttggctaaaccaacacgtaaacgtcgtgtgaaaaagaatatcgaatctggtattgctcatattcacgctacatttaataacactattgttatgattactgatgtgcatggtaatgcaattgcttggtcatcagctggtgctcttggtttcaaaggttctcgtaaatctacaccattcgctgctcaaatggcttctgaagctgctgctaaatctgcacaagaacacggtcttaaatcagttgaagttactgtaaaaggtccaggttctggtcgtgagtcagctattcgtgcgcttgctgccgctggtcttgaagtaacagcaattcgtgatgtgactccagtgcccacacaatggtgctcgtcctccaaaacgtcgccgtgtataatcatcgcattacactgcttttcgtttaagagggagtaa

SEQ ID NO: 1461 - DNA, 366 bp, Streptococcus pneumoniae
atggctcgtattgctggagttgatattccaaatgacaaacgcgtagtaatctcattgacttatgtcaacggtatcggacttgcaacatctaagaaaattttggctgctgctggaatctcagaagatgtttgtgtacgtgatcttacatcagatcaagaagatgctatccgtcgtgaagtggatgcaatcaaagttgaaggtgaccttcgtcgtaaagtaaacttgaacatcaaacgtttgatggaaatcggttcataccgtggtatccgtcaccgtcgtggacttcctgtccgtggacaaaacactaaaaacaacgctcgcactcgtaaaggtaaagctgttgcgattgctggtaagaaaaaataa

SEQ ID NO: 1462 - DNA, 165 bp, Streptococcus pneumoniae
gtggcaaaagactatgtgattgaagttgaaggcaaagtagttgatacaatgccgaatgcaatgtttacggttgaacttgaaaatggacatcagattttagcaacagtttctggtaaaatgcgtaaaaactatattcgtgttttagcgggagatcgtgttactgtc

SEQ ID NO: 1463 - DNA, 639 bp, Streptococcus pneumoniae
atgaatcttttgattatgggcttacctggtgcaggtaagggaactcaagcagcaaaaatcgtagaacaattccatgttgcacatatctcaacaggtgatatgttccgcgctgcaatggcaaatcaaactgaaatgggtgttcttgctaagtcatatattgacaagggtgaattggttcctgacgaagttacaaatggaatcgtaaaagaacgcctttcacaagatgatattaaagaaacaggattcttattggatggttacccacgtacaattgaacaagctcatgccttggacaaaacattggctgaacttggcattgaactagaaggtgttatcaatattgaagtgaaccctgacagcctcttggaacgtttgagtggccgtatcatccaccgcgtaactggagaaactttccacaaggtctttaacccaccagttgactataaagaagaagattactaccaacgtgaagatgataagcctgagacagtaaaacgtcgtttggatgttaatattgctcaaggagaaccaatcattgctcactaccgtgccaaaggtttggttcatgacatcgaaggtaatcaagatatcaatgatgtcttctcagatattgaaaaagtattgacaaatttgaaataa

SEQ ID NO: 1464 - DNA, 1311 bp, Streptococcus pneumoniae
atgttttttaaattattaagagaagctcttaaagtcaagcaggttcgatcaaaaattttatttacaatttttatcgttttggtctttcgtatcggaactagcattacagttcctggtgtgaatgccaatagcttgaatgctttaagtggattatccttcttaaacatgttgagcttggtgtcggggaatgccctaaaaaacttttcgatttttgccctaggagttagtccctatatcaccgcttctattgttgtccaactcttgcaaatggatattttacccaagtttgtagagtggggtaaacaaggggaagtaggtcgaagaaaattgaatcaagctactcgttatattgctctagttctcgcttttgtgcaatctatcgggattacagctggttttaataccttggctggagctcaattgattaaaactgctttaactccacaagtttttctgacgattggtatcatcttaacagctggtagtatgattgtcacttggttgggtgagcaaattacagataagggatacggaaacggtgtttccatgattatctttgccgggattgtttcctcaattccagagatgattcagggcatctatgtggactactttgtgaacgtcccaagtagccgtatcacttcatctatcattttcgtaatcattttgattattactgtattgttgattatttactttacaacttatgttcaacaagcagaatacaaaattccaatccaatatactaaggttgcacaaggtgctccatctagctcttaccttccgttaaaggtaaaccctgctggagttatccctgttatctttgccagttcgattactgcagcgcctgcggctattcttcagtttttgagtgccacaggtcatgattgggcttgggtaagggtagcacaagagatgttggcaactacttctccaactggtattgccatgtatgctttgttgattattctctttacattcttctatacgtttgtacagattaatcctgaaaaagcagcagagagcctacaaaagagtggtgcctatatccatggagttcgtcctggtaaaggtacagaagaatatatgtctaaacttcttcgtcgtcttgcaactgttggttccctcttccttggtgtgatttccattttaccgattgcagctaaagatgtatttggtctttctgatgttgttgcctttggtggaacaagtctcttgatcattatctctacaggtatcgaaggaatcaagcaattggaaggttacctattgaaacgtaagtatgttggtttcatggacagaacagaataa

SEQ ID NO: 1465 - DNA, 441 bp, Streptococcus pneumoniae
atgaaacttcatgaattgaaacctgcagaaggttctcgtaaagtacgtaaccgcgttggtcgtggtacttcatcaggtaacggtaaaacatctggtcgtggtcaaaaaggtcaaaaagctcgtagcggtggcggagttcgccttggttttgaaggtggacaaactccattgttccgtcgtcttccaaaacgtggattcactaacatcaacgctaaagaatacgcaattgtgaaccttgaccaattgaacgtctttgaagatggtgctgaagtaactccagttgttcttatcgaagcaggaattgttaaagctgaaaagtcaggtattaaaattcttggtaacggtgagttgactaagaaattgactgtgaaagcagctaaattctctaaatcagctgaagaagctatcactgctaaaggtggttcagtagaagtcatctaa

SEQ ID NO: 1466 - DNA, 183 bp, Streptococcus pneumoniae
atggctcaaattaaaattactttgactaagtctccaatcggacgcattccatcacaacgtaaaactgttgtagcacttggacttggcaaattgaacagctctgttattaaagaagataacgctgctatccgtggtatgattacagcagtatctcacttagtaacagttgaagaagtaaactaa

SEQ ID NO: 1467 - DNA, 495 bp, Streptococcus pneumoniae
atggcatttaaagacaatgcagttgaattagaagaacgcgtagttgctgtcaaccgtgttacaaaagttgttaaaggtggacgtcgtcttcgtttcgcagctcttgttgttgttggtgaccacaatggtcgcgtaggatttggtactggtaaagctcaagaagttccagaagcaatccgtaaagcagtagatgatgctaagaaaaacttgatcgaagttcctatggttggaacaacaatcccacacgaagttctttcagaattcggtggagctaaagtattgttgaaacctgctgtagaaggttctggagttgccgctggtggtgcagttcgtgccgttgtggaattggcaggtgtggcagatattacatctaaatcacttggttctaacactccaatcaacattgttcgtgcaactgttgaaggtttgaaacaattgaaacgcgctgaagaaattgctgcccttcgtggtatttcagtttctgatttggcataa

SEQ ID NO: 1468 - DNA, 357 bp, Streptococcus pneumoniae
gtgatttcaaaaccagataaaaacaaactccgccaaaaacgccaccgtcgcgttcgcggaaaactctctggaactgctgatcgcccacgtttgaacgtattccgttctaatacaggcatctacgctcaagtgattgatgacgtagcgggtgtaacgctcgcaagtgcttcaactcttgataaagaagtttcaaaaggaactaaaactgaacaagccgttgctgtcggtaaactcgttgcagaacgtgcaaacgctaaaggtatttcagaagtggtgttcgaccgcggtggatatctatatcacggacgtgtgaaagctttggctgatgcagctcgtgaaaacggattgaaattctaa

SEQ ID NO: 1469 - DNA, 525 bp, Streptococcus pneumoniae
atgtcacgtattggtaataaagttatcgtgttgcctgctggtgttgaactcgctaacaatgacaacgttgtaactgtaaaaggacctaaaggagaacttactcgtgagttctcaaaagatattgaaatccgtgtggaaggtactgaagtaactcttcaccgtccaaacgattcaaaagaaatgaaaactatccacggaactactcgtgcccttttgaacaacatggttgttggtgtatcagaaggattcaagaaagaacttgaaatgcgtggggttggttaccgtgcacagcttcaaggatctaaacttgttttggctgttggtaaatctcatccagacgaagttgaagctccagaaggaattacttttgaacttccaaacccaacaacaatcgttgttagcggaatttcaaaagaagtagttggtcaaacagctgcttacgtacgtagccttcgttcaccagaaccatataaaggtaaaggtatccgttacgttggtgaattcgttcgccgtaaagcaaggtaa

SEQ ID NO: 1470 - DNA, 399 bp, Streptococcus pneumoniae
atggttatgactgacccaatcgcagacttcctaactcgtattcgtaatgctaaccaagctaaacacgaagtacttgaagtacctgcatcaaacatcaaaaaagggattgctgaaatccttaaacgcgaaggttttgtaaaaaacgttgaaatcatcgaagatgacaaacaaggcgtcatccgtgtatttcttaaatacggaccaaatggtgaaaaagttatcactaacttgaaacgtgtttctaaaccaggacttcgtgtctacaaaaaacgtgaagaccttccaaaagttcttaacggacttggaattgccatcctttcaacttctgaaggtttgcttactgataaagaagcacgccaaaagaatgttggtggtgaggttatcgcttacgtttggtaa

SEQ ID NO: 1471 - DNA, 237 bp, Streptococcus pneumoniae
gatatcaagggcgtcaaaactccaagtaaaaataggaaacttgacgaagaaactaaagtttctaggaaagtttatctttttcacacagagtttagcccgggttcaattgggcttgccaatttgaacacgagctacagctttggcaaaaaagaccaatttgctttggagcattgcttctgcattaaattgtctatttttgctcgtgctgttacgctctttgtatcatgtattaactag

SEQ ID NO: 1472 - DNA, 270 bp, Streptococcus pneumoniae
atggctaaaaaatcaatggtagctagagaggctaaacgccaaaaaattgttgaccgttatgctgaaaaacgtgctgcattaaaggcggcaggggactacgaaggtttatctaaattacctcgcaacgcttcaccgactcgtttacataatcgttgtagagttacggggcgcccacattcagtttaccgcaaatttggtctgagtcgtatcgcttttcgcgaacttgcgcataaaggtcaaattcctggtgtaacaaaagcatcttggtaa

SEQ ID NO: 1473 - DNA, 543 bp, Streptococcus pneumoniae
atggcaaatcgtttaaaagaaaaatatcttaatgaagtagttcctgctttgacagaacaattcaactactcatcagtgatggctgtgcctaaagtagataagattgttttgaacatgggtgttggtgaagctgtatcaaacgctaaaagccttgaaaaagctgctgaagaattggcacttatctcaggtcaaaaaccacttatcactaaagctaaaaaatcaatcgccggcttccgtcttcgtgaaggtgttgcgatcggtgcaaaagttacccttcgtggtgaacgtatgtacgaattcttggataaattggtatcagtttcacttccacgtgtacgtgacttccacggtgttccaacaaaatcatttgatggacgcgggaactacacacttggtgtgaaagaacaattaatcttcccagaaatcaacttcgatgacgttgacaaaactcgtggtcttgacatcgttatcgtaacaactgctaacactgacgaagagtcacgtgcattgcttacaggccttggaatgccttttgcaaaataa

SEQ ID NO: 1474 - DNA, 306 bp, Streptococcus pneumoniae
atgtttgtaaaaaaaggcgacaaagttcgcgtaatcgctggtaaagataagggaacagaagctgttgtccttactgcccttccaaaagtaaacaaagttatcgttgaaggtgttaacattgttaagaaacaccaacgtccaactaacgagcttcctcaaggtggtatcatcgagaaagaagcagctatccacgtatcaaacgttcaagttttggacaaaaatggtgtagctggtcgtgttggttacaaatttgtagacggtaaaaaagttcgctacaacaaaaaatcaggcgaagtgcttgattaa

SEQ ID NO: 1475 - DNA, 369 bp, Streptococcus pneumoniae
atgattcaaacagaaactcgtttgaaagtcgcagacaacagcggtgctcgcgaaatcttgactatcaaagttcttggtggttcaggacgtaaatttgcaaacatcggtgatgttatcgtggcatctgtaaaacaagctactcctggtggtgcggttaaaaaaggtgacgttgttaaagcagttatcgttcgtactaaatcaggtgctcgtcgtgctgatggttcatacatcaaatttgacgaaaacgcagcagttatcatccgtgaagacaaaactcctcgcggaacacgtatctttggcccagttgcacgtgaattgcgtgaaggtggcttcatgaagatcgtgtcacttgctccagaagtactttaa

SEQ ID NO: 1476 - DNA, 330 bp, Streptococcus pneumoniae
atgaagccaccttcacgcaattcacgtgcaactgggccaaagatacgtgttccgcgaggagttttgtcttcacggatgataactgctgcgttttcgtcaaatttgatgtatgaaccatcagcacgacgagcacctgatttagtacgaacgataactgctttaacaacgtcaccttttttaaccgcaccaccaggagtagcttgttttacagatgccacgataacatcaccgatgtttgcaaatttacgtcctgaaccaccaagaactttgatagtcaagatttcgcgagcaccgctgttgtctgcgactttcaaacgagtttctgtttga

SEQ ID NO: 1477 - DNA, 261 bp, Streptococcus pneumoniae
atggaacgcaataatcgtaaagttcttgttggacgtgttgtatctgacaaaatggacaagacaatcacagttgtagttgaaacaaaacgtaaccacccagtctatggtaaacgtattaactactctaaaaaatacaaagctcatgatgaaaacaatgttgccaaagaaggcgatatcgtacgtatcatggaaactcgcccgctttcagctacaaaacgtttccgtcttgtagaagttgttgaagaagcggtcatcatctaa

SEQ ID NO: 1478 - DNA, 399 bp, Streptococcus pneumoniae
ttgaactgttttgatacgagcgatttgttttttaacttctttcaagcgagctgtttgttccaattgaccagtagcagcttggaaacgaagttcaaacaattcttttttcaattcgttttcgcgcttcgcgagttcttcttgagaaagaccacgaagttctttaacaaattcttttacttcattaagtttcatgccttctccttattttgcttcacgttttacgaatttacatttaactggcaatttgtggctagcaagtcgaagcgcttcacgtgcaatctcttcagatacaccagcgatttcgaacatcactttaccacgtttaactggtgctacccaaccttcaggtgcccctttaccagatcccatacgcacaccgatagctttagcagtgtatga

SEQ ID NO: 1479 - DNA, 207 bp, Streptococcus pneumoniae
atgaaacttaatgaagtaaaagaatttgttaaagaacttcgtggtctttctcaagaagaactcgcgaagcgcgaaaacgaattgaaaaaagaattgtttgaacttcgtttccaagctgctactggtcaattggaacaaacagctcgcttgaaagaagttaaaaaacaaatcgctcgtatcaaaacagttcaatctgaagcgaaataa

SEQ ID NO: 1480 - DNA, 414 bp, Streptococcus pneumoniae
atgttagtacctaaacgtgttaaacaccgtcgtgagttccgtggaaaaatgcgcggtgaagcaaaaggtggaaaagaagtagcattcggtgaatacggtcttcaagctacaactagccactggatcactaaccgccaaatcgaagctgctcgtatcgccatgactcgttacatgaaacgtggtggtaaagtttggattaaaatcttcccacacaaatcatacactgctaaagctatcggtgtgcgtatgggatctggtaaaggggcacctgaaggttgggtagcaccagttaaacgtggtaaagtgatgttcgaaatcgctggtgtatctgaagagattgcacgtgaagcgcttcgacttgctagccacaaattgccagttaaatgtaaattcgtaaaacgtgaagcaaaataa

SEQ ID NO: 1481 - DNA, 627 bp, Streptococcus pneumoniae
atgcgtgtcggcatcatccgtgattgggatgccaaatggtatgctgaaaaagaatacgcggattaccttcatgaagatcttgcaatccgtaaattcgttcaaaaagaacttgctgacgcagcagtttcaactattgaaatcgaacgcgcagtaaacaaagttaacgtttcacttcacactgctaaaccaggtatggttatcggtaaaggtggtgctaacgttgatgcactccgtgcaaaacttaacaaattgactggaaaacaagtacacatcaacatcatcgaaatcaaacaacctgatttggatgctcaccttgtaggtgaaggaattgctcgtcaattggagcaacgtgttgctttccgtcgtgcacaaaaacaagcaatccaacgtgcaatgcgtgctggagctaaaggaatcaaaactcaagtatcaggtcgtttgaacggtgcagatatcgcccgtgctgaaggatactctgaaggaactgttccgcttcacacacttcgtgcagatatcgattacgcttgggaagaagcagatactacatacggtaaacttggtgttaaagtatggatctaccgtggtgaagttcttccagctcgtaaaaacactaaaggaggtaaataa

SEQ ID NO: 1482 - DNA, 225 bp, Streptococcus pneumoniae
acattcactctaaacaaagctgctgaaatcatcttgaaagttttgaactcagctgtagctaacgctgaaaacaactttggtttggataaagctaacttggtagtatctgaagcattcgcaaacgaaggaccaactatgaaacgtttccgtccacgtgcgaaaggttcagcttcaccaatcaacaaacgtacagctcacatcactgtagctgttgcagaaaaataa

SEQ ID NO: 1483 - DNA, 246 bp, Streptococcus pneumoniae
ttgttgattggtgaagctgaacctttcgcacgtggacggaaacgtttcatagttggtccttcgtttgcgaatgcttcagatactaccaagttagctttatccaaaccaaagttgttttcagcgttagctacagctgagttcaaaactttcaagatgatttcagcagctttgtttagagtgaatgttcaagattgcgattgcatcggctacgcttttaccacggatgttatcaagaacaagacgtga

SEQ ID NO: 1484 - DNA, 282 bp, Streptococcus pneumoniae
atgggacgcagtcttaaaaaaggacctttcgtcgatgagcatttgatgaaaaaagttgaagctcaagctaacgacgaaaagaaaaaagttattaaaacttggtcacgtcgttcaacgatcttcccaagtttcattggttacactattgcagtttatgacggacgtaaacacgtacctgtttacatccaagaagacatggtaggccacaaacttggtgaatttgcaccaactcgtacttacaaaggtcacgctgcagacgacaagaaaacacgtagaaaataa

SEQ ID NO: 1485 - DNA, 834 bp, Streptococcus pneumoniae
gtgggaattcgtgtttataaaccaacaacaaacggtcgccgtaatatgacttctttggatttcgctgaaatcacaacaagcactcctgaaaaatcattgcttgttgcattgaagagcaaggctggtcgtaacaacaacggtcgtatcacagttcgtcaccaaggtggtggacacaaacgtttctaccgtttggttgacttcaaacgtaataaagacaacgttgaagcagttgttaaaacaatcgagtacgatccaaaccgttctgcaaacatcgctcttgtacactacactgacggtgtgaaagcatacatcatcgctccaaaaggtcttgaagtaggtcaacgtatcgtttcaggtccagaagcagatatcaaagtcggaaacgctcttccacttgctaacatcccagttggtactttgattcacaacatcgagttgaaaccaggtcgtggtggtgaattggtacgtgctgctggtgcatctgctcaagtattgggttctgaaggtaaatacgttcttgttcgtcttcaatcaggtgaagttcgtatgattcttggaacttgccgtgctacagttggtgttgtcggaaacgaacaacatggacttgtaaaccttggtaaagcaggacgtagccgttggaaaggtatccgcccaacagttcgtggttctgtaatgaaccctaacgatcacccacacggtggtggtgaaggtaaggcaccagttggtcgtaaagcaccatctactccatggggcaaacctgctcttggtcttaaaactcgtaacaagaaagcgaaatctgacaaacttatcgttcgtcgtcgcaacgagaaataa

SEQ ID NO: 1486 - DNA, 297 bp, Streptococcus pneumoniae
atgaatgtgtatgatgttatcaaaaaacctgtcatcactgacagctcaatggctcaacttgaagcagggaaatatgtatttgaagttgacactcgtgcaaacaaacttttgatcaagcaagctgttgaagctgctctcgaaggtgttaaagttgccaatgttaacacaatcaacgtaaaaccaaaagctaaacgtgttggacgttacactggttttactaacaaaactaaaaaagctatcatcacacttacagctgattctaaagcaatcgagttgtttgctgctgaagctgaataa

SEQ ID NO: 1487 - DNA, 624 bp, Streptococcus pneumoniae
atggcaaacgtaacattatttgaccaaactggtaaagaagctggccaagttgttcttagcgatgcagtatttggtatcgaaccaaatgaatcagttgtgtttgatgtaatcatcagccaacgcgcaagccttcgtcaaggaacacacgctgttaaaaaccgctctgcagtatcaggtggtggacgcaaaccatggcgtcaaaaaggaactggacgtgctcgtcaaggttctatccgctcaccacaatggcgtggtggtggtgttgtcttcggaccaactccacgttcatacggctacaaacttccacaaaaagttcgtcgcctagctcttaaatcagtttactctgaaaaagttgctgaaaacaaattcgtagctgtagacgctctttcatttacagctccaaaaactgctgaatttgcaaaagttcttgcagcattgagcatcgattctaaagttcttgttatccttgaagaaagaaatgaattcgcagctctttcagctcgtaaccttccaaacgtgaaagtcgcaactgctacaactgcaagtgttcttgacatcgcaaatagcgacaaacttcttgtcacacaagcagctatctctaaaatcgaagaagtacttgcataa

SEQ ID NO: 1488 - DNA, 627 bp, Streptococcus pneumoniae
atgacaaaaggaatcttagggaaaaaagtgggaatgactcaaatcttcactgaagctggcgaattgatccctgtaacagttattgaagcaactccaaacgttgttcttcaagttaaaactgttgaaacagacggatacaacgctatccaagttggtttcgatgacaaacgcgaagtattgagcaacaaacctgctaaaggacatgtagcgaaagctaacacggctcctaagcgcttcattcgtgaattcaaaaacgttgaaggcttggaagttggtgctgaaattacagttgaaacattcgcagctggagacgttgttgacgtaactggtacttctaaaggtaaaggtttccaaggtgttatcaaacgccacggacaatcacgtggaccaatggctcacggttctcgttaccaccgtcgtccaggttctatgggacctgttgcacctaaccgcgtattcaaaggtaaaaaccttgcaggacgtatgggtggtgaccgcgtaacaattcaaaatcttgaagttgtacaagttgttccagaaaagaacgttatccttatcaaaggtaacgtaccaggtgctaagaaatctcttatcactatcaaatcagcagttaaagctggtaaataa

SEQ ID NO: 1489 - DNA, 309 bp, Streptococcus pneumoniae
atggcaaacaaaaaaatccgtatccgtttgaaagcttacgaacaccgtacgcttgacacagcggctgcaaaaatcgtagaatcagctactcgtacaggtgcacaagttgcgggtccaatcccacttccaactgaacgtagcctctacacaatcattcgtgcgactcacaaatacaaagactctcgcgaacaatttgaaatgcgtacacacaaacgtttgatcgatatcgttaacccaactcaaaaaacagttgatgccttgatgaaattggatcttccaagtggtgtaaacgtagaaatcaaactttaa

SEQ ID NO: 1490 - DNA, 618 bp, Streptococcus pneumoniae
atgaagaaaaaagacttagtagaccaactagtctcagagatcgagacggggaaagtcaggacactgggaatatacggtcatggagcttcaggtaaatcaacctttgcacaggaattgtaccaagctttagattctactacagtaaatttgctagagacagatccttatatcacctcaggacgccatctggtagtacccaaggacgcgccgaatcaaaaggtgacagccagtctgccagtggcgcatgaactggagagtttgcagagagatatccttgccttgcaggcgagtatggatgtcttgacaattgaagaaccttggaaggctagtgaggtcttgtctggagccaaaccaattttgattgtcgaagggatgtctgttggctttctacccaaggaactctttgaaaaaaccatctgtttctacacggatgaggagaccgaattaaagcgacgccttgctagagatacgactgtgagaaatcgcgatgcatcctttatattggctagccatcagatgagacgggagcagtatctgcgatactataaagaaactgagtctaaggcggatatcttagtggaccaatcagaagataaatttgatgtcaagaggacttaa

SEQ ID NO: 1491 - DNA, 591 bp, Streptococcus pneumoniae
atgaataatccaaaaccacaagaatggaaaagcgaggaacttagtcaaggtcgtatcattgactacaaggcctttaactttgtggacggcgaaggcgtgcgtaactctctctatgtatcaggctgtatgtttcactgcgagggatgttataatgttgcgacttggtcttttaatgctggcattccctatacagcagaattagaagagcagatcatggcagatcttgctcagccctatgttcaaggtttgactttgttgggaggggagccttttcttaatactgggattctcttgccacttgttaagcggattcggaaggaattgccagacaaggacatctggtcctggaccggctacacttgggaagaaatgatgttggaaactccagataaactggaattcttgtcactgattgacattcttgtcgatggaagatatgatcgaactaagagaaatcttatgctccagtttcgaggttcgtctaaccaacgaattatcgatgtgcaaaaatcgctcaaaagtgggcaagtagtgatttgggacaagctcaatgacggaaaagaaagctatgaacaggtgaagagagaatga

SEQ ID NO: 1492 - DNA, 207 bp, Streptococcus pneumoniae
caagaattccagtttatctggagtttccaacatcatttcttcccaagtgtagccggtccaggaccagatgtccttgtctggcaattccttccgaatccgcttaacaagtggcaagagaatcccagtattaagaaaaggctcccctcccaacaaagtcaaaccttgaacatagggctgagcaagatctgccatgatctgctcttctaa

SEQ ID NO: 1493 - DNA, 507 bp, Streptococcus pneumoniae
atggaattacgcagaccaagattagcggataagaaagctgttttagatatgatgacagagtttgaaaagagccaatcagcccatgatggaggattttgggatgttgaggatttttcttacgaggagtggctagaaggtaaccgtaataaagaaatgggaatatggctacctgaaaatcgcgttccatcgatacagttcgtattgtttggtgaatcaggttgtgctctaggatttttgaatctgcgattgagactgaatgaggggttactgaattatgctggccacattggctactccatccgtccatctgaaagaggcaagggttatgcaaaagagactctccgtcagggcttgcaagttgctaaggaaaagaacatcaagaaagctctggtgacctgtagcgtgaataatcttgctagcagagcagtcattctagcaaatggtggaatatttgaggatgctcgcaatggagtcgagcgttattggatagaggtagcgaatgaataa

SEQ ID NO: 1494 - DNA, 465 bp, Streptococcus pneumoniae
ttgcataacccttgcctctttcagatggacggatggagtagccaatgtggccagcataattcagtaacccctcattcagtctcaatcgcagattcaaaaatcctagagcacaacctgattcaccaaacaatacgaactgtatcgatggaacgcgattttcaggtagccatattcccatttctttattacggttaccttctagccactcctcgtaagaaaaatcctcaacatcccaaaatcctccatcatgggctgattggctcttttcaaactctgtcatcatatctaaaacagctttcttatccgctaatcttggtctgcgtaattccatccttacctcccactatgagaaaagcgagagctggctctcacttttattttttcttgttcttgtttaaaaattgttctctgaagctaagcaagcgttctttcttaccagctccacctttagagtgtttctcgtga

SEQ ID NO: 1495 - DNA, 2214 bp, Streptococcus pneumoniae
atgcatatgattgcactagaagaaaaaattacaattttgccaactctcttcgtcgagaaacgagatgggagacgtgttgtatttgatgtggacaagattgacaaggctctccacaaggcggctgacaaggttatggatgtgacacccctggttgaaaaacgcctcaatgatctgactgagcgaattattacagaaattcatagtcgctttccacagggaattaagatttacgaaattcaaaatatcgtagaacatgaactccttgaagccaaagaatatgcgctggctgaggagtatattacttatcggacacagagggattttgagcgctcaaaagcgacggatatcaactttagtattcataaacttctcaacaaagaccagacagttgtcaatgaaaacgctaataaagacagtgatgtctttaacactcagcgtgatttgacagcagggattgttgggaaatcaatcggactgcaaatgcttcctaagcacgtagccaatgcccaccaaaagggggatatccactatcacgatttggactacagtccctatacccctatgaccaactgctgtttgattgattttaagggtatgttggaaaatggttttaagattggaaatgcagaggtagagagtcccaagtctatccagactgcgacagcacagatttctcaaatcattgccaacgttgcttctagccagtacggtggctgttcagctgaccgtatcgatgaaattttggcgccttatgcagagaagaattatcaaaaacatctcaaagatgcagaagagtgggtattgcctgaaaaacgggaagattacgcttggaagaaaacgcaaaaggacatctacgatgccatgcaatctcttgagtatgaaatcaatactctcttcacttcaaatggacaaacaccttttacttcgttaggttttggtctgggaaccagtcgttttgaacgagaaattcaaaaagctattttaaacattcgcatcaagggtcttggttcagaacaccgtacggctatctttcctaaacttattttcactctgaaaagaggccttaatttagaggaaggaactcccaactacgacatcaagcagttggctcttgagtgtgcaaccaaacggatgtatccagatgttttatcttacgataagattgttgacttgacaggatccttcaaggtgcctatgggttgccgttctttcctccaaggatggaaggatgaaaatggtgtagaagtcaattcaggtcgcatgaatctgggtgttgtgacggttaatctgcctcgtattgctcttgagtctgaaggtgatatgaataagttctgggaaatcttcaacgagcgaatgaatatcgcagaagatgctcttgtttaccgtgtcgaacgcactaaagaggcgacaccagcaaatgctcctattctttatcagtacggtgcttttggccatcgtctaggtaaagaagaaagtgttgaccagctctttaagaatcgtcgtgctaccgtttcgctgggctatatcggcttgtatgaagtagcgacagttttctttggtaacagctgggaaagtaatccagatgctaaggaattcacgctagacatcattcacgatatgaaacgccgtgtagaagagtggtcagaccaatatggctaccatttctctatctactcaacaccatccgaaagtctgacagaccgtttctgccgactagatatagacaagtttggctctattcctgatatcacagacaaggaatactacaccaactctttccactacgatgttcgtaaaaatccaacaccgtttgaaaaattggactttgagaaagtctatccagaagcaggtgcgtcaggtggtttcatccattattgtgagtatccagtccttcagcaaaatccaaaggccttggaagctgtctgggattatgcttatgaccgtgtaggctatctaggcaccaatactccgattgaccgttgctacaagtgtgactttgaaggggattttgaaccaactgagagagggtttgcttgtccaaactgtggcaatagcgaccctaaaacagtagatgtggtgaagcgaacttgtggctacctaggtaatcctcaagcaagaccgatggtcaacgggcgtcacaaggaaatcgctgcgcgtgtcaaacatatgaatggttcaacgattaaaatagctgggcatcaagtaacaaattag

SEQ ID NO: 1496 - DNA, 1557 bp, Streptococcus pneumoniae
ttgaacaggagaaacgatatgagtgtgtatggtagagtagaagaagttcataaggagaatcgtgaacctctagaataccaaatcgaacaagaatcgcatcatcgtgaatcaagtcgtcttcctttggtgaaaattttactatggagtacgcttgtaacggggataactctaggagtaccgctattactcgacttaatgagtgcacaagaagtgcaggatttttatgcaggttgggcgcttcatcagacagggaagatttacagcgactattatggaagtcaaggtttgctttattatttgctgacttacgtgagtcagggcggatttttctttgccatctttgagtggttagccttggtagcaggaggatttttcctttttagatcagcggacaccttgacagagcaaggagaccaagctggacatctggtgactattttttacatgctagttacaggtcttgcttttggtggaggctatgcgactcttttagcgcttcctttcttattcgcagcctttagtttagttgcggcttacctaagcaatccaagccatgataagggatttgtacggattgggctagctttggcaggcggatttttctttgctcccttatcatcgctcctgtttattgctgtagtgagtttaggcttgttggtctttaaccttgggcatagacgctttgcgcatgggttttatcagtttcttgcagtggctttaggtttttcacttgtcttttatccaactgcctactatagtgctgcaacaggaagttttggggatgcgattagtggtattcgttatcctattgacagtattcgctttgattttacttctaaaattttagagaatatgtttttttatggcttgttgtcccttggtttgggatttgtggtttgtatctttttaggtctctttcaatccaaaccctttaaactatacgtcatttcggttcctgcaagtcttgtggtaattttaggtttgattttacttttcttttcacaagagcctctgcacgcttcttatttgatggtcgtcttccctgttttcctacttttattggtaaccaatattaagagtcaacagagggggcgtagtgctagaagaaaccgaagagaaacgccagttagcctatggagtcgtttcttcaaaggaaatctatatctgctagtttttgagtttgtctatcttttgtctgttccttttttgatgaagtttgtcctttatccagtaccttatcaagaacgtaatcgtcttgctgatttggtaaaagaggagacaaatacggaagatgctatctatgcatgggatgatactgcgactctttatcgtaagagtgagcgcttgtcgccatcggcgattttgtccccgttgcactatacagcaactgaggaaaatcgtaataagttacttaatgacttgaaagaaaaacaacctaaggtgattgtggtaaatgataaggtggtagtctggtctgaagtggaaacactcttaaaagaaaattaccaacaagtaaagactgattactcagagtttaaagtctataaaattaaataa

SEQ ID NO: 1497 - DNA, 1476 bp, Streptococcus pneumoniae
atgctacttgaactttgtcttgtttttggtctctttctttatttaggacgcatggctcccattttatggattactgtcctcattctactgagtatcatcacaatcatttcgatagtcaaccgtaatacgactcctgagaataaggtaacctggttgttagtagcctttgtgccagtatttggtcccttgctctatctgatgtttggtgaaaggcgattgtccaaaaaagaaatcaaacaactgaagaagctaggctctatgcatttccaagaagcaaatagccagctactaaaagagaaattaaaagaaagtgacaaggcagcttatggagtcatcaagtccttattgagtatggataccaatgctgacatctatgatcaaactgcctctacattttttcctaacggagaagctatgtggaaaaagatggtagaagatcttaaaaaggctgagaaatttattttcttggaatattacattatagaagaaggtttgatgtggaatcgcatactagatatactagagcaaaaggtagctcagggtgtagaggttaagatgctctatgatgatatcggctgtatggctactttaacaggagattatgcacatcgacttcgtcagctgggcatcgaggcccataaattcaataaagttattcctcgtttgacagtggcttataataacagagatcatagaaaaatattgattgttgatggtcagatagcctatactggtggggtcaatctggcagatgagtacattaaccacgtcgagagatttggttattggaaggatagtggaattcgcttagacggactagcagtaaaagccctgacacgcttatttttgaccacttggtacattaatcgaggagaaattagtgattttgatcaatatcatttagaaaatcattctatcccgagtgacggtttaaccattccatacggaagtggacccaagccaatttttcgagcgcaggtagggaaaaaagtttatcagagtttaatcaatcaagcaacagaatcggtctatattacgacaccttatttgattatagattatgatttaacagagacaatcaaaaatgcagctatgagaggggtcgatgttcgaattatcaccccttacataccagataagaagttcattcagttagtcacgagaggagcttatcccgaccttctttctgctggtgttcggatttatgagtatagtccaggttttattcatagtaagcagatgttggtagacgaagattttgcggtggtggggacaatcaatctcgactaccggagcttggtacaccattatgaaaatgcagtcttactctataaaactccttctataagggaaatcgcccgagattttcgaaatatatttgcagattctcaggaagtctatcctcattctatcaaaacgagctggtatcaaaagcttgtaaaagaaatcgcccagctattcgcccctatcttataa

SEQ ID NO: 1498 - DNA, 558 bp, Streptococcus pneumoniae
ttgacccccttgtttgaacttgttatactaggggaattgctggttagagaaaatttctctaaattggtagcagaaaggaaattcatcatgaaattaaaaagattcacactttctcttgcttctctagcaagttttagtctcttagtagcttgttcacaaagagctcaacaggttcaacagcctgttgctcagcagcaggtccaacagcctgctcaacaacctgctcaacagaataccaatactgcaaatgcaggaggtaaccaaaatcaagcggctccagtacaaaaccaacctgttgctcaaccgaccgatattgatgggacttatactggtcaggatgacggagaccgtatcactttagtggtaactggaacgactggtacatggactgagctcgaatctgacggggatcagaaagtcaaacaggttacatttgattcagcaaatcaacgcatgattattggcgatgatgtcaaaatttacactgtaaacggtaatcaaatcgtcgtagatgatatggatagagacccatcggaccaaatcgttttaactaaataa

SEQ ID NO: 1499 - DNA, 210 bp, Streptococcus pneumoniae
gctctttgtgaacaagctactaagagactaaaacttgctagagaagcaagagaaagtgtgaatctttttaatttcatgatgaatttcctttctgctaccaatttagagaaattttctctaaccagcaattcccctagtataacaagttcaaacaagggggtcaatttatctgctcacggtccagcaggtagccccgtacttctgagataa

SEQ ID NO: 1500 - DNA, 390 bp, Streptococcus pneumoniae
ttggagcgtattcgcccacagatttacttggatggtgctcataacctccctgccttgactcgcttggttgagtttatcaaagaaaaagagcaggaaggttatcgtcctcaaatcctttttggagccttgaaacggaaggattatcaagggatgttaggttacctgactgaaaaattgcctcaggtggaactcaaggtgaccggctttgactatcagggggctttggacgaaagggatgtgacaggttacgatatagtttcttcttaccgagaatttatcagcgattttgaagaaagagcagatgctcaggatttgctgttcgttacagggtctctctattttatctcagaagtacggggctacctgctggaccgtgagcagataaattga

SEQ ID NO: 1501 - DNA, 483 bp, Streptococcus pneumoniae
ttggtggcttacttgacacgaccaatgtgggtaactggagagcttgctgtcatcacctccattgggcttgaccatcaagaaaccttgggtgatagtctagaagcaattgcagagcagaaagctggtattttcaaggctggtaagaaggcagtgattgcgaaattgcctccagaagctaggcttgtctgtcagaaaaaagccgaatctttagctgttaacctttatcaggcaggtcaagattttttaatgctgaatggtgatttttcaagctctttactaaatctttcacagctgaacataggcttagaaggagtctatcagcaggagaatgcagccttggcgttgcaaacttttcttctttttatgggagaaggaaaggaagctgttgatgaacaggctgtaagaaaggccttggaacagacccattggggctggtcgcttggagcgtattcgcccacagatttacttggatggtgctcataa

SEQ ID NO: 1502 - DNA, 492 bp, Streptococcus pneumoniae
atgtttgaagtagaagaatggctccatagtcggattggtttgaattttcgatcatgtttgggccgaatgcagcaagcggtggatttgttaggaaatcctgagcagtcttaccctattatccacgtaacagggactaatgggaaaggatctaccattgcttttatgagggaattatttatggggcatggcaaaaaagttgcgacctttacctcccctcatatcgtctctatcaatgaccgaatctgcattaatgggcaacctatagcagacgcagactttatccgtttgactgatcaggtcaaggagatggagaaaacgcttctgcaaactcctgcccagttgtccttttttgaattgctgaccttagttgcttttctttattttagggagcaagaggtggatttggttttattagaagtgggaattggtggcttacttgacacgaccaatgtgggtaactggagagcttgctgtcatcacctccattgggct

SEQ ID NO: 1503 - DNA, 306 bp, Streptococcus pneumoniae
atgtcacacgatcataaccacgaccacgaagaacgtgaactaatcacactagtagatgagcaaggaaatgaaaccttgtttgaaatccttttgacaattgatggaaaagaagaatttggtaaaaactatgttcttctagtaccagttaacgcagaagaagacgaagacggacaagttgaaatccaagcttactcattcattgaaaatgaagatggaacagaaggcgaattgcaaccaatcccagaagactcagaagacgaatggaacatgattgaagaagtcttcaacagctttatggaggagtaa

SEQ ID NO: 1504 - DNA, 420 bp, Streptococcus pneumoniae
atgagaattatgggattggacgtcggttcaaaaacggtaggggtggcgattagcgatccgcttggttttacagctcaagggcttgaaatcatccagataaatgaagaacaaggccaatttggttctgaccgcgttaaggaattggttgatacttacaaggtggaacgatttgtagtgggcttgcctaaaaacatgaacaatacaagtggaccgcgcgtagaagctagtcaagcctacggagcaaagctagaagagttttttggtttaccagtagactatcaggatgaacgcttgacaacagtggctgctgagcgcatgttgattgaacaagcagatatcagtcgcaataagcgcaagaaagtcattgataagttagcagctcagctgattttacaaaattatttagatagaaaattttaa

SEQ ID NO: 1505 - DNA, 267 bp, Streptococcus pneumoniae
atgggatttactgaagaaacagtacgttttaaattggacgattccaataaaaaagaaattagcgaaactttgacagatgtttatgcttcgttgaacgataagggttacaacccaattaaccaaatcgtaggttacgtattgagtggagaccctgcctacgttcctcgttataataatgcacgaaatcaaatccgtaagtatgagcgtgatgaaatcgttgaggaattggttcgctactacctcaaaggacaaggagtcgatctataa

SEQ ID NO: 1506 - DNA, 570 bp, Streptococcus pneumoniae
atgaaaaaaatagttcttgttagtctagctttcctttttgtcctggttggttgcggacagaaaaaagaaactggaccagctacaaaaacagaaaaagatacgcttcagtcggcattgccagttattgaaaatgctgagaagaatacagttgtaactaagactttggtcttgcccaagtcagatgatggtagccagcagacacaaacaattacttacaaagacaagacttttttgagtctaactatccaacaaaaacgtccagtctctgatgagttgaagacttatattgaccaacatggagtggaggaaactcaaaaagctcttcttgaagcggaggagaaggataagtctatcattgaagctcgtaaattggcaggtttcaaacttgaaacaaaactattgagcgcaacggaacttcaaacaacgactagttttgattttcaagttctggatgtcaagaaggcttcccagttggaacatctgaagaatattggtttggaaaatcttttgaaaaatgaaccaagcaaatatatttcagatagattggcaaatggcgcgacagaacaatag

SEQ ID NO: 1507 - DNA, 399 bp, Streptococcus pneumoniae
atgattaaaatttatacagtctcaagttgtactagctgtaaaaaagcaaaaacctggctcaatgcccaccagttaagttataaagaacaaaaccttggtaaagaaggaattacgagagaagaattactggatattctaaccaaaacagataacggaatagccagcatcgtttcgtctaaaaatcgctatgccaaagcccttggagtggatattgaagatttgagtgtcaatgaagttctcaatctgattatggaaacaccgagaattttaaagagcccaatccttgtagatgaaaaacgcctgcaagttggctacaaggaagacgatattcgtaccttcctaccacgctctgtccgtaatgtagaaaatgcagaagcacgtttgcgtgcagctctataa

SEQ ID NO: 1508 - DNA, 378 bp, Streptococcus pneumoniae; identical to SEQ ID NO: 512

SEQ ID NO: 1509 - DNA, 315 bp, Streptococcus pneumoniae
  unsure (305): n at each above location is unknown.
atgatggttaacaagaagcaagtgaaagttggtatttcaaccatctactactggtttcataatggtcatttaggattgacgaaggccgacatgctttatcccagaaaaaggaaaggtgtcaagaagcaagctagtccgaactttaagccggcaggtaaatctatcgaagaacgtcctgacgttattaatcttcgcttggaaaatggtcattatgaaattgataccgtcctactgactaagataaaaaattattgcctgttagtcttaaccgaccggcggagcatacagcgaattgtcaggtcgtntatcatctct

SEQ ID NO: 1510 - DNA, 888 bp, Streptococcus pneumoniae
ttggttacaattggggcgacagaggctttatctgcgactttgacggctattttggaagagggcgacaaggtacttttgccagctcctgcttatccaggctatgaaccgattgttaacttagttggggcagaaattgttgagattgatacgactgaaaatggttttgtcttgactcctgagatgttggagaaggccattttggagcagggtgataagctcaaggcggttattctcaactatccagccaatccgacaggaattacctacagtcgagagcagttagaggccttggcagctgttttacgcaagtacgaaatttttgttgtctgtgatgaggtttactcagaattgacctacacaggcgaagcccatgtgtctctaggaacgatgttgagagaccaggctattattatcaatggtttgtctaaatcgcatgccatgacaggttggcgtttggggctgattttcgctcctgcggccttcacagcccagttaatcaagagtcaccaatacttggtcactgccgcaaataccatggcgcaacatgctgcggtagaagccttgacggctggtaaaaatgatgcggagcccatgaagaaggaatatatccagcgtcgggactatatcatcgaaaaaatgactgctcttggttttgagattatcaaaccagacggtgccttctatatttttgctaaaattccagcgggctacaatcaagactcctttgcttttctgaaggattttgctcagaagaaggccgttgcctttatccctggtgcagcctttggacgttacggggaaggctacgtccgcctatcttatgcagccagcatggagactatcaaagaagccatgaaacgacttgaggagtacatgagagaagcatga

SEQ ID NO: 1511 - DNA, 186 bp, Streptococcus pneumoniae
gtgtttgacaaaaaacatgcgtttgccaacctgctctgtaaaaattttgacgagcttgtcatcctcacgaaaattgcgattgtaaagcaccaagccttgactcgtgatagactgaatcatgcttctctcatgtactcctcaagtcgtttcatggcttctttgatagtctccatgctggctgcataa

SEQ ID NO: 1512 - DNA, 771 bp, Streptococcus pneumoniae
atgattcagtctatcacgagtcaaggcttggtgctttacaatcgcaattttcgtgaggatgacaagctcgtcaaaatttttacagagcaggttggcaaacgcatgttttttgtcaaacacgctggtcagtctaagctggcgcctgttattcagcccttggtgctggcacgatttctattgcgaatcaatgatgacggactcagttacatcgaagactatcatgaggtcatgacttttcccaagattaatagtgacctctttgtcatggcctatgcgacctatgtggcagctcttgcagatgctagtttgcaggacaatcagcaggatgctcccttgtttgcttttttgcaaaagactttggagttgatggaagcaggcttggattatcaggttttgaccaatatttttgaaattcaaattttgactcgatttggaatcagcctcaattttaatgagtgtgtcttctgccatcgggttggtcaggcttttgacttttctttcaaatatggagcctgcctctgtccagagcattatcatgaggataagagacgttgtcatctcaatcccaatatcccctatctgctcaatcaatttcaagctattgattttgagactttggagaccatttcgctcaagcctggaatcaagcaagagctacgccaatttatggatcaactatatgaagagtacgttgggattcacctaaaatcaaagaaatttattgattccctagcagactggggacaattactaaaagaggaaaagaaatga

SEQ ID NO: 1513 - DNA, 993 bp, Streptococcus pneumoniae
atgaaaaaaatcgcagtagatgccatggggggcgattacgcacctcaggccattgttgagggtgtcaatcaagccctatctgacttttcagatatcgaggttcaactttacggagatgaagctaaaatcaagcaatatctgacagcgacagagcgcgtcagcattatccatacggatgagaagattgattcggatgatgaacctacgagagctattaggaataagaaaaatgccagtatggtattggcagccaaggctgtcaaagatggtgaagcagacgctgtcctttcggctgggaatacaggtgccttgttggctgctggattcttcatcgtgggtcgtatcaagaatatcgaccgtcctgggcttatgtcgactttgccgactgtagatgggaagggatttgacatgctagacctcggtgccaatgcggaaaatacagcccagcacctccatcaatacgcggttctaggatccttctatgctaaaaatgttcgtggcattgcgcaaccacgtgttggcttgctcaataacggaacagagagtagcaagggcgatccgcttcgtaaggaaacttatgaattactagtggctgatgaaagtttgaactttatcggaaatgtggaagcgcgtgatttgatgaatggtgttgcagatgttgttgtggcagatggtttcacgggaaacgctgtgctcaaatccatcgaagggacagctatgggaatcatgggcttgctcaagacagctattacaggtggtggtcttcgagcgaaactaggtgccctccttctcaaggacagcctcagaggtttgaaaaaacagctcaattattcagatgttggtggagcggtcttgtttggtgttaaggcacctgttgtcaagactcatggctcaagcgatgccaaggctgtttatagtacgattcgccagattcgtaccatgctagaaacagacgtagttgcccagactgcgcgtgaattttcaggagaataa

SEQ ID NO: 1514 - DNA, 336 bp, Streptococcus pneumoniae
ttggaactccgattgctattttccttgaatgattttaaccacatctcctacgttttggagttggtcaatttcttcatcgctgatttcgatactaaattcatcttccagagtcaagataaactccatcaagtcaacagaatccgcatccaaatcgtctttcagactcaaggattctgtcacgacaaagtcctctccctgtcgctcttggataatggtcacaatacggtcaaaaatttctttttctgtcatctcttttattctcctgaaaattcacgcgcagtctgggcaactacgtctgtttctagcatggtacgaatctggcgaatcgtactataa

SEQ ID NO: 1515 - DNA, 234 bp, Streptococcus pneumoniae
atgacagaaaaagaaatttttgaccgtattgtgaccattatccaagagcgacagggagaggactttgtcgtgacagaatccttgagtctgaaagacgatttggatgcggattctgttgacttgatggagtttatcttgactctggaagatgaatttagtatcgaaatcagcgatgaagaaattgaccaactccaaaacgtaggagatgtggttaaaatcattcaaggaaaatag

SEQ ID NO: 1516 - DNA, 294 bp, Streptococcus pneumoniae
atgagaaatatcggacaagctggtaaaatcttggctgacagtggttatcaagggctcatgaagatatatcctcaagcacaaactccgaggaaatcaagtaaacttaagccattaactcttgaagataaagcctgtaatcatgcgctatctaaggagagaagcaaggttgagaatatctttgccaaagtaaaaacgtttaaaatgttttcaacaacctatcgaaatcatcgtaaacgcttcggattacgaatgaatttgattgctggtattatcaatcatgaactaggattctag

SEQ ID NO: 1517 - DNA, 231 bp, Streptococcus pneumoniae
atgaatacaaaaaagatgtcacaatttgaaattatggatactgagatgcttgcttgcgttgaaggtggcggatgcaattggggagattttgccaaagcaggtgttggaggaggagtagcacgaggtcttcagctaggaattaaaacaagaacatggcaaggtgcagcaactggtgctgcgggaggagctatacttggaggtgtggcctatgcagcgacatgttggtggtaa

SEQ ID NO: 1518 - DNA, 207 bp, Streptococcus pneumoniae
atggcaaggtgcagcaactggtgctgcgggaggagctatacttggaggtgtggcctatgcagcgacatgttggtggtaattatggattttaaaagttttattattggtttagtagttggtatatttggtccttatatggatgatttaattagaaaaaaatttttaaagtcttcggagaagaaaacagaaaaatctattaaaaaataa

SEQ ID NO: 1519 - DNA, 2160 bp, Streptococcus pneumoniae
atgaatatgaaatttgggaaacgtcactatcgtccgcaagtggatcagatggactgcggtgtagcttcattagccatggtttttggctactatggtagttattattttttggctcacttgcgagaattggctaagacgaccatggatgggacgacggctttgggcttggtcaaggtggcagaggagattggttttgagacgcgagccattaaggcggatatgacgctttttgacttgccggatttgacttttccttttgttgcccatgtgcttaaggaagggaaattgctccactactatgtggtgactgggcaggataaggatagcattcatattgccgatccagatcccggggtgaagttgactaaactgccacgtgagcgttttgaggaagaatggacaggagtgactctttttatggcacctagtccagactataagccttataaggaacaaaaaaatggtctgctctcttttatccctatattagtgaagcagcgtggcttgattgccaatatcgttttggcaacactcttggtaaccgtgattaacattgtgggttcttattatctgcagtctatcattgatacctatgtgccagatcagatgcgttcgacactagggattatttctattgggctagtcatcgtctacatcctccagcaaatcttgtcttacgctcaggagtatctcttgcttgttttggggcaacgcttgtcgattgacgtgattttgtcctatatcaagcatgtttttcacctccctatgtcctttttcgcgacacgcaggacaggggaaattgtgtctcgtttcacggatgctaacagtattatcgatgcgctggcttcgaccattctttcgattttcctagatgtgtcaacagttgtcattatttcccttgttttattttcacaaaataccaatctctttttcatgactttattggcgcttcctatctacacagtgattatctttgcctttatgaagccgtttgaaaagatgaatcgggacaccatggaagccaatgcggttctgtcttcttctatcattgaggacatcaacggtattgagactatcaagtccttgaccagtgaaagtcagcgttaccaaaaaattgacaaggaatttgtggattatctgaagaaatcctttacctatagtcgagcagagagtcagcaaaaggctctgaaaaaggttgcccatctcttacttaatgtcggcattctctggatgggggctgttctggtcatggatggcaagatgagtttggggcagttgattacctataataccttgctggtttactttaccaatcctttggaaaatatcatcaatctgcaaaccaagcttcagacagcgcaggttgccaataaccgtctaaatgaagtgtatctagtagcttctgagtttgaggagaagaaaacagttgaggatttgagcttgatgaagggagatatgaccttcaagcaggttcattacaagtatggctatggtcgagacgtcttgtcggatatcaatttaatcgttccccaagggtctaaggtggcttttgtggggatttcagggtcaggtaagacgactttggccaagatgatggttaatttttacgacccaagtcaaggggagattagtctgggtggtgtcaatctcaatcagattgataaaaaagccctgcgccagtacatcaactatctgcctcaacagccctatgtctttaacggaacgattttggagaatcttcttttgggagccaaggaggggacgacacaggaagatatcttacgggcggtcgaattggcagagattcgagaggatatcgagcgcatgccactgaattaccagacagaattgacttcggatggggcagggatttcaggtggtcaacgtcagagaatcgctttggcgcgtgctctcttgacagatgcgccggtcttgattttggatgaggcgactagcagtttggatattttgacagagaagcggattgtcgataatctcatggctttggacaagaccttgattttcattgctcaccgcttgactattgctgagcggacagagaaggtagttgtcttggatcagggcaagattgtcgaagaaggaaagcatgctgatttgcttgcacagggtggcttttacgcccatttggtcaatagctag

SEQ ID NO: 1520 - DNA, 1350 bp, Streptococcus pneumoniae
atgaaaccagaatttttagaaagtgcggagttttataatcgtcgttaccataatttttccagtagtgtgattgtacccatggcccttctgctcgtgtttttacttggctttgcaactgttgcagaaaaggagatgagtttgtccactagagctactgtcgaacctagtcgtatccttgcaaatatccagtcaactagcaacaatcgtattcttgtcaatcatttggaagaaaataagctggttaagaagggggatcttttggttcaataccaagaaggggcagagggtgtccaagcggagtcctatgccagtcagttggacatgctaaaggatcaaaaaaagcaattggagtatctgcaaaagagcctgcaagaaggggagaaccactttccagaggaggataagtttggctaccaagccacctttcgcgactacatcagtcaagcaggcagtcttagggctagtacatcgcaacaaaatgagaccatcgcgtcccagaatgcagcagctagccaaacccaagccgaaatcggcaacctcatcagtcaaacagaggctaaaattcgcgattaccagacagctaagtcagctatggaaacaggtgcttccttggccagtcagaatctagcctactctctttaccagtcctacaagtctcagggcgaggaaaatccccaaactaaggttcaggcagttgcacaggttgaagcacagatttctcagttagaatctagtcttgctacttaccgtgtccagtatgcaggttcagctacccagcaagcctatgcgtcagggttaagcagtcaattggaatcccttaaatcccaacatttggcaaaggttggtcaggaattgacccttctagcccagaaaatcttggaggcagagtcaggtaagaaggtacagggaaatcttttagacaaggggaaaattacggcgagtgaggatggggtgcttcatcttaatcctgagaccagtgattctagcatggttgcagaaggtgccctactagcccaactttatccatctttggaaagagaagggaaagccaaactcacagcctatctaagttcaaaagatgtagcaagaatcaaggtcggtgattctgttcgctatactacgactcatgatgccgggaatcaacttttcctagattctactattacaagtattgatgcgacagctactaagactgagaaagggaatttctttaaaatcgaggcggagactaatctaacttcggagcaggctgaaaaacttaggtacggggtggaaggccgcttgcagatgattacgggcaagaaaagttatctacgttattatttggatcaatttttgaacaaagagtaa

SEQ ID NO: 1521 - DNA, 750 bp, Streptococcus pneumoniae
gtggtaaaatgtgctcaagtaatacgaaaggcgaactttaaaatgtcaaaacaattgatctattcgggaaaagctaaagatatctatacaactgaggatgaaaatcttattatttcaacttacaaggaccaggcgactgctttcaatggtgtcaagaaggagcagattgcaggtaagggagtcttgaataatcagatctcatcttttatttttgagaaattaaatgcggctggtgtggcgactcactttgtggagaaactttcagacacggaacaactcaataaaaaggttaagattattcctttggaagtcgtgctccgcaactatactgctggttccttttcaaaacgttttggtgtggatgagggaatcgccttggagactccgattgtcgaattttactacaaaaatgatgatttggatgatccatttatcaatgatgagcatgtgaaattcctacagattgcgggtgaccagcagattgcctacttgaaggaagaaacgcgtcgtatcaatgaactattgaaagtctggtgtactgagattgggcttaaattgattgactttaagctagagttcggttttgacaaggatggcaagattatcttggcagacgaattttcaccagataactgccgcttgtgggacgctgatggcaaccacatggataaggatgttttccgtagaggattgggagaactaaccgacgtttatgagattgtttgggaaaagttgcaggaattgaaataa

SEQ ID NO: 1522 - DNA, 762 bp, Streptococcus pneumoniae
atggataaacgtatttttgttgaaaaaaaggctgattttcaggtcaagtcagagagtttggttagagagctccagcacaacttgggactgtcaagcttgaaaagtattcgtattgtgcaagtatatgatgtatttgacttggctgaggacttgtttgcacctgcagagaagcacattttctctgagcagggaaccgaccatgttttagatgaagtatctgtgcaggcggatcttgctaactatgctttctttgccattgaaagtctgccagggcagtttgaccagcgtgcagcttcgtcacaggaagccttgcttttgttgggaagttcgagtgacgtgacagtcaacacagcccaactttacttggtgaataaagatattgatgcgactgagttggaagctgtcaaaaactacctgctcaatccagttgattctcgtttcaaggatatcacgacagggattgccaagcaggagttttcagagtcagacaagaccattccaaaattgactttctttgaaagctatacagcagaagactttgctcgctacaaggccgagcaagggatggccatggaagtggatgatttgctctttatccaagactactttaagtcaatcgggcgcgtgccaactgacactgaactcaaggttttggacacttactggtctgaccactgccgtcatacaactttggagacagagttgaaacacatcgacttttcagcttttaaatttccaaagcaattggcaggcaacctatga

SEQ ID NO: 1523 - DNA, 285 bp, Streptococcus pneumoniae
ctcttccagagcaagacgctttcactcttggttacactatctacttcttcgaattggcaattggccctttcaggttacttgaatgctatcaacccatttgacccacccagtgttgaagcttataaacgtaacctgttggcccttctgggaaaaccaggaatggagaattggagcaaaggactaaccgcacgtctattattaaaaaaaaaaggggttggccccctctttttaatttttttttcccttagaaattggactcacccaggctttgtgatttatttttga

SEQ ID NO: 1524 - DNA, 1371 bp, Streptococcus pneumoniae
gtggcattttacgcaaacgtgggaattctgataaaaattggagaaattcgacaaaaaaacttgaaaaaaacgaaggtaagcgttatgatagaaaagaagaaatattggaggaagaacatgtcacatattaaatttgattattcaaaagttttagacaaatttgttgcaccacatgaagtggaatacatgcaatcacaagtaacagcagcagatgaattaatccgtaaaggaactggtgctggtagcgacttcttgggatggttggaccttcctgaaaaatacgaccgcgaagaatttgaccgcatcttgaaagctgctgagcaaatcaagtcagacagcgatgttttggttgtgatcggtattggtggatcttaccttggtgcaaaagcagcaatcgacttcttgaatcaccattttgctaacttgcaaacaaaagaagaacgcaaagctccacaaatcctttacgcaggaaactcaatctcatctacttaccttgctgacttggtagagtatgttgcagacaaagacttctcagtaaacgtaatttctaaatcaggtacaacaactgaaccagcgattgctttccgtgtctttaaagaactcttggttaagaaatacggtcaagaagaagctaacaaacgtatctatgcaacaactgaccgccaaaagggtgctgttaaggttgaagcagacgctaacggttggggaacatttgttgttccagatgatatcggtggacgcttctcagtattgacagccgttggtttgcttccaatcgcagcatcaggagctgacatcaaagctcttatggaaggtgcgaatgcagctcgcaaagactacacttcagacaaaatctctgaaaacgaagcttaccaatacgcagctgttcgtaacatcctttatcgtaaaggctatgcaactgagatcttggtaaactatgagccatcacttcaatacttctcagaatggtggaaacaattggctggtgaatcagaaggaaaagaccaaaaaggtatctacccaacttcagccaacttctcaactgacttgcactcacttggtcaatttatccaagaaggaactcgtatcatgtttgaaacagttgtccgtgttgacaaacctcgtaaaaacgtgcttattcctactttggaagaagaccttgacggacttggttaccttcaaggaaaagacgttgactttgtaaacaaaaaagcaactgacggtgttcttcttgcccacacagatggtgatgtaccaaacatgtatgtgactcttccagagcaagacgctttcactcttggttacactatctacttcttcgaattggcaattggccctttcaggttacttgaatgctatcaacccatttga

SEQ ID NO: 1525 - DNA, 738 bp, Streptococcus pneumoniae
ttgagtgatatgataggactatcgttagcattcgaaaggagaggcatcatggctagaacggttgtaggagttgctgcaaatctatgtcccgtagacgcagaaggcaaaatcattcattcatctgtatcttgtagattcgcagagatcattcgtcaagtcggtggtctccctttagtcattcctgttggtgatgagtcagttgtacgtgattatgtggaaatgattgacaaactcattttgacaggaggccaaaatgttcatcctcagttttatggagagaaaaagaccgtcgagagcgatgattacaatctggtccgtgacgaatttgaattggcactcttgaaggaagcgcttcgtcagaataaaccaattatggcaatctgtcgcggtgtccaacttgtcaatgttgcctttggtggaaccctcaatcaagaaatcgaaggtcactggcaaggactacctttcgggacatctcactctattgagacagtagaaggaagcgtggtggctaagctatttgggaaagaaagtcaggtcaactcagtccatcgtcaaagcattaaagatttggcacctaatttccgtgtaactgctattgattcaagagaccaaactattgaagcgattgagtctatcgacgagcaccgcattatcggtttacagtggcattcagagtttctggttaatgaagaagatggcaatttagaattatttgagtatttattgaatgaactgtaa

SEQ ID NO: 1526 - DNA, 1812 bp, Streptococcus pneumoniae
ttggcagtagctaactgcgctaaatataatataaggaggagtaaaatgaagacagttcaatttttttggcattattttaaggtctacaagttctcatttgtagttgtcatcctgatgattgttctggcgacttttgcccaagccctctttccagtcttttctggacaagcggtgacgcagctagccaatttagttcaagcttatcaaaatggcaatccagaacttgtatggcaaagcctatcaggaatcatggtcaatcttggcctgctggttttggttctatttatctctagtgtaatatacatgtgtctcatgacgcgcgtgattgcagaatcgaccaacgagatgcgcaaaggcctctttggtaagcttgctcagttgacggtttctttctttgaccgtcgacaagatggcgatatcctgtctcattttaccagtgatttggataatatcctacaagcctttaacgaaagcttgattcaggtcatgagcaatattgttttatacattggtctgattcttgtcatgttttcgagaaatgtgacgctggctctcatcaccattgccagcaccccattggctttccttatgctgattttcatcgtgaaaatggcacgcaaatacaccaacctccagcagaaagaggtagggaagctcaacgcctatatggatgagagcatctcaggccaaaaagccgtgattgtgcaaggaattcaagaggatatgatggcaggatttcttgaacaaaatgagcgcgtgcgcaaggcaacctttaaaggaagaatgttctcaggaattcttttccctgtcatgaatgggatgagcctgattaatacagccatcgtcatctttgctggttcggctgtacttttgaatgataagtctattgaaacaagtacagccctaggtttgattgttatgtttgcacaattttcacagcagtactaccagcctattatccaagttgcagcgagttggggaagccttcagttggcctttactggagctgaacgaattcaggaaatgtttgatgcagaggaggaaatccgacctgaaaaggctccaaccttcactaagttgcaagaaagtgttgaaatcagtcatatcgatttttcatacttgcctgataaacctattttgaaagatgtcagcatttctgcccctaaaggccagatgacagcagttgttgggccgacaggttcaggaaaaacgactattatgaacctcatcaatcgcttttatgatgttgatgctggtggtatttattttgatggtaaagacattcgtggctatgacttagatagtcttagaagcaaggtgggaattgtattgcaagattcggtcttgtttagcggaacgattcgagacaatatccgatttggtgtgccagatgctagtcaggaaatggttgaggtagcagcaaaagcaacccacattcacgactatatcgaaagtttgcctgataagtacgatactcttattgatgatgaccagagcatcttttcagcagggcagaagcaattgatttcaatcgctcgaaccctgatgacagatccagaagttctcattctcgatgaagcaacttcaaacgtagatacggtgacagaaagcaagattcaacatgccatggaggtggttgtagcaggtagaactagtttcgtcattgcccaccgcttgaaaaccattctcaatgcagatcagattattgtccttaaagatggagaagtcattgaacgtggtaaccaccatgaacttttgaagctaggtggcttttattcagaactctatcacaatcaatttgttttcgaataa

SEQ ID NO: 1527 - DNA, 216 bp, Streptococcus pneumoniae
acgattcccaatcccagtaaccgtcgttatgatcgagttgaactcagccatcaagtcattgacacatgtttccgccttgtcaatgagcctcttgtaatgtttgatgttttcattacacgagataaaacgtttatgcgttatcaaactcatgaccaattgaaacaaaaagctgtggttagatcctttcggaaattgtcaagcgattggaggaaatga

SEQ ID NO: 1528 - DNA, 324 bp, Streptococcus pneumoniae
ttgtttcaattggtcatgagtttgataacgcataaacgttttatctcgtgtaatgaaaacatcaaacattacaagaggctcattgacaaggcggaaacatgtgtcaatgacttgatggctgagttcaactcgatcataacgacggttactgggattgggaatcgtttaggggcggtcattttagccgagattcgaaatattcatgcctttgataatcctgctcaattacaagctttcgctggactggattcttctatttatcagtcaggtcagattgatttagctggaagaatggtcaaacggggttcccctcatctgcggtag

SEQ ID NO: 1529 - DNA, 588 bp, Streptococcus pneumoniae
  unsure (145): n at each above location is unknown.
ttggctcaattgattccacgtctctttgatccacagaacggggccattaaaatcggtggcacggatattcgagacgtgagtgaagggaacctgcgtcaaacagtttcatcgttctccaaacgttccattctttttagtgtgacgnttgcagataacttgagacaggggaagggaaatgctactctatttgaaatggagcgcgcacgcaatattgcccaggctagtgaattcattcatcgtatggagaaaaactttgaaagtccagttgaagaacggggaaccaatttctctggtggacaaaaacaaaggatgtcgattgcgcgtgggattgtcagcaatccacgtattctgatttttgacgattcgacctcagccttggatgccaaatcagagcgcttggtgcaagaagctttgaataaggacttgaaggggacgacaaccattattattgctcaaaaaattagctcggttgtccatgcagacaagatcttggttctaaatcaaggacgattgattggtcaaggcacgcatgcagacttggttgccaacaatgccgtttaccgtgaaatctatgaaacacagaaatga

SEQ ID NO: 1530 - DNA, 1083 bp, Streptococcus pneumoniae
atgctgattcagaaaataaaaacctacaagtggcaggccttggcttcgctcctgatgacaggcttgatggttgctagttcacttctgcaaccgcgttatctgcaggaagtattagacgccctccttactgggaaatatgaagctatttatagtatcggggcttggttgattggtgtggccgtagtcggtctagttgctggtggactcaatgttgtcctcgcagcctatattgcccaaggagtttcatccgaccttcgggaggatgccttccgtaaaattcaaaccttttcttatgctgatattgaacaatttaatgcgggaaatctagtcgttcgaatgacaaatgatatcaaccagattcagaacgttgtcatgatgaccttccaaattcttttcagacttcccctcttgttcatcggttcgtttatcctagcggttcaaaccttaccttctctgtggtgggtgattgttctcatggtagtcttgatttttggtttgactgctgtcatgatgggaatgatggggcctcgttttgccaagtttcaaacccttcttgagcgcatcaatgccattgccaaggaaaatttacgtggcgttcgtgtggtcaagtcctttgtccaagaaaaagagcaatttgctaagtttacagagatctcagacgagctttttggtcaaaacctttacattggttatgccttttcagtagtggaaccctttatgatgttggttggttacggggcggtcttcctctctatttggctggtcgcgggaatggttcagtcggatccgtctgttgttggttccatcgcttcttttgttaattacctaagccagattatctttaccattgttatggttggatttttgggaaattctgtcagccgtgccatgatttccatgcgtcgtattcgagaaattcttgacgcagagccagctatgaccttcaaggatatcccagatgaagagttggttggaagccttagctttgaaaatgtgacctttacctatcccatggacaaggaaccgatgctgaaagatgtgagctttactattgaaccttgtcaaatggttggtgtagtatga

SEQ ID NO: 1531 - DNA, 1965 bp, Streptococcus pneumoniae
atgaatctggtactctcttatgaaaaagaaagctttgaagaccttcatttattggatttgcgattggcaacggtggagcaaacggcatctagtaagctgctccagtatgttcatcggactcagatgagggaattgaaccacctcaaacctgttatccgctacgaaattaaggatttcttgcagatggattatgcgaccaaggctagtctggatttggttgagaatgctcgctcaggtaagaaacaaggcagtcttttctggcttttggatgaaaccaaaacggctatggggatgcgtctcttgcgttcttggattcatcgccccttgattgataaggaacgaatcgtccaacgtcaagaagtagtgcaggtctttctcgaccatttctttgagcgtagtgacttgacagacagtctcaagggtgtttatgacattgagcgcttggctagtcgtgtttcttttggcaaaaccaatccaaaggatctcttgcagttggcgactaccttgtctagtgtgccacggattcgtgcgattttagaagggatggagcaacctactctagcctatctcatcgcacaactggatgcaatccctgagttggagagtttgattagcgcagcgattgctcctgaagctcctcatgtgattacagatgggggaattatccgaactggatttgatgagactttagacaagtatcgttgcgttctcagagaagggactagctggattgctgagattgaggctaaggagcgagaaaactctggtatcagcacgctcaagattgactacaataaaaaggatggctactattttcatgtgaccaattcgcaactaggaaatgtgccagcccactttttccgcaaggcgacgctgaaaaactcagaacgctttggaaccgaagaattagcccgtatcgagggagatatgcttgaggcgcgtgagaagtcagccaacctcgaatacgaaatatttatgcgcattcgtgaagaggtcggcaagtacatccagcgtttacaagctctagcccaaggaattgcgacggttgatgtcttacagagtctggcggttgtggctgaaacccagcatttgattcgacctgagtttggtgacgattcacaaattgatatccggaaagggcgccatgctgtcgttgaaaaggttatgggggctcagacctatattccaaatacgattcagatggcagaagataccagtattcaactggttacagggccaaacatgagtgggaagtctacctatatgcgtcagttagccatgacggcggttatggcccagctgggttcctatgttcctgctgaaagcgcccatttaccgatttttgatgcgatttttacccgtatcggagcagcagatgacttggtttcgggtcagtcaacctttatggtggagatgatggaggccaataatgccatttcgcatgcgaccaagaactctctcattctctttgatgaattgggacgtggaactgcaacttatgacgggatggctcttgctcagtccatcatcgaatatatccatgagcacatcggagctaagaccctctttgcgacccactaccatgagttgactagtctggagtctagtttacaacacttggtcaatgtccacgtggcaactttggagcaggatgggcaggtcaccttccttcacaagattgaaccgggaccagctgataaatcctacggtatccatgttgccaagattgctggcttgccagcagaccttttagcaagggcggataagattttgactcagctagagaatcaaggaacagagagtcctcctcccatgagacaaactagtgctgtcactgaacagatttcactctttgatagggcagaagagcatcctatcctagcagaattagctaaactggatgtgtataatatgacacctatgcaggttatgaatgtcttagtagagttaaaacagaaactataa

SEQ ID NO: 1532 - DNA, 546 bp, Streptococcus pneumoniae
ttgctctcaagacttatttttgaaaaggagagacagaaaatggcgatagaaaagctatcacccggcatgcaacagtatgtggatattaaaaagcaatatccagatgcttttttgctctttcggatgggtgatttttatgaattattttatgaggatgcggtcaatgctgcgcagattctggaaatttccttaacgagtcgcaacaagaatgccgacaatccgatccctatggcgggtgttccctatcattctgcccaacagtatatcgatgtcttgattgagcagggttataaggtggctatcgcagagcagatggaagatcctaaacaagcagttggggttgttaaacgagaggttgttcaggtcattacgccagggacagtggtcgatagcagtaagccggacagtcagaataattttttggtttccatagaccgcgaaggcaatcaatttggcctagcttatatggatttggtgacaggtgacttttatgtgacaggtcttttggatttcacgctggtttgtggggaaatccgtaacctctag

SEQ ID NO: 1533 - DNA, 447 bp, Streptococcus pneumoniae
atgagaaaaagagatcgtcatcagttaataaaaaaaatgattactgaggagaaattaagtacacaaaaagaaattcaagatcggttggaggcgcacaatgtttgtgtgacgcagacaaccttgtctcgtgatttgcgcgaaatcggcttgaccaaggtcaagaaaaatgatatggtgtattatgtactagtaaatgagacagaaaagattgatttggtggaatttttgtctcatcatttagaaggtgttgcaagagcagagtttaccttggtgcttcataccaaattgggagaagcctctgttttggcaaatattgtagatgtaaacaaggataaatggattttaggaacagttgctggtgccaataccttattggttatttgtcgagatcagcacgttgccaaactcatggaagatcgtttgctagatttgatgaaagataagtaa

SEQ ID NO: 1534 - DNA, 1692 bp, Streptococcus pneumoniae
atgaatacaaaagaattgattgctagcaaattatctagcatcattgatagcctggaccaagaggctattttaaagttactggaaacccctaaaaactcagaaatgggagacattgctttccctgctttttctcttgcaaaagtcgaacgtaaagcaccacaaatgattgcggctgaactggctgaaaaaatgaacagccaagcctttgaaaaagttgtcgcaacaggaccttacgttaactttttccttgataaatctgccatttctgctcaagtattgcaagctgttaccactgaaaaagaacactatgctgaccaaaatattggtaaacaagaaaatgttgttatcgacatgtctagtccgaatatcgctaaaccattttctattggccacctgcgttcaactgttatcggagatagcttgtcacatattttccaaaaaatcggttatcaaacggtcaaggtcaaccatttgggagactggggtaaacaatttgggatgttgattgttgcctacaaaaaatggggcgacgaagaagctgtaaaagctcatccaatcgatgaactccttaaactctatgtccgcatcaacgctgaagctgaaaatgaccctagcttggatgaagaagcgcgcgaatggttccgtaaacttgaaaatggagatgaggaagctctcgctctttggcaatggttccgcgatgaaagtttagtggaatttaaccgcctttacaatgaattgaaggttgaatttgacagctataacggagaagccttctacaatgataagatggatgcagttgtagacattctttctgaaaaaggactacttcttgaatcagaaggtgcccaagttgtgaatcttgagaaatacggaattgaacatccagccctcatcaagaagtctgatggtgcaactctctatatcacacgtgacttggctgcagccctctaccgtaaaaatgaataccaatttgctaaatctatctacgtcgttggtcaagaacaatctgcccactttaaacagctcaaagctgtcttgcaagagatgggctacgattggagtgacgacattacccacgttccttttggtctggttacaaaagaagggaagaagctctctactcgtaaagggaatgtcatcttgctagagcctactattgcagaggctgttagccgtgccaaggtccaaatcgaggctaaaaatcctgaactagaaaacaaagaccaagtagcacatgctgttggggttggagccattaaattctatgacctcaaaaccgaccgtacaaatggatacgacttcgacctagaagctatggtatccttcgagggtgaaactggaccttacgttcaatatgcctacgctcgtatccaatctatcttacgcaaagccgatttcaaaccagaaacatctggcaactatagcttgaatgatactgaaagctgggaaatcattaaactcattcaagacttcccacgtattatcaaccgtgcggcagataactttgaaccttctatcattgctaaatttgcaattagcctggctcaatcctttaacaaatactatgcacatacacgtatcttggatgaaagcccagaacgcgacagccgtctagccctcagctacgcaaccgcagtcgttctcaaagaagcccttcgcttgcttggagtagaagcgccagagaagatgtaa

SEQ ID NO: 1535 - DNA, 450 bp, Streptococcus pneumoniae
aaatcaatcgccctaaaaaaacaattagcgaatgattttggtaaaaagaaatttcacgctatgaaggctcaagcgattgtcacaagtcaagggagaattgtttctttggatatcgctgtgaactattgtcatgatatgaagttgttcaaaatgagtcgcagaaatatcggacaagctggtaaaatcttggctgacagtggttatcaagggcccatgaagatatatcctcaagcacaaactccacgtaaatccagcaaactcaagccgctaacagttgaagataaagcctgtaaccatgcgctatctaaggagagaagcaaggttgagaatatttttgccaaagtaaaaacgtttaaaatgttttcaacaacctatcgaaatcatcgtaaacgcttcggattacgaatgaatttgattgctggcattatcaatcatgaactaggattctag

SEQ ID NO: 1536 - DNA, 204 bp, Streptococcus pneumoniae
ttgatttttacttccgtcgcatcaatcattatcgtgtcctcagagctgagaggagttcttgaaatcgtaacaccacctttgaacaagagttacttcaacccattggctccgacggataaagaagacttgataagaactctagagttagctccccatgttgaaggtggctattttagacaaacaaaaaaacttcagacactataa

SEQ ID NO: 1537 - DNA, 285 bp, Streptococcus pneumoniae
  unsure (249): n at each above location is unknown.
ttgacagcagatgaaatctggtattttcatgcaggatccccacttactgttcacatgattacagcagatggtcactacgaagcagtcactttaggcctggacatatccaaagggcaacaacttcactactgtgttcctaagggcactatttggggatcaacagttgataaggattatgctctggtttcttgtcttgttgctcctggttttgaatttgaggattttgaattatttgaaagggtagatctnactggcgacctatccagagcacaaggagatgattga

SEQ ID NO: 1538 - DNA, 708 bp, Streptococcus pneumoniae
atgacaaaacaagtcttattagtggatgatgaagaacacattctgaaattgcttgactaccatttaagtaaggaaggcttttctactcaattggtaacaaatggacggaaggccttagctttggcagaaacagaaccctttgattttatcttgcttgatatcatgttaccacaattagatggcatggaagtttgtaagcggctgagagccaaaggcgtcaaaactccaattatgatggtttctgcgaaaagtgatgaatttgataaggttttagccttggaattaggggctgatgactacctgaccaagccttttagccctagagaattgctggcgcgtgtcaaggctgtcctcaggcgaactaaaggagaacaagaaggagatgattcagataatatcgctgacgattcttggctatttgggaccttgaaagtataccctgagcgtcatgaagtctacaaggcgaataagttactgagtttgaccccaaaagaatttgaactcttgctctatcttatgaaacatcccaacatgacactgactagagagcgtcttttggaacgtatctgggggtatgactttgggcaggaaacacgtttggtggacgttcatattggtaagttgagggaaaaaattgaagacaatcctaaagcccctcaatttattcgaaccattcggggttatggttataagttcaaggagttatag

SEQ ID NO: 1539 - DNA, 1332 bp, Streptococcus pneumoniae
atgaaacgctaccttcaattttggctagtcaatctaagtgttagcctcattctgattgcagggatggcattaacttggatcagtaaaggcatcggtctctttcttctagccctttctttgggacaaggtggctactggctcttttgcctttggaaatgggaagttgcttttgagaccttgcaccaacctctcttgaccaatagtgaatactttttagaaaaagggcaagaagacttaaagtctttggctcagtatgtgtctgccctaaaaaccaaagtctcccaacaggatcagcaatacaaggacctacccgaaacaatggaggttcttctgtcgcacctaaccatggggacgtttttagtttccgctcaaggtcagatgttattatccagtcgctctctgcctcattattttcccgatgtggacggcgacataagttcacttgatgacctcaaacggatggatattcgaaatttagttcaccaagcctttgatcaaaaaacaaggttaaaacaaaaagtaagtgggtttcatgagggtgacttgattttagaagtgacagcagttcccgtttttagccccacccaatctgtggaagctgtgctcgtcttgctatatgatttaacaacgattagaacttatgaaaagttaaatttagcctttgtctcaaatgcctcccatgaattgaggacaccagttacttcgattaagggctttgctgaaaccattaaggggatgtcagctgaagaagaagcgctcaaggatgactttctagacattatttacaaagaaagcttgcgtcttgagcatattgttgagcatcttcttaccttatctaaggctcaacaaatgcctatacaatggacgaccctttctttggcagaatttgtacaggatttgactcaaagcttgcaacctcagctcaagaagaaggatttacagctaaaggtgcaggtgccagatgatgtcaccctcgtatcagatagtcaattactttcccaaatcttactcaatcttttatccaatgccatccgttacactgaacaagggggaaaaattgaggtcaagacccaaaaggtgaacgaaggcattaagatttctgtatcagatacagggattggtattagtcaattagagcaggatcgtatttttgaacgtttttaccgagttaataaaggtcgaagcagacaaactggtggcactggtcttggccttgccattgtcaaagaactcagtcaattattaggtggccaagtcacggtgacgagtcagcttggcagaggcagttgcttcacgatttttcttcctaaccaatctttcgcacaggactaa

SEQ ID NO: 1540 - DNA, 876 bp, Streptococcus pneumoniae
atgaaattcaaaaaaatgcttactcttgcagccattggcttatcaggatttgggcttgttgcctgtggcaatcagtcagctgcttccaaacagtcagcttcaggaacgattgaggtgatttcacgagaaaatggctctggaacacggggtgccttcacagaaatcacagggattctcaaaaaagacggtgataaaaaaattgacaacactgccaaaacagctgtgattcaaaatagtacagaaggtgttctctcagcagttcaagggaatgctaatgctatcggctacatctccttgggatctttaacgaaatctgtcaaggctttagagattgatggtgtcaaggctagtcgagacacagttttagatggtgaataccctcttcaacgtcccttcaacattgtttggtcttctaatctttccaagctaggtcaagattttatcagctttatccactccaaacaaggtcaacaagtggtcacagataataaatttattgaagctaaaactgaaaccacagaatatacaagccaacacttatcaggcaagttgtctgttgtaggttccacttcagtatcttctttaatggaaaaattagcagaagcttataaaaaagaaaatccagaagttacgattgatattacctctaatgggtcttcagcaggtattaccgctgttaaggagaaaaccgctgatattggtatggtttctagggaattaactcctgaagaaggtaagagtctcacccatgatgctattgctttagacggtattgctgttgtggtcaataatgacaataaggcaagccaagtcagtatggctgaacttgcagacgtttttagtggcaaattaaccacctgggacaagattaaataa

SEQ ID NO: 1541 - DNA, 816 bp, Streptococcus pneumoniae
atgagtgcaacagtagctgttgtagctattttgctaatctgtttctttatttttagtaatggcttacctttcatggctaactacggctttgcccgttttttattaggcagtgattggtcgccaacgaacattccggcaagctatggtattttaccaatgatcgttggttccttattaattaccttaggagcgattgtgattggggtgccaacaggcatcttgacatcggtgtttatggtttattattgtccaaagcccgtctatggcttcttaaaatcagctatcaacttgatggcggccattccatctattgtttatggttttttcggcctacaattattggtgccttggattagaacctttttaggaaatggcatgagtgtcctaaccgcttcgttactattaggaataatgattttgccaaccattatcagtttgtcagaatctgctatccgaacagttcccaaaacgtattattctggtagcttggctctaggagctagtcatgaacggagtatttttagtgtcatcttgccagctgcgagatctggtattttatcagcagttattttaggaatcggtcgcgcagtaggtgaaaccatggcagttattttggtggcaggcaaccagccgattattccaagcggactcttttcaggaaccagaaccttaacaaccaatattgttctggaaatggcttacgcatcaggtcagcatagggaagcccttattgcaacctcagcagttctctttttccttattctcttgattaatgcctactttgcctacttgaaaggaaaatcatcttatgagtaa

SEQ ID NO: 1542 - DNA, 816 bp, Streptococcus pneumoniae
atgagtaaatacctgctaaaacttctcgtttattgtttttcagctttaacctttggctctctctttttaatcattggttttatcctcatcaaaggcttacctcatctaagtctatccctcttttcttggacttatacttctgagaacatttcccttatgccagcgattatttccaccgttattctggtttttggtgctcttcttttagccttgcccatagggatttttgctggtttttatcttgtggaatatacaaaaaaagattccctttgtgttaaaatcatgcgattggcctcagataccttgtctgggattccttccattgtttttggtctgtttggcatgctcttctttgtagtcttcttaggttttcaatactctctgttatcaggaatcttaacctcagttatcatggtgttgccagtcattattcgctcaacagaagaagcccttttatctgttagtgatagcatgcgtcaagcaagttatggacttggggcaggtaagttacggactgtttttagaattgttctaccagttgccatgccaggtattttagctggagtgatactagctattggccgtatcgttggtgaaacagctgccctcatgtatacattaggtacctctaccaatacgccaagtagtctcatgtcttcaggtcgttctctagccctgcatatgtatatgctgtcaagtgaggggctacatgtcaatgaagcctatgctaccggtgtgattttgattattactgttttaatgataaatactctatcaagcttattatctcggaaacttgtgaaaggagcttcctag

SEQ ID NO: 1543 - DNA, 753 bp, Streptococcus pneumoniae
atgggaacattttcagtcagacacctagacttattttacggggattttcaagccttaaaaaatatttcgattcaattaccagaaagacagattactgccttgataggcccatctggttgtggtaaatcaacttttctaaaaacccttaatcggatgaacgatttggttccttcttgccatattgaaggccaagtcctcttagatgagcaagatatttatagtagcaaattcaaccttaatcagctacgtaagcgtgtagggatggtttttcaacagcctaatccctttgccatgtctatctatgataacgtggcttatggcccaaggacacatggtattcgagacaaaaaacaattagatgccttagtggagaaatctttaaaaggggcagccatttgggaagaagtcaaagatgatcttaaaaagagtgccatgtccttatctggcggtcagcagcaacgcctttgcattgcgcgagctttagcagtagaacctgatattctgttaatggatgagccgacttcagccttagaccctatctccactttaaaaattgaagacctcattcagcaactaaaaaaggattatacgattatcattgttacccataacatgcaacaagcttcacgtatttcagataaaactgcttttttcttaacaggagaaatttgcgaatttggagataccgttgacgtgtttaccaatccaaaagatcagcgcacagaagactatatttcaggacggttcggataa

SEQ ID NO: 1544 - DNA, 651 bp, Streptococcus pneumoniae
atgagaaatcaatttgacttagaattgcatgaattagaacaatcctttttaggactagggcaacttgtccttgaaacagcttcaaaagccttactggccttagcctccaaagacaaggagatggcagagctaattatcaataaggatcatgctatcaaccaaggtcaaagcgctatcgaattggcctgtgcccgtttgttagccttgcagcagccacaagtgtctgaccttcgatttgtaattagcatcatgtcttcttgttcagaccttgaacgtatgggagaccatatggcaggcattgccaaagctgttttgcaactaaaagaaaatcaactagcccctgacgaagaacagttacaccaaatgggtaaattatccctcagcatgctagccgatttattggttgcctttcctttgcaccaagcctcaaaagctattagtattgctcaaaaagatgaacagattgaccaatattattatgccttatcaaaggaaatcattggacttatgaaagaccaagaaacctcaattcccaatggaactcaatacctttatatcatagggcatctggaacgcttcgctgattacattgctaacatttgtgaacgcctagtctacctagaaacaggagaactggtggatttgaattaa

SEQ ID NO: 1545 - DNA, 426 bp, Streptococcus pneumoniae
ttgaacaatttaagcagtgtagatagtgaggagctgtttcaattctatcgtgaacgagggaatgctgaaaactttatcaaagaaaggaaagcaggattctttggggataagacagatagttcgaccatgattaagaatgaagtacgtatgatgatgggctgtctggcttataatctctacctctttttaaagcagctagctggtgatgaagtaaaggccttgactatcaagcgttttcgacgtctcttccttcatattgccggaaaatatgtctctactgctagacgacatattctcaaattctcaagtctatacgcctattcaaaacagtttcaagccttatttgatacaatctgccagataaatctgatactccctgttccatatagagctagagggcaggggaaaacatgcctaacagaataa

SEQ ID NO: 1546 - DNA, 219 bp, Streptococcus pneumoniae
atgcctaacagaataagtcaccttattttaaaaatcgagcatcaaaccaagggaggagtctacccttttttaggaaaaaatcaagacaaatctcctcaattatgtctcgaacatcagaaattaagcaaaatcaccagaaggacagtatttcaactagcttttctggtaatttttgaactgtgtagttcgttagtgccagatatgaataatttgggatga

SEQ ID NO: 1547 - DNA, 459 bp, Streptococcus pneumoniae
gtgagaagaaatctgatagatagtttgattcagtatatgcttataataggggtaaacaactcaggaggttcttgtaggttgcgagagtttggcgaaaaaattaaaagattacgtttggctaaaaaaatcagtcgttcagaattttgtggtgatgagtctgaattaagtatccgtcaattaattagaattgaaaatggagaatccagaccaacactaacaaagttaaaatatatcgctgaacgtttgggggttgaagattacaagttgatgccaagttatatagagttggataaggaatacctagaattgaagtatttcttgatgagaactcctacatacgaagatgaaactatcgcccaaaagaaagagagtgttttgataagatttttgaagagtattatgataggctacctgaggaagaaagatttatcatcccaaattattcatatctggcactaa

SEQ ID NO: 1548 - DNA, 1017 bp, Streptococcus pneumoniae
atggaaaaacaaaccgtcgccgtcttggggcctggttcttggggaaccgccctttcacaagtcttaaatgacaatggacacgaggtacgtatttggggaaatcttcccgagcaaatcaatgaaattaatacacaccatactaataagcactactttaaagatgtcgttctagacgaaaatatcattgcctacaccgacttagcagaaacattgaaagatgtggatgcgattttgtttgttgtcccaacaaaagtgacacgacttgttgcccaacaagttgcacaaaccttggaccataaggttatcatcatgcacgcatcaaagggattagaacctgatagccataaacgattatcaaccattcttgaagaagaaattcctgaacatctccgtagtgatatcgtcgttgtttcagggcctagtcatgcagaagagaccattgtgcgtgacctaactttaataactgctgcttctaaagatttacaaacagctcaatacgttcaggagctatttagtaatcactacttccgactttataccaatacggatgttatcggggttgaaactgctggtgctcttaaaaatattattgctgtcggtgctggagctttacatggtcttggatttggtgataatgctaaggcagccatcatcgctcgaggtttagcagaaatcacccgcctaggggtagcactcggggccagtccattgacctatagcggcttatctggtgtgggagatttgatcgtaacgggaacttccatccactctcgtaactggagagctggagatgctctcggacgaggagaatccctagctgatatagaagctaatatgggcatggtaatcgaaggaatttcaacgactcgagcagcctatgaactagcccaagaacttggagtctatatgcccattacacaggctatttaccaagttatttatcacggaaccaatatcaaagatgccatttatgacatcatgaacaatgaatttaaagcagaaaatgagtggtcttaa

SEQ ID NO: 1549 - DNA, 900 bp, Streptococcus pneumoniae
atgacatcaaaagttagaaaggcagttatccctgctgctggactaggaactcgatttttaccagcaaccaaggcccttgccaaagaaatgttgccaatcgtagacaaaccaactatccagtttatcgtggaagaagctctcaaatcaggtattgaagatattctagttgtcactggtaaatcaaaacgttctattgaggaccacttcgattcaaacttcgaattggaatataacctcaaagaaaaagggaaaacagatcttttgaagctagttgatgaaacaactggcatgcgtctgcattttatccgccaaactcatccacgcggtctcggagatgctgttttgcaagccaaggctttcgtcggaaatgaaccttttgtcgttatgcttggtgatgacttgatggatatcacagacgaaaaggctgttccacttaccaaacaactcatggatgactacgagcgtacccacgcgtctactatcgctgtcatgccagtccctcatgacgaagtatctgcttacggggttattgctccgcaaggcgaaggaaaagatggtctttacagtgttgaaacctttgttgaaaaaccagctccagaggacgctcctagcgaccttgctattatcggacgctacctcctcacgcctgaaatttttgagattctcgaaaagcaagctcctggtgctggaaatgaaatccaacttactgatgcaatcgatactcttaataaaacacagcgtgtttttgcccgtgaatttacaggagctcgttacgacgttggggataagtttggctttatgaaaacatctattgactacgccctcaaacacccacaagtcaaagatgatttgaagaattacctcatccaacttggaaaagaattgactgagaaggaataa

SEQ ID NO: 1550 - DNA, 675 bp, Streptococcus pneumoniae
atgaaaaaagataaggcattttttgaaccttatctttttattttattccttctcagtcaattcttttccaagttggatgaggtaattcttcaaatcatctttgacttgtgggtgtttgagggcgtagtcaatagatgttttcataaagccaaacttatccccaacgtcgtaacgagctcctgtaaattcacgggcaaaaacacgctgtgttttattaagagtatcgattgcatcagtaagttggatttcatttccagcaccaggagcttgcttttcgagaatctcaaaaatttcaggcgtgaggaggtagcgtccgataatagcaaggtcgctaggagcgtcctctggagctggtttttcaacaaaggtttcaacactgtaaagaccatcttttccttcgccttgcggagcaataaccccgtaagcagatacttcgtcatgagggactggcatgacagcgatagtagacgcgtgggtacgctcgtagtcatccatgagttgtttggtaagtggaacagccttttcgtctgtgatatccatcaagtcatcaccaagcataacgacaaaaggttcatttccgacgaaagccttggcttgcaaaacagcatctccgagaccgcgtggatgagtttggcggataaaatgcagacgcatgccagttgtttcatcaactag

SEQ ID NO: 1551 - DNA, 681 bp, Streptococcus pneumoniae
ttgatgaaggaaatctttgatagacgttaccctgtgacgagtttcttcctcttagtgacgaccttggtatttttactaatgttggtcactacaggcggaaactttgacagggcagatacattatttcgatttggagccatgtatgggccagctattcgcctctttcccgagcaggtttggcgtctcttgtctgccatttttgttcatattgggtgggaacatttcattgttaatatgctttcactttattatcttggaaggcaggtagaggagattttcggttctaagcagtttttctttctctatcttttatcaggaatgatgggcaatctctttgtttttgtatttagtcctaaatccttagcagcaggcgcctctacctctctttatgggctatttgccgcgattattgttcttcgctatgcaactcgcaatccttatatccaacagctagggcaatcctatctgacactttttgtggttaacattattggaagtgttctgattccaggaatcagcctagcaggccatatcggtggtgcagttggtggcgcatttctagcagttatctttccagttagaggagaaaaacggatgtataacaccagccagagattaggagcggtagtcttgttcgtaggactcgccattttgcttttctacaagggaatgggaatgtga

SEQ ID NO: 1552 - DNA, 546 bp, Streptococcus pneumoniae
ttgtatatgaaatcggaattacgcaagcaagtcttgcatgaaatgaaggctttatctcaagaacaaaaacaggctatagaccaagctttaaccgagcgaattttacaacaccccttttatcaagaagccaaggtcatcgcaacctacctctctttttctcatgagtttcaaacgcgggaactgattgagcaggcgctgaaggacggcaagaaggttttaatacccaaaacttatcccaaggggcgcatggactttgtagtctatgatccgcagcagttggtaaaaactgcctttgccttactggagccacagggagatttggaagtggtggatgtatctcagattgatttgattcatgttcctggcctggcttttacgacggatggatatcggattggatatggtggaggttattatgaccgctatctggaacatttttctggtcatactttgagtacggttcatccttgtcaaattcaggactttatacctgaaaaccatgatattcctgttcaggaggtattaattgatgaaggaaatctttga

SEQ ID NO: 1553 - DNA, 1131 bp, Streptococcus pneumoniae
atgttagatttgattcagactagacgagatttacaccagataccagagattggcttggaggagttcaagactcaggcttatttgctggatgtgattgagaaattgactacgggcaaggattttgttcaaattcgtacttggcggacagggattttggtctacctgcagggaagtcagccggagcgaaccattggttggcggacagatattgatggcctgcctatcgtcgaacaaacaggtctaccttttgcttctcaacaccaaggtcgcatgcatgcctgtggtcatgattttcatatgaccattgccttaggctgtcttgagcgcgcccttgaggagcaacccaagaataatctgctctttctatttcagcctgctgaagaaaatgaagctggtggtatgctcatgtatgaggacggtgcttttggagattggttgccaaaccaattctatggtctccatgttcgtccagatttgaaagtcggccagattgcgactaatactcatacactctttgcaggaacttgcgaggtgaagatccgtttcaaaggcaaaggtggccacgcagcttttcctcatgaagccaatgacgccttggtggcggctagttactttgtgacccaagtgcagtcagttgttagccgcaatgtcaacccaatcgagggagcagtggtgaccttcggcgtttttcaagctggaaccaccaacaatgtcatcacagacacagcttttttacatggaactattcgtgccttgacacaggacatgagtctcttggtgcaaaagagggtaaaaacagttgcagaaggggttgcagctgcctttgatatggaagtcgaagtggaactcaaacaaggtggatacctacctgttgagaacaatccagccttggcgcgtgaactgatggacttctttgacgagaaagacggaatcgagttgattgatatcgaacctgctatgacaggcgaggactttggttatctcctttcaaaggttgatggcgtgatgttttggctaggtatcgatagtccctacgctcttcatcaccctcaaatgagtcctaaggaagaagtcttagctattggggtggctgcggtgtctagtttcctgaaaaagaaggcagcagaatag

SEQ ID NO: 1554 - DNA, 699 bp, Streptococcus pneumoniae
atgactgctacaaaaatgaacgctcaagaaattatccaatttatcgccaatgctgaaaagaaaaccagtgtcaaagtaacctttgaggggcaactcgcaactgctgtgcctagctctgttgtcaaactaggaaatgtcctattcggagactggaaggacgtggctccgcttcttgaaggtttggtagaaaatcaagattatgttgtcgagcaagatgctcgtaattctgcagttcctttgctagataagcgtgctatcaacgctcgtatcgagccaggtgctattatccgtgaccaggtggaaattggtgacaatgctgttatcatgatgggagctgttatcaatatcggtgctgaaatcggtgctggaaccatgattgacatgggtgccatccttggtggccgtgccatcgttggaaaaaatagccacgttggtgcaggtgcagttttggcaggtgtgattgagccagctagtgctgaaccagtccgtgtcggagacaatgttcttatcggtgctaatgcagtggttatcgaaggagtccaaatcggtagtggttcagttgtcgcagcaggagctattgttacccaagatgtcccagaaaacgtggtagtagcaggtgttccagctcgtattatcaaagaaattgatgcccaaactcaacaaaaaacagcgctagaggatgcgcttcgtaccttgtaa

SEQ ID NO: 1555 - DNA, 459 bp, Streptococcus pneumoniae
gtttgggcatcaatttctttgataatacgagctggaacacctgctactaccacgttttctgggacatcttgggtaacaatagctcctgctgcgacaactgaaccactaccgatttggactccttcgataaccactgcattagcaccgataagaacattgtctccgacacggactggttcagcactagctggctcaatcacacctgccaaaactgcacctgcaccaacgtggctattttttccaacgatggcacggccaccaaggatggcacccatgtcaatcatggttccagcaccgatttcagcaccgatattgataacagctcccatcatgataacagcattgtcaccaatttccacctggtcacggataatagcacctggctcgatacgagcgttgatagcacgcttatctagcaaaggaactgcagaattacgagcatcttgctcgacaacataa

SEQ ID NO: 1556 - DNA, 216 bp, Streptococcus pneumoniae
atgattttggcaggtttgtttagcaatgtcctctcgccggtttatgagctttcctttactcttgatatttggagtatcttgatttgcctcattatcgctttctttggaacggcttttgcttttttcatttccatgaaggctgtgtccttggtttctcctttggtgggttttccgcttactcagtgcgcagtgaacctctctcttctgctctcttga

SEQ ID NO: 1557 - DNA, 834 bp, Streptococcus pneumoniae
ttgctattggtggaagtgatgcggattatcagaatgcttggtctagtattgtggggagtctaccaactccatccagctccagcagttcaagtagtagttctagcgatagcagtaactcaagtactacacgaccttcttcaagggcgagacgataattctctaaatgaagtggccaatcaatggattgccacttttttcctttcgtgttacaataagggtatgaatcagtatcagaaaaagattgttaacggaaaaatttattcgctcctatccggcttaatatggggaatctgtggaattttaggaaagtacttctttactcattatcaggtgtcttcgggctggattacctctatgcgtttgacactggcagggagtcttgtactcatttggtctgcaatacaattaaaatcgcaagtgctagatatttggcgagacaagaaaaattacctgccctttttagcctatgctattttggggattttttcagttcagtattttttctatctctgtgtagaatactcaaatgctacgacagcaactattttacagtttattagccctgtctttatcctcttttataatcgcttggtttatcaaaaacgagcgtcaaaaagcgctgttttctatgttttggttgccatgctgggtgtttgcttgatggcgacaaagggagatctctctcagttatccatgacgccgctagctcttataacaggtttgctgagtgccatgggtgttatgtttaatgttatcttgccccaaccttttgctaagcgttatggttttgttctaacgagtttgctgggggatgattttggcaggtttgtttag

SEQ ID NO: 1558 - DNA, 2463 bp, Streptococcus pneumoniae
atgcaaaatcaattaaatgaattaaaacgaaaaatgctggaatttttccagcaaaaacaaaaaaataaaaaatcagctagacctggcaagaaaggttcaagtaccaaaaaatctaaaaccttagataagtcagtcattttcccagctattttactgagtataaaagccttatttaacttactctttgtactcggttttctaggaggaatgttgggagctgggattgctttgggatacggagtggccttatttgacaaggttcgggtgcctcagacagaagaattggtgaatcaggtcaaggacatctcttctatttcagagattacctattcggacgggacggtgattgcttccatagagagtgatttgttgcgcacttctatctcatctgagcaaatttcggaaaatctgaagaaggctatcattgcgacagaagatgaacactttaaagaacataagggtgtagtacccaaggcggtgattcgtgcgaccttggggaaatttgtaggtttgggttcctctagtgggggttcaaccttgacccagcaactaattaaacagcaggtggttggggatgcgccgaccttggctcgtaaggcggcagagattgtggatgctcttgccttggaacgcgccatgaataaagatgagattttaacgacctatctcaatgtggctccctttggccgaaataataagggacagaatattgcaggggctcggcaagcagctgagggaattttcggtgtagatgccagtcagttgactgttcctcaagcagcatttttagcaggacttccacagagtcccattacttactctccttatgaaaatactggggagttgaagagtgatgaagacctagaaattggcttaagacgggctaaggcagttctttacagtatgtatcgtacaggtgcattaagcaaagacgagtattctcagtacaaggattatgaccttaaacaggactttttaccatcgggcacggttacaggaatttcacgagactatttatactttacaactttggcagaagctcaagaacgtatgtatgactatctagctcagagagacaatgtctccgctaaggagttgaaaaatgaggcaactcaaaagttttatcgagatttggcagccaaggaaattgaaaatggtggttataagattactactaccatagatcagaaaattcattctgccatgcaaagtgcggttgctgattatggctatcttttagacgatggaacaggtcgtgtagaagtagggaatgtcttgatggacaaccaaacaggtgctattctaggctttgtaggtggtcgtaattatcaagaaaatcaaaataatcatgcctttgataccaaacgttcgccagcttctactaccaagcccttgctggcctacggtattgctattgaccagggcttgatgggaagtgaaacgattctatctaactatccaacaaactttgctaatggcaatccgattatgtatgctaatagcaagggaacaggaatgatgaccttgggagaagctctgaactattcatggaatatccctgcttactggacctatcgtatgctccgtgaaaagggtgttgatgtcaagggttatatggaaaagatgggttacgagattcctgagtacggtattgagagcttgccaatgggtggtggtattgaagtcacagttgcccagcataccaatggctatcagaccttagctaataatggagtttatcatcagaagcatgtgatttcaaagattgaagcagcagatggtagagtggtgtatgagtatcaggataaaccggttcaagtctattcaaaagctactgcgacgattatgcagggattgctacgagaagttctatcctctcgtgtgacaacaaccttcaagtctaacctgacttctttaaatcctactctggctaatgcagattggattgggaagactggtacaaccaaccaagacgaaaatatgtggctcatgctttcgacacctagattaaccctaggtggctggattgggcatgatgataatcattcattgtcacgtagagcaggttattctaataactctaattacatggctcatctagtaaatgcgattcagcaagcttccccaagcatttgggggaacgagcgctttgctttagatcctagtgtagtgaaatcggaagtcttgaaatcaacaggtcaaaaaccagggaaggtttctgttgaaggaaaagaagtagaggtcacaggttcgactgttaccagctattgggctaataagtcaggagcgccagcgacaagttatcgctttgctattggtggaagtgatgcggattatcagaatgcttggtctagtattgtggggagtctaccaactccatccagctccagcagttcaagtagtagttctagcgatagcagtaactcaagtactacacgaccttcttcaagggcgagacgataa

SEQ ID NO: 1559 - DNA, 1257 bp, Streptococcus pneumoniae
atgcacatttttgatgagctaaaagatcgtggtttgatatttcaaacgactgatgaagaagctttgcgtaaagccctagaagaaggtcaagtttcttattatactggctacgatccaactgctgacagccttcacctaggccaccttgtcgcaatcttgacaagtcgtcgcttgcaactagcaggtcacaaaccttatgcgctcgttggcggtgctacaggtctcatcggagatccgtccttcaaagatgctgaacgtagtctccaaacaaaagacacagtagatggctgggtcaagtctatccaaggacaactttctcgttttcttgactttgaaaatggcgaaaacaaggctgtcatggtcaacaactacgactggtttggcagcatcagcttcattgacttcctccgtgatattggaaaatacttcacggtcaactacatgatgagtaaggaatctgttaaaaaacggatcgaaacaggaatttcttacactgagttcgcttaccaaatcatgcaagggtatgacttcttcgtccttaaccaagaccataatgtcactcttcaaatcggtggttctgaccagtggggaaatatgacagctggtaccgaattgcttcgtcgtaaggcggacaagactggtcacgttatcactgttccactaatcacagatgcaactggtaagaaatttggtaaatcagaaggaaatgccgtctggctcaatcccgaaaagacttctccatacgaaatgtaccaattctggatgaacgtgatggacgctgacgctgttcgcttcttgaaaatctttactttcttgtcacttgatgagattgaagatattcgtaaacaatttgaagcagcgccacacgaacgcttggctcaaaaagtcttggctcgtgaagttgttacacttgttcacggagaagaagcctacaaagaagcacttaacatcactgagcaactctttgcaggaaacatcaaaaacctttctgtcaaagagctcaaacaaggacttcgtggtgtgccaaactaccaagtacaggcagacgaaaacaacaatatcgtggaactgctcgtctcatctggtatagttaactcaaaacgccaagcccgtgaagacgtccaaaacggagccatctacgtaaacggcgaccgcatccaagagcttgactatgtcttgagtgacgctgataagttagagaatgaactgactgttatccgtcgtgggaagaaaaaatactttgtattgacttactaa

SEQ ID NO: 1560 - DNA, 2073 bp, Streptococcus pneumoniae
gtgaataatatgtcttttaaagtgctacatagaggataccaacatatccgactatcatcttctttttcacttaccttggatattcaagactatcttcgttccttggcgagagatgaaaaggggattgagtctatccagttttacatggatcaacagcactttactctacgcataaaagaaggcttttctgtattagataatgcagaagcctttttaaaaagaattgataaagggaaagtttctgagttgatgactcttcccattcgtagagaagagagtgcttattctattgtttcaggtgcagcggttaagcgtgtactttttcgtagttttgtgccgtatcctattcgctatatatggacttgttatcaggctttgggttatattagagaagcctatcaaacactagcgcgtaaggaactaacgatggaagtcttggactgttcggctattttattgtctttgtttatgaaccaatcaaagacagctagcaatatcatgtttatgcttgatttggggaatcatttagatcagtggtccttgaaaaaaactgcaacagatttagaacagagtcttcttgcaaaagagagcgatgtattcctagtacagggcgatacggttgttagtatcaagagttccgatgttcaaataggagatgtcttgatcttatctcaaggaaatgaaattctgtttgatggacaagtagtttcaggtttaggtatggtcaacgaaagttccttgacaggagagagttttccagttgaaaaaagagagtctgatttggtttgtgcaaatacagtattagaaactggagagttacgcattcgtgtaacagataatcagatgaacagccgtattttacagctgattgagttgatgaagaaatctgaagaaaacaagaaaacgaaacaacgctatttcatcaagatggcggataaagtcgtcaaatataatttcttgggggctgggctgacttacctattgacaggttctttttctaaggctatttctttcctattggtcgatttctcctgcgctttgaaaatctctactcctgtagcttatttgacagttatcaaggaagggttgaaccgtgaaatggtgattaaggatggagatgttctggagaaatatctggaagttgatactttcttgtttgataagacaggaacaatcacaactagttatcctatagttgaaaaggtgttaccttttggagactatagtgaggaagatattctcagaatcagtgcctgtcttgaggaacacatttatcatcctattgctaatgccatcgtcaagcaagctgagatagagggaattgaacatgaggaaatgcatgggaaactccaatatatcgcaagcaaggggatcaaatctcatatagatggccaaccagttcttattgggaattatgtcttgatgcaggatgagcagattcatatcagttcagaacaaaatgctttaattgaagagtacaagagtcactacaatctcttattcttggcttatcaaaatgaattgattggaatgttctgcattcatactcctttgagaaaagaagcaaaaacagccttggataaacttaaggcacaggggaaaaaattgattctggcaacaggagacaccttgattaggacagaggaattagtcaaagatttgccctttgatcaggtctatacagacttgaaacctgatgggaaatttgagttagtagagaaactgcagaaagcaggtcacactattttgatggttggagatggattgaatgactcagcggctttaactctatcagatatcggtgtggtgatgaatgagagtgcagatatttctaagcagatgagtgatatcttattgttagataatcgtttggatttcttccaagagttggattcgttatcatcatctttgcaaacactcatcaagaaaaatattcaggataccgttgtcgtaaatagtagtttgattggctttggcttatttaattggttcagtccttcaaatctctctatcttacataatctaacaaccttgcgcattgtcctgcgtagcctgtctattaaaaatagatag

SEQ ID NO: 1561 - DNA, 195 bp, Streptococcus pneumoniae
ttgaaaatcttagcaagtaaggaagctaaaaaaggttattctaaagctttggctaaggcttacaagttgaaagacgagctagatgcatctgtttctgttgtgaagcaacatggagacgatgtcttgcaagatgccaaatatttgtacgagcaagagaaaaaagaagagcaattagatagccttataggtgaataa

SEQ ID NO: 1562 - DNA, 264 bp, Streptococcus pneumoniae
atgaatacaaatctcaagcccaaacttcagcgttttgcttctgcgactgcctttgcctgtcctatctgtcaagaaaatctgactctgttagagactaatttcaagtgctgcaaccgtcattcttttgacttggcgaaatttggctatgtcaatctagcacctcaaatcaagcaatctgctaactatgacaaggaaaattttcaaaaccgtcaacaaatccgtagaagccggcttttaccaagctatcttagatgctgtatctga

SEQ ID NO: 1563 - DNA, 591 bp, Streptococcus pneumoniae
atgacaaggaaaattttcaaaaccgtcaacaaatccgtagaagccggcttttaccaagctatcttagatgctgtatctgacttgcttgcaagctcaaaaactaccataacaattttggatatcggttgtggtgaaggattctattctcgcaaactacaagaaagtcactctgaaaaaactttctatgcctttgacatctccaaagattcagtccaaatcgctgctaaaagtgaacccaactgggcagtcaattggttcgttggcgacttggcacgccttcctataaaagacgctagcatggatatcctgcttgatatcttctcacctgccaactatggagaatttcgtcgcgttttatccaaagatggtatcttgataaaggttatcccaactgaaaatcacctcaaagaaatccgtcaaagagtacaggaccagctgacaaacaaggagtattctaaccaagatatcaaggagcatttccaggaacactttaccatcctatctagtcaaactgcctctctgactaagactatcacagcagaacaactgcaagccctactcagtatgaactcctctcctcttgcacgttga

SEQ ID NO: 1564 - DNA, 171 bp, Streptococcus pneumoniae
ttgtctctattatttattattttaaatttatttattttgtataagatctattctttgaggcgggaaaaatcgaaatacttgatttatacggcctatatcatatttggggtaaatgtagtatatggtattcaatggttattaaaagaactgatttcaactatttccccttaa

SEQ ID NO: 1565 - DNA, 573 bp, Streptococcus pneumoniae
atgaacaaattaatgaaatttatttcggtttttttgacgtcaattgtgttaattgtatcagcgattccaagtgtttcagctgtatacgcttctgaacaagtatcacaaattgaaacaaatatggaacttcaacctgtcacttctctaacagaagaacaaatcaatacacttgcaaacgaaatccaatcttttcatccagacgtctcacaacaatggatcaaagaagtaattaaccgacaattacaaggcgattatacaatcccacctacatactctccatttagagcagcttggcaaggtattacagttaatcaaatgggtgctctattagatactgcaatagctttagcattaggaggaactactgcaggccttgcaaatctaattaaagtaaaaggaaaacatgcagcaaaaagtgctattcgttcagcaatttctagatatctaggtagttggtttgtaaatgatgttgctttagaattcgctatgaatttattatcaccggggacttatttagcacaattatgggataaaaatgatgccattcctaacaacagaaggattaacttttaa

SEQ ID NO: 1566 - DNA, 2259 bp, Streptococcus pneumoniae
atgttatcactacaagaatttgtacaaaatcgttacaataaaaccattgcagaatgtagcaatgaagagctttaccttgctcttcttaactacagcaagcttgcaagcagccaaaaaccagtcaacactggtaagaaaaaagtttactacatctcagctgagttcttgattggtaaactcttgtcaaacaacttgattaaccttggtctttacgacgatgttaaaaaagaacttgcagctgcaggtaaagacttgatcgaagttgaagaagttgaattggaaccatctcttggtaatggtggtttgggacgtttggctgcctgctttatcgactcaattgctactcttggtttgaatggtgacggtgttggtcttaactaccactttggtcttttccaacaagttcttaaaaacaaccaacaagaaacaattccaaatgcatggttgacagagcaaaactggttggttcgctcaagccgtagctaccaagtaccatttgcagactttactttgacatcaactctttacgatattgatgttactggttatgaaacagcgactaaaaaccgcttgcgtttgtttgacttggattcagttgattcttctattattaaagatggtatcaactttgacaagacagatatcgctcgcaacttaactctcttcctttacccagatgatagtgaccgtcaaggtgaattgctccgtatcttccaacaatacttcatggtttcaaacggtgcgcaattgatcatcgacgaagcaatcgaaaaaggaagcaacttgcatgaccttgctgactacgcagttgtccaaatcaacgatactcacccatcaatggtgattcctgaattgattcgtcttttgactgcacgtggtatcgatcttgacgaagcaatctcaattgttcgtagcatgactgcctacactaaccacacaatccttgctgaagcgcttgaaaaatggcctcttgaattcttgcaagaagtggttcctcacttggtaccaatcatcgaagaattggaccgtcgtgtgaaggcagagtacaaagatccagctgttcaaatcatcgatgagagcggacgtgttcacatggctcacatggatatccactacggatacagtgttaacggggttgcagcactccatactgaaatcttgaaaaattctgagttgaaagccttctacgacctttacccagaaaagttcaacaacaaaacaaacggtatcactttccgtcgttggcttatgcatgctaacccaagattgtctcactacttggatgagattcttggagatggttggcaccatgaagcagatgagcttgaaaaactgttgtcttatgaagacaaagcagctgtcaaagaaaaattggaaagcatcaaggctcacaacaaacgtaaattggctcgtcacttgaaagaacaccaaggtgtggaaatcaatccaaattctatctttgatatccaaatcaaacgtcttcacgagtacaaacgccaacaaatgaacgctttgtacgtgatccacaaataccttgacatcaaagctggtaacatccctgctcgtccaatcacaatcttctttggtggtaaagcagctccagcctacacaatcgctcaagatatcattcacttgatcctttgcatgtcagaagttattgctaacgatccagcagtagctccacacttgcaagtagttatggttgaaaactacaacgttactgcagcaagcttccttatcccagcatgtgatatctcagaacaaatctcacttgcttctaaagaagcttcaggtactggtaacatgaaattcatgttgaacggagctttgacacttggtactatggacggagctaacgtggaaatcgctgagttggttggtgacgaaaacatctacatctttggtgaagattcagaaactgttatcgacctttacgcaaaagcagcatataaatcaagcgaattctacgctcgtgaagctatcaaaccattggttgacttcattgttagcgatgcagttcttgcagctggaaacaaagagcgcttggaacgtctttacaatgaattgatcaacaaagactggttcatgactcttcttgacttggaagactacatcaaagtcaaagagcaaatgcttgctgactacgaagaccgtgacgcatggttggataaagtcatcgttaacatttctaaagcaggattcttctcatctgaccgtacaatcgctcagtataacgaagacatctggcacttgaactaa

SEQ ID NO: 1567 - DNA, 1518 bp, Streptococcus pneumoniae
atgaaaaaacgtcaaagtggtgtgttgatgcacatctcttctcttccaggagcttacggaatcggatcatttggtcaaagtgcttacgacttcgttgatttcttggtccgtacaaaacaacgttactggcaaatccttccattaggagcaactagttacggggattctccttaccaatctttctcagccttcgcaggaaacactcattttatcgatttagatatcttggtggagcaaggtttgttggaagcaagtgaccttgaaggagttgactttggtagcgatgcgtctgaagttgactatgctaaaatctactatgcacgtcgtcctcttttagaaaaagcggtgaaacgtttctttgaagtcggagatgttaaagattttgagaaatttgctcaagacaaccaatcatggcttgagctctttgctgagtatatggctatcaaagagcattttgacaatcttgcttggactgaatggccagatgcagatgctcgtgctcgtaaagcttcagcacttgaaagctatcgtgagcaattggcagacaagttggtttaccaccgtgtgactcaatacttcttcttccaacaatggttgaaattgaaagcttacgctaacgacaaccacatcgaaatcgttggggacatgccaatctacgtagcggaagattcaagtgatatgtgggcaaatccacatctcttcaaaacagatgtcaatggtaaggctacttgtatcgcaggatgcccaccagatgagttttctgtaactggtcagctttggggtaatccaatctatgactgggaagcaatggacaaagacggctacaaatggtggattgaacgcttgcgtgaaagcttcaaaatctacgatatcgttcgtatcgaccacttccgtggcttcgaatcttactgggaaatccctgctggttccgatacagcagcacctggtgagtgggtgaaaggtccaggctacaagctttttgcagccgttaaggaagaacttggtgagctaaacatcatcgcagaagaccttggcttcatgacagatgaagtgatcgaattgcgtgaacgtactggcttcccaggaatgaagattcttcaatttgccttcaacccagaagacgaaagcattgatagcccacacttggcacctgctaactcagttatgtacacaggaacacacgataacaatacggttcttggttggtaccgtaatgagattgatgatgcgactcgtgagtacatggctcgttacacgaaccgtaaagaatacgaaacagtggtacacgctatgcttcgtacagtattttcatcagttagctttatggcaattgcaactatgcaagatttactagaattggatgaggcagctcgtatgaacttcccatctacccttggtggaaactggtcttggcgtatgactgaagatcaattgacaccagctgtcgaggaaggtttgcttgacttgacaacaatttatcgccgaattaatgaaaatttggtagatttaaagaaataa

SEQ ID NO: 1568 - DNA, 1272 bp, Streptococcus pneumoniae
atgtcatctaaatttatgaagagcactgcggtgcttggaactgttacacttgctagcttgcttttggtagcttgcggaagcaaaactgctgataagcctgctgattctggttcatctgaagtcaaagaactcactgtatatgtagacgagggatataagagctatattgaagaggttgctaaagcttatgaaaaagaagctggagtaaaagtcactcttaaaactggtgatgctctaggaggtcttgataaactttctcttgacaaccaatctggtaatgtccctgatgttatgatggctccatacgaccgtgtaggtagccttggttctgacggacaactttcagaagtgaaattgagcgatggtgctaaaacagacgacacaactaaatctcttgtaacagctgctaatggtaaagtttacggtgctcctgccgttatcgagtcacttgttatgtactacaacaaagacttggtgaaagatgctccaaaaacatttgctgacttggaaaaccttgctaaagatagcaaatacgcattcgctggtgaagatggtaaaactactgccttcctagctgactggacaaacttctactatacatatggacttcttgccggtaacggtgcttacgtctttggccaaaacggtaaagacgctaaagacatcggtcttgcaaacgacggttctatcgtaggtatcaactacgctaaatcttggtacgaaaaatggcctaaaggtatgcaagatacagaaggtgctggaaacttaatccaaactcaattccaagaaggtaaaacagctgctatcatcgacggaccttggaaagctcaagcctttaaagatgctaaagtaaactacggagttgcaactatcccaactcttccaaatggaaaagaatatgctgcattcggtggtggtaaagcttgggtcattcctcaagccgttaagaaccttgaagcttctcaaaaatttgtagacttccttgttgcaactgaacaacaaaaagtattatatgataagactaacgaaatcccagctaatactgaggctcgttcatacgctgaaggtaaaaacgatgagttgacaacagctgttatcaaacagttcaagaacactcaaccactgccaaacatctctcaaatgtctgcagtttgggatccagcgaaaaatatgctctttgatgctgtaagtggtcaaaaagatgctaaaacagctgctaacgatgctgtaacattgatcaaagaaacaatcaaacaaaaatttggtgaataa

SEQ ID NO: 1569 - DNA, 1293 bp, Streptococcus pneumoniae
atggaaaagcaacaacctagtaaagcagccctgctgtctatcattcctgggttaggacagatttacaataaacaaaaagccaaaggttttatcttccttggtgtaaccatcgtatttgtcctttacttcctagcacttgcaacccctgaattgagcaacctcatcactcttggtgacaaaccaggtcgtgataattccctctttatgctgattcgtggtgccttccatctaatctttgtaatcgtttatgtactcttttatttctcaaatatcaaagatgcacatacgattgcaaaacgcattaacaatggaattccagttccacgcacactcaaagacatgatcaaagggatttatgaaaatggcttcccttacctcttgatcattccatcttatgttgccatgaccttcgcgattatcttcccagttatcgtaaccttgatgatcgcctttaccaactacgacttccaacacttgccaccaaacaagttgttggactgggttggtttgaccaactttacaaacatttggagcttgagtaccttccgttctgcctttggttctgttctttcttggactatcatttgggctttggcagcttctactttacaaatcgtaattggtatcttcacagctatcattgctaaccaaccatttatcaaaggaaaacgtatctttggtgttattttccttcttccttgggctgtcccagccttcatcactatcttgacattctcaaacatgtttaacgatagtgtcggtgctatcaacactcaagtattgccaatcttggctaaattccttcctttccttgatggagctcttattccttggaaaacagacccaacttggactaagattgccttgattatgatgcaaggttggctcggattcccatacatctacgttctgaccttgggtatcttgcaatctattcctaacgacctttacgaagcagcttatattgacggtgccaacgcttggcaaaaattccgcaacatcactttcccaatgattttggctgttgcggcacctactttgattagccaatacaccttcaactttaacaacttctctatcatgtacctcttcaatggtggaggacctggtagtgtcggaggtggagctggttcaaccgatatcttgatctcatggatctaccgtttgacaacaggtacatctcctcaatactcaatggcggcagctgttaccttgattatctctatcattgtcatctcaatctctatggttgcattcaagaaactacacgcatttgatatggaggacgtctaa

SEQ ID NO: 1570 - DNA, 843 bp, Streptococcus pneumoniae
atgaataactcaattaaactcaaacgtagactgactcaaagccttacttacctttacctgattggtctatcaattgtaattatctatccactgttgattaccattatgtcagcctttaaagcaggtaacgtctcagcctttaaactagatactaatatcgacctcaattttgataattttaaaggcctcttcactgaaaccttgtacggtacttggtacctcaacactttgattatcgccttaattaccatggctgttcaaacaagtatcatcgtacttgctggttatgcttacagccgttacaacttcttggctcgtaaacaaagtttggtcttcttcttgatcatccaaatggtgccaactatggccgctttgacagccttcttcgttatggcgcttatgttgaacgcccttaaccacaactggttcctcatcttcctctacgttggtggtggtatcccgatgaatgcttggctcatgaaaggctacttcgatacagtgccaatgtctttagacgaatctgcaaaactagacggtgcaggacacttccgccgcttctggcaaattgttcttccacttgttcgcccaatggttgccgtacaagctctctgggccttcatgggacctttcggggactatatcctctctagtttcttgcttcgtgagaaagaatactttactgttgccgtaggtctccaaaccttcgttaacaatgcgaaaaacttgaagattgcctacttctcagcaggtgctatcctcatcgcccttccactctgtattctcttcttcttcctacaaaagaactttgtttcaggacttacaagtggtggcgacaagggataa

SEQ ID NO: 1571 - DNA, 801 bp, Streptococcus pneumoniae
atgcttccatatccattttcctttttttcaagtatttgggggtttcgtaagcccctgtccaaacgtttcgagctcaactggtttcaacttctctttaccagtatcttccttatcagcttgtctatggtacccattgctatccaaaacagctcccaggagacctatccgctagaaacttttatcgataatgtctatgaacctctgacagataaggttgtccaggatctctctgaacatgctacaattgtcgatggcacattaacttatactggaacagttagtcaagcctcttctattgtgattggtccaagtcaaatcaaggaattacctaaggacttgcaactgcatttcgatacaaatgagctagtcatcagcaaggaaagcaaggaactgacccgcatctcttaccgagccattcagactgagagtttcaaaagcaaagacagcttgacccaagcaatttctaaagactggtaccaacaaaatcgtgtctatatcagcctcttcctagttctcggtgcgagcttcctctttggtttgaatttctttatcgtctctctaggagctagtcttctcctttatatcactaagaaatcacgcctcttttcatttagaacctttaaagagtgctatcactttatcttgaactgtttaggattgccgactctaattacacttattttgggattatttggccaaaatatgacaaccttgattactgtacaaaatattctttttgttctgtatctggtcactatcttttataaaacacatttccgtgatccaaattaccataaatag

SEQ ID NO: 1572 - DNA, 987 bp, Streptococcus pneumoniae
atgcccgttacgattaaagacgtggccaaggctgctggtgtttcgccttcaaccgtaacccgtgttattcaaaataaatcaaccattagcgacgaaacaaaaaaacgcgttcgcaaggctatgaaggaactcaactaccacccaaacctcaacgctcgtagcttggtaagcagctatactcaggttatcggattggttcttcctgatgactcagacgccttctaccagaatcctttctttccatcggttctacgtggcatctctcaagtcgcatctgaaaaccactatgccattcagatagcaacagggaaagatgagaaggagcgtctcaacgctatttcacaaatggtctacggcaagcgtgtagatgggctaatctttctctatgcccaagaagaagaccctctcgtaaaactcgtcgcagaagaacagttccccttccttatcttaggtaaatctctatctcctttcatcccacttgtcgacaacgacaatgttcaagctggttttgatgcgactgaatatttcatcaaaaaaggctgcaaacgcattgcctttatcggaggaagtaaaaagctcttcgtgaccaaagaccgtttaacaggctatgaacaggcgcttaaacattacaaacttaccactgacaacaatcgcatctactttgccgacgagtttctggaagaaaagggctataaatttagcaagcgattattcaagcacgatccacaaattgacgctatcatcacaaccgatagcctcctagctgaaggtgtttgtaactatattgccaaacaccagctggatgtccctgttctcagctttgactcggttaatcccaagctcaacttggcagcctatgtcgatatcaatagtttagagcttggtcgtgtttcccttgaaactattctccagattattaatgataataaaaacaataaacaaatttgttaccgtcaattgatcgcccacaaaattatcgaaaaataa

SEQ ID NO: 1573 - DNA, 342 bp, Streptococcus pneumoniae
ttgaaaaaacttgatactatgcgttttattgtgggaagatttacttccttttctactgaaattgagtcttttcccaagatctttttatactcaatgaaaatcaaagtgcaaactaggaagctagccgcaggttgctcaaaacactgttttgaggttgtggatagaactgacgaagtcagctcaaaacatggttttgaggttgtagatgaaactgacgaagtcagctcaaaacatggttttgaggttgcagatgaaactgacgaagtcagctcaaaacatggttttgaggttgcagatagaactgacgaagtcagtaacatatatacggtaaggcgacgctga

SEQ ID NO: 1574 - DNA, 381 bp, Streptococcus pneumoniae
ttaatagtcttcgaaaatctcttcaaaccacgtcagcgtcgccttaccgtatatatgttactgacttcgtcagttctatctgcaacctcaaaaccatgttttgagctgacttcgtcagtttcatctgcaacctcaaaaccatgttttgagctgacttcgtcagtttcatctacaacctcaaaaccatgttttgagctgacttcgtcagttctatccacaacctcaaaacagtgttttgagcaacctgcggctagcttcctagtttgcactttgattttcattgagtataaaaagatcttgggaaaagactcaatttcagtagaaaaggaagtaaatcttcccacaataaaacgcatagtatcaagttttttcaatacctga

SEQ ID NO: 1575 - DNA, 942 bp, Streptococcus pneumoniae
atgaaacaaacaaaacgaattaagcggtggcgctattatctgcgccgctttgcttatcagataaaaattttacgtgtcttacaaagtatctctcgagaaaagtatgatgagaagatttcggcctctctggtctatggttttttatcagcagtagcagttaatttctttttccaaccagggcatgtgtattcgagtggtgcaacaggtctggcacagattatctctgccttgagtaatcactggtttggttttcatattccgatttcgctaaccttctacgccattaacttccctttgatggtcttagcttggtatcagattggccataagttcaccgtctttacctttatcacggtatctatgagttccttctttatccagtttgtccctgtggcaaccttgacggaggatcccattatcaatgccctttttggtggtgttgttatgggtttggggattggttttgctcttcgaaacaatatctccagtggtgggacggatatcgtcagcctgactattcgcaagaaaacgggtaagaatgtcggtagtatttctttcttggtaaatggaactatcatgctgatagcaggtttgacctttggttggaaatacgctctttattctatgattaccatctttgtctctagccgtgtgacagacgcagtctttactaagcaaaagcgtatgcaggccatgattgtgacaaatcatccagagaaggtaattgaaaaaatccataaaaaattgcaccgcggagcaaccatgatccacgatgcagaaggaacctataatcacgagagaaaggcagttttaatcactgtcattacacgtgcagagtttaatgaatttaaacagattatgacacaagtggatccaagctcctttgtctctgtctcggaaaatgttcatattctaggaagatttgtggagatagataattag

SEQ ID NO: 1576 - DNA, 1764 bp, Streptococcus pneumoniae
atgaaacgtagtatgtatgctggtcgtgttcgtgaggaacacatcggacaagaaataaccttgaaaggatgggttggccgtcgtcgtgaccttggtggtttgatctttatcgatcttcgtgaccgtgaaggaatcatgcagttggttatcaaccctgaaaaagtatctgcagaggttatggcaacagctgaaagccttcgtagcgaatttgttattgaggtgactggtcaggtcgctgcgcgtgagcaagccaatgataagttgccaactggtgcggttgagttaaacgtgacagctcttattgtgcttaatacagctaagacaacaccatttgagattaaggatggcattgaggcaaatgacgatacacgtttgcgttaccgttaccttgaccttcgtcgtccagaaatgttggaaaatcttaaacttcgtgccaaggtgacccactctatccgcaactacttggatgagttggagtttatcgacgtggagacaccattcctttctaagtcaacgcctgaaggggcgcgtgattatttagtgccgtctcgtgttaataaggggcatttttacgctcttcctcaaagtccacaaatcacgaaacagctcttgatgaatgctggttttgaccgttactaccaaatcgttaaatgtttccgtgacgaggacttgcgtggagaccgccagcctgaatttactcaggtcgacttggaaacgtccttccttactgagcaagaaatccaagatattacagaaggcttgatcgcgcgcgtgatgaaggaaacaaaaggcatcgaagtaacgctaccattccctcgtatgaaatacgatgatgctatggctctttacggttctgacaagccagatactcgttttgacatgttgcttcaggacttgacagaagtggtcaaaggtgtagactttaaagtcttttcagaagcacctgctgtaaaagcgattgtggtcaaagaagctgcggacaactattcacgtaaagacatcgacaagatgacggaagtagccaaacagtatggtgccaaaggtcttgcttgggtcaaggtggttgatggagaattaaacggaccagttgccaagttcttgactggtatccaagaagaattgacaacagcgcttgctcttgaagataaggacttggttctctttgtggcggatacgcttgaagtggctaatgcaacactgggtgcccttcgtggacgtattgctaaagagcttggcttgattgataatgataagttcaacttcctttgggtggttgactggccgatgtttgaatggtctgaagaagaaggccgctacatgagcgcccaccatcctttcacccttccacaggaagagactgttcacgaattagaaggtgatttggctaaggttcgtgccattgcttacgatatcgtcttgaacggttatgagcttggtggtggtagccttcgtatcaaccaaaaagaccttcaagaacgcatgttcaaggctcttggtttctcaactgaagaagccaatgaccagtttggtttccttcttgaagccatggactatggtttcccaccacacggtggtttggctatcgggcttgaccgttttgtcatgttgcttgctggagaagaaaatatccgtgaagtcattgcctttcctaagaacaacaaggcaactgacccaatgacacaagctccatcaacagtcgctctcaaacaactagaggaactcagcttacaagtagaagaagatgaaacaaacaaaacgaattaa

SEQ ID NO: 1577 - DNA, 432 bp, Streptococcus pneumoniae
ttgctcacgcgcagcgacctgaccagtcacctcaataacaaattcgctacgaaggctttcagctgttgccataacctctgcagatactttttcagggttgataaccaactgcatgattccttcacggtcacgaagatcgataaagatcaaaccaccaaggtcacgacgacggccaacccatcctttcaaggttatttcttgtccgatgtgttcctcacgaacacgaccagcatacatactacgtttcattatttctctcctcttttattctgttactattttaccataaaagcgcaggctcttcatgaaaatcatcagaaaagtttgccagtctttaaaagtcaggtgaaagccctaaaaattagcgctaatactcttcgaaaatctcttcaaaccacgtcagcgtcgccttaccgtaggtattgttactga

SEQ ID NO: 1578 - DNA, 192 bp, Streptococcus pneumoniae
atgaaaatcaaagtgcaaactaggaagctagccgcaggttgctcaaaacactgttttgaggttgtggatagaactgacgaagtcagctcaaaacatggttttgaggttgtagatgaaactgacgaagtcagtaacaatacctacggtaaggcgacgctgacgtggtttgaagagattttcgaagagtattag

SEQ ID NO: 1579 - DNA, 231 bp, Streptococcus pneumoniae
atgaaacgagtaattttattagcagtgattcaggcagtcgttctatttttcatcattggagcgctagcttatgccttcaaaggcgatttcttctataactatctagcagttgtctttgctcctattgcaggtgtactgcgttttgggacggcttacataacggaaattgtcttgcctcgaaaggcagccgaaatcgctgaaaagcgtaaagcaggcaaaaattcaaaataa

SEQ ID NO: 1580 - DNA, 642 bp, Streptococcus pneumoniae
atgaaactacttaaaaaccttggctggtttcttctagcccttctatcctttttctttatctatggctttattcaggggctcgcgactgcgtcgcttgctttaggcgcttcaccctatgctgttactctactctatgtggtcttggctggagtatatgtgtacggcatttacaaatggtatcagaaagctcctgttcatattgagaagagcggctttaaccgatttatttggcttcctgccttggtttggttcttatctctggtcgttcaattcttcttgccagatgatccttcagtaaatcaacaaatagcgacagacttgaccttgtctcaaccacttttctcattctttgctgtggttatttttgctcctttgacggaagagattgtttttagagggatgttagcacgctatctctttcctaagcaggacaatagtaaacgaaccctgatttttcttctggtatctagtcttctatttgccttgattcattttccaggtgatgtgcaacaattttttgtctattttagccttggttttagtttgggtttggcttacattagcagaaaaggtctggtctacagtatttctcttcacgctttgaataatttagtcggctttttgatgattctcatgctataa

SEQ ID NO: 1581 - DNA, 741 bp, Streptococcus pneumoniae
atgaatatgaaaaagaaacgtagattgttatttttgatgtctattgtcttgggggggttcttgggcatgtttgtagggatgtttaaggcacgtgtcgaatcccacgaaattattttagatgtaaaagccttgatgccatggatatcagctatttgtttactgataggtttcattagtatgtttttgactttcaatttcttaaagaaaagcagaaaatttcattccttgtatcaagaggaaatggatgacgatctgaatgaaacctattatgtgcaaatgtatcggaatcttgagtttggaaccattgcttttaatattacaggtgtagcgattccattggctatttttatttcattaagtgaggtgattatattgcatacaaaccctcaaacatttttcctttctttcttactctttgtggtattcttagtcgctcaaaaatctctttttaaaaccattgcgattgttcgtcagtttgatttggaatttttcgctacaccaaaggatgtcttgaactatataaattcttatgatgaaggggagcgtcaggctaatttggaacagagttttcgaattttattccaattacaccaatatgtcttaccagccttatatatttttcttattatcatttctttcttgacaggagagattcagttactagctttcttgcttgtaggagccatccatgtttatatcaatgtgatgcagttacctatggtaaaacgttatttcaaataa

SEQ ID NO: 1582 - DNA, 201 bp, Streptococcus pneumoniae
gtgatgaacaagtataaagtgatttattatgtagtggtcatagctttattagtcagcgtatttctactgattgggatggacctaagctggtttaatccctatcaaagcgaccaatttgtttgggtctactttgctctcatcccagtaattgaatggattgaaaagaaatccaaaaatctagcaagtgaaaaaggagaatga

SEQ ID NO: 1583 - DNA, 465 bp, Streptococcus pneumoniae
atgatagataaagtggtcaggaacttactcctgacctttttcttttgcaaaatgacaaaaatcataaactttttgacaactatacttgtcaaaaagaaaaagatgtgttacaatgtaagcaagttaagagaaaagaagaaaggagctatgatgtgggtactagggtttatactatttctgattttcttttattctaatgattctaaaaaaatcaagaaactagagaagaaaatcaaaagacttgagcgaaaagagaaaggaaatgcagaaatgtcgagattattacaagaaatgattggaaaggaaccaattataacgggagtgtatattgggccagataactgggaagttgtggatgttgatgaggaatgggtaaagctacgacgtgtagataatacgggaaaagaaaaattcaagttgcaacgtattgaggatatccaaaccgttgaatttgacggagagtag

SEQ ID NO: 1584 - DNA, 186 bp, Streptococcus pneumoniae
agtggtcaggaacttactcctgacctttttcttttgcaaaatgacaaaaatcataaactttttgacaactatacttgtcaaaaagaaaaagatgtgttacaatgtaagcaagttaagagaaaagaagaaaggagctatgatgtgggtactagggtttatactatttctgattttcttttattctaa

SEQ ID NO: 1585 - DNA, 192 bp, Streptococcus pneumoniae
atgaaaatcaaagagcaaactaggaagctagccgcaggttgctcaaaacactgttttgaggttgtggatagaactgacgaagtcagctcaaaacatggttttgaggttgtagatgaaactgacgaagtcagtaaccatacctatggcaaggtgaagctgacgtggtttgaagatattttagaagagtattaa

SEQ ID NO: 1586 - DNA, 189 bp, Streptococcus pneumoniae
gtatggttactgacttcgtcagtttcatctacaacctcaaaaccatgttttgagctgacttcgtcagttctatccacaacctcaaaacagtgttttgagcaacctgcggctagcttcctagtttgctctttgattttcattgagtataaaatcctagtttttcaaagatttctgagaagttttggctga

SEQ ID NO: 1587 - DNA, 1290 bp, Streptococcus pneumoniae
atgaaattacaaaaaccaaaaggaacgcaggatattttacctgctgaatctgctaagtggcagtatgttgagggctttgcccgtgagattttcaagcgctataactatgcagaagtgcgcacgcctatttttgagcattacgaggttatcagtcgctctgtcggagatacaacggatatcgtaaccaaggaaatgtacgatttttatgacaagggtgaccgtcatattaccctccgtccagaaggaactgcgcccgttgtccgttcctatgtggaaaataaactcttcgccccagaagtgcaaaagccaagcaagttctactatatgggacctatgttccgttatgagcgtccacaggcagggcgcttgcgccaattccaccagattggtgttgagtgttttggctctagcaatccagctaccgatgtggaaacaatctctatggcagcctattttttgaaggaaatcggtattcaaggtgtcaaattgcacctcaacactcttggaaatcctgagagccgtgcagcctaccgccaagccttgattgactatttgacaccgctcaaggagaccttgtctaaggatagccaacgtcgcttggaggaaaatcctcttcgtgtcttggactctaaggaaaaagaagacaaggtggcagtagagaatgcgccgtctatcttggactttcttgatgaagaaagccaaactcattttgatgctgtgcgtcagatgttggaaaatcttggagtagattacatcatcgataccaatatggtgcgtggtctggactactacaaccacaccattttcgagtttatcacagagattgagggcaatgacttgacagtctgtgcgggtggtcgctacgatggtttggttgcttactttggaggccctgaaactgctggatttggttttgggcttggtgtagagcgcctgcttctcatccttgaaaaacaaggcgtggccctccctatcgaaaacgccctagatgtctatatcgcagtcttgggtgatggagcaaatgtcaaagccctagaactagtccaagctcttcgccaacaaggtttcaaagcagagcgtgattacctcaaccgtaagctcaaagctcagttcaagtcagcagatgtctttgcggctaagaccctcatcaccctaggagagagcgaagtcgaaagcggacaagtgacggtcaagaacaaccaaacccgagaagaagtgcaagtgtcacttgagacaatcagccaaaacttctcagaaatctttgaaaaactaggattttatactcaatga

SEQ ID NO: 1588 - DNA, 921 bp, Streptococcus pneumoniae
ttgtttttcaaggatgagaagcaggcgctctacaccaagcccaaaaccaaatccagcagtttcagggcctccaaagtaagcaaccaaaccatcgtagcgaccacccgcacagactgtcaagtcattgccctcaatctctgtgataaactcgaaaatggtgtggttgtagtagtccagaccacgcaccatattggtatcgatgatgtaatctactccaagattttccaacatctgacgcacagcatcaaaatgagtttggctttcttcatcaagaaagtccaagatagacggcgcattctctactgccaccttgtcttctttttccttagagtccaagacacgaagaggattttcctccaagcgacgttggctatccttagacaaggtctccttgagcggtgtcaaatagtcaatcaaggcttggcggtaggctgcacggctctcaggatttccaagagtgttgaggtgcaatttgacaccttgaataccgatttccttcaaaaaataggctgccatagagattgtttccacatcggtagctggattgctagagccaaaacactcaacaccaatctggtggaattggcgcaagcgccctgcctgtggacgctcataacggaacataggtcccatatagtagaacttgcttggcttttgcacttctggggcgaagagtttattttccacataggaacggacaacgggcgcagttccttctggacggagggtaatatgacggtcacccttgtcataaaaatcgtacatttccttggttacgatatccgttgtatctccgacagagcgactgataacctcgtaatgctcaaaaataggcgtgcgcacttctgcatagttatagcgcttgaaaatctcacgggcaaagccctcaacatactgccacttagcagattcagcaggtaa

SEQ ID NO: 1589 - DNA, 1248 bp, Streptococcus pneumoniae
atgaaactattgtttagaaatccagcttatagaattttgactttgtcacgcttcttcaatgcttttggtgcttcgattttcaatctggtctttatcgtctatgcatcgaccttgtcacaagcatcttttgctgttgctatggcgaatattgtcatgcttcttccgactctctttacagtttttgcagggattcgggcagattacacgagggccaaggtcaaatggatggtctatagcggtttgtttcaggcggttttattttttctggcagccctagttgttcagcaagctagtttatttgccttttctagcctgtgtttgatcaatgtcattagtgatatcatcagtgattttgcaggtggcctgcgtatgcctcttattaaggaaaaagtagctgaagatgatttgatggaggcttattctttttcacagttcatcacctatatttcagctattggtggtcaagctttcggagtctggctcttagctctatcggtcaacaatttttctctcgttgcgggaatcaatgcctgctttttcctagtatcagccactatcctctttttaggaaaaagcaaattgagcctgtcaatgtcatctgctgatggtgaaaaactaaaaaatgagaagctttctatcaaagaccagttcctaacaatttatcgaaatttacgtctcgtttttcttaaaagtggacagaaaaactttggttttatgctctgtgctgtcttgcttgtcaatgccttgggtggcgctttgggtggaatttataatatcttctttttgagccattctctcttgaatttttcttacacagaggcactatttatcaatcaagtctgtgttttgttagcaatcatcattagtagccttacgggcaatgattattttgggaagcagtccttgcctagattgatgatgtgggagaccgtaggacttagtctagttggtttggctaatttattcaatcaagtcgtgcttggtttgctatttctcttctttactctgtatgtgtctggtaaagttcaaccaaagattagtgccatgctcatgaaaaatctagctccagaggttctagctcgtactagtaattttttaggtctattgtttaccttatccatacctgtgggaacagcttgtttttcactagtagccgtatggaatatacagttgacttggatgctatttgttggtctttccttgctagctatttttttgacaattcttaatctcaaaaatgatatctaa

SEQ ID NO: 1590 - DNA, 399 bp, Streptococcus pneumoniae
ttgagtgtgaagaatttaccaatgcctattattttaaacgtgttatcgaagagcatttctacaaggaaaatgagacctatttccgaattgtttatctgtgggcagaaggtctccttgatagcaagcaaggtagagtcaaggaaggccagaaaaagatggaggatgctgtccgtatttttgagatgcttggctgtaataaatctgccgaatactatagaaatacgaccgaatgttgaatatctgcaaaccaagaaaaaatttgaagcgatagaactattgccctctctcaggtcattacaaaagttctatcgtttttttgctcattttatttgttgcatatattcaaaagaatcgtttcgcaaattcataagtgctatactaaagctattcttgatgtag

SEQ ID NO: 1591 - DNA, 852 bp, Streptococcus pneumoniae
atggagcagattggaaaagtctttagacaattacgagaatcaagaaatatctcactgagacaagcaaccggaggacaattttcgccgtctatgttgtcccgttttgaaacaggtcagagtgagctttcggtggaaaagtttctatttgctctggaaaatatatctgccagtgtggaggagatcctctttctggcgagaggtttccagtatgatacagattctgagttgagaaaagaaattacagatgtcttggaaccaaagaatatagcacctcttgaggacttatatcgcagggagtatcaaaagcatgcccattctcacaacaaacagaaacatattctaaatgccattattatcaagtcttatatgaagagcatagatgaaagggtagagttaacagcagaggaaggaaaagtccttcatgattatttgttttctaccgagatctggggaatctatgaactcaatttattttcagtcagttctccatttttatctgtttctctttttactagatatgtacgagaaatggtacgtaaatctgattttctaatggaaatgtctggcaatcgaaacctttttcatactatactattgaatggctttttagctagtattgagtgtgaagaatttaccaatgcctattattttaaacgtgttatcgaagagcatttctacaaggaaaatgagacctatttccgaattgtttatctgtgggcagaaggtctccttgatagcaagcaaggtagagtcaaggaaggccagaaaaagatggaggatgctgtccgtatttttgagatgcttggctgtaataaatctgccgaatactatagaaatacgaccgaatgttga

SEQ ID NO: 1592 - DNA, 342 bp, Streptococcus pneumoniae
atgagagacgatatcaaaatcaatgaccgtgctttggccttgcaagaccaaatcatcgaaaaactagagaaagtttttgatacagatgtggaattggatgtttacaatctaggtctgatttatgaaatcaatctggatgaaacggggctctgcaagattgtcatgaccttcaccgatactgcctgtgattgcgccgaaagcctgcctattgaaatcgtggcaggtctgaaacaaatcgagggtatcaaagatatcaaggttgaagttacctggtcgcctgcttggaaaatcacacgaatcagtcgctatggccgtattgcccttggactaccacctcgttaa

SEQ ID NO: 1593 - DNA, 1704 bp, Streptococcus pneumoniae
atgactgaattagataaacgtcaccgcagtagcatctatgacagcatggttaaatcacctaaccgtgctatgcttcgtgcgactggtatgacagataaggactttgaaacatcgattgtgggagtgatttcgacttgggcggaaaatacaccatgtaacattcacttgcatgatttcgggaaactggctaaagaaggtgtcaaatctgcaggcgcttggcctgtacagtttggaaccattaccgtagcggacgggatcgctatgggaacgcctggtatgcgtttctctctaacatctcgtgacatcatcgcggactccatcgaggcggctatgagtggtcacaacgtggatgccttcgtcgctatcggtggctgtgacaagaacatgcctggatctatgattgctattgctaatatggatatcccagctattttcgcctatggtggaactattgcaccgggaaatcttgatggtaaagatatcgacttggtttctgtctttgaaggtatcggaaaatggaaccacggtgacatgacagctgaggacgtgaaacgtcttgaatgtaatgcctgccctggccctggtggttgtggtggtatgtatactgctaataccatggcaactgctatcgaagttctagggatgagtttgccagggtcatcctctcacccagctgaatcagctgataagaaagaagatatcgaagcagcaggacgtgctgttgttaagatgttggaacttggtctcaaaccatcagatatcttgactcgtgaagcctttgaagatgctattactgtaacgatggctctcggtggttctacaaacgccactcttcacttgctcgccattgcccatgccgcaaatgttgacttgtcacttgaggacttcaatacgattcaagaacgtgtgcctcacttggccgacttgaaaccatctggtcagtatgtcttccaagacctctacgaagtcggtggtgtccctgcggttatgaagtacttgttggcaaatggtttccttcacggagatcgcatcacatgtactggtaagactgtagctgaaaacttggctgactttgcagacttgactccaggccaaaaagttatcatgccacttgaaaatccaaaacgtgcggatggtccgcttatcatcttgaacgggaaccttgctcctgacggtgcagttgccaaggtatcaggtgttaaagtgcgtcgtcacgttgggccagctaaggtctttgactcagaagaagatgcgattcaggccgttctgacagatgaaatcgttgatggcgatgtagtcgttgttcgttttgttggacctaaaggtggtcctggtatgcctgagatgctgtcactttcttcaatgattgttggtaaaggtcagggagataaggtggccctcttgacggacggacgtttctctggtggtacttatggtctggttgttggacatatcgctcctgaagctcaggatggtggaccaattgcctatctccgtaccggcgatatcgttacggttgaccaagataccaaagaaatttccatggccgtatccgaagaagaacttgaaaaacgcaaggcagaaacaaccttgccaccactttacagccgtggtgtcctcggtaaatatgcccacatcgtatcatctgcttcacgcggagccgtgacagacttctggaatatggacaagtcaggtaaaaaataa

SEQ ID NO: 1594 - DNA, 933 bp, Streptococcus pneumoniae
atgatgagaagtacgaaagaattacggcatgtatatagagacttccttttagaggctaatcaaagttattctgatatagtagtcttagaagccgatttgtcaagttcgatggctactcataatcttgaaaaggacttcggagaccgttatgtgaatgttgggattatggaagcagaaatggtcggccttgcagcaggcttgtctattcaggggtttagaccttatcttcatacatttggtccttttgcttcacgaagagtatttgatcaattatttatttctcttggatacgcacaattggatgccactgtgattggatcagatgcaggagtaactgcagaaatgaatggtgggacacatatgccatttgaagaaattggattgttacgtttaattcctaaatcgatcatttttgaagcaactgatgatatccaatttcgtgaaatattgaaccagacattagacttaaaaggactaaaatatattcgaacaattagaaaagctccagttcctgtgtatcaaggtggagaagatttttctaaaggctacattgagttaaggcatggtgaagatcttgtaatcgttgcttctggtataatggttgctccaagtattcgagttgcagatgaactgtctaaattaggttattcagtaagtgtgatagatttatttagaatcaaaccgataccagaacagataaaaacaatgttaagtggaaaaactatatttactgtagaaaatcacaatcagataggtggaattggcagtgctttatgtgaattattctctgatgatggaataacaaaaattcatcggatgggtgttcaagaaagattcggtcaagtagggaaaatggattatcttcttaatgagtatggtttgagtgaatcgaatataaaagagaaggttctagaaatttataatgcaagatag

SEQ ID NO: 1595 - DNA, 858 bp, Streptococcus pneumoniae
atgattttaagtaaaaatagagaagatgggttaagaaaatttgcgactaacatccgattaaatactcttagaacattgaatcatcttggattcggacattacggaggaagtctgtctatcgtagaagttttagcagtgctttatggtgaaataatgccaatgactccagaaatatttgcagcacgagatagagattatttcatattatcaaaaggtcatggaggaccagctctatacagtacactctatttgaatggtttctttgacaaagaattcttatattctttaaatacaaatggaaccaaattaccgtctcatcctgatagaaatctaacgccaggcatagatatgacaacgggctctttaggacaaggaattagtgttgcaactggacttgcatatggtcagagaataagaaagagtcccttttatacttatgctattgttggagatggtgagttaaatgagggacaatgttgggaggctatacagtttgcttctcatcaacagttatccaacttaattgtatttgttgatgataacaaaaaacaattagatggttttacaaaggatatttgtaatccaggtgatttcgtagaaaaattttcagcatttggatttgaatccattagggtcaagggttcagatattagagaaatttatgaagggattgtccaattaaaacagtcacataattcatcacctaagtgcattgtattagatactattaaaggtcaaggggttcaagagctggaagaaatgaaatccaaccatcatcttcgccctactgtagaggagagacaaatgttaacttcagttgtagaaagattaagtcaggaattggaggaaacagaatga

SEQ ID NO: 1596 - DNA, 1347 bp, Streptococcus pneumoniae
atgatgaagttcatattggatattgttagtacaccagctattttagtagctttaattgcaatcttaggattagttcttcagaagaagaaattacctgatattattaaaggtggaattaagacctttgttggtttcttagttgtatctggtggtgcaggaattgtacaaaattctttaaatccatttggtaccatgtttgagcatgcttttcatttatctggcgttgtgccgaataatgaagcaattgtagctgtagctttaacaacatatggctcagctactgcaatgattatgtttgcaggcatggtgttcaatatcttaatcgctcgttttactcgatttaaatatatctttttaacagggcaccacactctatatatggcatgtatgattgcggtcattttatcagttgctggctttactagcttgcctctcatcttactaggaggattagcactcggtattattatgagtatttccccagcatttgtgcaaaaatatatggttcaattaactggaaatgacaaggtggctttaggtcatttcagttctttgggatattggttgagtggttttactggtagccttatcggtgacaaatcaaaatcaacagaggacattaaatttccaaagagtttagcttttttacgtgatagtactgttagtatcactttatctatggcagttatttacattattgtagctatctttgcagggtcagaatatatagaaaaagaaatcagtagtggtacaagtggtctagtttatgctttacaattagcaggtcaatttgcagcaggggtatttgttattttagcaggtgttcgccttattttgggcgaaattgttccagcctttaaaggtatttcagagcgtcttgtacctaattcaaaacctgctttggattgtccgattgtttatacttatgcacccaatgcagttctaattggatttatctctagttttattggtggtttagtaagtatggcaattatgattgcttcaggaacggttgttatcttaccaggcgttgtgcctcatttcttctgtggagcgactgcaggtgtcattgggaatgcatctggtggtgttcgtggagccactattggagcatttttacaaggtattttaatcagttttcttccagtctttttaatgccagttttgggaggactcggtttccaaggatcaactttctcagatgcagattttggtctatcaggaattattttaggaatgttaaatcaatttggctcacaagcaggcattgtgattggtcttgttcttattttagcagttatgtttggagtatcctttattaaaaagccatctgcaaaggaggaataa

SEQ ID NO: 1597 - DNA, 285 bp, Streptococcus pneumoniae
atgttaaaaattggtacagcttgtggttcaggattaggttcaagttttatggtacagatgaatattgaatctgtattgagtgatttgaatgtttcggatgtagaagttgaacattatgatttaggtggagcagatccaaatgcagctgatatttggattgttggtcgtgatctagctgattcagctagtcatcttggagatgttcgtatcttaaatagtattattgatatggacgaactacgagaattaattactaaaatttgtgaagaaaaaggacttatatag

SEQ ID NO: 1598 - DNA, 2031 bp, Streptococcus pneumoniae
atgtttgattatagagcactagttattttgatgactttgatggatcattgtgagctatcattatatgaattatctgttaaggtgagcttacctataaaggaagtcaaagaaggaatagattatttagtgccttatctagctaataaagggatagtgctggataaaaaacaaggtcgctatagtttatcaaatcgtacgaagcagtctttgacagatattattaagtcggatgaattggttttaccaaagtcgactcgcttagctttaatctatctttacactttttgccgattagattttatatcgaataatcattaccaagactttttgaaagtaagtaagaatacaaccttatctgatattcaatcattaagaaagattatgttagataatgatttggagctagggtacagtagagcaaaaggttatactttacacggttcagagtggaataagcaccgtttagcttttcaaatggttagtgagttgctggaatcctccatagggatttggggtttggattatgttttatccagttgggggtattcattaacttatgatttgattgatcaggtagttaaagattattatgagaagctacagctagtacctattgttaatcaattaaaagtttaccttttcggtttagtattcattctgtgtaggtatcaaagggatgttgaaagagtatgtctttcagagacattagtatctcctgttattcaagatataacgactattttattggatacagtggttgatttgggaattatagatacggtgttttctgaggatgattatcgctatatcacagttttattatcaagttgctttgaaggtgaagtagatgttgctccggtttactttaatcaattaacagaggctattataagtagaatggaagatatttctttgttacattttaaacaaagggaaggattgagagaaaatcttcgtcgccaccttataccggcttactatagattaaagttcggcctacctagttcaaatgaatatgtattgcatgttaaagaacattatcctgatttatttgaattagtcaaagattctttgatgcccttgatggacgctattgacaatcccatacctgatagtgaaacagcatattttgttatccatttcggaggttatttaaagaaagcagatactttgcctcaaaaatggtataaagcagcaatcatttgtcctaatggtgttagttcttcattgatgttaaaagagaatctattagcattatttcctcaaattgagtttataggaacctcaaagattgatgatttacaggtgaaagctagtagtgactatgatatggttttttctaccataaaggtggagacagaaaagccaaattatctagtttcggttatgatgactgaagagcaagcaatacaactagtagaactagtgttaaaagattttccgaatttagagtatggagattttgagattgaacaaatcctgaatattgtcaaaagatatggaattattacacaagaattggaattaagattggcgttaaagaattatctttatcaaaaaaatgatagaaaggaaattgtaccagtgctagaacaacttattaccaaagaaacctatcaggttagttcgcaaaaattaggatggaaggaggcgattcgtttagcagctaaaccgcttttggatcaagataagataacggagaactaccctgaggcaatgattcaaaaagtagaagagtttggaccttttattaatttagggaagggagtagcaattcctcacgctcggccagatgaaggtgtgaatgaaataggaatgtcaatgttagttttggaagaaccgatttatttattggataatccagaacaagaggtaagattgttgatttgtattgcagccattgataatgagagtcatttaaaggctttgtcacatttaacaacaattttaagagataaaaatcatgttcaaactttaatatcatcaaaaaactatgatgatattaaaatgataattaaacaggaggattag

SEQ ID NO: 1599 - DNA, 1008 bp, Streptococcus pneumoniae
atgactgaaaaactaatcaattcaaaaccaaatggtgtattcgcattgattctcattgagttgacaatcgtacttggtgtctttatatttataatgggtgttggttcggaaaacatttttggaattattatcggacctttactaatcgtaattgcagcgctaactcatgctggtttaaaagttgtcaaacctcaggaagctctggttctgacactctttggtaattatacaggtaccatcaaagaacctggtttttactttgtcaatcccttcagcgtagcagtcaaccctgcaaaccacactcgacttggacaaagtggtgatgttagcacaaaatctccttttttaggagctaaatcatcaaatgacaatgatgtaaatcttgaaattggcaagaaacacatttccctcaaagtcatgaccttgagcaattctcgtcaaaaaatcaatgattgcttaggaaaccctgtagaaatcggtatcgcggtaacttggagagttgtcgataccgctaaggcagtcttcaacgttgataactacaaagaatatctttcattgcaatgtgatagcgccctccgtaatattgtccgcatctatccttacgatgtgtctcctaatgtggatactacgggtgaacggcaagcagatgaacgtagtctccgtggctctagcgaaattgttgctaaccgtattcgtgaagaaatccaaagtcgtgttgaggatgctggcttggaaatccttgaagcacgtatcacttacctagcttatgctccagaaattgctgccgttatgcttcaacgccaacaagcatctgccattattgatgcacggaagatgattgtagatggtgctgtaggaatggttgaaatggcactagaacggctcaatgaaggggaattggtagaacttgacgaagaacgaaaagctgccatggtttcaaatctccttgtcgttctttgtggcaatcatgatgcacaaccaattgtcaacacaggaagtctttactaa

SEQ ID NO: 1600 - DNA, 201 bp, Streptococcus pneumoniae
atggctgaagctaaaaaaaagcagatcccccttcgactctcaacaaagttatacgctgcactcgcatcatgggcagaagacgactttcgttcagtcaatgggcaaatcgaatatctcctcacagagtgtgtcaagcaacggaaaaaagacggaaaatacgtatcagaaaccattgacgaaccatttgagattgatatttaa

SEQ ID NO: 1601 - DNA, 183 bp, Streptococcus pneumoniae
atggcagtacctgcacgtcgcacttcaaaagcgaagaaaaacaaacgtcgtacacactacaaagtaacagctccatctgtaaactttgacgaaactactggagattactcacgttctcaccgtgtatcacttaaaggatactacaaaggacgtaaaatcactaaagctgcatcagctgaataa

SEQ ID NO: 1602 - DNA, 1926 bp, Streptococcus pneumoniae
atgaaaaaaactacaatattatcattaactacagctgcggttattttagcagcatatgtccctaatgaaccaatcctagcagatactcctagttcggaagtaatcaaagagactaaagttggaagtattattcaacaaaataatatcaaatataaggttctaactgtagaaggtaacataagaactgttcaagtgggtaatggagttactcctgtagagtttgaagctggtcaagatggaaaaccattcacgattcctacaaaaatcacagtaggtgataaagtatttaccgttactgaagtagctagtcaagcttttagttattatccagatgaaacaggtagaattgtctactatcctagctctattactatcccatcaagcataaaaaaaatacaaaaaaaaggcttccatggaagtaaagctaaaactattatttttgacaaaggcagtcagctggagaaaattgaagatagagcttttgatttttctgaattagaagagattgaattgcctgcatctctagaatatattggaacaagtgcattttcttttagtcaaaaattgaaaaagctaaccttttcctcaagttcaaaattagaattaatatcacatgaggcttttgctaatttatcaaatttagagaaactaacattaccaaaatcggttaaaacattaggaagtaatctatttagactcactactagcttaaaacatgttgatgttgaagaaggaaatgaatcgtttgcctcagttgatggtgttttgttttcaaaagataaaactcaattaatttattatccaagtcaaaaaaatgacgaaagttataaaacgcctaaggagacaaaagaacttgcatcatattcgtttaataaaaattcttacttgaaaaaactcgaattgaatgaaggtttagaaaaaatcggtacttttgcatttgcggatgcgattaaacttgaagaaattagcttaccaaatagtttagaaactattgaacgtttagccttttacggtaatttagaattaaaagaacttatattaccagataatgttaaaaattttggtaaacacgttatgaacggtttaccaaaattaaaaagtttaacaattggtaataatatcaactcattgccgtccttcttcctaagtggcgtcttagattcattaaaggaaattcatattaagaataaaagtacagagttttctgtgaaaaaagatacatttgcaattcctgaaactgttaagttctatgtaacatcagaacatataaaagatgttcttaaatcaaatttatctactagtaatgatatcattgttgaaaaagtagataatataaaacaagaaactgatgtagctaaacctaaaaagaattctaatcagggagtagttggttgggttaaagacaaaggtttatggtattacttaaacgaatcaggttcaatggctactggttgggttaaagacaaaggtttatggtattacttaaacgaatcaggttcaatggctactggttgggttaaagacaaaggcttatggtattacttaaacgaatcaggttcaatggctactggttgggttaaagacaaaggcttatggtattacttaaatgaatcaggttcaatggctactggttgggttaaagacaaaggcttatggtattacttaaacgaatcaggttcaatggctactggttgggttaaagacaaaggcttatggtattacttaaacgaatcaggttcaatggctactggttgggttaaagacaaaggcttatggtattacttaaatgaatcaggttcaatggctactggttggtttacagtttctggtaaatggtactatacctataattcaggagatttattagtaaacacgactacacccgatggctatcgagtcaatgctaacggtgagtgggtaggatag

SEQ ID NO: 1603 - DNA, 228 bp, Streptococcus pneumoniae
gttttatcttttgaaaacaaaacaccatcaactgaggcaaacgattcatttccttcttcaacatcaacatgttttaagctagtagtgagtctaaatagattacttcctaatgttttaaccgattttggtaatgttagtttctctaaatttgataaattagcaaaagcctcatgtgatattaattctaattttgaacttgaggaaaaggttagctttttcaatttttga

SEQ ID NO: 1604 - DNA, 576 bp, Streptococcus pneumoniae
atggacttaaaatttgaaggggttgatttagaatacaaaaaagctaaaaacaatcttccagagtctttctgggaaacctactcagcatttgcaaatacaaatggcgggaaaataattctcgggatagatgaaaaaaacattgacacctaccaaagagtcaatagactccctgcgaaacaaaattatgaagcaagtaaacaactaactgatgcacgatttaagcgtcttgttggtgttcagcgtaccacttttgaagagatgttagctgtattaaaaacagcttatcaacttaaacacgcaaaaggtggacgaaaacctaaattaagcctagaagaccttcttatggccactcttcaatatgtgcgagaatatcgcacttatgaagaaattgcggctgattttggtatccacgaaagcaacttaatccgtcggagccaatgggttgaagtaactcttgttcaaagtggtgttacgatttcaagaactcttctcagttctgaggacacggtaatgattgatgcgacggaagtaaaaatcaatcgccctaaaaaaacaattagcgaatcattctggtaa

SEQ ID NO: 1605 - DNA, 378 bp, Streptococcus pneumoniae
aaatcaatcgccctaaaaaaacaattagcgaatcattctggtaaaaagaaatttcacgctatgaaggctcaagcgattgtcacaagtcaagggagaattgtttctttggatatcactgtgaactattgtcatgatatgaagttgttcaaaatgagttgcagaaatatcggacaagctggtaaaatcttggctgacagtggttatcaagggctcatgaagatatatcctcaagcacaaactccacgtaaatccagcaaactcaagccgctaacagctgaagataaggcttataaccatgcgctatctaaggagagaagcaaggttgagaacatctttgccaaagtaaaaacgtttaaaatgttttcaacaacctattga

SEQ ID NO: 1606 - DNA, 327 bp, Streptococcus pneumoniae
gtgattttatggagtttcgattttgtaaatgctcatgctcacgcatttttcatggataatgttgagtggagtcatgcagattcttactttcttagctttgttagtgacgatgttgaagaacgttacacagaaaatgtctatctggatagcctaagtgtcaaacaaaaatttaagtttcttttcgacttcggtgatgaatggcgttttgaatgccaagtactgagagaaatcgagacagaggacgaagaagcttatctcgtacgttcggttggaacgtcgccagaacaatatccagattatgatggttttgactatgaagaatggtaa

SEQ ID NO: 1607 - DNA, 1881 bp, Streptococcus pneumoniae
atggtaagatttacaggacttagtcccaaacaaacgcaagctattgaggttttaaaaggtcatatttctctaccagatgtggaagtggctgtcactcagtctgaccaagcctctatctctatcgagggtgaggaaggtcactatcaattgacctaccgcaaacctcaccaactttatcgtgccttgtccttgttggtaacagttctagcagaagctgataaagtagagattgaggaacaagcagcttacgaagatttggcttacatggttgactgttctcgaaatgcggtgctgaatgtggcttctgccaagcagatgattgagatcttggctctcatgggctactcaacctttgagctttacatggaagacacttaccagattgaagggcagccttactttggctatttccgtggagcttattcagcagaggagttgcaggaaatcgaagcctatgttcaacagtttgacatgacctttgtaccatgcatccagaccttggcccacttgtcggcctttgtcaaatggggtgtcaaggaagtgcaggagctccgtgatgtagaggacattcttctcattggcgaagaaaaggtttatgacctgattgatggtatgtttgccacgttgtctaaactgaagactcgcaaggtcaatatcgggatggacgaagcccacttggttggtttgggacgctacctgattttgaacggtgttgtggatcgtagtctcctcatgtgccaacatttggagcgcgtgctggatattgctgacaaatatggtttccactgccagatgtggagtgatatgttcttcaaactcatgtcagcggatggccagtacgaccgtgatgtggaaattccagaggaaactcgtgtctacctagaccgtctcaaagaccgtgtgactctggtttactgggattattatcgggatagcgaggaaaaatacaaccgtaatttccgcaatcatcacaagattagccatgaccttgcatttgcagggggagcttggaagtggattggctttacacctcacaaccattttagccgtctagtggctatcgaggctaataaagcctgccgtgccaatcagattaaagaagtcatcgtaacgggttggggagacaatggtggtgaaactgcccagttctctatcctatcaagcttgcaaatctgggcagaactcagctatcgcaatgacctagatagtttgtctgcgcacttcaagaccaatactggtctaacggttgaggattttatgcagattgaccttgccaacctcttaccagacctaccaggcaatctcagcggtatcaatcccaaccgctatgttttttatcaggatgttctttgtccgatacttgaccgacacatgacacctgaacaggacaaaccgcacttcgctcaggctgctgagacgcttgctaacattaaagaaaaagctggaaactatgcttatctctttgaaactcaggcccagttgaatgctattttaagtagcaaagtagatgtgggacgacgcattcgtcaggcctaccaagaggatgataaagaaagtttacaacaaatcgccagacaagaattaccagaacttagaagccaaattgaagacttccatgccctctttagtcaccaatggctgaaagaaaacaaggtctttggtttggatacagttgacatccgtatgggcggactcttgcaacgcatcaaacgagcagaaagccgtatcgaggtttatctggctggccagcttgaccgcatcgacgagctggaagttgaaatcctaccatttactgacttctacgcagacaaggatttcgcagcaactacagctaaccagtggcataccattgcgacagcttcgacgatttatacgacttaa

SEQ ID NO: 1608 - DNA, 870 bp, Streptococcus pneumoniae
atgaccattgcaacgattgatatcggagggactgggattaagtttgccagtctgactcctgatgggaaaatactgtataagacaagtatttcaacgcctgaaaacttggaggatttactagcgtggctagatcaacgcttgtcagaacaggattacagtgggattgctatgagcgttccaggtgcggtcaatcaagagacaggtgtgattgatggcttcagtgcggtgccctacatccatggcttttcttggtatgaggcgcttagctcttatcagctacctgtccatttagaaaatgatgccaactgcgttggactcagtgaactactagctcatccagatcttgaaaatgcagcctgtgtcgtgattgggacagggattggcggagccatgattatcaatggtagacttcatcgaggtcgccacggtctgggtggagaatttggctacatgacaacccttgcccctgctgaaaaacttaataactggtcgcaactagcatcaactgggaatatggtacgatacgtgattgaaaaatctggtcatactgattgggacggtcgcaagatttaccaagaggccgcagctggtaatgctctttgtcaagaagccattgagcgcatgaaccgcaatctggcgcaaggcttgctcaatatccagtatctcatcgatccagatgtcatcagtctgggtggctctatcagtcaaaatccagattttatccaagatgtcaagaaggctgttgataactttgtcgatacctacgaagaatacacggtcgcaccagttatccagacctgcacctatcacgcagatgccaatctctacggtgcccttgtcaactggctacaggaggaaaagcaatggtaa

SEQ ID NO: 1609 - DNA, 2661 bp, Streptococcus pneumoniae
atgaggttttacttcatggaaaatgttgttgtacatattatctcacatagtcactgggaccgtgagtggtacttgccttttgaaagccatcgtatgcagttggtggaattgtttgacaatctctttgatctctttgaaaatgaccctgagttcaagagtttccacttggatggacaaactattgtccttgatgactacttacaaattcgccctgaaaatcgtgacaaggtccaacgctacattgacgagggcaaacttaaaattggtcccttttacatcttgcaggatgactacttgatctccagtgaagccaatgtccgcaataccttgattggtcaacaagaagctgccaaatggggtaaatcaacccagattggctactttccagatacctttggaaatatgggacaagctcctcaaatccttcaaaaatcaggtattcacgtggcagcctttggtcgtggtgtgaagccgattggatttgacaaccaagtccttgaagatgagcggtttacatcccagttttcagaaatgtactggcagggtgtggatggtagtcgtgttttaggtattctctttgccaactggtacagtaatgggaatgaaatcccagttgacaaagatgaggccttgatcttctggaaacaaaaattgtcagatgtgcgtgcctacgcttcgaccaaccaatggttgatgatgaacggctgtgaccaccagcctgtccagaaaaatctgagcgaagccattcgtgtggcaaatgaactcttcccggatgtaatctttgttcatagttcttttgatgaatatgttcaagctgtagaaggtgcgcttcctgaacacttatcaactgttacaggtgagttgaccagtcaggaaacagatggctggtacacacttgccaacacttcttcatcccgcatttacctaaaacaagccttccaagaaaatagcaacctcctagagcaagtggtagaacccttgactattatcactggtggacacaaccacaaggaccagttgacctatgcttggaaaacacttttgcagaatgcgccacatgatagtatctgtggctgtagcgtggacgaagttcaccgcgagatggaaacgcgttttgccaaggtcaaccaagtaggaaactttgttaaaagtaatttgctcaacgagtggaagggtaaaattgctacggataaggctcaaagtgactatctctttactgtcattaacacaggcttgcatgataaggtcgatactgtcagcacagtgattgatgtggcgacttgtgatttcaaggaattgcacccaacagaaggctacaaaaagatggctgctcttatcttgccaagttaccgtgtggaggacttggatggtcgtcctgtagaggctacaatcgaagacctcggagctaattttgagtatgatttaccaaaagacaagttccgccaagctcgtattgctcgtcaagtgcgcgtgaccattccagttcacctagcgccgctttcttggacaaccttccaattgctggaaggaaaacaagaacaccgtgagggtatttaccaaaacggagtgattgatacaccattcgtaacggtgagtgtggatgacaacatcacagtctatgacaagacaactcacgaagcctatgaagactttatccgctttgaagaccgtggggacatcggaaacgagtatatctatttccaaccaaaaggaacagagccaatctttgcagagcttaagggccacgaggtcttggaaaacacagcttgctatgctaaaatcttgctcaaacatgaattgaccgtgcctgtcagtgcggatgaaaagctagaagaagagcaacaaggtatcatcgagtttatgaagcgtgaggctggacggtcagaagaattgacaaacattcctctggaaactgagttgactgtcttcgttgacaatccacaaatccgcttcaagactcgctttactaacactgccaaggatcaccgtatccgtctcttggtcaagactcataacacgcgtccaagcaatgattctgaaagtatctatgaggtggtgacacgaccaaacaaaccagctgcttcatgggaaaatcctgaaaatcctcaacaccaacaagcttttgtcagtctgtatgacgatgaaaaaggggtgactgtatccaataagggattgaatgaatacgaaatccttggggataacaccattgccgtgaccattttgcgtgcatcaggtgagctaggtgactggggctacttcccaacgccagaagcacaatgcttgcgtgagtttgaagtcgagtttgcacttgaatgccaccaagcccaagaacgcttctcagcctatcgtcgtgccaaagccttgcagacaccgtttaccagccttcagcttgctagacaggaaggaagcgtggttgcgactggtagcctcttgagccattctgttctcagcataccgcaagtttgtccaacagcctttaaagtggcggaaaatgaagaaggctatgtcctccgttactataatatgagtcaagaaaatgtgcgcatatcagaacatcaacaaaccattcttgacttacttgagcgaccatatccagttcattcaggactattggctccacaagagattcgtacagaattcatcaaaaaagaagaaatttaa

SEQ ID NO: 1610 - DNA, 1305 bp, Streptococcus pneumoniae
ttgtttgaaagagggaattgcacgatgatttattcgaaagaaattgttagagaatggctagatgaagtagcagagcgggctaaggaccatccagagtgggtggatgttttcgagcgttgctacaccgataccttggacaatacggttgaaatcttagaagatggttcaacttttgtcttgactggggatattcctgccatgtggcttcgggattcgacagcccaactcagaccctaccttcatgtagctaaaagagatgccctcctgcgtcagaccattgcaggtttggtcaaacgtcagatgaccttggtactcaaggatccctatgctaactccttcaacattgaggagaactggaaagggcaccacgagactgatcacacagaccttaacggctggatctgggagcgcaagtatgaggtggattcactttgctatcctttgcagttggcttatctcctctggaaagagactggcgagactagtcagtttgatgagatttttgtcgtagcgactaaggaaattctccatctatggacagttgaacaagaccacaagaactctccttatcgttttgtccgagatacggaccgtaaggaagacaccttggtaaatgatggctttggacctgactttgcagtgacaggtatgacttggtcagcctttcgtccgagtgatgactgttgccagtatagttacttgattccgtcaaatatgtttgctgtagtagtcttgggttatgtgcaagaaatcttcgcagcattaaacctagctgatagccagagtgttattgctgatgccaagcgtcttcaggatgaaatccaagaaggaatcgaaaactacgcttacaccaccaacagcaagggcgaaaagatttacgcttttgaagtagatggcctaggaaatgccagcatcatggatgatccgaatgtgccaagtctactagctgcgccctatctgggctactgttcgatcgatgatgaagtgtatcaagccactcgccgtaccattctgagctctgaaaattcatacttctaccaaggagaatacgctagcggtcttggaagttctcataccttctatcgctatatctggccaatcgccctttctatccaaggattgacaacaagagataaggcagagaaaaaattcttgctggatcagctggttgcctgcgatggtggtacaggtgtcatgcacgaaagcttccacgtagatgatccgaccctctactctcgtgaatggttctcctgggctaacatgatgttctgtgagttggtcttggattacttggatattcgctaa

SEQ ID NO: 1611 - DNA, 2085 bp, Streptococcus pneumoniae
atgaaaccactacttgaaaccatcgatacccgctttggaactaccaacaagcatgccttttctcggggaaataccctgccatacacaggcgtgccttttgggatgaattattttgtgccccagaccagtgaccaggacggagcttggttcttcgatccgcatctgcctatctttcaggggattcgattaactcaccagcccagtccttggattggggactactcttggctccttctgacacctgtcaccagtcaactgggtgaagacagtctctttcaccgccagtcttcctataatagggataaggcctctttccaacctcattatctaaagattttctccctgcgctatcagattgaaacccagctcacaccgacttgctacggtgcttctattcgtttgaagcaaaagcaaggcaaagccctctccctctatcttcacgcaacagatgaactgacagtagagcaagtagataagcgaactcttgccctgcgacaagaaggtaaaactgaaaccaacaaaaattcgctaacgatgttcactgccctacaaatgaacacggatattcttgctatcagccaagaagctggagactggcgaattgacttagtaagtagtcaaaccgagatgcaactagccacttctttcatctctccttctcaagctctaatcaatctacctcaagaagattttgatagctgtaaagcaagtgcccaagcggattgggaaaatctcctccatcgttttgatgttatagagacaggagaggctaaccgaaccttctttgaccactgtctctacagactcttcctcttcccacagactttttatgaggttgatgagtcagggcaagccatccacatggatctggctactggtactgtcaagcctggtgtcctctttagcaacaatggtttctgggataccttccgcaccaccttccccctctttgcccttatcataccggagcactatcaacgctttttagaaggtttcctcaatagctaccgcgatactggtttccttccaaaatggctggctccagatgaacggggtatgatgccaggtacacttttagacggtattatcgcagatagcgcctgcaaggacatggcccctgacctagaaggagaactcttccaagccatgctcgaaacagccagcaaagccgaccctctcggcatcaatggccgccacggactagcccaataccaagaactaggttacctctctaccgaccaccacgaaagtgttagccatactctagactatgcctatagtgacttttgtatcgctagctgtgccaaaaaactagagaacatagaaatcgctgaaacctacaaggctgcttcacaaaattaccgccagctatttgacgctgagacaggttacatgcgagcacgagacaatcaaggaaactttcaccctgacttctctccttatagttgggggcgagactacgctgaatgctctgccattcaagctactttaggcgttctccacgacatccctggcttaatccaactgatgggtggaaaagaaacctttagcaactatcttttgaaagcttgtcaagatgctcccctctttgaaacaacaggctatggttacgaaattcacgaaatgagcgagatggctactgctccttttggacaaatagccatttccaaccagcctagtttccacattccttatctcttccgctacagcgattaccctgactacactgcccttcttatcaagacgctccgtcagaaagcttttcacccaagttgggaagcctatcctggagatgaagacaatggtagtctctctgcttggtacatctggtcagctctcggattttatccaacctgtccaggaaaaccaagctatgacctcggaatccctctctttgaccatctacgagtctacctcgctaaagaagataaatggctggatatccatactaaacaaaaccacaaccattttaactttgtcaaagaatgccgactggacaaaacactcgtatcaactattcaacaccaagacctcttaaaagctgaacaactaactttcaccctcagctggttaccaagtcactaa

SEQ ID NO: 1612 - DNA, 1680 bp, Streptococcus pneumoniae
atgaagaaaattaaaccgcatggaccgttaccaagtcagactcagctagcttatctgggagatgaactagcagcttttatccacttcggtcctaataccttttatgaccaagaatgggggactggacaggaggatcctgagcgctttaacccgagtcagttggatgcgcgtgagtgggttcgtgtgctcaaggaaacgggcttcaaaaagttgattttggtggtcaagcaccacgatggctttgtcctttatccgacagctcacacagattattcggttaaggtcagtccttggaggagaggaaagggcgacttgctccttgaagtatcccaagctgccacagagtttgatatggatatgggggtctacctgtcaccgtgggatgcccatagtcccctctatcatgtggaccgagaagcggactacaatgcctattatctggctcagttgaaggaaatcttatcaaatcctaactatgggaatgctggtaagttcgctgaggtttggatggatggtgccagaggagagggcgcgcaaaaggttaattatgaatttgaaaaatggtttgaaaccattcgtgacctgcagggcgcttgcttgattttttcaacagaaggcaccagtatccgctggattggcaatgaacgagggtatgcaggtgatccactgtggcaaaaggtgaatcctgataaactaggaacagaagcagagctgaactatcttcagcacggggatccctcgggcacgattttttcaatcggagaggcagatgtttccatccgtccaggctggttctaccatgaggatcaggatcctaagtctctcgaggagttggtcgaaatctactttcactcagtagggcgaggaactccactcttgcttaatattccgccgaatcaagctgggctctttgatgcaaaggatattgaacgactttatgaatttgcgacctatcgcaatgagctctataaagaagatttggctctgggagctgaggtatctggtccagctctttccgcagactttgcttgtcgccatttgacagacggccttgagaccagctcttgggcaaacgatgcagccttgcccatccagttagaactcgacttaggttctcctaaaacttttgatgtaattgagttaagagaagatttgaagctagggcaacgaatcgctgcttttcatgtgcaagtagaggtggatggtgtctggcaggagtttggttcgggtcatactgttggttacaaacgtctcttacgaggagcagttgttgaagcacagaagatacgtgtagtcattacagaatcacaggttttgcctttgttgaccaagatttcactctataaaactccgaggttatcacaaacagtagctgttcaggggctagcatttgcagaaaaaagcctagctgtggcaaagggagagactcttcattttaggattgaacgtagtgaaagtagctcctctttagaggctaagatttcgattcaaccggggacaggtgtccatggtgtcgcctatcaggatgagattcaagtccttcaattccaagcaggggaaagcaaaaaagatttgcatctaccaaccctgtatttcgcaggagataaaaccttggatttctatctgaacctaacggtggatggtcagcttgtggatcaacttcaagtccaagtttcataa

SEQ ID NO: 1613 - DNA, 1230 bp, Streptococcus pneumoniae
atgtcttctcatccaattcaggtcttctcagaaattgggaaactgaaaaaagttatgttgcaccgtccaggcaaggagttagaaaacttgttgccggactatcttgaaaggcttctttttgatgatattcctttcttggaagatgctcaaaaagaacatgatgcatttgcccaagctcttcgcgatgaaggaattgaggttctctacctagaacaactcgctgctgaatcattgacctctccagaaatccgcgatcaatttatcgaggaatacttagacgaagccaacatccgtgatcgtcaaaccaaggttgctattcgtgaattgcttcacggcatcaaggacaaccaagaattggttgaaaaaacaatggctgggattcaaaaagttgaattgccagaaattcctgacgaagctaaagatctaactgacttagttgaatcagagtatccatttgcaattgacccgatgccaaacctctatttcactcgcgacccatttgcaacaattggaaacgccgtatcgcttaaccacatgtttgcagatactcgtaaccgtgaaacactctacggtaagtatatcttcaaataccacccaatctatggcggaaaagtggatttggtctacaaccgtgaagaagatacgcgtatcgaaggtggagacgagctaattctttctaaagacgtccttgcagtaggtatctctcaacgtacagacgcagcttctatcgaaaaacttttggtcaacatcttcaagaaaaatgttggcttcaagaaagttttggcctttgaatttgctaacaaccgtaaattcatgcacttggatactgtcttcactatggtagactatgacaagttcactattcacccagaaatcgaaggcgaccttcacgtttactcagttacttacgaaaacgaaaaacttaaaatcgttgaagagaaaggtgacttagctgaacttcttgctcaaaaccttggtgtagaaaaagttcatttgattcgttgcggtggtggcaatatcgtagcagctgcgcgtgaacaatggaacgacggttctaacactttgaccatcgcacctggtgtggtagttgtttatgaccgcaataccgtgaccaataagattttggaagaatacgggcttcgcttgattaagattcgcggaagtgaattggttcggggccgtggtggacctcgttgtatgtctatgccatttgaacgtgaagaagtgtaa

SEQ ID NO: 1614 - DNA, 1017 bp, Streptococcus pneumoniae
atgacaaattcagtattccaaggacgcagcttcttagcagaaaaagactttacccgtgcagagttagaataccttattggtctttcagctcacttgaaagatttgaaaaaacgcaatattcaacaccactaccttgctggcaagaatatcgctctcctatttgaaaaaacatctactcgtactcgtgcagcctttacaactgcggctatcgaccttggtgctcacccagaatacctcggagcaaatgatattcagttgggtaaaaaagaatctactgaagatactgctaaagtattgggacgtatgtttgacgggattgaattccgcggattcagccaacgtatggttgaagaattggcagaattctcaggcgttccagtatggaacggtctaactgacgaatggcacccaactcaaatgctcgctgactacttgactgttcaagaaaacttcggtcgcttggaaggcttgacattggtatactgtggtgatggacgtaacaacgttgccaacagcttgctcgtaacaggtgctatccttggtgtcaatgttcacatcttctcaccaaaagaactcttcccagaaaaagaaatcgttgaattggcagaaggatttgctaaagaaagtggcgcacatgttctcatcactgaagatgctgatgaagcagttaaagatgcagacgttctttacacagacgtttgggtatcaatgggtgaagaagacaaattcgcagaacgtgtagctcttcttaaaccttaccaagtcaatatggacttagttaaaaaagcaggcaatgaaaacttgatcttcctacactgcttgccagcattccacgatactcacactgtttatggtaaagacgttgctgaaaaatttggtgtagaagaaatggaagtaacagacgaagtcttccgcagcaagtacgctcgccacttcgatcaagcagaaaaccgtatgcacactatcaaagctgttatggctgcgacacttggtaacctttatattcctaaagtataa

SEQ ID NO: 1615 - DNA, 948 bp, Streptococcus pneumoniae
atggcaaatcgtaaaattgtagtagctttgggaggaaatgcgattctttcttctgacccatcagcaaaggctcaacaagaagctttagttgaaacagctaagcatcttgtaaaattgattaaaaatggagatgatttgattatcactcacggtaatggacctcaagttgggaatctcttgctccaacatttggcatcagactctgaaaagaaccctgccttcccactcgactcacttgtcgctatgacagaaggtagcatcggtttctggttgaaaaatgctttgcaaaatgctctcttggatgaaggcatcgaaaaaaatgttgcctctgttgtaacgcaagttatcgtagataaaaatgatccagcttttgttaacttgagtaaaccaatcggtcctttctattcagaagaagaagcaaaagcagaagccgaaaagagcggagcgactttcaaggaagatgctggccgtggctggcgtaaggtcgttgcctcaccaaaacctgttgacatcaaagaaattgaaaccatccgtactcttttaaataatggtcaagtcgtcgtagctgcaggtggtggcggtattcccgtcgtcaaagaaaacaatggacatttgactggtgtcgaagcggttattgataaagacttcgcttcccaacgtttggcagaattggttgatgcagacctcttcatcgttttgacaggtgtagattatgtatttgttaactacaacaagccaaaccaggaaaaattggaacatgtgaatgttgcccagctggaagaatatatcaaacaagatcagtttgcaccaggtagcatgcttccaaaagtagaagcagctatcgcttttgtcaatggtcgtccagaaggaaaagcagttattacttcccttgaaaatctaggcgccttgattgaatctgaaagcggaacaattattgaaaaaggataa

SEQ ID NO: 1616 - DNA, 1512 bp, Streptococcus pneumoniae
atgagtgaaaaagctaaaaaagggtttaagatgccttcatcttacaccgtattattgataatcattgctattatggcagtgctaacttggtttatccctgcgggggcctttatagaaggtatttacgagactcagcctcaaaatccacaagggatttgggatgtcctcatggcaccgattcgggctatgctaggtactcatccagaggaaggttcgctcattaaagaaacgagcgcagcgattgatgtagccttcttcatccttatggttgggggtttccttggcattgtcaacaaaactggtgctcttgacgtagggattgcctctatcgtgaagaagtataagggccgcgaaaaaatgttaattttggtactgatgcctttgtttgccctcggtggtacaacttatggtatgggggaagaaacaatggccttctatccactccttgtgccagttatgatggccgttggttttgatagcctgactggtgttgcaattattttgctcggttctcaaatcggctgtttggcatctactctgaatccatttgcgacaggtattgcttcagcgactgcgggagttggtacaggggacggtatcgtacttcgtctgatcttctgggttaccttgactgctcttagtacttggtttgtttaccgttatgcggataagattcaaaaagatccgactaagtcactggtttatagtactcgcaaagaagatttgaaacactttaacgtagaagaatcttcatctgtagaatctacacttagcagcaaacaaaaatcagttctcttcttatttgtgttgacattcatcttgatggtattgagcttcattccatggacagaccttggcgttaccatttttgatgactttaatgcttggttgactggtcttccagttattggtaatattgtcggttcatctacttctgcactaggtacttggtacttcccagaaggcgcaatgctctttgcctttatgggtatcctgattggtgttatttatggtcttaaagaagataagattatctcttccttcatgaatggtgctgctgacttgctcagtgttgccttgatcgtagcgattgctcgtggtattcaagttatcatgaacgacggtatgattaccgatacaatcctcaactggggtaaagaaggcttgagcggtctatcttcacaagtctttatcgttgtaacttatatcttctatctacctatgtcattcttgatcccatcttcatctggtcttgccagcgcaactatgggtatcatggctccacttggagaatttgtaaatgtccgtcctagcttgattatcactgcttaccaatctgcttcaggtgtcttgaacttgattgcaccaacatctggtattgtgatgggagctcttgcacttggacgtatcaacattggtacttggtggaaattcatgggcaaactcgtagtcgctattattgtagtgaccatcgcccttcttctccttggaaccttccttccattcctataa

SEQ ID NO: 1617 - DNA, 1332 bp, Streptococcus pneumoniae
atgaaaatagatataacaaatcaagttaaagatgaatttcttatatcattaaaaaccttgatttcctatccttcagtactcaatgaaggagaaaatggaacaccttttggacaagcaatccaagatgtcctagaaaaaactttagagatttgtcgagacataggtttcactacctatcttgaccctaaaggttattacggatatgcagaaatcggtcagggagcagagcttctggccattctctgtcatttggatgttgttccatcaggtgatgaagcagattggcagacaccgccatttgaagcaactatcaaagacggctgggtattcggacgtggtgtccaagatgataaaggtccttcgcttgcagctctctatgcagtaaaaagcttgctggaccaaggtattcagttcaaaaagcgcgtacgctttatctttggtaccgatgaggaaaccctctggcgctgcatggcacgctacaataccatcgaagaacaggccagcatgggctttgcacctgactcatcttttcctctgacctatgctgaaaaagggcttctacaggtcaaacttcatggccctggatcggatcaactagagcttgaagtaggaggcgcctttaacgttgtaccagacaaggccaactaccaaggtcccctctatgaacaggtttgtaacgatctcaaagaagctggttatgattaccaatccactgaacaaaccgtaacggttctcggagtgccaaagcatgctaaggatgctagtcaaggtatcaatgctgtcatccgactagctaccattcttgctcctctccaagaacaccctgctctcagctttcttgcaacacaagcaggtcaagacggcacaggaagacaaatctttggtgatatagcagatgaaccttctggtcacctatcctttaatgtcgcaggtctcatgatcaatcatgaacgttctgaaatccgtattgacattcggactcctgtcttagctgacaaggaagaactagtaaagttgcttacaagatgtgcacaaaactaccaactccgctacgaagagtttgactatctagcgcctctatacgtcgcaaaagacagtaaactcgttagcacactgatgcaaatctaccaagaaaagactggcgataacagtcctgctatttcatccggtggtgccacttttgctcgcaccatgccaaattgtgtagccttcggcgccttattcccaggagcgaagcagacagaacatcaggcaaatgaatgtgccgttctagaagatttgtaccgtgctatggatatttatgccgaagccgtctatcgacttgcaacttaa

SEQ ID NO: 1618 - DNA, 192 bp, Streptococcus pneumoniae
tttcaacatactataaaatcaggcaatacaacggctaaaaagtttgagtttatcgaaataccagtgcaaaaactgaaaaaagcgatttataaagctcatctcaaagattcagatgactttagaccagaaacatccacaccaaatctttttgaaagctgtttgaagctttgtccttgctttcttagttcatag

SEQ ID NO: 1619 - DNA, 237 bp, Streptococcus pneumoniae
tacaaaaaccaagctgaagaagacaaaccgctatctgataaatatattttcgaaaaaatattaggaaaaacatatgcagccttcaaaaaagatcaaattaatgagcgtgtcgagaaattaggtaagttaaaacctattacaataaattacaacggaaaatcagaagtaattgatagtaaagaaaaattacaagagcttatgaataaagccgttaaagacgaagtggctcaaatatag

SEQ ID NO: 1620 - DNA, 267 bp, Streptococcus pneumoniae
atgatgggagatgggatgaaagaatttcaatttgagagaaagcagcgtttttctttgaggccatatgcaataggagcttgttcggtcttgctaggaacgagtttattttttgctggtatgggtgctcagcctgtacaggatacagaaacgagttcagcactaatttcaagtcattatttggatgagcaggatttatctgaaaagctgaaatctgagttgcaatggcttgaattagaaaacaagcttttgaacttatgggagcattag

SEQ ID NO: 1621 - DNA, 153 bp, Streptococcus pneumoniae
ttgcgtttattaagaaaaacaaaaaacatcgatatacatttaactaaaaattattgtatgttatctcccttaattaggaatgataagggaataactagaaagatttgtgaatacaaactatttctgatatacaaaatatacagtaataatgaa

SEQ ID NO: 1622 - DNA, 216 bp, Streptococcus pneumoniae
actaatactcttcgaaaatctcttcaaaccacgtcagcgtcgccttgccgtatatctgcaacctcaaaacagtgttttgagctgacttcgtcagtcttatctactacctcaaaacggtgttttgagcaacctgtggctagtttcctagtttgctctttgattttcattgagtataaagagcttggcaacaggctctttttgtattgcgtttattaa

SEQ ID NO: 1623 - DNA, 165 bp, Streptococcus pneumoniae
ttgccaagctctttatactcaatgaaaatcaaagagcaaactaggaaactagccacaggttgctcaaaacaccgttttgaggtagtagataagactgacgaagtcagctcaaaacactgttttgaggttgcagatatacggcaaggcgacgctgacgtggtttga

SEQ ID NO: 1624 - DNA, 900 bp, Streptococcus pneumoniae
atggcaatatttttcatgatttttctgattgtttgtgtgctcctattggtgatagtcacactgagtacagtttatgtggttcgtcagcagtcggtggcgattattgaacgctttgggaaataccaaaaggttgctaatagcggtattcatattcgcttgccttttgggattgactcgattgcagcacggattcagttgcgcttgttgcaaagtgatattgtggttgagactaagaccaaggacaatgtgttcgttatgatgaatgtagcgactcagtaccgtgtcaacgagcagagcgtgacagatgcttactataaactcatacgtccagaatctcagattaaatcttatatcgaagatgctcttcgctcttctgttccaaaattaaccttggatgaattgtttgagaaaaaagatgagattgcccttgaagttcaacaccaagtagcagaagaaatgaccacttacggctacattatcgtgaaaaccttgattaccaaggtcgaaccggatgcagaagttaagcaatccatgaatgaaatcaatgcggcgcaacgtaagcgggtcgcagcacaagaattggcggaagctgacaagattaaaattgtcactgcagctgaagccgaagcagaaaaagaccgccttcatggtgtggggattgcccaacaacgtaaggcgattgtggatggattggcagagtctatcaccgaactcaaggaagccaatgttggcatgacagaagaacaaatcatgtctatcctcttgaccaaccagtatttggataccttgaatacctttgcctctaaaggaaatcaaaccatctttttaccaaatacgccaaatggtgtggatgatatccgaacacaaatcttgtcagcccttcgcgctgagaagaaataa

SEQ ID NO: 1625 - DNA, 192 bp, Streptococcus pneumoniae
catttcaggaaaaatcgcagtaaaaacggcacagccttctttaaatgtgctataatactagaaaaatacttgtggaggttccattatggcaatatttttcatgatttttctgattgtttgtgtgctcctattggtgatagtcacactgagtacagtttatgtggttcgtcagcagtcggtggcgattattga

SEQ ID NO: 1626 - DNA, 1152 bp, Streptococcus pneumoniae
atggctacattttatgttccggcagtcaaccttattggtaaaggtgttgtaaatgaagtgggtccttatatcaaggaacttggctataaaaaggcacttttggtgacagataagtacatcgaaggcagtgacattttacctaaggttttaaaaccactggatacagaaggaatcgaatatgtcatctttagcgatgtagagccaaaccctacttgtaagaatgtcacagatggggtagctgctttgcaagaacatggatgtgattttatcatcagtcttggtgggggttctccacaggatgcagctagttgtatttctatcatggctacaaatggtggaaaaccacaggattatgaagggcttcataagtctgctaaaaaaggcttgccagttgtggctatcaatacaacggcaggaacttctgcagaaatcactattaactatgtgattactgatgaagaacgcaaggttaagatggtaatggttgacaagaatagccttgctcttatctctgttaatgacccggaactcatgctttccaaacctaaaggcctgactgctgctactggtatggatgctctgactcacgctgttgaagctttggtaacacctggtgcttatgatgtaaccaagaaactgtctattggtgctattgagcttatcaaggaatatcttcctcgtgctgtagaaaatggacatgatattgaagcgcgtgaaggtatggtcaatgccatcttccttggtggtatgagctttaataatgctggtcttggttatgttcactcaatggctcaccaactcggtgcagtatataatttgccacatggtgtttgctgtgccatgttgctaccagttatagagcgtgaaaatgctaaacgtgtaccagaagctttccgcaatgttgccaaagccttgggacttcatgtagaaggtaaatcagatcaagaatgtgccgattatgcgattgttgagattgagaagctttctgagacagtaggtattcctaagaaactgactgaacttggtattgaagaaaaagatttcgactttgaatacctttctaagaatgccttgattgatgcctgcgcaccaggaaatccatttatgccaaccttagaagaaacgattgccttttataaagagttattttag

SEQ ID NO: 1627 - DNA, 1767 bp, Streptococcus pneumoniae
atgatccaacatccacgtattgggattcgtccgactattgatggtcgtcgtcaaggtgtacgcgaatcacttgaagtacaaacaatgaacatggctaaaagtgtggcagatttgatttcaagcacattgaaatatccagatggggaacctgtggaatgtgtgatttctccatctaccattggtcgtgttccagaggctgcagcttcccatgagttgtttaaaaaatcaaatgtttgcgcaacaattacagttacaccatgctggtgttatggtagtgaaactatggatatgtctccagatattcctcatgctatttggggatttaatgggacagaacgcccaggagctgtctatcttgcagctgtactagcttcacatactcaaaaagggattccagcctttgggatttatggtagagatgttcaggaagctaatgatacagctattccagaagatgtcaaagaaaaacttttacgttatgcgcgggcagctcttgcaactggcttgatgagagacactgcttacctatcaatgggtagtgtttcgatggggattggtggttctattgtaaatccagatttcttccaagaatacttaggaatgcgaaatgaatcggtagatatgacggagttcacgcgccgtatggaccgtggtatttacgaccctgaagagttcgaacgtgcgctcaaatgggtgaaagaaaacgtaaaagaaggattcgaccataaccgtgaagaccttgttttaagccgtgaagaaaaagatagacaatgggaatttgttattaagatgttcatgattggacgtgacttaatggttggtaacccaagacttgctgaacttggttttgaggaagaagcagttggtcaccatgctttagtagctggtttccaaggtcaacgtcagtggacagaccattttccaaatggggactttatggaaactttcctcaatactcagtttgactggaatggtattcgaaaaccatttgtatttgcgacagagaatgattcactaaatggtgtgtctatgctctttaattatctattaacaaatactccacaaatctttgctgatgtgcgtacttattggagtccagaggctgttgaacgtgtaacaggatatactttagagggtcgtgctgcagctggattcttacatctaatcaactctggatcttgtacattggatggtacaggtcaagctactcgagatggcaaacctgttatgaaaccattctgggagttggatgaaagtgaagtacaggctatgcttgaaaatacagacttcccaccagcaaaccgcgaatacttccgtggaggaggattctcaactcgtttcttgacgaagggggatatgccagtaacaatggtacgtctcaatcttttaaaaggggttggtccagtgctacaaattgcagaaggttacacacttgaacttcctgaagatgttcaccatactttagataatcgtacagatccaggatggccaactacttggtttgctccacgtttgacaggaaaaggtgctttcaagtctgtctatgacgtcatgaataattggggagctaatcacggagccataacatatggacacattggagcagacttgattaccttggcttctatgttgagaattcctgtcaatatgcataatgtacccgaggaagatatctttagacctaaaaattggtccttatttggaacagaagatctagaatcagcagactatcgtgcatgtcagttgttgggaccgctacataaataa

SEQ ID NO: 1628 - DNA, 729 bp, Streptococcus pneumoniae
atgtctcaagatgaaaaattaattcgtgaacagatttgtgatgtttgtcataagatgtggcaacttggttgggttgctgctaacgatgggaatgtatctgttcgattagatgaggataccattcttgcaacacctactggtatcagcaaaagttttattacaccagaaaagctggtgaagttaaatcttaaaggagagattttagaagcagaaggtgattactgtccttctagtgaaattaaaatgcacattcggtgctacgaagaacgtgaggatgttcgttcagttgttcacgcgcatccaccgattgcaacaggatttgctcttgcacacattcctttagatacttattcactaattgagagcgcgattgtggttggggcaattcctattaccccatttggagtaccgtctacaatggaagtgccagaagcaattacaccttatctgcccgatcatgatgtcatgctattagaaaatcatggagctctgactgtcggaagcgatgtcattacagcatactaccgtatggaaactttagaattagtcgcaaagacaaccttccacggaagaatgttactttctacaaagggcattgaggagcaagaaattgctcgtccgactttagaacgtctattctcaatgcgagaaaattataaggttacaggtcgtcacccaggctaccgtaaatataatggcgatggtagtataaaagaaacaaaaaaataa

SEQ ID NO: 1629 - DNA, 3087 bp, Streptococcus pneumoniae
gtgttccagaatatcttacaaaattatttgttattgaggaagttgtatgtaaataatgaggaaataaaaatggaaaataaaaaaatagcaaaacagattttaatagctacggctgttttaacaagttttttaggaagtaatttggtttatgcagatgtagttcaaagtaattctaataacagagctagtactgaaactgctagagtaacagggaataacttagaaaaacttattactaaagataaagaaattgataaagagatgacatatctttcagatatggattggtcttctgcaactcatggtgatatagataaaacaaaaacagtacaaaaagatgctccatttacaacaggaaataaaggagagcatactaagatttcattgctcacttctgatgataaagttaaatattttgataaaggaataggaacagtcgcagattctccatcagtaatcagctatgatatcagcggtcaagggtttgaaaaatttgaaacttatataggaattgatcaaagtgctaatagttctagatcagaccatgcagtagtggatagaatagaaatagaaattgatggaaaggttgtctattctagtagtgtaactaatccagaaggattcagatataatacccaggcacaatttattagtgtgacaattccacaaaacgctaaaaaaatatccttaaaatcattcgcaggagaacatacatggggtgatgaggttgtatttgctgatgctaaacttattaaaactgttagtactcaaactataactccagatcttcttaataaaggaattaatggaggagtatatctttctgatttagaatgggttgatgctactcatggtgatgacgataaatcaaaaacagttcagaaagataaaccgtttacacctggtaataacgggtctaataataaaataaaattactaattgacggtaaggaagtcgaatttaataagggattgggaactgtagcaagtaacccgtctagtataaaatatgatgtttcgggtgctaatgttacaagatttatttcctatgtcggaattgataggagtgcaaatcatttaaattcagattacgcagatattcaaaaatttgaagttgttgcggatggtaaagtcatttactcatcagattcaaaatatccaaaaggaattaagtatgatatatcggcatttctggttgatgttgaaattcccaaagatacacagacaatagaacttaaatcatattcagggaaatatacatgggctgacgaattggttttaggtggagccttgtttatggcaaatggtaaatttaagaatcctaatgattggtcagaagttgataaacgtcgtgaaattaataatgaacatccgttacttatgatgcctttatatgctaacggagaagagtttaaccaagggaaatatactttttggggaggagatacattaacaggtaagtgggagaatataccagatgacttaaaaccatatactgttatacagttacatccagatgatcttcctaaaagagatggagctgctagagatttttatgaacatatgctagaagaagcagcgaaatatgtaaatcctaagactggaaaaaatgaacctattccagttattctaacggtttacactgctggtaatatgccttattatacttcggcacattggttaagtaccagctggattgataaaatgtatcaaaaatatccaaatttgcatggtattttcagtactgagaattattggatttgggcaaatgatattgaaaataaggcggcagattacttaaaagtatcagctaaaaatggaggatattttatatgggctgaacaaaataatggttctgcaatagaaaaagcatttggaaaaaacggtaagatagcatttcagaaatctgttgataagtactggaagaaccttattttcatgttcaaaaatacacctgctgctgagggaaatgattcaactacagaaagttatatgaagggactttggctttcaaatcatacttatcaatggggtggtttgatggatacttggaagtggtatgagacaggtaaatggaaactgtttgcaagtggtaatatcggaaaaagtcaaggagatagacaatggttgactgaaccagagtctatgctaggagaagaagctttaggggtttaccttaatggaggtgtagtttataattttgaacacccagcttatacctatggtgtaaataataaagaaagcttactctttagcgaagtaataaaagaattttttagatatgtaatagcgcatccagcaccatccaaagaaaaggtacttgaggatacaaaagtattcatacatggagactattcaaataaaggaaatggtaagttctttgtaaacgtaaatactgatagagaacaaactccattatacatgactggtcgttataatgttattccagctattccaggtgttttaaaaacagataaattgaaagagtctgtttctggtagccgtattcagattaaggaaatcacttctccagaatttagctctactcaggctagaaaagaatacttaaataagctgtatcctatgaattatgaaggagatatctttgctcagaaattagataatagatggtttgtctataattataaggtaaatgagaatgttaaacagactgggaaattaaaatttaattctttagaaatggatgttgaatttgaacctcatacctatggtatttttgagagaataagtaatggattgaaagtgaatttaaataattttagaacaaataaagattcactatggtctaatgctcaagatgcaaatcaggcaaagaaactaccacaattgaccaagaaaggtgcgattaagtggattgaagaacattatatcaaagatactcagtttggagagaaaagggttacaaagatagtattaagaggtatagataaacttcctactattcattcattatcaggaacaaataattcctatgatcagccatctctcaattttgatcagaaaaatcatatggttactattaccattaacagtaacggaaatcttgaattcgaacttcatttttag

SEQ ID NO: 1630 - DNA, 2214 bp, Streptococcus pneumoniae
atgacgatttatattaataaggacgagaccgtttttcatttggcaatgaaagatagtagttatatttttagaattttagaaaatggggaacttcaacatctacattttgggaaaaggattcatgtcaaggaaaattataaccaattgatggcctatgaaaaaagaggatttgaagtatctttttctgaagaatttgaggatattcaacagtctatgatacaaaatgaatattcttcatatgggaaaggagattttcggcatccagcctttcaagttcaaggaatgaatggtagtaggataacgacactaaaatatcaaggttttgaacttgaaaaagggaaaaatcgtcttaactctctaccttcaacatttgatgatattggtcagtgtgcggaaacattaacgattattttaacagattccatattagatttaactgttagactaaattacacaatttttccggaatacaatgtcttagttagaaatacggaatttttaaataatagcaataataagttgactcttttgaaagcaatgagcttacagctagatctacctgatagtcaatatgactttattcaattttctggagcatggctgagggaacgtcagttatatagaacttcgcttagaccaggtattcaagcaatagatagcttgagatactcatcaagtcctcagcaaaatcctttctttatgctatcaaggagggaaactacagagcatagtggtgaggtttatggttttaactttatctattctggaaattttcaaaatatgattgaagttgaccattttgacaccgctagagtaacggtaggaataaatccagtagaatttcgttttttattaaatcctgccgaaagttttgtgacaccagaagcaattgtgatctattctgatcaagggatgaatcagatgagccaacaactatcagatttttatcgacatcatttagttaatcctaatttttctcaagctagtcgtcctataatactcaatagttgggaaacattttattttgacttgggtacagaaaaaattttagatttagcaaaggctgctaaagatttagggatagaattatttgtactggatgatggttggtttggtcataggaaagatgacaaaagttctctgggggattgggtaacagatagaagtcgccttcctgaaggtattggatttcttgcagatgaaattcacaaaataggtttacaatttggtttgtggtttgagcctgaaatgatttctattgatagtgatttgtacaagaatcatgccgattggactatccatttgttagacagagagaagtcagtaggaagaaatcaatatgtgttggatttgacgagacaggaagttgttgattacctttttgattctatttctaaaatcataatcaaaacaaatctggattatatcaaatgggatatgaatcgtcatataacagatatttatagtattgaacttgattctgaacagcagatggaatttggtcatcgatatatcttaggtctttatcagttattagatcgtttaataactaagttcccttcagttctatttgaatcttgttcttcaggtggtggacgttttgatttaggacttatgtattatgcaccgcaagcgtggacgagtgatgatacggacccgatagaaagattgaaaattcagcatggaacttcttatggatattctccatcaatgatgacagcccatgtttctatttctccaaatgaacaaagtagaagacaaacgagtttggacactaggacaaatgtagcttattttagttctttcggttatgaattagatgttacgagattgtcggtagaagaaaaagaacaagtgagagaacaaattcagttttataaaaaatatcgttcattgtttcaatatggggatttctataggataaacagtccttttagttgtgattctgctagttggcaagttgtttcaaaagataaatgccaatcgattttattgtatgctcaattgaatagtaagttgaatccaggttatacaagagtttattttagtggtttagataaagataaatgctattccgtctctggatttgatgagttcttttatggagatgaattaatgaatgctggaataaaagtcagtttaagtaatttagcactatgtgttccagaatatcttacaaaattatttgttattgaggaagttgtatgtaaataa

SEQ ID NO: 1631 - DNA, 1872 bp, Streptococcus pneumoniae
atgaaaattgaaaataaaaatgtaagacgtaatttcttttggggagatggtcgattttatactactgatatcgtaaacaaacgggcaggagtaatgatagaaaatgtttcgaaagaagaatttaccattacattggagaatggtataagactttcttcaaatcatttttcagcaatcgttagggaagagggagatacgcgaattcaggtttcttttgtttgtccttccattcgtttacgtttaatctttgaatcgagggatgatgttctttcgaagcaattagttttagaatcatctactgaggttattaaatctgtagaggtagagagttttgagtttgaaacagaagacaatattttctatccgaaaagacaagattgtattaaggaaatggcgaatttttccggtcattatgtagaattgggacaacctgtttatgcgaattctttattcttaggaatggaatttccaatgtctgaaaacaaggtagatggtagacactatgtatcaagatattacttgggaactgttgtaaatcaagaaaagagtttgtggtcttgtattattgggggagcatgttcttataaaaaagaagagattcaagaggcattttttgaatatgttgaaggaatagctcaacctagttatttccgtaaacagtataattcctggtatgaccatatgaccgatattacagaggaaggtattttaaaaagtttttctgagattcgagatggatttgaaaatcatggagttcatttagatgcttatgttgttgatgatggttggacaaactatcaatcagtttgggaattcaatcataaattcccaaatggtttgagaaatattaaacatcttgtaaatggatttggttcaagcctaggattgtggattggtccccgaggtggttataatgggacagaaatcattatgagtgattggttagaagcacatccagagttaaatattggatctaaaaatttgatttcaaatgatgtaaacgtggctgattttaactatctcaatcaaatgaagaaaaagatgttggaatatcaaaaagaattcgatatcagctattggaaaattgatggttggttacttcaacctgacaaacctgataagagtggaccgcacggtatgtataccatgacagcggtttatgagttcttaattcaactgttgatagatctaagaaaggagagaggaggaaaagattgttggttaaacttgacttcttatgtaaatcctagtccatggtttttacagtgggtcaatagtttatggattcaaatatctcaagatgtaggctttacagagaatgcaggtaatgatatcaatcgtatgattacttaccgagatagtcagtatcaagaatttttggaaaaacgtgagatacagttacctatgtggtcgctttataatcatgaaccaatctatgctgtcagtgcaaatacctggtacatggatcatcaaatgtttgcatcaataccagattttgaagcttatctattatttatttcaacaagagggaatgctttttgggagtttcactattcttttgatatgtttgatgaagaacgctggaaagccaatgctcgtgccgtcaaatggatagaggagaattatcaaacactaaaatatagtaaaaaaataggaggaagtcctgaaaaatttgaaatttatggttataagtgtcacaatcagaagacttctactgaaattctctctctgagaaatcctgctcagattaaacaaaaaataaaaatagagaatctttcgatagagaattttaccagagtaattggagattttactattcaagaagatgagatagaattggcaccgtactctatcgtgatactgaagaagtaa

SEQ ID NO: 1632 - DNA, 1320 bp, Streptococcus pneumoniae
atgaaacatacacttgaaactatcaatagtagaactcagtggtttagagaagcaagatttgggatgttcattcattgggggttatattctattccaggaaaaggggaatggattcgtagtcatcagaaattatctattgaagattatgaaccatattttcgagcttttgatcctaaggaatataaccctagagaatgggctaaacaagcaaaagctgcagggatgaagtatatggttttaacggctaaacatcatgatgggttttgtttgtttgattcaaaatttacagattataaagcaacaaatacacctgcaggtagagatttagttaaagaatttgtagatgctgttcgagctgaaggtttaaaagtaggcttatattttagtttgattgactggcaccatcctgatttccctaaatatgctgatctaaatcatccaatgagaggaaatgaagcctatcgagatgagaaaattaactttgacagttatttggagtatttacacaatcaagttaaagaaattgtaactggttatggtcagattgacatattatggtttgattattcttatgaagacatggtgggtgaaaaatggggagcttcaaaattaatagacatggttcgtcattatcagccaaacgttatcgtagataatagattagaaacatcaggtgaaggattcggaagtatcgttacagatgaaattacctcttacgctggagattttgttagtccagagcaaattgttcctcacgaaggtattcgaaactttaaaggtgaacctgttccttgggaactttgtctaactatgaataacaattgggcttataatcctacagattatctatataagtctagtcaaactttgataagaaagttagtggaatgtgttagtaaaaacggaaatatgattcttaatgtaggcccagatgctttgggaagaattaatgattcaagtaagaaaatattagataattttcatcgatggatgtctcgaaatggtgaggcaatttatggatgtagtggagatgaaaatttaccaaaaccagattggggatactatactcgtaatggaaatacggtttatgctcatgtatttgaacaacctataggtcctttagctcttcttggtattagtaaagaaaacgtaaaaagaatgagctttcttcatgatggaagtgaggtgaaaatttcagaaagctggacgaccaatgcctacaaaggaatttgttttgcacagtttggagaagttccacattttacctatccattaccagacttgattgatagcgtaatcaaaattgagttgagagagtag

SEQ ID NO: 1633 - DNA, 186 bp, Streptococcus pneumoniae
atgaatgaacatcccaaatcttgcttctctaaaccactgagttctactattgatagtttcaagtgtatgtttcatccttttactgctcctcctcctaaagcttcaatgaagtatttacttgtaaatgcgaatagaatgattggtggtaatacgattacaacaatagctgaaaatagaccattataa

SEQ ID NO: 1634 - DNA, 885 bp, Streptococcus pneumoniae
tattttattcagagaaagaaaaagactgaaaggtgggaaatgattatgaatacacatataaatggtattagtaaaaaaggcaaagttcttatatatggttatatgctccttaccattttaatttctattttccctattgcgtggatttttttatcatcattaaaagcagatcctatgaaaaatccaggtattagtttaccgactgactttactcttgaaggttatataaatgtttttacaaaacttcatgttttcacttacttttggaatagctttaaagtagtgtctatatcagttattattagcattgttatgatctccatgtcttcatatgttattgctaggatggaatttagagggaagaagttggtgacttctatgctgtattctactctatttattccagcaacagctatgacttttccagtttatagattagtaaatgagttggggatttataataccccagttgctctaattctggtctactcttgtagtggaattgctatgagtttctttattataaagaactattttgaaattattccaaaagaattggaggaggcagcagagattgatggtgcgacatatgctcaaactttttggaaagtgatgttaccaattgctagaccaggaattttaacagcagcagtacttgcctttattaataactggaatgaatattattgggcatctatgttggtgattgataaaaatgaattaacagtaccagcattactaggtcaatttactacaagttttaatactaattataatggtctattttcagctattgttgtaatcgtattaccaccaatcattctattcgcatttacaagtaaatacttcattgaagctttaggaggaggagcagtaaaaggatga

SEQ ID NO: 1635 - DNA, 930 bp, Streptococcus pneumoniae
atggcacaaaaaattatgagcctacaaaataggaagaatcaaaaaagacgatttatctttttatttcttttgccaacgttgatttgtttctttctattttatttttattctgtagtaacaatctttttaacttcatttgctaaatgggattatacaaatttaaacacccctgagtttcttggatttgataaattatttgaaaattataggtatgtttttaaagaatacccattttttacagaagctctaattaattctgttcgttgggctgtaattggtgttattattcaagttcctttagctgtatctgttgcaattacattatctaagaaattaaaaggctggaagatatctaggaatctttatattgtaccaagtatcatttctagtgctgctatgggcttgatttttcttcaaatctataatccaaactatggtgttgttaaccaaattattcatctatttaatccatcgtttaaagattcagtactgttgactccaggattaaatatagtagctatgactggcgcttatatcttctttgcaggagcatcaaccattatgattcttgggcaaatttttgctattccagaagaagttcaagaagctgctattttagacaatattactggttggaggaaagagtggtatattacgattccgatgattaaggggacaattaaaactgtttcaattatggcagcaacttcagggtttttgctctataacgaagtattctttttgacaaatggtgctgcaggaacaaaaagtatcagttttgttattcgagaattagcagtggctagctcacgaactcagtatgctcgtgcaaatacaattggagttatacaaattttaggtggaatgttgattatcgtttgtattaatattttattcagagaaagaaaaagactgaaaggtgggaaatga

SEQ ID NO: 1636 - DNA, 1293 bp, Streptococcus pneumoniae
atgaacaaaaaaagtcttttgaaatgcgctgttatcgggttagtagctacctttggtttagcagcttgtggaacatctaaggatgcaagcggtggaagttcttctggtaaagaagtattagaattttatcatgggtatcatcatagtgaagatgaatggcctgtagcgaagactatgcgagatttatatgataaatttgcagaagaacataaagatagtggtgtagaatttaaaccaacccctgtaaatggtgatttgaaggatataatgaataacaaggttgctagtggtgagtttcctgatgtgattgacctagcaggtaatgcagtatcattagctgcgattgaacaaaaacttgttttagatttgaaaccatatatcgattcaaataagcttgaaaaaaatgttggtttgaactataagcaaaaccaaaaagatggaaaaatttatacagttcacgaacagttatttacaatgggtttgtggtacaacaaggacatatttgcaaaagcgggtgctaagacacctgatcagtggaatacttgggatgatttcactcaggcaatggcaagcattagaaaacaagatggagtgtatgcatttggtgctggagaaccatctattcgcttgtttaatacagtattaggaaccacagaaaatggacgtaaattattagacaagccattaacaaaagaaggaattgaatctaaagaatttgcagatgctttgaaaatggttatgaaagaaattcaagctaatggttctaagaatgctggtggcgatgccaatgcttattccaaagatttccaagaaggtaaatctgcagtcttctttaatggtgtgtgggcttctggtgagatgtctaagaacccaagtcttgcacctggaatctatcctgcaggtgtagcaattagttcttctggaggtggtatcactatctcaagtaagatgtctgaagctaaacaaaaactagctcttgagtttttgaaatatatgactagcgatgatgtacaaaaagtaatttttgaaaaagtaggagcaaatccttctaatgaaaatgtaaatgtaaaagaactttcagaaaagagttcagaagctactactaaaattttaggacaagcaatcactcaagttaagaatgcaaaagcagttgttccaactgtaagtgatgtttggggtggcgatgtacacacagctattatcaatgcattgacagaaagtgctgctgaaaatgtagatgttgatcaaaaagtaaaatctactcaagatgtgttgaaatcattgattggttaa

SEQ ID NO: 1637 - DNA, 1404 bp, Streptococcus pneumoniae
atggaagcggttttagcaatagatttaggtgcgacttctggaagagcaatcgttggttacctttctgaaaataaactagtaatggaagaaataaatcgcttttctaatctacctattagagtaaaagggcatttatcttgggatattgactttctactagctaaaattcttgaaagtatccgcttggctaatactagttacaagattttatctatcggtattgacacatggggagttgattttggactgattgataatgaaggtaagctgttattacaacctgttcattatcgtgatgaaagaacaaagggagtgttaaaggaaatatctgaaatgactgaattagaaaaactgtattcagagacaggaaatcagattatggagataaataccttgtttcaactctttaaggcacgtcaagaatctcctgactctttctataagaccaataagattcttttaatgccagatttgtttaattatctcttgacaggtaagtttgctacagaaaaaagcattgcttcaacaactcaattatttgatcctaggagtcaaaattggaatcagaatatcttaaaactatttgaattggattcatctttacttcctgaaattgtttcagagggaaatgttcttggaaggataaaagaggagtatggtttaggcgatattcctgttgtgaatgtttgtagtcatgatacagcaagcgcgattgtctcagtacctaagacagaaggtagtttatttatttcatcaggtacttggtctttggttggagtggaacttacttcaccgattcttactaccgaatccttcagttatggatttacaaatgaagtcggtaaagatggagtgattacatttctgaagaattgtacagggttgtggatcatagaggaactaagacgttcatttgaacgaagagggaaagcctattcttttgatgatattaggacaatggtggagaaagaaaaagaaaatcttcctctgattgatactgaatcaactgaatttgcaacagaatctgatatgcacaagactttgacagaatatctagcttatcatcatgaaactagagagtggacagatggacaactatttaagattgtttatgaaagcctagctgaaacgtataggaaagcgatagagttactagaagaactaactcataaggtttataagaggatatatgtgattggaggaggtgctagagccagttactttaaccaaatgattgctgatagaactggtaaagaggttcttacaggttcgactgagggtacagctgtggggaatattgttgtgcagctattgagtcaaggtaaaataaacgaggatacagagttaaaggatattatgacaaatattgctgatacacaatattattatcctcagctatcataa

SEQ ID NO: 1638 - DNA, 177 bp, Streptococcus pneumoniae
atgaatattgggttaacatttgaacattattcaagtaagcgttcacatattgaaaaaataaaacgtggggattataataaagttaatcaaggacgaagagagaagaaaaatggaagcggttttagcaatagatttaggtgcgacttctggaagagcaatcgttggttacctttctga

SEQ ID NO: 1639 - DNA, 774 bp, Streptococcus pneumoniae
atgataaaagatgaacgtgtacttgaattgattgaaattattataaagaaaaaaagaattgccgtaaaagagctggcagaaatcactttctccagcacaagtaccttacgtcgtgatttaattttcttagaaaatcaaggtcttatcaaaagaaagcacggatacgtgaccctgtcctctatgaacacaattgaactttctcatcaaatacgggaaggagaaagtactaggcaaaaaagactaatcgctagtctcgctaaagactttattcggtctggtatgtgtatctatctggattccagtacgactgtctacgaactctgtccctatctttctgaacttgataatttgattatttttacaaatggtttacatactgcacaaaccctatctgaaactgttaaagatagctccaaaatctttatcacatctggcgaggtcaaacatcaatcctgttccgtggtcaactatgataaggaaaattctttattagatcattttaatatcgatttagcattttgttcagcaagaggtattgatgaccaatatgtttatgaagcttctctcagccaagctatttcaaaaaagaatattattgacaaagcccatgaaaccatcttactgattgatagttctaaattttacaagactggattttttaaaattaatcccctatccaaatacacaacctttatttctgacaccttgccagaccaaaaattattagatgcagtagaattatttgatggagaatgggtttctgatattcaatga

SEQ ID NO: 1640 - DNA, 219 bp, Streptococcus pneumoniae
agactttgtcgcctagaccctatatttcaagaattaagtgaccttgatgatctaaatgtattgtggtatactatttttgtcatcggttaccgattacgttcctatgggttcgtgagaggaggtgaaactaatgagccttatcatagagctcgctcttactattatagcggatgttatagctggaattatcttgtatttcgtctgcagatggctagatag

SEQ ID NO: 1641 - DNA, 207 bp, Streptococcus pneumoniae
tctacaatagttcaagtattaagtgaggttgatgatctaaatttagtgtggtatactatttttgtcatcggttaccgattacgttcctatgggttcgtgagaggaggtgaaactaatgagccttataccagagcttgctcttactattatagcagatgttatagctggaattatcttgtatttcgtctgcaaatggctagatggtaa

SEQ ID NO: 1642 - DNA, 1506 bp, Streptococcus pneumoniae
gtgaaaaaaattagcttattactagccagtctatgtgccttgtttttagtggcttgttccaatcaaaaacaggtagatggtaaactcaatatcgtgacaaccttttaccctgtctatgaatttaccaagcaagttgcaggagatacggctaatgtagaactcctaatcggtgctgggacagaacctcatgaatacgaaccatctgccaaggcagttgccaaaatccaagatgcagataccttcgtttatgaaaatgaaaacatggaaacatgggtacctaaattgctagataccttggataagaaaaaagtgaaaaccatcaaggcgacaggcgatatgttgctcttgccaggtggcgaggaagaagagggagaccatgaccatggagaagaaggtcatcaccatgagtttgacccccatgtttggttatcaccagttcgtgccattaaactagtagagcacatccgcgacagcttgtcagcagattatcctgataaaaaagagacctttgagaagaatgcagctgcctatatcgaaaaattgcaatccttggataaggcttacgcagaaggcttgtctcaagcaaaacaaaagagctttgtgactcaacacgcagcctttaactatcttgccttggactatggactcaaacaagtcgcaatctcaggcctttctccagatgcagagccatcagctgctcgcttggcagaattgacagagtatgtcaagaaaaataaaatcgcctatatctattttgaagaaaatgcctcacaagcccttgctaacacactttcaaaagaagcaggtgtcaaaactgatgtcctcaatcctttagaaagtctgacagaagaggacaccaaggatggagaaaactacatttccgtgatggagaaaaacctcaaggctttgaaacaaacaacagaccaagaagtcccagcaatcgaacctgaaaaggcagaggataccaagacagtccaaaatggttacttcgaggatgcagctgtcaaggaccgcaccttgagtgactatgcaggtaactggcaatcagtttatcctttccttgaagacggcacgtttgaccaagtctttgactacaaggctaagttgactggtaagatgacccaggctgagtacaaggcttactatacaaaaggctatcagacagatgtgactaagattaacattactgataatactatggaatttgttcaaggtggacaaagcaagaaatacacttacaagtatgtcggtaagaaaattttgacttacaagaaaggcaatcgtggcgtgcgtttcctctttgaagccacagatgctgacgctggacaattcaaatatgttcagtttagtgaccacaatgttgccccagttaaggcagaacatttccatatcttttttggaggtacaagccaagaagctctatttgaagaaatggataattggccaacctactacccagataacctatctggccaagaaatcgcccaagaaatgttggcgcattga

SEQ ID NO: 1643 - DNA, 807 bp, Streptococcus pneumoniae
atgcttagtttattatcttacgactttatacaacgcgcctttttggcggttattgctatgagtcttttctcaccggtattgggaaccttcctcatcttgcgtcgtcagagtttgatgagtgatacccttagccacgtctcactttcaggtgtagcctttggtctggttttggggatttctccaactgtttctactattgccattgtcttgattgcggcggtctttctggagtatctccgtacggtttacaagagctttatggaaatcgggacagctatcctcatgtcaacaggtctggctgtttctctgattgtcatgagcaagggtaaaagctcgagttcaatgagtttggaccaatatctctttggttcgatcgtgactatcagtgaagaacaggtcatttccctctttgtcattgcggcggttgttttgattttgacctttctctttcttcgtcctatgtatatcttaacttttgacgaagatacggcctttgtggatggcttgccagttcgtaccatgtccattctttttaacatggtgacaggggtggctattgcccttatgattcctgcagcaggagctcttctggtatcgaccattatggtcttgccagctagtattgccctgcgtctggggaaaaactttaaatcggttatgctgcttgccagtgcgattggctttttgggaatggtagcaggactttacatttcctactatgcagaaacacctgcaagtgcaagtattaccattatttttgtaactgtctttatactaatcagtttagtaagacgttttatcaaatag

SEQ ID NO: 1644 - DNA, 705 bp, Streptococcus pneumoniae
atgagatatattacggtagaggatttgtccttctattatgataaggagcctgttcttgaacatatcaattattgtgttgatagtggggaatttgttaccttgactggggaaaatggagcggctaagacgacgctcatcaaggctagtcttggaattctgcaaccacgcattggaaaggtggctatttcaaagacaaatacgcaaggtaagaaattgagaatagcctatcttcctcaacaaattgccagttttaatgctggttttccaagtacggtctatgaatttgtcaagtcgggtcgctatccgagaaaaggctggttccgtcgtttgaatgctcatgatgaggagcatatcaaggctagtctggactcagttggcatgtgggaacatcgagacaaacgcttggggtctctatctgggggacaaaagcagcgagcggtgattgcgcgtatgtttgcttctgaccctgatgtgtttatcctagacgagccgacaacggggatggatgcaggaagtaaaaatgaattttacgaactcatgcaccacagcgcccatcatcatggcaaggctgttttgatgattacccatgaccctgaagaagttaaggattatgcggatcgcaatattcatctagtccgtaaccaagactcgccatggcgttgtttcaatgttcatgagaatggccaggaggtgggccatgcttag

SEQ ID NO: 1645 - DNA, 192 bp, Streptococcus pneumoniae
aattcatttttacttcctgcatccatccccgttgtcggctcgtctaggataaacacatcagggtcagaagcaaacatacgcgcaatcaccgctcgctgcttttgtcccccagatagagaccccaagcgtttgtctcgatgttcccacatgccaactgagtccagactagccttgatatgctcctcatcatga

SEQ ID NO: 1646 - DNA, 501 bp, Streptococcus pneumoniae
atgtcaaagaatagtatttttctcttaaaaaagagaagtctaaaaggaaaggagtcagatatgagacagctagcaaaggatatcaatgcttttttgaatgaggtgattttgcaggcggaaaatcagcatgaaatcctaataggtcattgcactagcgaggtggccctgaccaatactcaggagcatatccttatgctcttgtcagaggaatctttaacaaattcagaattggcccgtcgtctcaatgtcagtcaggcggcagttaccaaggccattaagtctttggtcaaggaagggatgttggaaacatctaaagattctaaagatgcgcgtgtgattttttatcagttgactgacttggctcgtccaatcgctgaggagcaccaccatcaccatgagcatacacttttaacctatgaacaagtggcgactcagtttactccaaatgaacaaaaagtgattcagcggtttttgactgctttagtaggagaaatcaaataa

SEQ ID NO: 1647 - DNA, 1284 bp, Streptococcus pneumoniae
ttgtggagctacaaaatgcttaaacgcttatggatgatcttcggaccggtcttgatcgctggtttgttggtttttctgctcattttcttttatcctactgagatgcatcataatctaggagctgaaaagcgttcagcagtggctactactatcgatagttttaaggagcgaagtcaaaaagtcagagcactatctgatccaaatgtgcgttttgttcccttctttggctctagtgaatggcttcgttttgacggtgctcatcctgcggtattagctgagaaatacaatcgttcctaccgtccttatcttttaggacaggggggagctgcatcgcttaaccaatattttggaatgcaacagatgttaccacagctggagaataaacaagttgtgtatgttatctcacctcagtggttcagtaaaaatggctatgatccagcagccttccagcagtattttaatggagaccagttgactagttttctgaaacatcaatctggagatcaggctagtcaatatgcagcgactcgcttactgcaacagttcccaaacgtagctatgaaggatctggttcagaagttggcaagtaaagaagaattgtcgacagcagacaatgaaatgattgaattattggctcgttttaatgaacgccaagcctccttttttggtcagttttcggttagaggctatgttaactacgataagcatgtagctaagtatttaaaaatcttgccagaccagttttcttatcaagcaatagaagatgttgtcaaagcagatgctgaaaaaaatacttccaataatgagatgggaatggaaaattatttctataatgagcagatcaagaaggatttgaagaaattaaaggattctcagaaaagctttacctatctcaagtcgccagagtataatgacttgcagttggttttaacacagttttctaaatctaaggtaaacccgatttttatcattccacctgttaataaaaaatggatggactatgctggtctacgagaggatatgtaccaacaaacggtgcagaagattcgctaccagttagaaagtcaaggttttaccaatatagcagatttttctaaggacggcggggagcctttctttatgaaggacaccattcaccttggttggttgggttggttggcttttgacaaggcagttgatcctttcctatccaatcccacaccagctccgacttaccatctgaatgagcgctttttcagcaaagattgggcgacttatgatggagatgtcaaagaatttcaatag

SEQ ID NO: 1648 - DNA, 240 bp, Streptococcus pneumoniae
atggatatcaaatcagaagttattgaaattattgatgagttgtttatggaagatgtttctgacatgatggatgaagatctttttgatgcaggtgtcttggatagtatgggaacggttgagttgattgtggagattgagaaccgttttgacattcgtgtccctgtaacagagtttggtcgtgacgactggaatacagctaataaaatcatagctggtattgtggagctacaaaatgcttaa

SEQ ID NO: 1649 - DNA, 1245 bp, Streptococcus pneumoniae
atgatggagttttttcaacagcttcctcatttagagccatatggcaatcctcagtattttgtttatgtgattgctgcaaccttgcccatctttataggcctctttttcaagaaacgctttgcctggtatgaagtgttggtaagtctcttctttattgtcaccatgttggtgggtggaaagaccaatcaactagctgccttgggtatttacctttgctgggaaatattgctcctgcttttctacaagcattatcgaaaaagcaaggatggcaagtgggtcttctacttagttagttttctgtccctacttccgattatctttgtcaaggtgcaaccagctatcaatggaacgcagtctttgcttgggttcttgggaatttcttacctgacctttcgttctgttgggattatcatcgagctgagagatggagtgattaaggattttaccctctgggaattcctccgtttccttctcttcatgccaactttctcgagtggtccaatcgatcgctttaagcgatttaatgaaaattatcaggccattcctgagcgagatgagttgatggatatgctggatgaatctgtccgctatatcatgcggggctttttgtataagtttatcctagctcatgttttaggagagaccttactccctcctctgaagaatttagccttgcagtcaggtggcttctttaatctctatgccttggcagttatgtatacttttggtctggagctcttctttgactttgcaggttattctatgtttgctttggccatctcaaacttgatgggaatccgtagccctatcaactttaacaagccctttttatcaagggatttaaaggagttttggaatcgctggcatatgagtctgtctttctggttccgtgactttgtctttatgcgaatggtgatggtgttaaccagaaagaaagtctttaaaaatcgtaatgtaacctcaagcatggcctacattgtaaatatgctgattatgggattttggcatggcgtgacctggtactatatcgcctatggactctttcatggactaggcttggtcatcaatgatgcctgggttcgcaagaaaaaaacgctcaataagaaacggaaaaaagcagggaaggctgccctacctgagaatcgctggattcagtttcttggcatggttgtcactttccatgttgtcatgttgtcattcttaatcttttctggattcttgaataatctatggtttaaaaaataa

SEQ ID NO: 1650 - DNA, 1551 bp, Streptococcus pneumoniae
gtgtcaaataaaccaatagcagatatgattgaaaccattgagcattttgctcagacacagcctagctatcctgtctataatgttttggggcaggaacacacttatggcgatttaaaggctgattcggatagtttggctgcagtcattgaccaactaggcttgcctgagaagtctcctgtggttgtttttggtggccaagaatatgaaatgttggcaacctttgtagcgctgactaagtcaggtcatgcctacattccaattgatagccattcggccttggagcgagtttcagctattttagaagtagcagagccaagcttgattattgccatttcagcctttcccttggagcaggtttctacaccaatgataaatctagctcaggttcaagaagcctttgcccaagggaacaactatgaaatcacgcatccagtcaagggagatgataattactacattatctttacttctggtacgactggtaagcctaagggagtgcagatttcacatgataatctcctcagctttacaaactggatgattacggataaggaatttgcgacaccgagtcgtccgcaaatgctggcacagccaccttattcttttgacttgtctgtcatgtattgggcaccgaccttggcacttggtggtacgcttttcactcttccttcagtcatcactcaggactttaagcaactctttgcggctatcttttcattgccaatcgctatctggacatcaacaccatcctttgcagatatggccatgttgtctgaatacttcaacagtgagaaaatgcctggaatcacgcatttctactttgatggtgaagaattgacggtcaaaacagctcaaaaactgcgcgagcgtttcccaaatgcccgtatcatcaatgcttacggcccaacagaagcgacagtagctctgtcagcagttgccgtgacagacgagatgttagcgactctcaaacgcctaccaatcggctataccaaggctgattctccaacctttatcattgacgaggaaggaaataaactgccaaatggtgagcagggagaaatcattgtttctgggccagctgtttcaaaaggttatatgaacaatcctgaaaaaacagcagaagccttctttgagtttgaaaatctgccagcctatcacacaggcgatgtgggaaccatgacagatgagggcttgcttctctacggcggacgcatggacttccagattaagtttaacggttaccgcattgagttagaagatgtctctcaaaacctcaacaagtctcgctttatcgaatctgctgtcgcagtaccgcgctataacaaggaccacaaggtacaaaatctattggcttatgtcatcttaaaagacggtgttcgtgagcagtttgagcgagatatcgatattaccaaggccatcaaggaagacctgacagacatcatgatgtcctacatgatgccatctaaattcctttaccgagacagtttgccactaactccaaatggaaagattgacatcaaaggattgattaacgaggtgaataagagatga

SEQ ID NO: 1651 - DNA, 198 bp, Streptococcus pneumoniae
aaaaataagctagtaagaatcactcttattttagcgaaaaattacagaaatgaatggtttttcttgatgaaacagagaaaagaattgtacctctttcttggtcggacagccttgtattttcttatctttctagggctgctttacttctttagctatcttggtcagggtcaaggaagctttatctataatgaattttaa

SEQ ID NO: 1652 - DNA, 522 bp, Streptococcus pneumoniae
ttggaaattttttcaaatacgatttgggtttcttccattatacttgtttttgtaacggagttattaaataaaacggaaagttactggggatattctaatacagcatactctattggtattataattagtggcttaattgcttttaggctatctgaaaagttccttgctgctaaatgggaaagtattctttttcctcttgtagctatggcaatagtgacactgactattctatattttccaaacgcacagatgtttttattattttcagctttagttggtatgttatcgcaactaaaagaagttcctgaaagtgtatttcttcaggaaacagtagaggaaaatcatttagttaatgtctattccgttcttgaagtgatttctacattagcattttcagtatttgttttgctaatgagctatattactgagagttttggtattagcatcagtttttggctatcagccatttgtctgatgatagaagctattttaatttatatcagacgagattattttaaatga

SEQ ID NO: 1653 - DNA, 711 bp, Streptococcus pneumoniae
atgtctaattcatttgtcaagttgttagtctctcaattatttgcaaatttagcagatattttctttagagtaacaatcattgctaacatatacattatttcaaaatcagtaattgccacatcactagttcctatcttaataggaatatcctcttttgttgcgagtcttttagttccgttggttactaaaaggttagcgctaaatagggttttatctttatctcaatttggaaagactatattattggcgatactggtaggaatgtttaccgtaatgcaatccgtagcgcctttggtgacctatctatttgttgttgcaatttccatactagatggttttgcagcacccgtttcctatgctattgtgccacgctatgcgaccgatttgggtaaggctaattcagccttatcaatgactggtgaagctgttcaattgataggttggggattaggtggactcttgtttgcaacaattggtctgttacctaccacgtttatcattttagtcttgtatatcatttctagctttctgatgttatttcttcctaacgctgaagtggaggtgttagagtcagaaactaatcttgaaattttgctcaaaggttggaagttagttgctagaaatcctagattaagacttttgtatcagcaaatttattggaaattttttcaaatacgatttgggtttcttccattatacttgtttttgtaa

SEQ ID NO: 1654 - DNA, 186 bp, Streptococcus pneumoniae
ggttttatctttatctcaatttggaaagactatattattggcgatactggtaggaatgtttaccgtaatgcaatccgtagcgcctttggtgacctatctatttgttgttgcaatttccatactagatggttttgcagcacccgtttcctatgctattgtgccacgctatgcgaccgatttgggtaa

SEQ ID NO: 1655 - DNA, 189 bp, Streptococcus pneumoniae
gataaagataaaaccctatttagcgctaaccttttagtaaccaacggaactaaaagactcgcaacaaaagaggatattcctattaagataggaactagtgatgtggcaattactgattttgaaataatgtatatgttagcaatgattgttactctaaagaaaatatctgctaaatttgcaaataattga

SEQ ID NO: 1656 - DNA, 993 bp, Streptococcus pneumoniae
atgagccccatttgtgaaccccatttctcagatacgagttatggtttcagaccaaataggtcatgtgaaaaagccatcatgaagctcttagaatacttaaatgacggctatgagtggatagtggatatagacctagagaaatttttcgatacagttcctcaagatagattgatgtccttagtacataacattatcgaagacggagatacggaatccttgattcgtaagtatcttcattcaggtgttatcattaatggtcaacgttataaaacactagttggtacaccacagggaggaaatttatctcctctcttatccaatatcatgcttaatgaattggacaaggaattagaaaagaggggacttcgatttgtgcgctacgcagatgattgtgtgattacggtcgtaagcgaggcagccgctaagcgtatgatgtattcagtcagtcgttttattgaaaaacggctaggtttgaaagtaaacatgaccaagactaagattaccagaccaagagagttgaaatatctaggttttgggttctggaaatcatcagatggttggaaaagtcgtccacatcaagatagtgttcggagatttaagcttaaattgaagaaactaacacagaggaaatggagtatagacctaacaagacgtattgagcaactgaatttgtctattcgaggatggataaactatttctcattgggaaatatgaaaagtatagtcgccagcatagatgagcgcttgcgtactcgcctacgagtgattatctggaagcaatggaagaagaaatcgagacgattatggggattgcttaagttaggggttcctaaatggatagcagataaggtatctggctggggcgaccattatcaattagtagctcagaagtcggtacttaaacgtgctatatcaaaaccagtcctggaaaaacgtggactggtttcgtgtttggattattaccttgaacgacatgcgttaaaagttagttga

SEQ ID NO: 1657 - DNA, 282 bp, Streptococcus pneumoniae
atgtcaaaattgctagataagatattatcacgcgaaaatatgctggaagcctacaatcaagtaaaatccaataaaggctcagctgggattgatggaatgactatcgaagagatggataattatctcagacaaaactggcgcttgactaaggaactgataaaacagagaaaatataagcctcaaccagttcttagagttgagatacctaaaccagacggaggtatccgtcaactaggaattccaacagttatggatagaatgattcaacaggccattgtctaa

SEQ ID NO: 1658 - DNA, 246 bp, Streptococcus pneumoniae
agcctccttatccgctatatacgccttactatcacgttcctgttcgtagagccacgatttcgctatcccttcctctccctgctacctcacgatagtcaggcttgggaatcgctattgggttcaccggtagcaggtgcccaccgaggacttacacctcagatatacgacatgcccgtcgtactacaaaaaaacgacgatttaaatcgtcgttttgctaagataaatatgcattttttttttttttga

SEQ ID NO: 1659 - DNA, 198 bp, Streptococcus pneumoniae
atgcttaatgcgaaaattttttatatatttttatgtttgatcgttatcgaaactacaggcttgttgttgttgaaaagaggtctcgaaatgggttatttagacacagaagctattatcctcgcagttttttcatttgctttttacaacctatgttcattcgcttgggtctgctctacaataaaaaacaataaaaaataa

SEQ ID NO: 1660 - DNA, 588 bp, Streptococcus pneumoniae
ttgtttgtttttgctgatgatagcttatcggcaaactctaaagttgtatctggtgaggctcagtttgagaatggctcatcagtgcggttcggagatacgcaagtaaatattttaagcgatgaagttcttgaggttgtcaatccagatggaagtgtagacactattgaacgacgtgctgacggcgtctatatcaatggggcattttatatggcttatcaaaagaatgaaatcgacctaaatatatcttttagatcatacgatcctaatgtttggaattacgtcaacacaatacatgggaataaacaagctaacacattcgctaacttcatgactggtgctggaatcagttatatgattggtaggataggtgctttattgggggggccatggggtgcaataattggtggagcatattttggtatacaagcttatcagtcttacttggattcacaaagcccatatccatactacataacaagtacttatatccatgttgctcaaagaaaatggaagtttatcactgaatactatagaaactcaaactatactgggtatgtaaaaaccgtaacaacctatgtgaatttctaa

SEQ ID NO: 1661 - DNA, 204 bp, Streptococcus pneumoniae
gtgccgaaatggtcaaatcctgattatgtcaacgaattagacccaaaaatcgttgatatgctagtagaatttcacaagtcacaaggcactttggaaactcccgaggcgcaagcagaaatcgcccaaaaacgtgaagaaatcgagcaaaggagagctgagcttgagggtaaaaaacaagagcttttgaaccgcttgaacaaatag

SEQ ID NO: 1662 - DNA, 759 bp, Streptococcus pneumoniae
gtggagggcagcattccttgtcgcccgtcccttctttttaatggagacagaaagatgatgaatgaattatttggagaatttctagggactttaatcctgattcttctaggaaatggtgttgttgcaggtgtggttcttcctaaaaccaagagcaatagctcaggttggattgtgattactatgggttgggggattgcagttgcggttgcagtctttgtatctggcaagctcagtccagctcatttaaacccagctgtgaccatcggtgtggccttaaaaggtggtttgccttgggcttccgttttgccttatatcttagcccagttcgcaggggccatgctgggtcagattttggtttggttgcaattcaaacctcactatgaggcagaagaaaatgcaggcaatatcctggcaaccttcagtactggaccagccatcaaggatactgtatcaaacttgattagcgaaatccttggaacctttgttttggtgttgacaatctttgctttgggtctttacgattttcaggcaggtatcggaacctttgcagtgggaactttgattgtcggtatcggtctatcactaggtgggacaacaggttatgccttgaacccagctcgtgaccttggacctcgtatcatgcacagcatcttgccaattccaaacaagggagacggagactggtcttacgcttggattcctgttgtaggccctgttatcggagcagccttggccgtgcttgtattctcacttttctaa

SEQ ID NO: 1663 - DNA, 1827 bp, Streptococcus pneumoniae
atggaattttcaaagaaaacacgtgaattgtcaattaaaaaaatgcaggaacgcaccctggacctcttgattatcggtggaggaatcacaggggctggtgtagccttgcaggcggcagctagcggtcttgagactggtttgattgaaatgcaagactttgcagaaggaacatctagtcgttcaacaaaattggttcacggaggacttcgttacctcaaacaatttgacgtagaggtggtctcagatacggtttctgaacgtgcagtggttcaacaaatcgctccacacattccaaaaccagacccaatgctcttaccagtttacgatgaagatggagcaacctttagccccttccgtcttaaagtagccatggacttgtacgaccttttagcaggtgtgagcaacacaccaactgcgaacaaggttttgagcaagaaagaagtcttggaacgccagccaaacttgaagaaggaaggcttggtaggaggtggagtgtatcttgacttccgtaacaacgatgcgcgtctcgtgattgaaaacatcaaacgtgccaaccaagacggtgccctcattgccaaccacgtgaaggcagaaggcttcctctttgacgaaagtggcaagattacaggtgttgtagctcgtgatctcttgacagaccaagtatttgaaatcaaggcccgtctggttattaatacaacaggtccttggagtgataaagtacgtaatttgtctaataagggaacgcaattctcacaaatgcgcccaactaagggagttcacttggtagtggattcaagcaaaatcaaggtttcacagccagtttactttgacacaggtttgggtgacggtcgtatggtctttgttctcccacgtgaaaacaagacttactttggtacaactgatacagactacacaggtgatttggagcatccaaaagtaactcaagaagatgtagattatctacttggcattgtcaacaaccgctttccagaatccaacatcaccattgatgatatcgaaagcagctgggcaggtcttcgtccattgattgcagggaacagtgcctctgactataatggtggaaataacggtaccatcagtgatgaaagctttgacaacttgattgcgactgttgaatcttatctctccaaagaaaaaacacgtgaagatgttgagtctgctgtcagcaagcttgaaagtagcacatctgagaaacatttggatccatctgcagtttctcgtgggtctagcttggaccgtgatgacaatggtcttttgactcttgctggcggtaaaatcacagactaccgtaagatggctgaaggagctatggagcgcgtggttgacatcctcaaagcagaatttgaccgtagctttaaattgatcaattctaaaacttaccctgtttcaggtggagaattgaacccagcaaatgtggattcagaaatcgaagcctttgcgcaacttggagtttcacgtggtttggatagcaaggaagctcattacctagcaaatctttacggttcaaatgcaccgaaggtctttgcacttgctcacagcttggaacaagcgccaggactcagcttggcagatactttgtcccttcactatgcaatgcgcaacgagttggctcttagcccagttgacttccttcttcgtcgtaccaaccatatgctctttatgcgtgatagcttggatagcatcgttgagccagttttggatgaaatgggacgattctatgactggacagaagaagaaaaagcaacttaccgtgctgatgtcgaagcagctctcgctaacaacgatttagcagaattaaaaaattaa

SEQ ID NO: 1664 - DNA, 300 bp, Streptococcus pneumoniae
caaatctttacggttcaaatgcaccgaaggtctttgcacttgctcacagcttggaacaagcgccaggactcagcttggcagatactttgtcccttcactatgcaatgcgcaacgagttggctcttagcccagttgacttccttcttcgtcgtaccaaccatatgctctttatgcgtgatagcttggatagcatcgttgagccagttttggatgaaatgggacgattctatgactggacagaagaagaaaaagcaacttaccgtgctgatgtcgaagcagctctcgctaacaacgatttag

SEQ ID NO: 1665 - DNA, 1509 bp, Streptococcus pneumoniae
atgtcacaagaaaaatacatcatggccattgaccagggaactacaagttctcgtgccatcattttcaacaaaaaaggggaaaaggttagctcgagtcaaaaagagtttactcagattttccctcaagcaggttgggttgagcacaatgccaatgaaatttggaactctgttcagtcagttattgcgggtgctttcatcgaaagtggtgtcaagccaaatcaaatcgaggcaatcgggattaccaaccaacgtgaaacaacggttgtctgggataagaaaacaggacttcctatctacaatgctatcgtttggcagtcacgccagacagcacctttggctgagcaactaaaaagccaaggttatgtggaaaaattccatgaaaagactggtttgattattgatgcttacttctctgctaccaaggttcgttggattttggatcatgtagaaggtgctcaagagcgagcagaaaaaggggaattgctctttggtactatcgatacttggttggtttggaaattgactgacggtgcggctcacgtgactgactactcaaatgcagctcgtaccatgctttataacattaaagaactcaaatgggatgatgagattttggaaatccttaacattccgaaggctatacttccagaagttcgttctaactccgaaatctacggcaagacagctccattccatttctacggtggagaggtgccaatctcaggtatggctggggaccaacaagcagccctctttggacagttggcttttgagccaggtatggttaagaatacttatggaacaggctctttcatcatcatgaatactggggaagagatgcagttgtctgaaaacaacctcttgacaaccattggttacggaatcaacggtaaggtttattatgccttggaaggttctatcttcatcgcaggaagtgctattcagtggcttcgtgacggtcttcgcatggttgaaaattcaccagaatctgaaaaatacgctcgtgattctcacaacaacgatgaagtttatgtcgttccagcctttacaggtctaggcgctccatactggaaccaaaatgctcgtggttccgtctttggtttgactcgtggaacaagcaaagaagactttatcaaggcgactttgcaatctattgcttatcaagtgcgtgacatcatcgacaccatgcaagtggatactcagactgccattcaagtattgaaggtggatggtggtgcagccatgaacaacttcctcatgcagttccaggcggatattttaggcattgatattgcacgtgctaaaaacttggaaacaacagctctaggagcggccttcctagcaggtttatcagtagggtactggaaaaacttggacgagttgaaactcttgaacgagacaggagaactctttgagccatctatgaatgaatctcgcaaggaacaactctacaagggctggaagaaggctgtgaaagcaactcaagtctttgcggaagtagacgactaa

SEQ ID NO: 1666 - DNA, 1428 bp, Streptococcus pneumoniae
atgtatttaggagatttgatggagaaagccgagtgtggtcaattttcaatcctttcctttctattacaagagtctcagacgaccgtcaaggctgtaatggaagaaacaggattttcaaaagcaaccctaaccaaatatgtcaccctgctcaatgacaaggctttggatagtggcttagagctgactattcactcagaagatgaaaatctgcgtctgtctatcggtgcagctaccaaggggagagatattcggagcttgtttttggatagtgctgttaaataccagattttggtttatcttctctaccaccaacagtttttagcccatcagctggctcaagaattggtgattagcgaggctacgcttggtcgtcacttggctggtttaaatcagattttgtcagaatttgatttatccatccaaaatggacgctggcgaggtccagagcatcagattcgctatttctatttctgtcttttccgaaaggtctggtcgagtcaggaatgggaaggtcacatgcagaaaccagagagaaaacaggagattgccaatttagaggaaatctgcggtgcaagtttgtctgcggggcagaaattggacttggttctctgggctcacatcagtcaacaacgtcttcgggtcaatgcttgtcagtttcaagttatagaagagaaaatgcgagggtattttgacaatatcttctatcttcgtttgctgagaaaggttccgtccttttttgctgggcaacatattccactaggagttgaggatggtgagatgatgatattcttctcttttctcctatctcatcgcattcttcctcttcatactatggagtatattcttggttttggagggcagttggcagatttactgacgcaattgattcaagaaatgaagaaggaggaactattgggggattatacagaggaccatgtcacctatgaactcagtcagctttgtgctcaagtctatctctataagggctatattttacaggatcgctacaagtaccagttagagaatcgtcatccatatttactgatggaacatgattttaaagagacagcagaggagatttttcatgctctacctgcttttcaacaggggacagatttagataagaagattctctgggaatggctccagttaatcgaatatatggctgaaaacggtggccagcatatgcggattggtctggatttgacatctggttttcttgtcttttcaaggatggcagccattttgaaacggtatttggaatacaatcgttttattaccattgaagcttatgaccctagtcggcattatgatttgctggttaccaataacccgattcataagaaggaacagaccccagtctattatttaaaaaatgacttggatatggaagatttggcagggattcgtcagttattattcacttaa

SEQ ID NO: 1667 - DNA, 198 bp, Streptococcus pneumoniae
tatagttttaataattttatccatagctactattttagcataaaaatgcccaaagggggagccgtgtgtttactgattttcaggataatggaccaggaaatcagcatgaaaataaaaagagaaacagattatttcagcatttgtaagatttatgctatgcttaaggtagaaaatgaaaggggtaacaaatgtatttag

SEQ ID NO: 1668 - DNA, 873 bp, Streptococcus pneumoniae
atggataaaattattaaaactatatcagaaagcggagcctttcgtgcttttgtccttgatagcacggaaaccgtccgcactgctcaagaaaaacatcaaacccaagctagctcaactgtagcgcttggtcgaactcttatcgccagccagattctcgcagccaatgaaaaaggaaataccaaacttacagttaaggtgttgggatctagctctctaggtgctattatcaccgtcgctgataccaaggggaacgtcaaaggctacgttcaaaatcctggtgttgacatcaaaaagactgcgactggtgaagtcctagtcggaccttttgttggaaatggtcaattcctcgttatcacagactacggtactggaaatccttacaattctataactcccctcatctctggagaaatcggtgaagaccttgccttttaccttactgaaagccaacaaacgccttcagcggtcggcctcaatgtccttttggacgaggaagacaaggtcaaggttgcaggtggtttcctagttcaagtcttgccaggagccaagaaagaagagattgctcgctttgaaaaacgcatccaagaaatgccagctatctctactcttctcgaaagcgacgaccatatcgaagccctcctcaagactatctacggggacgaagcctacaagcgtctttctgaagaagaaatccgtttccaatgtgactgtagccatgaacgctttatgaacgctcttgccagccttccaagctcagacttacaggaaatgaaagaggaagaccacggggtagaaatcacttgtcaattctgccaaactacttacaactttgatgaaaaggacctggaggaactcattcgtgacaaatcttaa

SEQ ID NO: 1669 - DNA, 981 bp, Streptococcus pneumoniae
gtgacaaatcttaatacaccttttatgattggcaatgttgagattcccaatcgtaccgttttagcgcctatggctggcgtgaccaactcagcctttcgtaccatcgcaaaagagctcggagctggactcgttgtaatggaaatggtctctgacaagggaatccaatacaacaacgaaaaaaccctgcacatgcttcatatcgatgagggcgaaaaccctgtctctatccaactttttggtagcgatgaagacagcctagcacgcgcagcagaattcatccaagaaaataccaagaccgatatcgtcgatatcaacatgggctgccctgtcaacaaaatcgtgaagaacgaagctggtgctatgtggctcaaggatcctgacaagatctactctatcatcaacaaggtccagtctgtccttgatatcccacttactgtcaaaatgcgtaccggctgggcggacccatctcttgcagtagaaaatgccctcgctgctgaggctgcaggtgtttctgccctcgccatgcatggccgtacccgtgaacaaatgtatactggccacgcagaccttgagaccctttacaaggttgcccaagctctaaccaagattccattcatcgccaacggtgatatccgtactgtccaagaagccaagcaacgcatcgaagaagttggtgctgacgcagtcatgattggccgagctgccatgggaaatccttacctcttcaaccaaatcaaccattactttgaaacaggagaaatcctacctgatttgacctttgaagacaagatgaagatcgcctacgaacacttgaaacgattgattaacctcaaaggagaaaacgtcgcagttcgtgaattccgcggcctcgctcctcactatctccggggaacatctggcgctgccaaactccgtggagccatttcgcaagctagcaccctggcagagattgaagccctcttgcaattggaaaaagtataa

SEQ ID NO: 1670 - DNA, 189 bp, Streptococcus pneumoniae
gacaaaagtataatattaaatataaaaagcgaacaaaatcagttatctgacactcagaattctgtcttgttcgcttttttgtctaatctatcgattttaaaaatttataataaagaattcctaaaatcaaaatctttttatcccagactcttttcttttaagccgaatactttttacaaacatttttga

SEQ ID NO: 1671 - DNA, 666 bp, Streptococcus pneumoniae
atcaatcactatttcattcttttcttagcaagaatggttgcccccgccaaggtaagaagacctgcaatttcaagtgctagatttgaaatagatccagttgatggcaatgacttcttcggtttatttgttgctttttcgtttgttgaagcttggttagaaggttgcttgtccttgcttaaattatttgtagttgatggcttcttatcatctgcttgtggcttgctattatctggttttggtttttctggttgcggtttaacctctggttttggtttttctggttgcggtttaacctctggttttggtttttccggctgcggtttaacctctggttttggtttttccggctgcggtttaacctctggttttggtttttccggctgcggtttaacctctggttttggtttttccggctgcggtttaacctctggttttggtttttccggctgcggtttaacctctggttttggtttttccggctgcggtttaacctctggttttggtttttccggctgcggtttaacctctggttttggtttttccggctgcggtttaacctctggttttggtttttccggctgcggtttaacctctggttttggtttttctggttgcggtttaacctctggttttggtttttccagctgcggtttaacctctggttga

SEQ ID NO: 1672 - DNA, 1353 bp, Streptococcus pneumoniae
atgaaagcggtcagtgaatatgtaggaaaaatggtgagagatgcctatgtaaaatcagatagaaaacgacataaaaatactgtagctctagttaaccagttgggaaacattaagaacaggtatttgaatgaaatagttcattcaacctcaaaaagccaactacaggaactgatgatgaagagtcaatcagaagtagatgaagctgtgtctaaatttgaaaaggactcattttcttcgtcaagttcaggatcctccactaaaccagaaactccgcagccggaaaatccagagcatcaaaaaccaacaactccatctccggataccaaaccaagccctcaaccagaaggcaagaaaccaagcgtaccagacattaatcaggaaaaagaaaaagctaagcttgctgtagtaacctacatgagcaagattttagatgatatacaaaaacatcatctgcagaaagaaaaacatcgtcagattgttgctcttattaaggagcttgatgagcttaaaaagcaagctctttctgaaattgataatgtaaataccaaagtagaaattgaaaatacagtccacaagatatttgcagacatggatgcagttgtgactaaattcaaaaaaggcttaactcaggacacaccaaaagaaccaggtaacaaaaaaccatctgctccaaaaccaggtatgcaaccaagtcctcaaccagaggttaaaccgcagctggaaaaaccaaaaccagaggttaaaccgcaaccagaaaaaccaaaaccagaggttaaaccgcagccggaaaaaccaaaaccagaggttaaaccgcagccggaaaaaccaaaaccagaggttaaaccgcagccggaaaaaccaaaaccagaggttaaaccgcagccggaaaaaccaaaaccagaggttaaaccgcagccggaaaaaccaaaaccagaggttaaaccgcagccggaaaaaccaaaaccagaggttaaaccgcagccggaaaaaccaaaaccagaggttaaaccgcagccggaaaaaccaaaaccagaggttaaaccgcagccggaaaaaccaaaaccagaggttaaaccgcaaccagaaaaaccaaaaccagaggttaaaccgcaaccagaaaaaccaaaaccagataatagcaagccacaagcagatgataagaagccatcaactacaaataatttaagcaaggacaagcaaccttctaaccaagcttcaacaaacgaaaaagcaacaaataaaccgaagaagtcattgccatcaactggatctatttcaaatctagcacttgaaattgcaggtcttcttaccttggcgggggcaaccattcttgctaagaaaagaatgaaatag

SEQ ID NO: 1673 - DNA, 549 bp, Streptococcus pneumoniae
caaaagaaccaggtaacaaaaaaccatctgctccaaaaccaggtatgcaaccaagtcctcaaccagaggttaaaccgcagctggaaaaaccaaaaccagaggttaaaccgcaaccagaaaaaccaaaaccagaggttaaaccgcagccggaaaaaccaaaaccagaggttaaaccgcagccggaaaaaccaaaaccagaggttaaaccgcagccggaaaaaccaaaaccagaggttaaaccgcagccggaaaaaccaaaaccagaggttaaaccgcagccggaaaaaccaaaaccagaggttaaaccgcagccggaaaaaccaaaaccagaggttaaaccgcagccggaaaaaccaaaaccagaggttaaaccgcagccggaaaaaccaaaaccagaggttaaaccgcagccggaaaaaccaaaaccagaggttaaaccgcaaccagaaaaaccaaaaccagaggttaaaccgcaaccagaaaaaccaaaaccagataatagcaagccacaagcagatgataagaagccatcaactacaaataatttaa

SEQ ID NO: 1674 - DNA, 528 bp, Streptococcus pneumoniae
ttgtggcttgctattatctggttttggtttttctggttgcggtttaacctctggttttggtttttctggttgcggtttaacctctggttttggtttttccggctgcggtttaacctctggttttggtttttccggctgcggtttaacctctggttttggtttttccggctgcggtttaacctctggttttggtttttccggctgcggtttaacctctggttttggtttttccggctgcggtttaacctctggttttggtttttccggctgcggtttaacctctggttttggtttttccggctgcggtttaacctctggttttggtttttccggctgcggtttaacctctggttttggtttttccggctgcggtttaacctctggttttggtttttctggttgcggtttaacctctggttttggtttttccagctgcggtttaacctctggttgaggacttggttgcatacctggttttggagcagatggttttttgttacctggttcttttggtgtgtcctgagttaa

SEQ ID NO: 1675 - DNA, 546 bp, Streptococcus pneumoniae; identical to SEQ ID NO: 729

SEQ ID NO: 1676 - DNA, 753 bp, Streptococcus pneumoniae; identical to SEQ ID NO: 1270

SEQ ID NO: 1677 - DNA, 195 bp, Streptococcus pneumoniae; identical to SEQ ID NO: 728

SEQ ID NO: 1678 - DNA, 165 bp, Streptococcus pneumoniae
atgtttaaatcaaatcatgagcgaagaatgcgttattccattcgtaaatttagtgtaggagtagctagcgtagctgttgccagtctttttatgggaagtgttgtacatgcgacagagaaagagggaagtacccaagcagccaatgtcattaagttagtgatctaa

SEQ ID NO: 1679 - DNA, 1257 bp, Streptococcus pneumoniae; identical to SEQ ID NO: 293

SEQ ID NO: 1680 - DNA, 696 bp, Streptococcus pneumoniae
atgtggtacttctacaatactgatggttcaatggcgacaggatggctccaaaacaatggttcatggtactacctaaacagcaatggcgctatggcgacaggatggctccaaaacaatggttcatggtactatctaaacgctaatggttcaatggcaacaggatggctccaaaacaatggttcatggtactatctaaacgctaatggttcaatggcaacaggatggctccaaaacaatggttcatggtactacctaaacgctaatggtgatatggcgacaggatggctccaatacaatggttcatggtactacctaaacgctaatggtgatatggcgacaggatggctccaatacaatggttcatggtactacctaaacgctaatggtgatatggcgacaggatggctccaatacaatggttcatggtactacctaaacagcaatggtgctatggtaacaggatggctccaaaacaatggctcatggtactacctaaacgctaacggttcaatggcaacaggttgggtgaaagatggagatacctggtactatcttgaagcatcaggtgctatgaaagcaagccaatggttcaaagtatcagataaatggtactatgtcaatggctcaggtgcccttgcagtcaacacaactgtagatggctatggagtcaatgccaatggtgaatgggtaaactaa

SEQ ID NO: 1681 - DNA, 330 bp, Streptococcus pneumoniae
atgaaccattgttttggagccatcctgtcgccattgaaccatcagtattgtagaagtaccacataccgttttcttgtttccagcctatttttggtgcaggagctggttgctctggtttttgcggttgctgttgagtctatcgattatattcttcatctgatctaccagcatagtcttcttcagcttgttgatcatctgttttttctgcttttggttgttcagctggcttctctggttttggtgcgggagctggattctcaggctcttcagttggtttttctggttgaggagccggcgctggttgtggttgttcagctggtttttctttaa

SEQ ID NO: 1682 - DNA, 315 bp, Streptococcus pneumoniae
aaaaaatcaagacagatcgtaaaaaagcagaagaagaagctaaacgaaaagcagcagaagaagataaagttaaagaaaaaccagctgaacaaccacaaccagcgccggctcctcaaccagaaaaaccaactgaagagcctgagaatccagctcccgcaccaaaaccagagaagccagctgaacaaccaaaagcagaaaaaacagatgatcaacaagctgaagaagactatgctggtagatcagatgaagaatataatcgatagactcaacagcaaccgcaaaaaccagagcaaccagctcctgcaccaaaaatag

SEQ ID NO: 1683 - DNA, 642 bp, Streptococcus pneumoniae
ggcggagaaaacgaagagtttctgagagagcaagcaacacgtgataaaaaagaaaatgatgcgaagtcttcagattctagcgtaggtgaagaagctcttccaagcccatccctgaaaccagaaaaaaaggttgcagaagctgagaagaaggttgcagaagctgagaaaaaagccaaggctcaaaaagaagaagatcgccgtaactacccaaccaatacttacaaaacgcttgaacttgaaattgctgagtccgatgtgaaagttaaagaagcggagcttgaactagtaaaagaggaagctaaggaatctcgaaacgaggaaaaagttaatcaagcaaaagcgaaagttgagagtaaaaaagctgaggctacaaggttagaaaaaatcaagacagatcgtaaaaaagcagaagaagaagctaaacgaaaagcagcagaagaagataaagttaaagaaaaaccagctgaacaaccacaaccagcgccggctcctcaaccagaaaaaccaactgaagagcctgagaatccagctcccgcaccaaaaccagagaagccagctgaacaaccaaaagcagaaaaaacagatgatcaacaagctgaagaagactatgctggtagatcagatgaagaatataatcgatag

SEQ ID NO: 1684 - DNA, 219 bp, Streptococcus pneumoniae
ttgttgatcatctgttttttctgcttttggttgttcagctggcttctctggttttggtgcgggagctggattctcaggctcttcagttggtttttctggttgaggagccggcgctggttgtggttgttcagctggtttttctttaactttatcttcttctgctgcttttcgtttagcttcttcttctgcttttttacgatctgtcttgattttttctaa

SEQ ID NO: 1685 - DNA, 315 bp, Streptococcus pneumoniae
ttgcttgctctctcagaaactcttcgttttctccgcccctttggtttatcttgctctgaagtcgctacattcttttcaacagcttccttcaacttagcttctgctcttcgtttagcttcttcttctgctttttcacgatctgtcttgatgttttctaaccttgtagcctcagcttttttactctcaactttcgcttctgcttgcttaattttttcatcgtctcgagattccttagcttcctcttttactagttcaagctccgcttttttaacttccacatcggactcagcaatttcaagttcaagcgttttgtaa

SEQ ID NO: 1686 - DNA, 828 bp, Streptococcus pneumoniae
atgtttgcatcaaaaagcgaaagaaaagtacattattcaattcgtaaatttagtattggagtagctagtgtagctgttgccagtcttgttatgggaagtgtggttcatgcgacagagaaggaggtaactacccaagtagccacttcttctaatagggcaaatgaaagtcaggcaggacataggaaagctgctgaacaattcgatgaatatataaaaacaatgatccaattagatagaagaaaacatacccaaaatttcgccttaaacataaagttgagcagaattaaaacggagtatttgcgtaaattaaatgttttagaagagaagtcgaaagctgagttgccgtcagaaacaaaaaaagagatagacgcagcttttgagcagtttaaaaaagataccaacagaaccaaaaaaacggtagcagaagctgagaagaaggttgaagaagctaagaaaaaagccaaggctcaaaaagaagaagatcaccgtaactacccaaccaatacttacaaaacgcttgaacttgaaattgctgagtccgatgtggaagttaaaaaagcggagcttgaactagtaaaagaggaagctaaggaatctcgagacgatgaaaaaattaagcaagcagaagcgaaagttgagagtaaaaaagctgaggctacaaggttagaaaacatcaagacagatcgtgaaaaagcagaagaagaagctaaacgaagagcagaagctaagttgaaggaagctgttgaaaagaatgtagcgacttcagagcaagataaaccaaaggggcggagaaaacgaagagtttctgagagagcaagcaacacgtga

SEQ ID NO: 1687 - DNA, 528 bp, Streptococcus pneumoniae
atggtattagcgattattttagtaacattccttattcgattgatttttttaaagcgttcgatagagaatgagaaacgaatccttagcaatggcgggaaagaatttggagttgagaatacaaaacgattaacgttggctcatattgttttttatctctcttgcctcgttgaagcaatggtgcataagacaatgtttgatggtatgagcatggttggtttagtcttgcttattttttctatgctgatgttgatgttggtgattcacttgttgggagatatttggacagtgaagcttatgcttgtcaataatcacaaatatgtagatcatatcttgtttaggacagtaaaacatcctaattactttttaaatattttacctgagttgattggcttgaccttgttgagtcatgcctatatgacttttgttttagtctttccagtttatgcagttattttgtatcgacgaatagctgaagaggaaaagctattacatgaagttataatcccaaatggaagcataaagagataa

SEQ ID NO: 1688 - DNA, 1341 bp, Streptococcus pneumoniae
atgataaaaaatcctaaattattaaccaagtcctttttaagaagttttgcaattctaggtggtgttggtctagtcattcatatagctatttatttgacctttcctttttattatattcaactggagggggaaaagtttaatgagagcgcaagagtgtttacggagtatttaaagactaagacatctgatgaaattccaagcttactccagtcttattcaaagtccttgaccatatctgctcaccttaaaagagatattgtagataagcgactccctcttgtgcatgacttggatattaaagatggaaagctatcaaattatatcgtgatgttagatatgtctgttagtacagcagatggtaaacaggtaaccgtgcaatttgttcacggggtggatgtctacaaagaagcaaagaatattttgcttttgtatctcccatatacatttttggttacaattgctttttcctttgttttttcttatttttatactaaacgcttgctcaatcctcttttttacatttcagaagtgactagtaaaatgcaagatttggatgacaatattcgttttgatgaaagtaggaaagatgaagttggtgaagttggagaagttggaaaacagattaatggtatgtatgagcacttgttgaaggttattcatgagttggaaagtcgtaatgagcaaattgtaaaattgcaaaatcaaaaggtttcctttgtccgtggagcatcacatgagttgaaaacccctttagccagtcttagaattatcctagagaatatgcagcataatattggagattacaaagatcatccaaaatatattgcaaagagtataaataagattgaccagatgagccacttattggaagaagtactggagtcttctaaattccaagagtggacagagtgtcgtgagactttgactgttaagccagttttagtagatattttatcacgttatcaagaattagctcattcaataggtgttacaattgaaaatcaattgacagatgctaccagggtcgtcatgagtcttagggcattggataaggttttgacaaacctgattagtaatgcaattaaatattcagataaaaatgggcgcgtaatcatatccgagcaagatggctatctctctatcaaaaatacatgtgcgcctctaagtgaccaagaactagaacatttatttgatatattctatcattctcaaatcgtgacagataaggatgaaagttccggtttgggtctttacattgtgagtaatattttagaaagctatcaaatggactatagttttctcccttatgaacacggtatggaatttaagattagcttgtag

SEQ ID NO: 1689 - DNA, 654 bp, Streptococcus pneumoniae
atgaacattttagttgcagatgacgaggaaatgattagagaaggaattgcagcatttctgacagaagagggttatcatgtcattatggctaaggatggacaagaggtcttggaaaaatttcaagatctccctatccatctcatggtactggatttaatgatgcctaggaagagtggttttgaagtgttaaaagaaatcaatcaaaagcacgatattcctgtcatcgtcttgagtgctctgggagatgaaactactcagtcacaggtatttgatctctatgctgatgatcatgtgacaaaacctttttctttggtactgcttgtcaagcgtattaaggcgcttatcagacgttactacgtcatagaggatctttggcgatatcaggatgtaacagtggattttacctcttacaaagcacattataaaaatgaagaaattgatctcaaaccaaaggaattactggtactaaagtgtttgattcagcataaaaatcaagttttaagtagagagcagatattggaagaaatttcaaaagatgtagctgatttaccttgtgatagggtcgttgatgtctatattcgtactcttcgcaaaaaattagctttagattgtatcgtgactgtgaaaaatgttgggtataagattagcttatga

SEQ ID NO: 1690 - DNA, 225 bp, Streptococcus pneumoniae
ttgattttcattgagtttcactccactgtgacttatggtcagatgctgatacttttattcttttatgcaatatcaaattttaactggcctgctttgacaccaatcttaagtgtgctgcctgccactaaatctcccttaagaagaagttctgccaacttgtcctccacttctgtttgcagggttctgcgaagtgggcgagctcccatctctgggtcatatccttga

SEQ ID NO: 1691 - DNA, 2433 bp, Streptococcus pneumoniae
atgaactattcaaaagcattgaatgaatgtatcgaaagtgcctacatggttgctggacattttggagctcgttatctagagtcttggcacttgttgattgccatgtctaatcacagttatagtgtagcaggggcaactttaaatgattatccgtatgagatggaccgtttagaagaggtggctttggaactgactgaaacggactatagccaggatgaaacctttacggaattgccgttctcccgtcgtttgcaggttctttttgacgaagcagagtatgtagcgtcagtggtccatgctaaggtgctagggacagagcacgtcttctatgcgattttgcatgatggcaatgccttggcaactcgtatcttggagagggctggtttttcttatgaagacaagaaagatcaggtcaagattgctgcccttcgtcgaaatttagaagaacgggcaggctggactcgtgaagacctcaaggctttacgccaacgccatcgtacagtagctgacaagcaaaattctatggccaatatgatgggcatgccgcagactcctagtggtggtcttgaggactatacgcatgatttgacagagcaagcgcgttctggcaagttagaaccagtcatcggtcgggacaaggaaatctcacgtatgattcaaatcttgagccgtaagactaagaacaaccctgtcttggttggggatgctggtgtcgggaaaacagctctggcccttggtcttgcccagcgtattgctagtggtgacgtgcctgcggaaatggctaagatgcgcgtgttacaacttgatttgatgaatgtcgttgcagggacacgcttccgtggtgactttgaagaacgcatgaataatatcatcaaggatattgaagaagatggccaagtcatcctctttatcgatgaactccacaccatcatgggttctggtagcgggattgattcgactctggatgcggccaatatcttgaaaccagccttggcgcgtggaactttgagaacggttggtgccaccactcaggaagaatatcaaaaacatatcgaaaaagatgcggctctttctcgtcgtttcgctaaagtgacgattgaagaaccaagtgtggcagatagtatgactattttacaaggtttgaaggcgacttatgagaaacatcaccgtgtacaaatcacagatgaagcggttgaaacagcggttaagatggctcatcgttatttaaccagtcgtcacttgccagactctgctatcgacctcttggacgaagcagcagcaacagtgcaaaataaggcaaagcatgtaaaagcagacgattcagatttgagtccagctgacaaggccctgatggatggcaagtggaaacaggcagcccagctaatcgcaaaagaagaggaagtacctgtctacaaagacttggtgacagagtctgatattttgaccaccttgagtcgcttgtcaggaatcccagttcaaaaactgactcaaacggatgctaagaagtatttaaatcttgaagcagaactccataaacgtgtcatcggtcaagatcaagctgtttcaagcattagccgtgccattcgccgtaatcagtcaggaattcgcagtcacaagcgtccgatcggttcctttatgttcctaggacccacaggtgtcggtaagaccgagttggccaaggctttggcagaagttctctttgatgacgaatcagcccttatccgctttgatatgagtgagtatatggagaaattcgcagccagccgtctaaatggagctcctccaggctatgtgggttacgaagaaggtggggagttgacagagaaggttcgcaataaaccctattccgttctcctctttgatgaggtagagaaggcccacccagatatctttaatgttctcttgcaggttctggatgacggtgtcttgacagatagcaagggacgcaaggtcgatttttcaaataccattatcattatgacatcgaacctaggtgcgactgcctttcgtgatgataagactgttggttttggggctaaggatattcgttttgaccaggaaaatatggaaaaacgcatgtttgaagaactgaaaaaagcttatagaccggaattcatcaaccgtattgatgagaaggtggtcttccatagcctatctagtgaccatatgcaggaagtggtgaagattatggtcaagcctttagtggcaagtttggctgaaaaaggcattgacttgaaattacaagcttcagctctgaaattgttagcaaatcaaggatatgacccagagatgggagctcgcccacttcgcagaaccctgcaaacagaagtggaggacaagttggcagaacttcttcttaagggagatttagtggcaggcagcacacttaagattggtgtcaaagcaggccagttaaaatttgatattgcataa

SEQ ID NO: 1692 - DNA, 522 bp, Streptococcus pneumoniae
atgagaaaatttcggtataatagtcaaacaaggtcaaggtttaaagagagaggtgggtttgttatgagatttaaaaatacatcggatcatattgaggcctacatcaaggcgattttagatcaatctggtatcgtggagttgcaacggagtcagttggcagatacctttcaggttgttcctagtcagattaactacgtgatcaagacacgctttacggaaagtagaggctacttggttgaaagtaagcgtggtggcggaggctacattcgtataggacggattgagttttctagtcatcatgaaatgctccgggagctgctttactcgattggtgagcgagtcagtcaagaaatttatgaggatattctccagcttttggttgagcaggaattgatgaccaagcaggagatgaatttgctagaatcagtagctttggatcgcgttttaggagaagaagctccagttgttcgagcaaacatgctacgtcagatcatacaagaggtagatagaaaagggaagtaa

SEQ ID NO: 1693 - DNA, 729 bp, Streptococcus pneumoniae
atgacagaaattagactagagcacgtcagttatgcctatggtcaggagaggattttagaggatatcaacctacaggtgacttcaggcgaagtggtttccatcctaggcccaagtggtgttggaaagaccaccctctttaatctaatcgctgggattttagaagttcagtcagggagaattgtccttgatggtgaagaaaatcccaaggggcgcgtgagttatatgttgcaaaaggatctgctcttggagcacaagacggtgcttggaaatatcattctgcccctcttgattcaaaaggtggataaggcagaagctatttcccgagcggataaaattcttgcgaccttccagctgacagctgtaagagacaagtatcctcatgaacttagcggtgggatgcgccagcgtgtagccttactccggacctacctttttgggcacaagctctttctcttagatgaggcctttagcgccttggatgagatgacaaagatggaactccacgcttggtatcttgagattcacaagcagttgcagctaacaaccctgatcatcacgcatagtattgaggaggccctcaatctcagcgaccgcatctatatcttgaaaaatcgccctgggcagattgtttcagaaattaaactagattggtctgaagatgaggacaaggaagtccaaaagattgcctacaaacgtcaaattttggcggaattaggcttagataagtag

SEQ ID NO: 1694 - DNA, 1008 bp, Streptococcus pneumoniae
atgaagaaaacatggaaagtgtttttaacgcttgtaacagctcttgtagctgttgtgcttgtggcctgtggtcaaggaactgcttctaaagacaacaaagaggcagaacttaagaaggttgactttatcctagactggacaccaaataccaaccacacagggctttatgttgccaaggaaaaaggttatttcaaagaagctggagtggatgttgatttgaaattgccaccagaagaaagttcttctgacttggttatcaacggaaaggcaccatttgcagtgtatttccaagactacatggctaagaaattggaaaaaggagcaggaatcactgccgttgcagctattgttgaacacaatacatcaggaatcatctctcgtaaatctgataatgtaagcagtccaaaagacttggttggtaagaaatatgggacatggaatgacccaactgaacttgctatgttgaaaaccttggtagaatctcaaggtggagactttgagaaggttgaaaaagtaccaaataacgactcaaactcaatcacaccgattgccaatggcgtctttgatactgcttggatttactacggttgggatggtatccttgctaaatctcaaggtgtagatgctaacttcatgtacttgaaagactatgtcaaggagtttgactactattcaccagttatcatcgcaaacaacgactatctgaaagataacaaagaagaagctcgcaaagtcatccaagccatcaaaaaaggctaccaatatgccatggaacatccagaagaagctgcagatattctcatcaagaatgcacctgaactcaaggaaaaacgtgactttgtcatcgaatctcaaaaatacttgtcaaaagaatacgcaagcgacaaggaaaaatggggtcaatttgacgcagctcgctggaatgctttctacaaatgggataaagaaaatggtatccttaaagaagacttgacagacaaaggcttcaccaacgaatttgtgaaataa

SEQ ID NO: 1695 - DNA, 408 bp, Streptococcus pneumoniae
ttgatttcctcttttctttttcaaaaacgctctattttaagtacgtttccatttaatcacatatttttcactgatatcgaccagcttcatacccaaaagactgataatcgacaccagaataataatggcaaacatggtatcatactgaaacagttttttagactgaatcatataaacaccaagaccttcaaaacctcccaaccactcagataccacagttgtgataaaggcgtaggagacactgaccctcagacctgcataaaagtaaggcaggctaaccgggattttaaaatgccacaggatttgccaagggtttgctcgcatcagactaaacaaagtcagcatatccttgtcacaatgcctaaaaccgtccaaaatactaacgatgatgggaaaggttgttgttaa

SEQ ID NO: 1696 - DNA, 750 bp, Streptococcus pneumoniae
ttgaaaagtatactgagacgacacattagtctattgggctttctcggagtattgtcaatctggcagttagcaggttttcttaaacttctccccaagtttatcctgccgacacctcttgaaattctccagccctttgttcgtgacagagaatttctctggcaccatagctgggcgaccttgagagtggctttactggggctgattttgggagttttgattgcctgtcttatggctgtgctcatggatagtttgacttggctcaatgacctgatttaccctatgatggtggtcattcagaccattccgaccattgccatagctcctatcctggtcttgtggctaggttatgggattttgcccaagattgtcttgattatcttaacaacaacctttcccatcatcgttagtattttggacggttttaggcattgtgacaaggatatgctgactttgtttagtctgatgcgagcaaacccttggcaaatcctgtggcattttaaaatcccggttagcctgccttacttttatgcaggtctgagggtcagtgtctcctacgcctttatcacaactgtggtatctgagtggttgggaggttttgaaggtcttggtgtttatatgattcagtctaaaaaactgtttcagtatgataccatgtttgccattattattctggtgtcgattatcagtcttttgggtatgaagctggtcgatatcagtgaaaaatatgtgattaaatggaaacgtacttaa

SEQ ID NO: 1697 - DNA, 291 bp, Streptococcus pneumoniae
atgaaagcaagcattgccttgcaagttttacccctagcacaggggattgatcggatagctgttattgatcaggtcattgcttatctgcaaactcaagaagtgacgatggtagtgacaccatttgaaacggtcttggaaggggagtttgatgagcttatgcgcattctaaaagaagcgctggaagtggcagggcaggaggcagacaatgtctttgccaatgtcaaaataaatgtaggagagattttaagtattgatgagaaacttgaaaagtatactgagacgacacattag

SEQ ID NO: 1698 - DNA, 852 bp, Streptococcus pneumoniae
atgacaggatttattcattttaaagatttggatggtgccagtgttgggaatagtcatccttcaacttcaccaggcggaactcattattttaagaccaagtctgctattaaaactgaacctctagctagcggaactgtgattgattactattatcctggggagaaggttcattatgatcagatacttgaaaaagacggctataagtggttgagttatactgcctataatggaagctatcgttatgttcaattggaggctgtgaataaaaatcctctaggtaattctgttctttcttcaacaggtggaactcattattttaagaccaagtctgctatcaaaactgaacccctagttagtgcaactgtgattgattactattatcctggagagaaggttcattatgatcaaattctcgaaaaagacggctacaagtggttgagttatacggcttataacggaagtcgtcgctatatacagctagagggagtgacttcttcacaaaattatcagaatcaatcaggaaatatctctagctatggatccaataatagttcaactgtcggttggaagaaaataaatggtagttggtatcatttcaaatcaaatggttctaaatcaacaggatggctgaaagacggttctagctggtattatttgaaattatctggtgaaatgcagacaggatggttaaaggagaatggctcgtggtattatctgggtagttcaggggcaatgaaaacaggctggtaccaggtctctggtaagtggtattattcttactcttcaggcgccttagctgttaatacgacggtggatggctacagagtaaacagtgatggagaacgagtatag

SEQ ID NO: 1699 - DNA, 414 bp, Streptococcus pneumoniae
atgaaaattttaccgtttatagcaagaggaacaagttattacttgaagatgtcagttaaaaagcttgttccttttttagtagtaggattgatgctagcagctggtgatagtgtctatgcctattccagaggaaatggatcgattgcgcgtggggatgattatcctgcttattataaaaatgggagccaggagattgatcagtggcgcatgtattctcgtcagtgtacttcttttgtagcctttcgtttgagtaatgtcaatggttttgaaattccggcagcttatggaaatgcgaatgaatggggacatcgtgctcgtcgggaaggttatcgtgtagataatacaccgacgattggttccattacttgttctactccaggaactaatgttcatggtgcctgggtgtcaaagtaa

SEQ ID NO: 1700 - DNA, 267 bp, Streptococcus pneumoniae
atgtcagatgcatttacagatgtagccaagatgaaaaaaatcaaagaagaaatcaaggcacatgagggacaagtcgtagaaatgactttggagaatggtcgtaagcgccaaaaaaatagattgggtaagctaattgaagtttatccatccctatttattgtggagtttggggatgtggaaggagataaacaagttaatgtttacgttgaatcctttacttactcagatattcttacagaaaagaatttgattcattatcttgactaa

SEQ ID NO: 1701 - DNA, 1353 bp, Streptococcus pneumoniae
atggcagaagtagaagagttacgagtacaacctcaagatatcttagctgagcaatccgttttaggggctatctttattgatgagagtaaacttgtttttgtgcgagaatacattgagtctcgggacttttttaagtatgcccatcgtttgattttccaagccatggtcgatttatccgatcgtggtgatgccatagatgcaacaacggttcgtactatccttgataatcaaggtgatttacagaatattggtggcttgtcttacttggttgagattgttaattctgtgccaacttctgctaatgcggagtattatgctaagattgttgcagaaaaagcaatgctacgtcgtttaattgccaagttgacagagtctgtcaaccaagcttacgaagcgtcacaaccagctgatgaaattattgctcaggcagaaaaagggttgattgatgtcagtgaaaatgcaaatcgaagcgggtttaagaacattcgagatgtgttgaatctcaactttggaaatctggaagctcgctcgcaacaaacgaccgatattacaggtattgcgacaggttatcgtgatttggatcatatgacaacaggacttcatgaggaggagttgattatcttagcagctcgtccagcagttggtaagacagcatttgccttgaatatcgctcagaacattgggactaagttggacaaaacggttgctattttttcactcgaaatgggtgcggaaagcttggtagatcgtatgttagctgcagaaggcttggtggagtcacattctatccgtacagggcaattgacagatgaggagtggcaaaaatatactattgctcagggtaatctagctaacgccagtatctatatcgatgatacgccaggtattcggattacagagattcgttctcgttctcgtaaattggctcaagaaactggaaatcttggtttgattgtgatagactatttgcaacttatcacgggaactggtcgagaaaatcgtcaacaagaagtttctgaaatttctcgtcagttgaaaatactagccaaggaattgaaggttccagtaatcgctctgagtcagctttctcgtggtgtagaacaacgtcaggacaagagaccggtcttgtctgatattcgtgaatctgggtctattgagcaggacgctgatatcgtagcttttctctatcgcgatgactactatgaacgtggtggtgaagaagaggagggtatcccaaataataaggtggaagttattatcgagaaaaaccgtagtggagctcgtggaacagtggaattgattttccaaaaagaatacaataaattttcaagtatctcaaagagggaggcataa

SEQ ID NO: 1702 - DNA, 453 bp, Streptococcus pneumoniae
atgaaagtaatctttttagcagatgttaaaggaaaaggtaaaaaaggcgaaattaaggaagtaccaacagggtatgcgcaaaactttcttatcaaaaagaatctagccaaagaagcgactgctcaagctgtaggtgaacttcgtggtaaacaaaaatcggaagaaaaagctcacgctgagatgattgcagaaggaaaagcaattaaagcacaacttgaagcagaagaaactgttgtagaatttgttgaaaaagttggtccagatggtcgtacctttggttctattaccaataagaagattgcagaagaattgcaaaagcaatttggaattaagattgataaacgtcatattcaagtacaagctccgattcgagcggttggtttgattgatgtgccagtgaaaatctatcaagatatcacaagtgtaatcaatcttcgtgtgaaagaaggataa

SEQ ID NO: 1703 - DNA, 1974 bp, Streptococcus pneumoniae
atgaaaaaattttatgtaagtccaatttttcctattctagtaggattgattgcgtttggagtcttatccactttcattatttttgttaataataatctgttgacggttttaattttgtttctttttgtaggaggctatgtttttttatttaagaaactgagagtgcattatacaaggagtgatgtagaacagatacagtatgtaaaccaccaagcggaagaaagtttgacatctctattggaacagatgcctgtaggtgttatgaaattgaatttatcttctggagaggttgagtggtttaatccctatgctgaattgattttgaccaaggaagatggtgattttgatttggaagctgttcaaacgattatcaaggcttcagtaggaaatccgtctacttatgccaagcttggtgagaagcgttatgctgttcatatggatgcttcttcaggtgttttgtattttgtagatgtatccagggaacaagccataacagatgaattggtaacaagtcgaccagtgattgggattgtctctgtggataattatgatgatttggaggatgcaacttctgagtcagatattagtcaaatcaatagttttgtagctaattttatatcagagttttcagaaaaatacatgatgttttctcgtcgggtaagtatggatcgattttatctatttactgactacacggtgcttgagggcttgatgaatgataaattttctgttattgatgctttcagagaagagtcgaaacagagacagttgcccttgaccttaagtatgggattttcttatggcgatggaaatcatgatgagatagggaaagttgctttgctcaatttgaacttggctgaagtacgtggtggcgaccaggtggttgttaaggaaaacgacgaaacgaaaaatccagtttattttggtggtgggtctgctgcttcaatcaagcgtacacggactcgtacgcgcgctatgatgacagctatttcagataagattcggagtgtagatcaggtttttgtagtcggtcacaaaaatttagacatggatgctttgggctctgctgtaggtatgcagttgttcgccagcaatgtgattgaaaatagctatgctctttatgatgaagaacaaatgtctccagatattgaacgagctgtttcattcatagaaaaagaaggagttacgaagttgttgtctgttaaggatgcaatggggatggtgaccaatcgttctttgttgattcttgtagaccattcaaagacagccttaacattatcaaaagaattttatgatttatttacccaaaccattgttattgaccaccatagaagggatcaggattttccagataatgcggtcattacttatatcgaaagtggtgcaagtagtgccagtgagttggtaacggaattgattcagttccagaattctaagaaaaatcgtttgagtcgtatgcaagcaagtgttttgatggctggtatgatgttggatactaaaaatttcacctcgcgagtaactagtcggacatttgatgttgctagctatctcagaacgcgcggaagtgatagtattgctatccaggaaatcgctgcgacagattttgaagaatatcgtgaggtcaatgaacttattttacaggggcgtaaattaggttcagatgtactaatagcagaggctaaggacacgaaatgctatgatacagttgttattagtaaggcagcagatgccatgttagccatgtcaggtattgaagcgagttttgttcttgcgaagaatatacaaggatttatctctatctcagctcgaagtcgtagtaaactgaatgtacaacggattatggaagagttaggcggtggaggccactttaatttggcagcagctcaaattaaagatgtaaccttgtcagaagcaggtgaaaaactgacagaaattgtattaaatgaaataaaggaaaaggagaaagaagaatga

SEQ ID NO: 1704 - DNA, 549 bp, Streptococcus pneumoniae
atgattaaatatagtatccgtggtgaaaacctagaagtaacagaagcaattcgtgattatgtagtttctaaactcgaaaagatcgaaaagtacttccaaccagaacaagagttggatgcccgaattaacttaaaagtttatcgtgaaaaaacggctaaagtggaagtaacgattccgcttggatctattactctccgcgcagaagatgtatctcaagatatgtatggttcaattgaccttgtaactgataaaattgaacgtcagattcgtaaaaataaaacaaaaatcgagcgtaaaaataaaaataaggtagcaactggtcaattatttacagatgctttggtggaagattcaaatgttgtccagtctaaagttgttcgttcaaaacaaattgatttaaaaccaatggatttggaagaagcaattctacaaatggatttattggggcatgatttctttatctatgtagatgttgaagatcagacaaccaatgtgatttatcgtcgtgaggatggtgaaattggtttgttagaggttaaagaatcttaa

SEQ ID NO: 1705 - DNA, 663 bp, Streptococcus pneumoniae
atgaagtgcttgttatgtgggcagactatgaagactgttttaacttttagtagtctcttacttctgaggaataatgactcttgtctttgttcagactgtgattctacttttgaaagaattggggaagagaactgtccaaattgtatgaaaacagagttgtcaacaaagtgtcaagattgtcaactttggtgtaaagaaggagttgaagtcagtcatagagcgatttttacttacaatcaagctatgaaggattttttcagtcggtataagtttgatggagacttcctgttaagaaaagttttcgcttcatttttaagtgaggagttgaaaaagtacaaagagtatcaatttgttgtaattcccctaagtcctgatagatatgctaacagaggatttaatcaggttgagggcttggtagaggcagcaggctttgagtatctggatttattagagaaaagagaagagagagccagttcttctaaaaatcgttcagagcgcttggggacagaacttcctttctttattaaaagtggagtcactattcctaaaaaaatcttacttatagatgatatctatactacaggagcaactataaatcgtgttaagaaactgttggaagaagctggtgctaaggatgtaaaaacattttcccttgtaagatga

SEQ ID NO: 1706 - DNA, 1299 bp, Streptococcus pneumoniae
atgaaagtaaatttagattatctcggtcgtttatttactgagaatgaattaacagaagaagaacgtcagttggcggagaaacttccagcaatgagaaaggagaaggggaaacttttctgtcaacgttgtaatagtactattctagaagaatggtatttgcccatcggtgcttactattgtcgagagtgcttgctgatgaagcgagtcagaagtgatcaaactttatactattttccgcaggaggattttccgaagcaagatgttctcaaatggcgcggccaattaactccttttcaagagaaggtgtcagagggactgcttcaagcagtagacaagcaaaagccaaccttagttcatgcggtaacaggagctggaaagacagaaatgatttatcaagtagtggctaaagtgatcaatgcgggtggtgcagtgtgtttggctagtcctcgcatagatgtttgtttggagctgtacaagcgcctgcaacaggatttttcttgcgggatagctttgctacatggagaatcggaaccttattttcgaacaccactagttgttgcaacaacccatcagttattgaagttttatcaagcttttgatttgctgatagtggatgaagtagatgcttttccttatgttgataatcccatgctttaccacgctgtcaagaatagtgtaaaggagaatggattgagaatctttttaacagcgacttcgaccaatgagttagataaaaaggtccgtttaggagaactaaaaagactgaatttaccgagacggtttcatggaaatccgttgattattccaaaaccaatttggttatcggattttaatcgctacttagacaagaatcgtttgtcaccaaagttaaagtcctatattgagaagcagagaaagacagcttatccgttactcatttttgcttcagaaattaagaaaggggagcagttagcagaaatcttacaggagcaatttccaaatgagaaaattggctttgtatcttctgtaacagaggatcgattagagcaagtacaagcttttcgagatggagaactgacaatacttatcagtacgacaatcttggagcgtggagttaccttcccttgtgtggatgttttcgtagtagaggccaatcatcgtttgtttaccaagtctagtttgattcagattggtggacgagttggacgaagcatggatagaccgacaggagatttgcttttcttccatgatgggttaaatgcttcaatcaagaaggcgattaaggaaattcagatgatgaataaggaggctggtctatga

SEQ ID NO: 1707 - DNA, 636 bp, Streptococcus pneumoniae
atggaatttaggacaattaaagaggacggccaagtccaagaagaaatcaaaaaatctcgctttatctgccatgccaagcgtgtttatagcgaagaagaggctcgtgacttcattactgccatcaaaaaagaacactacaaagcgacacataactgctctgcctttattattggagaacgtagtgaaattaaacgtacaagtgatgatggtgagcctagtggtactgctggtgttcccatgcttggggtactagaaaatcacaatctcaccaatgtctgtgtggtcgtgacacgctactttggtggtattaaactaggcgctggaggactaattcgtgcttacgccggcagtgtcgccttagctgtcaaagaaattggtattattgaaataaaagaacaggctggcattgctattcaaatgtcttatgctcagtaccaagagtacagtaacttccttaaagaacatgatctcatggagctggatacaaactttacagatcaagtcgatacgatgatttatgttgataaggaagaaaaagaaactattaaagctgcacttgtggagttttttaatggaaaagtcactttaactgaccaaggtttacgagaggttgaagttcctgtaaacttagtgtaa

SEQ ID NO: 1708 - DNA, 927 bp, Streptococcus pneumoniae
atgtctatttataacaacattactgaattaatcggtcaaacaccgattgttaaacttaacaacatcgtgccagaaggtgctgcagacgtctatataaagcttgaagcatttaatcctggttcatctgtaaaagaccgtattgcccttagcatgattgaaaaagctgaacaagatggtattctgaaacctggttctactattgttgaagcaacaagtggaaacactggtattggactttcatgggtaggtgctgctaaagggtataaagtcgtcatcgttatgcctgaaactatgagtgtagaacgacgtaaaattatccaagcttatggtgctgaactcgtcctaactcctggtagcgagggaatgaaaggtgctattgctaaggctcaagaaatcgctgctgaacgtgatggtttccttcctcttcaatttgacaatccagctaatccagaagtacacgaaagaacaacaggagctgagatactagctgctttcggtaaagatggattagatgcctttgttgctggagtaggtaccggtggaacgatttctggtgtttctcatgcactcaaatcagaaaattctaacattcaagtttatgcagtggaagctgatgaatctgctattctatctggtgaaaaacctggtcctcacaaaattcaaggtatctcagctggatttattcctgatacacttgatactaaagcctatgatggtatcgttcgtgtaacatcagatgatgctcttgcactcggacgtgaaattggtggaaaagaaggcttccttgtagggatttcctcagctgcagctatctacggagccatcgaggttgccaaaaaattaggtacaggtaaaaaagtccttgctctagcaccagataacggtgaacgttatctctctacagcactctatgaatttgaagtttag

SEQ ID NO: 1709 - DNA, 1041 bp, Streptococcus pneumoniae
atggcagaaattacagctaaacttgtaaaagagttgcgtgaaaaatctggtgccggtgttatggacgctaaaaaagcgcttgtagaaacagacggtgacatcgaaaaagcgattgaattgcttcgtgaaaaaggtatggctaaggcagctaagaaagctgaccgtgttgctgcagaaggtttgactggtgtttatgttaacggtaatgttgcagcagttattgaagtaaacgctgaaactgacttcgttgcaaaaaacgctcaattcgttgaattggtaaatactacagctaaagtcattgctgaaggaaaacctgctaacaatgaagaagctcttgctttgataatgccttcaggtgaaactcttgaagctgcatacgtatctgcaacagcaactatcggagagaaaatctcattccgtcgctttgcattgattgaaaaaacagacgcacaacactttggagcataccaacataacggtggacgtatcggtgttatttcagttgttgaaggtggagacgaagcacttgctaaacaattgtcaatgcacatcgcagcgatgaaaccaacagttctttcttacaaagaattggatgagcaattcgttaaagatgagttggcacaattgaatcacgttatcgaccaagacaacgaaagccgtgcaatggttaataaaccagctcttccacacttgaagtatggatcaaaagctcaattaactgatgatgttattgctcaagctgaagctgacatcaaagctgaattggctgcagaaggcaaaccagaaaaaatctgggacaaaattattccaggtaaaatggatcgcttcatgcttgataacactaaagttgaccaagcttacacacttcttgcacaagtttacatcatggatgacagcaagacagttgaagcataccttgaatcagttaacgcttcggtagttgagtttgctcgctttgaagttggtgaaggtatcgagaaagctgcaaacgacttcgaagctgaagttgcagctacaatggcagcagccttgaataactaa

SEQ ID NO: 1710 - DNA, 387 bp, Streptococcus pneumoniae
ttgagcgttttttgcaacgaagtcagtttcagcgtttacttcaataactgctgcaacattaccgttaacataaacaccagtcaaaccttctgcagcaacacggtcagctttcttagctgccttagccatacctttttcacgaagcaattcaatcgctttttcgatgtcaccgtctgtttctacaagcgcttttttagcgtccataacaccggcaccagatttttcacgcaactcttttacaagtttagctgtaatttctgccattttaattctcctatattttttgaaaataggagagccgggctaagccccgccctcctaggtaattactatttgtataaattaagcgttgtcaccttctacaacttcaacgatttcttcaattga

SEQ ID NO: 1711 - DNA, 864 bp, Streptococcus pneumoniae
ttgatgaattgtgaagcagttgcccttgggtcgttttgcgagttgaagtcaagaagaggaaaaaaacaaaaaggagaaatactcatggcagtaatttcaatgaaacaacttcttgaggctggtgtacactttggtcaccaaactcgtcgctggaatcctaagatggctaagtacatctttactgaacgtaacggaatccacgttatcgacttgcaacaaactgtaaaatacgctgaccaagcatacgacttcatgcgtgatgcagcagctaacgatgcagttgtattgttcgttggtactaagaaacaagcagctgatgcagttgctgaagaagcagtacgttcaggtcaatacttcatcaaccaccgttggttgggtggaactcttacaaactggggaacaatccaaaaacgtatcgctcgtttgaaagaaattaaacgtatggaagaagatggaactttcgaagttcttcctaagaaagaagttgcacttcttaacaaacaacgtgcgcgtcttgaaaaattcttgggcggtatcgaagatatgcctcgtatcccagatgtgatgtacgtagttgacccacataaagagcaaatcgctgtcaaagaagctaaaaaattgggaatcccagttgtagcgatggttgacaccaatactgatccagatgatatcgatgtaatcatcccagctaacgatgacgctatccgtgctgttaaattgatcacagctaaattggctgacgctattatcgaaggacgtcaaggtgaggatgcagtagcagttgaagcagaatttgcagcttcagaaactcaagcagattcaattgaagaaatcgttgaagttgtagaaggtgacaacgcttaa

SEQ ID NO: 1712 - DNA, 225 bp, Streptococcus pneumoniae
ttgttacagctgttgaatcaacaacacgtatccaagtatcagaatcaaattatgcaggtaatcgtacaattggaaatcaccgtggatggttcaatccaacaacaacttctgaaggttttgttacatatatttatgcagattaatttacagagggactcgaatagagccctcttttcaggttttaccgtgacaatccctattaaaaattatatcaaaatagcttga

SEQ ID NO: 1713 - DNA, 1179 bp, Streptococcus pneumoniae
atgaagaaaaaaatcttagcgtcacttttattaagtacagtaatggtttctcaagtagctgttttaacaactgcgcatgcagaaacgactgatgacaaaattgctgctcaagataataaaattagtaacttaacagcacaacaacaagaagcccaaaaacaagttgaccaaattcaggagcaagtatcagctattcaagctgagcagtctaacttgcaagctgaaaatgatagattacaagcagaatctaagaaactcgagggtgagattacagaactttctaaaaacattgtttctcgtaaccaatcgttggaaaaacaagctcgtagtgctcaaacaaatggagccgtaactagctatatcaataccattgtaaactcaaaatcaattacagaagctatttcacgtgttgctgcaatgagtgaaatcgtatctgcaaacaacaaaatgttagaacaacaaagggcagataaaaaagctatttctgaaaaacaagtagcaaataatgatgctatcaatactgtaattgctaatcaacaaaaattggctgatgatgctcaagcattgactacgaaacaggcagaactaaaagctgctgaattaagtcttgctgctgagaaagcgacagctgaaggggaaaaagcaagtctattagagcaaaaagcagcagctgaggcagaggctcgtgcagctgcggtagcagaagcagcttataaagaaaaacgagctagccaacaacaatcagtacttgcttcagcaaacactaacttaacagctcaagtgcaagcagtatctgaatctgcagcagcacctgtccgtgcaaaagttcgtccaacatacagtacaaacgcttcaagttatccaattggagaatgtacatggggagtaaaaacattggcaccttgggctggagactactggggtaatggagcacagtgggctacaagtgcagcagcagcaggtttccgtacaggttcaacacctcaagttggagcaattgcatgttggaatgatggtggatatggtcacgtagcggttgttacagctgttgaatcaacaacacgtatccaagtatcagaatcaaattatgcaggtaatcgtacaattggaaatcaccgtggatggttcaatccaacaacaacttctgaaggttttgttacatatatttatgcagattaa

SEQ ID NO: 1714 - DNA, 240 bp, Streptococcus pneumoniae
ttttattatcttgagcagcaattttgtcatcagtcgtttctgcatgcgcagttgttaaaacagctacttgagaaaccattactgtacttaataaaagtgacgctaagatttttttcttcatattacgtagatactccttcttttaaagacaatactagtataccaaaaaaaggcctaataaatattacgcctttgttacatttatatgtcgttcttatagataatatttttcaaaaataa

SEQ ID NO: 1715 - DNA, 495 bp, Streptococcus pneumoniae
atgagacagttgaagcgagttggagtatttttattgcttcctttctttgttctaattgacgcccatattagccagcttctgggctcatttttcccccatgtacatttggctagtcattttctttttctatttctcttatttgagacgatagaagtatcagagtatctctacctagtctattgttttgttataggcttggtttatgatgtttactttttccatctaatagggattacaactctcttatttatcttattgggagccttccttcataaattgaatagtgttattttgttgattcgttggacaagaatgctagctatgattgtgctgacattcctgtttgaaatgggtagttatcttttggcttttatggtagggttgacagtagatagcatgtcgatttttatagtctatagcttggtaccgacgatgattttaaattttttatggattactgtttttcaatttatttttgaaaaatattatctataa

SEQ ID NO: 1716 - DNA, 819 bp, Streptococcus pneumoniae
atgaaccgttttaaaaaatcaaaatatgtcattattgtttttgtcactgttctgcttgtgtcagctctcttagcgacgacttattcaagtacaattgtgacaaaattaggagatggaatctcattggttgatagagttgtacaaaaaccttttcagtggtttgattctgtcaaatcagatttggctcatttgacacgaacatataatgaaaatgaaagtttgaagaaacagctttaccaattagaagttaaatcaaatgaggtggaaagtttaaagacagaaaatgaacaactgcgccaattgcttgatatgaagtctaaattgcaagccacaaagactttagcagcagatgttattatgcgttctccggtatcttggaagcaggagttgaccttagatgcaggtagatcaaaaggtgcttctgagaacatgttagctattgcaaatggtggcttgattgggagtgtttcaaaagtagaggagaaatctactatagtcaaccttctgacaaatacggaaaatgctgataagatttctgttaaaattcaacatggctctactacaatttatggaattattattggctatgacaaggaaaatgacgttcttaaaattagccaattaaatagtaatagcgatattagtgcgggagataaggtgactactggtggattaggaaactttaacgttgctgatattcctgttggtgaagtggttgccacaacgcatagtacagactatttgacacgagaagtaactgttaaattgagtgcagatactcataatgtagatgtgatagaattagtggggaattcataa

SEQ ID NO: 1717 - DNA, 795 bp, Streptococcus pneumoniae
atggatagtatgattttagggcgttatatcccaggggattcgattgttcaccgattggatccacgtagcaaattgcttgctatgatgctactgattttgattgtgttttgggctaataaccccttgacgaatctgattctttttatagcgacagggatatttattgccttgtcaggagtatctctttcattttttattcagggcttgaagtctatgtttttcttgattgccttcacaactatttttcaactatttttcatttctaatgggaatgttttatttgagttttcgtttgtgagaatcacggattatgctttgcaacaagctgggattattttttgtcgctttgtattgattattttcttttcaactttgttaaccttaacaaccatgcctttaagtttggcatcagctgtcgaagctttattagcacctttaaagcgtgtgaaagttccagttcatgaaattggattgatgctgtctatgagtttgcgttttgtcccaaccttgatggatgatacgacgcggattatgaatgcacagaaagctcgtggagtggattttggagaaggaagcatcgttcaaaaagtaaaggcgatgattcccattttgattcctctttttgcgacaagtttaaaacgtgcagattccttggctatcgctatggaagcgcgtggctatcagggtggaaaaggcagaagtcaataccgacaattgaaatggactctaaaggatacgctgaccattcttgttattctcgtacttggttgttgtttatttttcttaaaatcttag

SEQ ID NO: 1718 - DNA, 171 bp, Streptococcus pneumoniae
gtggatccaatcggtgaacaatcgaatcccctgggatataacgccctaaaatcatactatccatttagcgactccttgaactcctctatcttaaccggtaatcgtttaaatgacacgcctctatcagccaatcgtttacaaaaggccgtaattttaggtactcccaactga

SEQ ID NO: 1719 - DNA, 840 bp, Streptococcus pneumoniae
atgggaattgctctagaaaatgtgaattttacatatcaagaaggtactcccttagcttcagcagctttgtcggatgtttctttgacgattgaagatggctcttatacagctttaattgggcacacaggtagtggtaaatcaactattttacaactcttaaatggtttattggtgccaagtcaagggagtgtgagggtttttgataccttaatcacctcgacttctaaaaataaagatattcgtcaaattagaaaacaggttggcttggtatttcagtttgctgaaaatcagatttttgaagaaacggttttgaaggacgttgcttttggaccgcaaaattttggagtttctgaagaagatgctgtgaagactgcgcgtgagaaactggctctggttggaattgatgaatcactttttgatcgtagtccgtttgagctgtcagggggacaaatgagacgtgttgccattgcaggcatacttgccatggagccagctatattagtcttagatgagccaacagctggtctagatcctctagggagaaaagagttgatgaccctgttcaaaaaactccaccagtcagggatgaccatcgtcttggtaacgcatttgatggatgatgttgctgaatatgcgaatcaagtctatgtaatggaaaagggacgtttagtaaaggggggcaaaccaagtgatgtctttcaagacgttgtttttatggaagaagttcagttgggagtacctaaaattacggccttttgtaaacgattggctgatagaggcgtgtcatttaaacgattaccggttaagatagaggagttcaaggagtcgctaaatggatag

SEQ ID NO: 1720 - DNA, 348 bp, Streptococcus pneumoniae
gcatattcagcaacatcatccatcaaatgcgttaccaagacgatggtcatccctgactggtggagttttttgaacagggtcatcaactcttttctccctagaggatctagaccagctgttggctcatctaagactaatatagctggctccatggcaagtatgcctgcaatggcaacacgtctcatttgtccccctgacagctcaaacggactacgatcaaaaagtgattcatcaattccaaccagagccagtttctcacgcgcagtcttcacagcatcttcttcagaaactccaaaattttgcggtccaaaagcaacgtccttcaaaaccgtttcttcaaaaatctga

SEQ ID NO: 1721 - DNA, 786 bp, Streptococcus pneumoniae
atgaaatcaataattgatgtaaaaaatctttcttttcgctataaagaaaatcagaactactacgatgtgaaggatattacgtttcacgtgaaacgtggagaatggctttcgattgtagggcataatggtagtggtaaatcaacgacggttcgattaattgatggcttactggaagcagaatccggagagattgtaattgatggccaacgtttgactgaggaaaatgtttggaatatacgtcgtcaaatcggtatggtttttcaaaatccagacaatcaatttgttggagcgactgttgaagatgatgttgcttttggtttggaaaatcagggactttctcgtcaagaaatgaaaaagagagtggaagaagctctggctttagttggcatgttggactttaaaaagagagagccagcgcgtctatcaggtggccaaaagcaacgtgtggccattgcaggtgttgtagccctaagaccagctattttaatcttagatgaagcaacgagtatgttggatcctgaggggcgtagagaacttattgggacagtaaaaggaattcgaaaagactatgatatgacagtcatttctattacccatgatttggaagaagtcgccatgagtgatcgcgtattggtcatgaaaaaaggggaaattgaatcaactagtagtccaagggagcttttctctcgaaatgatttagatcaaattggattagacgatccttttgctaatcaattaaaaaaatctttgaccagaatggctatgatttacctgaaaattatttga

SEQ ID NO: 1722 - DNA, 225 bp, Streptococcus pneumoniae
tcttttcgaattccttttactgtcccaataagttctctacgcccctcaggatccaacatactcgttgcttcatctaagattaaaatagctggtcttagggctacaacacctgcaatggccacacgttgcttttggccacctgatagacgcgctggctctctctttttaaagtccaacatgccaactaaagccagagcttcttccactctctttttcatttcttga

SEQ ID NO: 1723 - DNA, 546 bp, Streptococcus pneumoniae
atgaaaaaagaacaaattcccaatctcttaacaataggtcgaattctctttatacctatttttatctttattttaacgataggaaattcgatagagagtcatatagttgcagctattatctttgctgttgccagtattaccgactatttagatggatatttagctcgtaaatggaatgtggtcagtaattttggtaaatttgcagatcctatggcggataagttactagttatgtcggcttttattatgttgattgagttaggtatggctccggcttggattgttgcagtgattatctgtcgtgagttagctgtgacaggtttaaggcttttattggttgaaactggtggaacaattttagcagcagcaatgcctggaaaaattaaaacttttagtcagatgtttgccattattttcttgctattacattggactttgcttggtcaagttctactttatgtagccttatttttcactatctactctggctatgactatttcaagggtagtgcctatgtatttaaagggacatttggttcgaaatga

SEQ ID NO: 1724 - DNA, 831 bp, Streptococcus pneumoniae
atgacaagtatgagaaaaaaaacaattggagaggttttacgattagctagaatcaatcagggattgagtttagatgaattgcagaaaaagacagaaatccagttagatatgttggaagcaatggaagcagacgatttcgatcaacttccaagtcctttttacacgcgttctttcttgaaaaaatatgcatgggctgttgagttagatgaccaaattgttttggatgcttatgattctgggagtatgattacttatgaggaagtagatgttgatgaagatgagttgacaggtcgtagacgttcaagtaagaaaaagaagaaaaaaacatcatttttacctttattttattttatcctttttgctttatcgattttaatttttgtgacttattatgtttggaactatattcaaactcaaccagaggagccttctctttctaattacagtgtggttcaatcaacaagttcaactagctctgttccccactcctcaagtagtagttcttctagtatagaatcagctataagtgtatcaggcgaaggaaatcatgtagaaatcgcttataagacaagtaaggaaacagttaaattgcaattggcagtttcagatgttacaagttgggtcagtgtttcagaaagcgaacttgagggcggtgtaaccttatcgccaaagaagaaaagtgcagaagcaacagttgcaactaaaagtcctgtaacaattacgttaggtgttgtaaaaggtgttgatttgacagtagataatcagactgttgatttatcgaaattaacagctcagactggacaaatcactgtaacctttactaaaaattaa

SEQ ID NO: 1725 - DNA, 1284 bp, Streptococcus pneumoniae
atgacaaaggttgtttttgaagaaaaatactatccagctgtaaaagaaatggtttatcgaactcgtttggccaacggattgacagttgctcttttgcctaaaaaggaatttaaagaggtttacgggagtgtcactgtacagtttggttcggtagatacgtttgtcacagaagttgacggagatgtaaaacaatatcctggaggaattgctcattttcttgaacataaattatttgagagagaagattctagtgatttgatgtcggcttttacgagtctaggtgcagatagtaatgcctttacaagctttacaaaaacaaactatcttttttcagcaacggattattttttagaaaatttagatttacttgatgaattggtaacatcagcacactttactgaagcttccattctgacagagcaggatattattcagcaagaacgagaaatgtaccaagatgatccagattcgtgtttattcttttcaactttagcgaatttgtatcctggtacacctttagcaactgatatagttggaagtgaggagtccatttcccaaatcaatctaactaatttgcaagaaaattttacaaagttttacaaacctgtaaacatgtctctgtttttagttggtaattttgatgtggagcgagtacaggactattttgaaagcaaagaactgaaagattcagattttcaggaagtagcaagagaaaagttgtttttacagcctgtaaagctaacagatagtatgagaatggaagtatcttctcccaaactagcgattggagttagaggtaagcgagaagtttctgaagcggattgctatcgacatcatattttattaaaattattgtttgcaatgatgtttggttggacttcggatcgttttcaaaaatgttatgaatcaggtaaaattgatgcgtccttatctctggaagttgaaataacaagtcgctttcattttgtcatgttgacaatggatacgaaagagccagttgctttgtctcatcaatttaggaaggctattcgtaattttacaaaggatttagatattacagaggaacatttagatattatcaaaagagagatgtttggcgaatttttcagtagcatgaactctcttgaatttattgcaacgcaatatgatgcttttgaaaatggtgagacaatttttgatttgccgaaaattttacaggaaattactttagaggatgtccttgatgctggacatcatttaatagatgatggtgacatagttgattttacaatattcccatcgtag

SEQ ID NO: 1726 - DNA, 1251 bp, Streptococcus pneumoniae
atggagttagtgcatggaatttcaacacattttatccaatcaaaaaagtttaaaacaaacaaaattaccgtgcgttttaccgctccattatcccttgatacgattgcaggtcacatgttgagtgcaagtatgctagagactgctaatcagatgtaccccacttctcaagatttgaggagacacttggccagtctatacggtacagatatgtcaaccaattgtttcagaagagggcaaagccacattatagaattgacatttacctatgttcgtgatgagtttttaagtaggaaaaacgtgctaacctctcagattttggaacttgtaaaagaaactcttttttcacccgtagtagttgataatgggtttgatccggccttatttgaaattgagaaaaaacaattgctagcaagtttagcagctgatatggatgattctttttattttgcacataaagaattggataaattgttttttcatgatgaacgtcttcaattggaatatagtgatttacgaaatcgtattttagctgaaactccacaaagttcttactcttgtttccaagaatttttagccaatgatcgaatagatttctttttcctaggtgattttaatgaggttgaaattcaaaatgtattagaatcatttggctttaaaggtcgaaaaggagatgtgaaggttcagtattgtcaaccttattctaatatccttcaggaaggtatggttcggaaaaatgtgggacaatccattttggaattaggttatcattaccgttctaaatatggtgatgaacaacatttacccatgattgtaatgaatggtttacttggtggatttgctcactctaagctctttacaaatgtccgtgaaaatgctggattagcttataccatttcaagtgagcttgatttatttagtggattcttgaggatgtatgctggtatcaatcgagaaaatcgtaaccaggctcgtaaaatgatgaataatcaactgcttgatttaaaaaaaggttattttacagagtttgagttaaatcagaccaaggaaatgattcgttggtcgttgttactttctcaagataatcaatcttcattgattgaacgtgcttatcaaaatgccttatttggaaaatcttcagcagactttaaaagttggattgcaaagcttgaacaaattgacaaagatgctatttgtagagtagctaataatgtgaaactacaagcgatttactttatggaaggaatagaatga

SEQ ID NO: 1727 - DNA, 369 bp, Streptococcus pneumoniae
atggaatacaaattatttgaagaatttattaccctccaagcactactcaaagaacttggaattacacatagcggaggagctattaaatcatttctctctgaacattctgtttactttaatagggaattagagagtcgtcgtggaaaaaaacttcgtattggcgataaagttgacatccctgacatgaacattgacatcttgttgacacaacctacttctgaagaacaagatgaataccaagctgataaagttgaaaaagaacggatcgctaaacttgtcaaaaagatgaataagggagttaaaaaagacaaatcgaaacctgcttcatcacctaaaagccaacaagctccacgattccctggtagataa

SEQ ID NO: 1728 - DNA, 1098 bp, Streptococcus pneumoniae
atgtggctacaacatctatctctcaagacttttcgtaattacaaagaaacgaaaatagactttaatcctaaattgaatgtctttttgggacgtaatgcacaaggaaaaacaaacatgttagaggctatctattttttagccttaacgcgtagtcatcgaactcgaacagataaaaatctcattcattttgatgaggaacaacttcatctttcaggtctcgttcagaaaaaaactggatccattcccctagaaatcgaactaacacaaaaaggccgtgtaacaaaagttaatcacttaaaacaggcacgcctttcagattatgtaggacacatgaatgttgtcttatttgctcctgaagatttacaactaattaaaggagcaccttcgattcgacgaaaattcattgatatggaacttgggcaaattaagccaatctatttatctgacttaaccaattataaccacatcctaaagcaaagaaacacttacctaaaatcagctcaaaaaatagatgaaacattcctttctgtgttagatgatcagctagttgattatggatgtcgtgtaatgaatcaccgcttagatttcataaaaaaactagaatcatttgggcgtaagaaacattttgaactctctaatcagatcgaagagttgtcaatatcctatcaatcttctgtcaatataactgacaaacaaaacttatccgaatctttcaaaattgctttagaaaaaagtagatccagagatttatttaaaaagaatactggtgtcggtcctcatcgagatgacatttctttttatataaatgggatggatgctagtttcggaagccaaggtcaacatcgtagtctcgtcctctcgataaaattagcagaaatcgaattaatggaaagcattaccacagaatctccgatattactgcttgacgatgtgatgagtgaacttgacaacactagacagttaaaattattagaaacgatttctcaatcaatccaaacctttatcacaacaacaagcttagaccatcttcaaaatctgccagaaaatctaagtatcttcactattcaggatggtaaagctgctgtaaatggaaattga

SEQ ID NO: 1729 - DNA, 1479 bp, Streptococcus pneumoniae
atgtctaattgggacactaaatttttgaaaaaaggttttacctttgatgatgtattgcttattccagctgaaagtcatgtgttgcctaacgatgcagatttaacaactaaattggcagataatttgactttaaatatcccaattattaccgctgccatggacacagttacagagagtcaaatggccattgctattgctcgtgcaggcggtctcggagttatccataaaaacatgtcaattgctcaacaagcagacgaggttcgtaaggtaaaacgttctgaaaatggagttattattgatccgttcttcttgacgcctgaacatacaattgctgaagcagatgagcttatgggtcgttaccgcatcagtggtgttccagttgttgaaacacttgaaaatcgtaaattggttggtattttgacaaaccgagatcttcgttttatttcagattataatcaaccaatttcaaaccatatgactagtgaaaatcttgttactgctcctgtgggtacggatcttgcaacggctgagagtattcttcaagagcatcgtattgaaaaacttccgttggtcgatgaagaaggcagtctttctggtttgatcactatcaaagatattgaaaaagttattgagtttccaaatgcggctaaagatgagtttggtcgtcttctagttgcaggtgcagtaggtgttacttcagatacatttgaacgtgcagaggctctttttgaggcaggagcggatgcgattgttattgatactgcacatggtcattctgcaggtgtcttgcgtaaaattgccgagattcgtgctcatttcccagatcggactttgattgctggaaatattgctactgctgaaggtgcacgtgccctttatgaagcgggtgtagacgttgttaaggttggtattggaccaggttctatctgtactactcgtgtgattgctggtgttggtgttccgcaagtaacagctatctacgatgctgcagctgttgcgcgcgaatatggtaaaacgattattgctgacggtgggatcaagtattctggagatattgtaaaagcacttgctgcaggtggaaatgctgttatgcttggatctatgtttgctggaactgatgaagctccaggcgaaactgaaatcttccaaggacgtaaattcaagacttaccgtggtatgggatcaattgctgctatgaagaaaggttcaagcgaccgttatttccaaggttctgtcaatgaagcaaacaagcttgttccagaaggaattgaaggtcgtgttgcttataaaggagcggcagctgatattgttttccaaatgattggtggtattcgctctggtatgggttactgtggtgcagctaaccttaaagaactacacgataatgctcaatttattgaaatgtctggtgctggtttgaaagaaagccatcctcatgatgtgcaaattactaatgaggcaccaaattattctatgtaa

SEQ ID NO: 1730 - DNA, 147 bp, Streptococcus pneumoniae
actgcacctgcaactagaagacgaccaaactcatctttagccgcatttggaaactcaataactttttcaatatctttgatagtgatcaaaccagaaagactgccttcttcatcgaccaacggaagtttttcaatacgatgctcttga

SEQ ID NO: 1731 - DNA, 1026 bp, Streptococcus pneumoniae
atgactaaacccattattttaacaggagaccgtccaacaggaaaattgcatattggacattatgttggaagtctcaaaaatcgagtattattacaggaagaggataagtatgatatgtttgtgttcttggctgaccaacaagccttgacagatcatgccaaagatcctcaaaccattgtagagtctatcggaaatgtggctttggattatcttgcagttggattggatccaaataagtcaactatttttattcaaagccagattccagagttggctgagttgtctatgtattatatgaatctagtttcgttagcacgtttggagcgaaatccaacagtcaagacagagatttctcagaaaggatttggagaaagcattccgacaggattcttggtctatccaatcgctcaagcagctgatatcacagctttcaaggctaattatgttcctgttgggacagatcagaaaccaatgattgagcaaactcgtgaaattgttcgttcttttaacaatgcatataactgtgatgtcttggtagagccggaaggtatttatccagacaatgagagagcagggcgtttgcctggtttagatggaaatgctaaaatgtctaaatcactaaataatggtatttatttagctgatgatgcggatactttgcgtaaaaaagtaatgagtatgtatacagatccagatcatatccgcgttgaggatccaggtaagattgagggaaatatggttttccattatctagatgtttttggtcgtccagaagatgctcaagaaattgctgatatgaaagaacgttatcaacgaggtggtcttggtgatgtgaagaccaagcgttatctacttgaaatattagaacgtgaactgggtcctattcgtgagcgccgtattgaatttgctaaggatatgggagaagtttataatatgattcaaaaaggtagtgaaagagcgcgtgaagttgcgggtcaaaccctatctgaggtaaaaggggcaatgggacttcattactttaactaa

SEQ ID NO: 1732 - DNA, 1623 bp, Streptococcus pneumoniae
ttgcttacagtatctgatgtttcactacgttttagtgatcgcaaactttttgatgatgtcaatatcaaatttacagaaggaaatacttacggattaatcggtgctaatggtgccggaaaatcaacctttttaaaaattttagctggagatatcgaacctactactggtcacatctctcttggtccagatgaacgtctctctgttcttcgtcaaaatcactttgactacgaagatgaacgtgccattgatgtcgttatcatgggaaatgaaaaactttatagcatcatgaaagagaaagatgctatctacatgaaggaagatttctcagacgaggacggggttcgtgctgccgaactcgaaggagagtttgccgaacttggaggttgggaagcagagagtgaagcctctcaactacttcaaaacctaaacattccagaagaattacactaccaaaacatgagcgaattggccaacggtgaaaaagtaaaggttctcctcgccaaagcactttttggtaaaccagatgttcttctcttggacgagcctactaacggtttggatatccaatcgattacttggttagaagacttcttaattgactttgataacacagttatcgtagtatcccacgaccgtcacttcttaaacaaagtttgtactcacatggccgaccttgactttggaaaaatcaaactctatgtcggaaactacgacttctggaaggaatcttctgagcttgctgctaaattgctagcagaccgtaatgctaaagcagaagaaaaaattaaacaattgcaagaattcgttgctcgtttctctgccaatgcttctaagtcaaggcaggcaacatcacgtaagaaaatgcttgataagattgagctagaagagattgtaccatctagtcgtaaatatccatttatcaactttaaagcggaacgtgagattggtaatgatctcttgacagtagaaaatctaactgtaaagattgatggtgaaactatcttggataatattagtttcatcttgcgtccagatgataagacagcacttattggacaaaatgatattcaaacgactgcattaattcgtgcaatcatgggagatattgactatgaaggaactgtcaagtggggagttacaactagtcaatcttacctaccaaaagataactcagctgattttgcaggaggagaatcaattcttgactggttgcgtcaattcgcaagtaaagaagatgatgacaatactttcctacgtggtttcctcggccgtatgctcttctctggagatgaagttaacaaacctgtaaatgtcttgtcagggggagaaaaagttcgtgtcatgctttcaaaactcatgctcttaaaatcaaatgtccttgtacttgatgatccaacaaatcacttggacttggaatctatctcaagcttgaatgatggattgaaaaactttaaagaatcaatcatctttgccagccatgaccacgaatttattcaaactttggctaaccatatcattgtcttatctaaaaatggcgtcattgaccgtatcgatgaaacctacgatgaattcctagaaaatgcagaagtacaagcaaaagttaaagaactttggaaagactaa

SEQ ID NO: 1733 - DNA, 2553 bp, Streptococcus pneumoniae
atgaaatcatttttaaaaacatatcgaacctattttatttctttcatcattcctgtagtgattatgtctggagtatatctatctcaaggtatctactggaatagcgacaactctcctctattaggagatggctttcatcaatacgttatttttgatatagccttacgaaatatcctacatggaaatagtagtctgttttacacctttacaagtggtctagggctaaacttctatgccctatctagttattacttgggtagttttctcgcgcctctggtttacttttttgatctaacgaatatgccagatgctatctatctgacaactctcttaaaatttggattgattggtctgtcaaccttttttagtttgaataaattgtttcaatctatccctcagactttaaaactagccttatctacttcctatgctctgatgagtttcactgtcagtcaattagagataaaaacctggctagatgtttttatcttgattcctttaattataactggtttacatctactgataactgaaaagaaactcctattgtactttacaagtctgtcaatcttatttattcaaaattattattttggatatatgacagtattgtttcttattttctggtatctctgtcaaatttcgtgggactttaagactcgaaaatcatctgttcttgatttcatagttatctcctttttagctggtatggctagtttgattatgactcttcccactctatttgatttacagacacatggggaaaaattgactgaagttacaaagtttcaaactgaaagtagctggtatcttgatctctttgctaagcaattcattggttcctttgacacaacaaagtatggggccatcccaatgatttttgttggactacttccctttattttgaccattttattttttacgctgaaatctattaagtttcacgtgaaactcatatatgtaatattctttgcatttctaattgcaagcttttacatagaagctcttgacttattttggcaaggcatgcatactccaaacatgtttttacatcgctatgcttggattttctctaccttgttaatttacacagcagcagaagtcttaaagcgtctgaaagaacttaaagtctggaattttttagtttcgctttttcttgtagtagcaggatttttagctaccatctatctaaaatcgcattattcttttttaacagatttgaatattctgcttactcttgaatttttggttgtctattctcttttactccttgcagttatcaaaaagtttatatctgtgaatctatttgccattctaatctctttatttatactggttgaaatgagtttaaatgcttcatctcaaatggacggaattgctaaggaatggggatttgcttctcgaagtgcttatagtcgagatatcccagctatggaatctttctcaacatatattggaaatcaatttactcgtactgaaaaactacaaactcagacaggaaatgacagtatgaaattcaactacaatggaatctctcaattttcatctgttcgaaatcgttcatcaagctctactttagataaacttggttttaaatcctctgggactaatctcaatctccgatatgcaaataatagtattttggctgatagtttatttggtatccagtacaatatctcagacagtcctattgataagtatggctttaaagatatctatcaaaaagataatcttaccctatatgaaaatcaatactctcttccgattgcagttgctagtcaatctgtttacaatgatgtcaagttcaatgaacataccttggataatcaggcctcatttttaaatcaacttgctaacgtcaattttgattatttttctccaataccttatgaaaaaacagaaaaaatagaaaatactaatgatttgattagtgtcacaagttcttcaaatgaagatgcagcaatccagtatcaaattgaagttccagaaaacagccaagtttatctctctttcataaaccttcacttttctaacgataaacaaaagaaggttgacatccttgtaaatggtgaaaaaaagacttttacaactgataatgtcttctccttctttaatctaggatatactaaagagaaaaaaactttcaatatcaatgttagtttccctggaaattcacaagtatcatttgaatctcctaccttctatcgtttagataccaaaactttcaccgaggcaattcaaaaaattaaagaacaacctgtcacagtatcaacttctaaaaacaaggtttttgctacatatgatgtccaacaagatacatctattttcttcaccattccttatgacaaaggttggtctgcctaccaagatggtaagaaaatagaaattaaacaagctcaaactggatttatgaaagttgacattcccaaggggaaaggaactattacactttccttcattccctatggttttattactggagcaatctgttcctttacttctctcttactatttggaatctataatcacagacgaaagtcatctaaggcataa

SEQ ID NO: 1734 - DNA, 315 bp, Streptococcus pneumoniae
ttggcaggaattttggtatatggaggagttcagcttattggtttaactgctaatcatgagatgagaatatttattctcatcatcctaacaagtttagtattcatgtctatggtgaccactttagcaacgtggaatagccgtataggagcttttttctcacttattttgcttttactacagttagcatcaagtgcaggtacttatccacttgctttgacaaatgatttctttagatctattaatccctggttaccaatgagctattcagtttcgggattacgacaaacaatctctatcaacaagtcattttcctag

SEQ ID NO: 1735 - DNA, 339 bp, Streptococcus pneumoniae
ttggcagatggatctaggaaactagcagaaggtggaacaaagttaacttctggattggaagatttacagacaggacttgcttctttaggacaaggactaggtaatgctagtgatcaactcaaatcagtatcaacagaatctaaaaatgcagagattttgtcaaatccactcaatctttcaaaaacagacaatgatcaagttcctgtaaatggaatcgcaatagctccttatatgatatcagttgctctttttgttgcagcaatatcaacaaatatgatatttgcgaaattgccttcaggacgtcatccagagagccgttgggcttggttgaaatcttga

SEQ ID NO: 1736 - DNA, 768 bp, Streptococcus pneumoniae
atgatcgggatttctcttattccagatctgtacaatatcatatttttgtcatcaatgtgggatccatatgggcaattgtctgacttacctgtggcagttgtaaataatgataaagaggcttcctataatggtaatactatggcaataggaaaagacatggtgtccaatttaaaagaaaataaaaccttggattttcattttgtagatgaagaggaaggaaagaagggattggaagatggcgattactatatggtagtgactttaccaagtgatttatctgacaaaacaactacattatccaatattcaatcgacagcagcttatcaatcattgacaagtgagcaacaaactgagataagtgattctgtatctcaaaattcaactgatagtattcaatcggctcagtcaattgtagctttagtacaagatttacagggaagtttagaaaacttacaaaatcaatcttctaatctttcgactttaaaaaatcaagctaatcaagtatcacctattacttctacttctttgataggattgtcaagtggattaacagagatacaaggagatgttactagcaaattagttcctgccagtcagtcgattgcatcaggtgtaaacgcatatactacaggtgttgataaagtttctcagggcgcaagtcaactaagtgaaaaaaatgccaccttgacaggtagtttggataaactagtttcaggctcaaacaccttgacacaaaaatcttctagattgacagcaggagttggttaa

SEQ ID NO: 1737 - DNA, 543 bp, Streptococcus pneumoniae
atgcaagaaagtaacaaacgcttaaaaacaaagcgaactattgaaaatgctatggtacaattactgatggaacagccatttgataaaatttctactgtcaaattagtagaaaaagccggaattagtcgttccagcttctatactcactataaggataagtatgatatgattgagcactatcaaagcaagctattccatacatttgaatatatttttcaaaaacatgctcatcacaaaagagacgctattttagaagtttttgaatatctagagtcagaaccacttctggctgtccttctttctgaaaatgggactaaagaaatccaaaatttcttacgaaataaacttcatatcatgcttagtacagatttacaaaagcgatttatgcaactgaatctaaataccaccgaattagaatatagtagcatctatctaactcatgcactttttggtgtctgccaaacttggattgcacatggaaaaaaagaaagttctcaagaaataacagacttccttatgaaaatgcttggtgatacaaattga

SEQ ID NO: 1738 - DNA, 753 bp, Streptococcus pneumoniae
atgaaagttttaattttagaagatgttattgaacatcaagtgagactagagagaatattggatgaaatttcgaaagaatcgaatattccaatatcatacaagacaacgggaaaagtccgtgaatttgaagaatacattgaaaatgatgaagtaaatcaactttatttcctagatatcgatattcatggaattgagaaaaagggatttgaagtggctcagctcattcgtcattacaatccttacgctattatcgtctttatcactagtcgatcagagtttgcgactctaacctataaataccaggtatcagccctagattttgttgataaggatatcaatgatgagatgtttaagaagagaattgagcaaaatatcttctacacgaagagtatgttacttgaaaatgaagatgttgtagattatttcgactacaattacaagggaaatgatttaaaaattccttaccatgatattttgtatattgaaacaacaggggtatctcataaattgcgcattattggtaagaattttgcaaaagagttttatggtaccatgacagatattcaggaaaaggacaaacatactcagcgattttattctcctcacaagtcatttttggtaaatataggcaatatcagagaaattgatcgaaaaaacttagaaattgttttctatgaagaccatcgttgtcctatttcaagattaaaaattagaaaattaaaagatattttagagaaaaaatctcaaaagtga

SEQ ID NO: 1739 - DNA, 1326 bp, Streptococcus pneumoniae
atggatttatttggatttgggacggttattgttcattttttaattattagtcacagttaccattttatttgtaaaggtcaaataaatagaaaagaattattcgtttttggtgcttatacattactaacagaaatagtatttgattttcccttatatattctatatttagatgggttagggattgaaagatttttatttcctttgggattatattcctattttcgatggatgaaacagtatgagagggatagaggactattcctaagtttactactatctcttttatatgagagcactcataactttctgtccgtaactttctcctctataacaggagataattttgttttacaatatcatttcccattctttttcgttgtgacggtgttaacctattttgttacattaaaaatcatttactatttccatttggaactagcctattttgacgaggactacctttatcctttcttgaaaaaagtattttttgctttactattgctacatattgtatctttcgtttcagatatggtaagtacgattaaacatttgaatagttttggaagtattttgtcatctattgtctttatctctctccttttgaccttctttgcaatgaattctcataaagttcaaatggagaaagagattgctttgaagcagaagaaatttgaacagaaacatttacagaattacacagatgaaattgttggtctgtataatgaaatccgtggttttcgacatgattatgctggaatgcttgtcagcatgcagatggcaattgacagtggtaatttacaggaaattgacagaatttacaatgaagttttagtcaaagcaaatcataaattgcgttcagataagtacacttactttgatttgaacaacatagaagactcagctttacgaagtttggttgctcagtcaattgtctatgctcgaaataatggtgtagagtttacactggaagtaaaagatacgattaccaagcttccaattgaactattggatttggttcgtatcatgagcgttttattgaataatgctgtcgaaggatcggctgatagctataaaaagcagatggaagtagcagttattaagatggaaactgaaacagttattgtgattcagaattcatgtaaaatgacgatgactccttcaggagatctatttgccttaggattctccactaagggaagaaatcgcggagtcggattaaataatgtgaaagaactactagataagtacaacaatattattttagaaacagagatggaaggcagtacatttagacaaatcattagatttaagagggaatttgaatga

SEQ ID NO: 1740 - DNA, 480 bp, Streptococcus pneumoniae
atgaaaattaaagttgtaacagttgggaaactgaaagaaaagtatttaaaagatggtatcgcagagtattcaaaacgaatttctagatttgctaagtttgaaatgattgagttatcagatgaaaaaacaccagataaggccagtgaatcagaaaatcaaaagattttagaaatagaaggtcagagaattttatcaaaaattgctgaccgtgatttcgttattgtgttagccattgaagggaaaactttcttctcagaagaatttagtaagcagttagaagaaacttctataaaaggattttctactcttacttttattattgggggaagtttaggattgtcatcatctgtaaaaaatagagccaatctttctgtcagttttggtcgcctaaccttaccccatcagttaatgagactagttcttgttgaacaaatctatcgcgcttttacgattcagcagggattcccctaccataaatag

SEQ ID NO: 1741 - DNA, 1194 bp, Streptococcus pneumoniae
atggaggcaaatatgaaacatctaaaaacattttacaaaaaatggtttcaattattagtcgttatcgtcattagcttttttagtggagccttgggtagtttttcaataactcaactaactcaaaaaagtagtgtaaacaactctaacaacaatagtactattacacaaactgcctataagaacgaaaattcaacaacacaggctgttaacaaagtaaaagatgctgttgtttctgttattacttattcggcaaacagacaaaatagcgtatttggcaatgatgatactgacacagattctcagcgaatctctagtgaaggatctggagttatttataaaaagaatgataaagaagcttacatcgtcaccaacaatcacgttataaatggcgccagcaaagtagatattcgattgtcagatgggactaaagtacctggagaaattgtcggagctgacactttctctgatattgctgtcgtcaaaatctcttcagaaaaagtgacaacagtagctgagtttggtgattctagtaagttaactgtaggagaaactgctattgccatcggtagcccgttaggttctgaatatgcaaatactgtcactcaaggtatcgtatccagtctcaatagaaatgtatccttaagatcggaagatggacaagctatttctacaaaagccatccaaactgatactgctattaacccaggtaactctggcggcccactgatcaatattcaagggcaggttatcggaattacctcaagtaaaattgctacaaatggaggaacatctgtagaaggtcttggtttcgcaattcctgcaaatgatgctatcaatattattgaacagttagaaaaaaacggaaaagtgacgcgtccagctttgggaatccagatggttaatttatctaatgtgagtacaagcgacatcagaagactcaatattccaagtaatgttacatctggtgtagttgttcgttcggtacaaagtaatatgcctgccaatggtcaccttgaaaaatacgatgtaattacaaaagtagatgacaaagagattgcttcatcaacagacttacaaagtgctctttacaaccattctatcggagacaccattaagataacctactatcgtaacgggaaagaagaaactacctctatcaaacttaacaagagttcaggtgatttagaatcttga

SEQ ID NO: 1742 - DNA, 759 bp, Streptococcus pneumoniae
atggaaaaatttgaaatgatttctatcacagatatacaaaaaaatccctatcaaccccgaaaagaatttgatagagaaaaactagatgaactagcacagtctatcaaagaaaatggggtcattcaaccgattattgttcgtcaatctcctgttattggttatgaaatccttgcaggagagagacgctatcgggcttcacttttagctggtctacggtctatcccagctgttgttaaacagatttcagaccaagagatgatggtccagtccattattgaaaatttacagagagaaaatttaaacccaatagaagaagcacgcgcctatgaatctctcgtagagaaaggattcacccatgctgaaattgcagataagatgggcaagtctcgtccatatatcagcaactccattcgtttactttccttgccagaacagattctttcagaagtagaaaatggcaaactatcacaagcccatgcgcgttccctagttgggttaaataaggaacaacaagactatttctttcaacggattatagaagaagatatttctgtaaggaaattagaagctcttctgacagagaaaaaacaaaagaaacagcaaaaaactaatcatttcatacaaaatgaagaaaaacagttaagaaaactactcggattagatgtagaaattaaactatctaaaaaagacagtggaaaaatcattatttctttttcaaatcaagaagaatatagtagaattatcaacagcctgaaataa

SEQ ID NO: 1743 - DNA, 1362 bp, Streptococcus pneumoniae
ttgaaagaaaaacaattttggaatcgtatattagaatttgcacaagaaagactgactcgatccatgtatgatttctatgctattcaagctgaactcatcaaggtagaggaaaatgttgccactatatttctacctcgctctgaaatggaaatggtctgggaaaaacaactaaaagatattattgtagtagctggttttgaaatttatgacgctgaaataactccccactatattttcaccaaacctcaagatacgactagctcacaagttgaagaagctacaaatttaactctttataactatagtccaaagttagtatctattccttattcagatacgggattaaaagaaaagtatacctttgataactttattcaaggggatggaaatgtttgggctgtatcagccgctttagctgtctctgaagatttggctctgacctataaccctctttttatctatggaggaccaggccttggtaagactcacttattaaacgctattggaaatgaaattctaaaaaatattcctaatgcgcgtgttaaatatatccctgccgaaagctttattaatgactttcttgatcacctaagacttggggaaatggaaaagtttaaaaagacctatcgtagtcttgatcttttgttaatcgatgatatccagtcactcagcggaaaaaaagttgcaactcaggaagaatttttcaatacctttaacgcccttcatgacaagcaaaaacagattgtcctaacgagtgatcgtagtccaaaacatctagaagggctcgaggagaggcttgtcacgcgttttagttggggattgacacaaactatcacaccccctgactttgaaacacgtattgccattttacaaagtaaaacggaacatttaggctacaatttccaaagtgatactctagaatacctagctgggcaatttgattcaaatgttcgagatcttgagggagccatcaacgacatcactttaattgccagagtaaaaaaaatcaaggatatcactattgatattgctgcagaagccattagagcccgcaaacaagatgttagccaaatgctcgtcatcccaattgataaaatccaaactgaagttggtaacttttatggtgttagtatcaaagaaatgaagggaagtagacgccttcaaaatattgttttggcccgtcaagtagccatgtatttatctagagaactaacagataatagtcttccaaaaattgggaaggaatttgggggaaaagatcataccacagtcattcatgcccatgccaaaataaaatctttgattgatcaagacgataatttacgtttagaaattgaatcaatcaaaaagaaaatcaaataa

SEQ ID NO: 1744 - DNA, 1137 bp, Streptococcus pneumoniae
atgattcatttttcaattaataaaaatttatttctacaagcattaaatactactaagagagctattagttctaaaaatgccattcctattttatcaacagtaaaaattgacgtgaccaatgaaggtattactttaattggttcaaatggtcaaatttcaattgaaaattttatttctcaaaaaaatgaagatgctggtttgttaattacttctttaggttcgatccttcttgaagcttctttctttatcaatgtagtatctagtttacctgatgtaactcttgattttaaagaaattgaacaaaatcaaattgttttaaccagtggcaaatcagaaattaccctaaaaggaaaagatagcgaacaatatccacgaatccaagaaatttcagcaagcactcctttaatacttgaaacaaaattactcaagaaaattattaatgaaacagcctttgctgcaagtacacaagagagtcgtccgattttaacaggtgtccacttcgtattgagtcaacacaaagagttaaaaacagttgcaacagactctcatcgcctaagccagaaaaaattgactcttgaaaaaaatagtgatgattttgatgtcgtaattcctagccgttctctacgcgaattttcagcggtatttacagatgatatcgaaactgtagagattttctttgccaataaccaaatcctctttagaagcgaaaatattagcttctatactcgtctcctagaaggaaactatcctgatacagatcgcttgattccaacagactttaacactactattacttttaatgtggtaaacttacgccagtcaatggagcgtgcccgtcttttatcaagtgcgactcaaaatggtactgtgaaacttgaaattaaggatggggttgttagcgcccatgttcactctccagaagttggtaaagtaaacgaagaaatcgatactgatcaggttactggtgaagatttgaccattagtttcaacccaacttacttgattgattctcttaaagctttaaatagcgaaaaggtgaccattagctttatctcagctgttcgtccatttactcttgtgccagcagatactgacgaagacttcatgcagctcattacaccagttcgtacaaattaa

SEQ ID NO: 1745 - DNA, 195 bp, Streptococcus pneumoniae
atgtatcaagttggaaattttgttgagatgaaaaaatcacacgcttgtacaatcaagtcgactggtaaaaaggctaatcgttgggaaattacacgtgtaggagcagatatcaaaataaaatgcagtaattgtgagcatgttgtcatgatggggcgatatgattttgagcgaaaaatgaataaaattattgactga

SEQ ID NO: 1746 - DNA, 1125 bp, Streptococcus pneumoniae
atgagaaatatggctttgacagcaggtatcgttggtttgccaaacgttggtaaatcaacactatttaatgcaattacaaaagcaggagcagaggcagcaaactacccatttgcgactattgatccaaatgttggaatggtggaagttccagatgaacgcctacaaaaactaactgaaatgataactcctaaaaagacagttcccacaacatttgaatttacggatattgcagggattgtaaaaggagcttcaaaaggagaagggctagggaataaattcttggccaatattcgtgaagtagatgcgattgttcacgtagttcgtgcttttgatgatgaaaatgtgatgcgcgagcaaggacgtgaagacgcctttgtagatccacttgcagatattgatacaattaatctggaattaattcttgctgacttagaatcagtgaacaaacgatatgcgcgtgtagaaaagatggcacgtacgcaaaaagataaagaatcagtagcagaattcaatgttcttcaaaagattaaaccagtcctagaagacgggaaatcagctcgtaccattgaatttacagatgaggaacaaaaggttgtcaaaggtcttttccttttgacgactaaaccagttctttatgtagctaatgtggacgaggatgtggtttcagaacctgactctatcgactatgtcaaacaaattcgtgaatttgcagcgacagaaaatgctgaagtagtcgttatttctgcgcgtgctgaggaagaaatttctgaattggatgatgaagataaaaaagagtttcttgaagccattggtttgacagaatcaggtgtagataagttgacgcgtgcagcttaccacttgcttggattgggaacttacttcacagctggtgaaaaagaagttcgcgcttggactttcaaacgtggtatgaaggctcctcaagcagctggtattatccactcagactttgaaaaaggctttattcgtgcagtaaccatgtcatatgaagatctagtgaaatacggatctgaaaaggccgtaaaagaagctggacgcttgcgtgaagaaggaaaagaatatatcgttcaagatggcgatatcatggaattccgctttaatgtctaa

SEQ ID NO: 1747 - DNA, 570 bp, Streptococcus pneumoniae
atgaccaaattacttgtaggcttgggaaatccaggggataaatattttgaaacaaaacacaatgttggttttatgttgattgatcaactagcgaagaaacagaatgtcacttttacacacgataagatatttcaagctgacctagcatcctttttcctaaatggagaaaaaatttatctggttaaaccaacgacctttatgaatgaaagtggaaaagcagttcatgctttattaacttactatggtttggatattgacgatttacttatcatttacgatgatcttgacatggaagttgggaaaattcgtttaagagcaaaaggctcagcaggtggtcataatggtatcaagtctattattcaacatataggaactcaggtctttaaccgtgttaagattggaattggaagacctaaaaatggtatgtcagttgttcatcatgttttgagtaagtttgacagggatgagtatatcggtattttacagtctgttgacaaagttgacgattctgtaaactactatttacaagagaaaaattttgagaaaacaatgcagaggtataacggataa

SEQ ID NO: 1748 - DNA, 3510 bp, Streptococcus pneumoniae
atggtgaccttattagatttattctcagaaaatgatcagattaaaaaatggcatcaaaatttaacagataagaaaagacaactaatacttggtttatcaacatctactaaggctcttgcaattgcaagcagtttagaaaaagaagataggattgtgttattgatgtcaacttatggagaagcagaaggacttgttagtgatcttatatctatcttgggtgaggaactcgtctatccatttttggtagatgatgctcctatggtggagtttttgatgtcttcacaggaaaaaattatttcacgggttgaagccttgcgttttttgactgattcatctaagaaagggattttagtttgtaatatcgcagcaagtcgattgattttaccgtctcccaatgcattcaaagatagtattgtaaaaatctcagttggtgaagaatatgatcaacacgcgtttatccatcagttaaaggaaaatggctatcgaaaagttactcaagtacaaactcagggcgaatttagtcttcgaggagatattttagatatttttgaaatatcccagttagaaccttgtcgaattgagttttttggtgatgaaattgatggtatcaggtcatttgaagtagaaacacaattatcgaaagaaaataagacagaactcactatctttccagctagtgatatgcttttgagagaaaaggattatcaacgaggacagtcagctttagaaaaacaaatttcaaaaactttatcacctattttgaaatcatacctagaagaaattctttcaagttttcaccaaaaacaaagtcatgcagactctcggaagtttttatctttgtgctatgataagacatggactgtctttgattatattgaaaaagatactccaatattctttgatgattatcaaaaattgatgaatcagtatgaagtctttgaaagagaattagcgcagtactttacagaagaattacagaatagtaaagcattttctgatatgcagtatttttctgatattgaacaaatctataaaaaacaaagtccagtgacctttttttctaatcttcaaaagggtttaggaaatctcaaatttgacaaaatttatcaattcaatcaatatcctatgcaggaatttttcaatcagttttcttttctaaaagaagaaattgaacgatataaaaaaatggattacaccattattctgcagtctagcaattcaatgggaagtaaaacattggaggatatgttagaggaatatcagattaaattggattctagagataagacaaatatctgtaaagaatctgtaaacttaatagagggtaatctcagacatggttttcattttgtagatgaaaagattttattgataactgaacatgagatttttcaaaagaaattaaagcgtcgttttcgaagacaacatgtttcaaatgcagagagattaaaagattacaatgaacttgaaaaaggggactatgttgtccatcatatccatgggattggtcaatatctaggaattgaaaccattgaaatcaagggaattcatcgtgattatgtcagtgtccaataccaaaatggtgatcaaatttctattcccgtggaacagattcatctactgtccaaatatatttcaagtgatggtaaagctccaaaactcaataaattaaatgacggtcattttaaaaaggccaagcaaaaggttaagaaccaggtagaggatatagctgatgatttaatcaaactctactctgaacgtagtcagttgaagggttttgctttctcagctgatgatgatgatcaagatgcctttgatgatgctttcccttatgttgaaacggatgatcaacttcgtagtattgaggaaatcaagagggatatgcaggcttctcagccaatggatcgacttttagttggggatgttggttttggaaagactgaagttgctatgcgtgcagcctttaaagcagtcaatgatcacaaacaggttgtcattctagttccgacgacggttttagcgcaacagcactatacgaattttaaggaacgattccaaaattttgcagttaatattgatgtgttgagtcgctttagaagtaaaaaagagcagactgcaacacttgaaaaattgaaaaacggtcaagtcgatattttgattggaacacatcgtgttttgtcaaaagatgttgtgtttgctgatttgggcttgatgattattgatgaggaacagcgatttggtgtcaagcataaggaaactttgaaagaactgaagaaacaagtggatgtcctaaccttgaccgctacgccaatccctcgtaccctccatatgtctatgctgggaatcagagatttatctgttattgaaactccgccgactaatcgctatcctgttcagacctatgttttggaaaagaatgatagtgtcattcgtgatgctgtcttgcgtgaaatggagcgtggaggtcaagtttattatctttacaacaaagttgacacaattgttcagaaggtttcagaattacaggagttgattccggaggcttcgattggatatgttcatggtcgaatgagtgaagtccagttggaaaatactctattagactttattgagggacaatacgatatcttggtgacgactactattattgagacaggggtggacattccaaatgctaatactttatttattgaaaatgcggaccatatgggcttgtcaaccttatatcagttaagaggaagagtcggtcgtagtaatcgtattgcttatgcttatctcatgtatcgtccagaaaaatcaatcagtgaagtctctgaaaagagattagaagcgattaaaggatttacagaattgggctctggctttaagattgcaatgcgagatctttcgattcgtggagcaggaaatcttttaggaaaatcccagtctggtttcattgattctgttggttttgaattgtattcgcagttattagaggaagctattgctaaacgaaacggtaatgctaacgctaacacaagaaccaaagggaatgctgagttgattttgcaaattgatgcctatcttcctgatacttatatttctgatcaacgacataagattgaaatttacaagaaaattcgtcaaattgacaaccgtgtcaattatgaagagttacaagaggagttgatagaccgttttggagaatacccagatgtagtagcctatctgttagagattggtttggtcaaatcatacttggacaaggtctttgttcaacgtgtggaaagaaaagataataaaattacaattcaatttgaaaaagtcactcaacgactgtttttagctcaagattattttaaagctttatccgtaacgaacttaaaagcaggcatcgctgagaataagggattaatggagcttgtatttgatgtccaaaataagaaagattatgaaattttagaaggtttgctgatttttggagaaagtttattagagataaaagagtctaaggaagaaaattccatttga

SEQ ID NO: 1749 - DNA, 297 bp, Streptococcus pneumoniae
ttgccaaagcgaatttcaacttggtcattaactttcaagtccgttgaacttttggccaagattccattaaccttgattctacctttatctgctacttcctttgcgactgtacgacgcttgataattcgcgatacttttaaatatttatctaatctcatccttattacctcaatttattattgtaccatttttatctattttatagaagaaaaatatcaaatggaattttcttccttagactcttttatctctaataaactttctccaaaaatcagcaaaccttctaaaatttcataa

SEQ ID NO: 1750 - DNA, 267 bp, Streptococcus pneumoniae
atgagattagataaatatttaaaagtatcgcgaattatcaagcgtcgtacagtcgcaaaggaagtagcagataaaggtagaatcaaggttaatggaatcttggccaaaagttcaacggacttgaaagttaatgaccaagttgaaattcgctttggcaataagttgctgcttgtaaaagtactagagatgaaagatagtacaaaaaaagaagatgcagcaggaatgtatgaaattatcagtgaaacacgggtagaagaaaatgtctaa

SEQ ID NO: 1751 - DNA, 369 bp, Streptococcus pneumoniae
atgtctaaaaatattgtacaattgaataattcttttattcaaaatgaataccaacgtcgtcgctacctgatgaaagaacgacaaaaacggaatcgttttatgggaggggtattgattttgattatgctattatttatcttgccaacttttaatttagcgcagagttatcagcaattactccaaagacgtcagcaattagcagacttgcaaactcagtatcaaactttgagtgatgaaaaggataaggagacagcatttgctaccaagttgaaagatgaagattatgctgctaaatatacacgagcgaagtactattattctaagtcgagggaaaaagtttatacgattcctgacttgcttcaaaggtga

SEQ ID NO: 1752 - DNA, 222 bp, Streptococcus pneumoniae
atgaagattatgctgctaaatatacacgagcgaagtactattattctaagtcgagggaaaaagtttatacgattcctgacttgcttcaaaggtgataaaatggaaaatttattagacgtaatagagcaatttttgagtttgtcagatgaaaagctggaagaattggctgataaaaatcaattattgcgtttacaagaagaaaaggaaaggaagaatgcgtaa

SEQ ID NO: 1753 - DNA, 1338 bp, Streptococcus pneumoniae
atgaaaagctggaagaattggctgataaaaatcaattattgcgtttacaagaagaaaaggaaaggaagaatgcgtaaattcttaattattttgttgctaccaagttttttgaccatttcaaaagtcgttagcacagaaaaagaagtcgtctatacttcgaaagaaatttattacctttcacaatctgactttggtatttattttagagaaaaattaagttctcccatggtttatggagaggttcctgtttatgcgaatgaagatttagtagtggaatctgggaaattgactcccaaaacaagttttcaaataaccgagtggcgcttaaataaacaaggaattccagtatttaagctatcaaatcatcaatttatagctgcggacaaacgatttttatatgatcaatcagaggtaactccaacaataaaaaaagtatggttagaatctgactttaaactgtacaatagtccttatgatttaaaagaagtgaaatcatccttatcagcttattcgcaagtatcaatcgacaagaccatgtttgtagaaggaagagaatttctacatattgatcaggctggatgggtagctaaagaatcaacttctgaagaagataatcggatgagtaaagttcaagaaatgttatctgaaaaatatcagaaagattctttctctatttatgttaagcaactgactactggaaaagaagctggtatcaatcaagatgaaaagatgtatgcagccagcgttttgaaactctcctatctctattatacgcaagaaaaaataaatgagggtctttatcagttagatacgactgtaaaatacgtatctgcagtcaatgattttccaggttcttataaaccagagggaagtggtagtcttcctaaaaaagaagataataaagaatattctttaaaggatttaattacgaaagtatcaaaagaatctgataatgtagctcataatctattgggatattacatttcaaaccaatctgatgccacattcaaatccaaaatgtctgccattatgggagatgattgggatccaaaagaaaaattgatttcttctaagatggccgggaagtttatggaagctatttataatcaaaatggatttgtgctagagtctttgactaaaacagattttgatagtcagcgaattgccaaaggtgtttctgttaaagtagctcataaaattggagatgcggatgaatttaagcatgatacgggtgttgtctatgcagattctccatttattctttctattttcactaagaattctgattatgatacgatttctaagatagccaaggatgtttatgaggttctaaaatga

SEQ ID NO: 1754 - DNA, 1278 bp, Streptococcus pneumoniae
atgagggaaccagattttttaaatcattttctcaagaagggatatttcaaaaagcatgctaaggcggttctagctctttctggtggattagattctatgtttctatttaaggtattgtctacttatcaaaaagagttagagattgaattgattctggctcatgtgaatcataagcagagaattgaatcagattgggaagaaaaggaattaaggaagttggctgctgaagcagagcttcctatttatatcagcaatttttcaggagaattttcagaagcgcgtgcacgaaattttcgttatgatttttttcaagaggttatgaaaaagacaggtgcgacagctttagtcactgcccaccatgctgatgatcaggtggaaacgattttgatgcgcttgattcgaggaactcgcttgcgctatctatcaggaattaaggagaagcaagtagtcggagagatagaaatcattcgtcccttcttgcattttcagaaaaaagactttccatcaatttttcactttgaagatacatcaaatcaggagaatcattattttcgaaatcgtattcgaaactcttacttaccagaattggaaaaagaaaatcctcgatttagggatgcaatcttaggcattggcaatgaaattttagattatgatttggcaatagctgaattatctaacaatattaatgtggaagatttacagcagttattttcttactctgagtctacacaaagagttttacttcaaacttatctgaatcgttttccagatttgaatcttacaaaagctcagtttgctgaagttcagcagattttaaaatctaaaagccagtatcgtcatccgattaaaaatggctatgaattgataaaagagtaccaacagtttcagatttgtaaaatcagtccgcaggctgatgaaaaggaagatgaacttgtgttacactatcaaaatcaggtagcttatcaaggatatttattttcctttggacttccattagaaggtgaatcaattcaacaaatacctgtttcacgtgaaacatccatacacattcgtcatcgaaaaacaggagatgttttgattcaaaatgggcatagaaaaaaactcagacgtttatttattgatttgaaaatccctatggaaaagagaaactctgctcttattattgagcaatttggtgaaattgtctcaattttgggaattgcgaccaataatttgagtaaaaaaacgaaaaatgatataatgaacactgtactttatatagaaaaaatagataggtaa

SEQ ID NO: 1755 - DNA, 543 bp, Streptococcus pneumoniae
atgttagaaaacgatattaaaaaagtcctcgtttcacacgatgaaattacagaagcagctaaaaaactaggtgctcaattaactaaagattatgcaggaaaaaatccaatcttagttgggattttaaaaggatctattccttttatggctgaattggtcaaacatattgatacacatattgaaatggacttcatgatggtttctagctaccatggtggaacagcaagtagtggtgttatcaatattaaacaagatgtgactcaagatatcaaaggaagacatgttctatttgtagaagatatcattgatacaggtcaaactttgaagaatttgcgagatatgtttaaagcaagagaagcagcttctgttaaaattgcaaccttgttggataaaccagaaggacgtgttgtagaaattgaggcagactatacctgctttactatcccaaatgagtttgtagtaggttatggtttagactacaaagaaaattatcgtaatcttccttatattggagtattgaaagaggaagtgtattcaaattag

SEQ ID NO: 1756 - DNA, 1959 bp, Streptococcus pneumoniae
atgaaaaaacaaaataatggtttaattaaaaatccttttctatggttattatttatctttttccttgtgacaggattccagtatttctattctgggaataactcaggaggaagtcagcaaatcaactatactgagttggtacaagaaattaccgatggtaatgtaaaagaattaacttaccaaccaaatggtagtgttatcgaagtttctggtgtctataaaaatcctaaaacaagtaaagaaggaacaggtattcagtttttcacgccatctgttactaaggtagagaaatttaccagcactattcttcctgcagatactaccgtatcagaattgcaaaaacttgctactgaccataaagcagaagtaactgttaagcatgaaagttcaagtggtatatggattaatctactcgtatccattgtgccatttggaattctattcttcttcctattctctatgatgggaaatatgggaggaggcaatggccgtaatccaatgagttttggacgtagtaaggctaaagcagcaaataaagaagatattaaagtaagattttcagatgttgctggagctgaggaagaaaaacaagaactagttgaagttgttgagttcttaaaagatccaaaacgattcacaaaacttggagcccgtattccagcaggtgttcttttggagggacctccggggacaggtaagactttgcttgctaaggcagtcgctggagaagcaggtgttccattctttagtatctcaggttctgactttgtagaaatgtttgtcggagttggagctagtcgtgttcgctctctttttgaggatgccaaaaaagcagcaccagctatcatctttatcgatgaaattgatgctgttggacgtcaacgtggagtcggtctcggcggaggtaatgacgaacgtgaacaaaccttgaaccaacttttgattgagatggatggttttgagggaaatgaagggattatcgtcatcgctgcgacaaaccgttcagatgtacttgatcctgcccttttgcgtccaggacgttttgatagaaaagtattggttggccgtcctgatgttaaaggtcgtgaagcaatcttgaaagttcacgctaagaacaagcctttagcagaagatgttgatttgaaattagtggctcaacaaactccaggctttgttggtgctgatttagagaatgtcttgaatgaagcagctttagttgctgctcgtcgcaataaatcgataattgatgcttcagatattgatgaagcagaagatagagttattgctggaccttctaagaaagataagacagtttcacaaaaagaacgagaattggttgcttaccatgaggcaggacataccattgttggtctagtcttgtcgaatgctcgcgttgtccataaggttacaattgtaccacgcggccgtgcaggcggatacatgattgcacttcctaaagaggatcaaatgcttctatctaaagaagatatgaaagagcaattggctggcttaatgggtggacgtgtagctgaagaaattatctttaatgtccaaactacaggagcttcaaacgactttgaacaagcgacacaaatggcacgtgcaatggttacagagtacggtatgagtgaaaaacttggcccagtacaatatgaaggaaaccatgctatgcttggtgcacagagtcctcaaaaatcaatttcagaacaaacagcttatgaaattgatgaagaggttcgttcattattaaatgaggcacgaaataaagctgctgaaattattcagtcaaatcgtgaaactcataagttaattgcagaagcattattgaaatacgaaacattggatagtacacaaattaaagctctttacgaaacaggaaagatgcctgaagcagtagaagaggaatctcatgcactatcctatgatgaagtaaagtcaaaaatgaatgacgaaaaataa

SEQ ID NO: 1757 - DNA, 624 bp, Streptococcus pneumoniae
cgtccaacagcatcaatttcatcgataaagatgatagctggtgctgcttttttggcatcctcaaaaagagagcgaacacgactagctccaactccgacaaacatttctacaaagtcagaacctgagatactaaagaatggaacacctgcttctccagcgactgccttagcaagcaaagtcttacctgtccccggaggtccctccaaaagaacacctgctggaatacgggctccaagttttgtgaatcgttttggatcttttaagaactcaacaacttcaactagttcttgtttttcttcctcagctccagcaacatctgaaaatcttactttaatatcttctttatttgctgctttagccttactacgtccaaaactcattggattacggccattgcctcctcccatatttcccatcatagagaataggaagaagaatagaattccaaatggcacaatggatacgagtagattaatccatataccacttgaactttcatgcttaacagttacttctgctttatggtcagtagcaagtttttgcaattctgatacggtagtatctgcaggaagaatagtgctggtaaatttctctaccttagtaacagatggcgtgaaaaactga

SEQ ID NO: 1758 - DNA, 108 bp, Streptococcus pneumoniae
atgacgataatcccttcatttccctcaaaaccatccatctcaatcaaaagttggttcaaggtttgttcacgttcgtcattacctccgccgagaccgactccacgttga

SEQ ID NO: 1759 - DNA, 480 bp, Streptococcus pneumoniae
atgattaaagaattgtatgaagaagtccaagggactgtgtataagtgtagaaatgaatattaccttcatttatgggaattgtcggattgggaccaagaaggcatgctctgcttacatgaattgattagtagagaagaaggactggcagacgatattccacgtttaaggaaatatttcaaaaccaagtttcgaaatcgaattttagactatatccgtaagcaggaaagtcagaagcgtagatacgataaagaaccctatgaagaagtgggtgagatcagtcatcgtataagtgagggaggtctctggctagatgattattatctctttcatgaaacactaagagattatagaaacaaacaaagtaaagagaaacaagaagaactagaacgcgtcttaagcaatgaacgatttcgagggcgtcaaagagtattaagagacttacgcattgtgtttaaggagtttactatccgtacccactag

SEQ ID NO: 1760 - DNA, 246 bp, Streptococcus pneumoniae; identical to SEQ ID NO: 1035

SEQ ID NO: 1761 - DNA, 150 bp, Streptococcus pneumoniae; identical to SEQ ID NO: 1036

SEQ ID NO: 1762 - DNA, 186 bp, Streptococcus pneumoniae; identical to SEQ ID NO: 1037

SEQ ID NO: 1763 - DNA, 261 bp, Streptococcus pneumoniae; identical to SEQ ID NO: 1038

SEQ ID NO: 1764 - DNA, 408 bp, Streptococcus pneumoniae
ttcattggcattcggagtttatctgagattggtaatccgggatggacccctcacccaaatagtgctctacctccaagaatctctaatgtcgacgctagccctaaagctatttcggagagaaccagctatctccaagttcgtttggaatttctccgctacccacaagtcatccaagcacttttcaacgtgccctggttcggtcctccagtgcgtcttaccgcaccttcaacctgctcatgggtaggtcacatggtttcgggtctacgtcatgatactaaggcgccctattcagactcggtttccctacggctccgtctcttcaacttaacctcgcatcataacgtaactcgccggttcattctacaaaaggcacgctctcacccattaacgggctcgaacttgttgtag

SEQ ID NO: 1765 - DNA, 156 bp, Streptococcus pneumoniae
atgcgttccagcactcctcacggtataccttcatcacacatagaacgctctcctaccatacctataaaggtatccacagcttcggtaaattgttttagccccggtacattttcggcgcagggtcactcgactagtgagctattacgcactctttga

SEQ ID NO: 1766 - DNA, 156 bp, Streptococcus pneumoniae; identical to SEQ ID NO: 272

SEQ ID NO: 1767 - DNA, 246 bp, Streptococcus pneumoniae; identical to SEQ ID NO: 273

SEQ ID NO: 1768 - DNA, 234 bp, Streptococcus pneumoniae; identical to SEQ ID NO: 274

SEQ ID NO: 1769 - DNA, 207 bp, Streptococcus pneumoniae
atggacaatgcaagattccatagaatgggtaagctagaacttttatgtgaagagtttgggcataaacttttacctcttcttccctactcacctgagtacaatcctattgagaaaacatgggctcatatcaaaaagaacctcaaaaaggtattaccacgttgccataccttttacgaggctcttttgtcctgctcttgtttcaattga

SEQ ID NO: 1770 - DNA, 246 bp, Streptococcus pneumoniae
aacaccactataatctctatcagctcttgcttttccaccctgtttaaaaccttcctcaaagataaagagaaaatcgtcaacgcccttcaattaccttattccaacgccaaactggaagccaccaataatctcatcaaacttatcaagcacaatgcctttggttttaggaactttgaaaacttcaaaaaagaaaggacgaaatttgtcctttctagatcttcgctttcttcaacccactacagttga

SEQ ID NO: 1771 - DNA, 141 bp, Streptococcus pneumoniae
atgagctttattgctcaggactttgataagctcaatatcataactgttcttgagagcagaacacaagccatcatccgaaatcccatgaatacaaggctatcaagcgatactgaaagctcattcaacaagatagtcagaaac

SEQ ID NO: 1772 - DNA, 273 bp, Streptococcus pneumoniae
tataaaaaaattcaaactagaattcttcttagaaaaggccgttttaagtgctatcattgctcaaaaatggaggtcgctgagacttctatcgtcaagaagaatcatcaaattccttgtatcatcaaccaaaagattgatcagaagctaattgaaaagacttctatgaccgacattgatcatcagttgtctatttcaacttcaactgtcattcgcaagatcaatgattttcactttgagcatgatttttcgcgtcttcctgagattatgtcctag

SEQ ID NO: 1773 - DNA, 243 bp, Streptococcus pneumoniae
ttgattatgttacaaaaaatttatgagcagatgactaatttctatgatagtattgaagaagagtatggtcctacatttggtgataattttgactgggaacatgttcattttaaatttttaatttattatttagtgagatatggcattggttgtcgtaaggattttatcgtttaccattatcgtgttgcttatcgtttgtatcttgaaaaattggtaatgaatcggggttttatttcttgttga

SEQ ID NO: 1774 - DNA, 1329 bp, Streptococcus pneumoniae
atgtatgtgagaaaggaagagcctgagggctcagacaaaattatgacttcagttgttgttgtaggtacccaatggggtgatgaaggtaaagggaagattacagacttcctttcagcgaatgcagaagtgattgcacgttaccaaggtggtgataatgctggtcacacgattgtgattgacggtaagaaatttaagttgcacttgattccatctgggattttcttccctgaaaaaatatctgtcattgggaatggtatggttgtaaatcctaaatctcttgtaaaagagttgagctatcttcatgaggaaggtgtaacaactgataacttgcgtatttctgatcgtgcgcatgttattttgccttatcatatcgagttggatcgcttgcaagaagaagctaagggcgacaataagattggtacgacaattaagggaattggtccagcttatatggacaaggctgctcgtgttggaattcgtattgcagatcttttagataaagatattttccgtgagcgtttagaacgtaaccttgctgaaaagaatcgtctttttgaaaaattgtatgacagtaaagcgattgttttcgatgatatttttgaagaatattacgaatatggtcaacaaatcaagaaatacgtgatagatacatctgttatcttgaatgatgcgcttgataatggcaaacgtgtgctttttgaaggtgcacaaggtgttatgctagatatcgaccaaggtacttatccatttgttacgtcatcaaaccctgtagctggtggtgtgacaattggttctggtgtcggtccaagcaagattgacaaggttgtaggtgtatgtaaagcttatacgagtcgtgtaggagatggtcctttcccaactgagttgtttgatgaagtgggagaacgtatccgtgaagtgggtcatgagtatggtacaacaactggtcgtccacgtcgtgtaggttggtttgactcagttgtgatgcgtcatagccgtcgtgtttctggtattactaacctttctttgaactctattgatgttttgagcggtttggatactgtgaaaatctgtgtggcctatgatcttgacggtcaacgtattgactactatccagctagtcttgagcaattgaaacgttgcaagcctatctatgaagagttgccaggttggtcagaagatattaccggagttcgcaatttggaagatcttcctgagaatgcgcgtaactatgttcgtcgtgtgagtgaattggttggcgttcgtatttctactttctcagtaggtcctggtcgtgaacaaacaaatattttagaaagtgtttggtcctaa

SEQ ID NO: 1775 - DNA, 423 bp, Streptococcus pneumoniae
ttgagagaggctgagattgctcttgaacacgatgaaattccaattggttgtgtgattgtcaaagatggggaaatcattggtcgtgggcataatgcgcgtgaggaattacagcgagcggttatgcatgcggaaattatggctatagaggatgcgaacttgagtgaggagagctggcgcttgctggattgcacactttttgtgaccattgaaccttgtgtcatgtgtagtggagcgattgggcttgcccgcattccaaatgtggtctatggggctaaaaaccagaaatttggcggtgctgggagtttgtacaatatcttgacagatgagcgtctcaatcatcgtgtggaggttgaaataggaattttggaagatgaatgcgcagctatcatgcaggatttttttagaaatagacggaaaaaataa

SEQ ID NO: 1776 - DNA, 444 bp, Streptococcus pneumoniae
atgaaaattcgtggttttgaattggtttcgagttttacagatgaaaatttattgcccaagcgtgagacagcgcatgcggctggttacgacttaaaggttgctgtgcgtacagttgttgcgccaggagagattgtcttggttccgacaggggttaaggcttatatgcagccgactgaggttctctacctctatgatcgttcttcaaatcctcgtaagaagggcttggttttaattaactcagttggggtcattgatggggattattatggaaatcctggaaatgaagggcatatttttgcgcagatgaagaatatcacagaccaagaggttgttcttgaagttggggagcgtattgtccaggctgtttttgctactttcttaattgcagatggagatgcggctgatggcgttcgaactggtggatttggatcgacagggcactag

SEQ ID NO: 1777 - DNA, 558 bp, Streptococcus pneumoniae
atggcgttcgaactggtggatttggatcgacagggcactagaatgaagattatctttgtacgtcatggggagccagattaccgtgagttagaggagcgttcttatataggatttgggatagatttggcacccttgtctgagatgggacggcagcaagtccagaaattgagcaaaaatcctttactctcgtcagctgaaataatcgtatcttctgcagtcacaagagctttagaaacggcttcgtatgtggtctgtgctacgggttttcctttaagagtagagcctttattacatgaatggcaggtctataaaacaggaatagaaaactttgaaacagctagaagactgtttttagaaaacaagggggagttgcttcctaatagtcctattcaatatgagacagctacggaaatgaagtctcggtttctagaatgtatgtctaagtatcgagaacatcagactgtggtagttgttgctcatcgaatgctcatgcgccagtttgtgccaaatgagaagattgatttttgccaagtgattgagtgtgagttagagatatag

SEQ ID NO: 1778 - DNA, 204 bp, Streptococcus pneumoniae
acctgccattcatgtaataaaggctctactcttaaaggaaaacccgtagcacagaccacatacgaagccgtttctaaagctcttgtgactgcagaagatacgattatttcagctgacgagagtaaaggatttttgctcaatttctggacttgctgccgtcccatctcagacaagggtgccaaatctatcccaaatcctatataa

SEQ ID NO: 1779 - DNA, 1365 bp, Streptococcus pneumoniae
gtcatcgcaaagaaaaaagcgacatttgtatgtcaaaattgtgggtataattcccctaaatatctgggacgttgccccaactgtgggtcttggtcttcttttgtggaagaggttgaggttgccgaggtcaagaatgcgcgtgtgtccttgacaggtgagaaaaccaagcccatgaaactagctgaggtgacttccatcaatgtcaatcgaaccaagacggagatggaggaattcaaccgtgtgcttggaggcggagtggtaccaggaagtctcgtcctcatcggtggggatcctgggattgggaaatcaactcttctcctacaagtctcaacccagttgtcccaagtggggacagttctctatgtcagtggggaggagtctgcccagcagattaaactacgtgcagagcgcttaggtgatattgatagtgagttttatctctatgcagagaccaatatgcagagtgttcgtgcagaagtggagcgtatccagccagactttctcattattgattccatccagaccatcatgtctcctgagatttcaggggtgcaggggtctgtttctcaggtacgtgaagtgaccgctgaactcatgcagttggccaagaccaataacattgccatctttatcgtaggtcatgtgaccaaagaaggaaccttggctgggcctcgtatgttggagcatatggtggatacggtgctttactttgaaggggagcgtcaccacacctttcgtattttgagagcggtcaaaaatcgttttggttccactaatgagattgggatttttgagatgcagtcgggcggcttggttgaggtactcaatccgagtcaagttttcctagaagagcgtttggatggggcgactggttcctccatcgttgtaaccatggaagggacgcgtccgattttggcggaggttcaggctttggtaacaccgaccatgtttggaaatgccaagcgtactacgacaggacttgattttaaccgtgctagcttgattatggctgttttggaaaaacgggcagggcttctcttgcaaaatcaggatgcctatctcaaatctgctggtggtgttaaattggatgaacctgccattgacttggctgttgcagttgctattgcttcgagctacaaagacaagccaactaatcctcaggaatgttttgtcggagaactgggcttgacaggagagattcggcgcgtgaatcgtattgagcaacgcatcaacgaagctgctaaactgggctttactaagatttatgtacctcagaattccttgacaggaatcactctgcctaaggaaattcaggtcattggcgtgacaacgattcaggaagtcttgaaaaaggtctttgcataa

SEQ ID NO: 1780 - DNA, 621 bp, Streptococcus pneumoniae
ttgcataaactgttcaaaatacgacacgattccctccttgaaaatttgatagtcaaatatttctcctatcttatcatttttaagagaatttgtcacggattatgcaaagacctttttcaagacttcctgaatcgttgtcacgccaatgacctgaatttccttaggcagagtgattcctgtcaaggaattctgaggtacataaatcttagtaaagcccagtttagcagcttcgttgatgcgttgctcaatacgattcacgcgccgaatctctcctgtcaagcccagttctccgacaaaacattcctgaggattagttggcttgtctttgtagctcgaagcaatagcaactgcaacagccaagtcaatggcaggttcatccaatttaacaccaccagcagatttgagataggcatcctgattttgcaagagaagccctgcccgtttttccaaaacagccataatcaagctagcacggttaaaatcaagtcctgtcgtagtacgcttggcatttccaaacatggtcggtgttaccaaagcctgaacctccgccaaaatcggacgcgtcccttccatggttacaacgatggaggaaccagtcgccccatccaaacgctcttctag

SEQ ID NO: 1781 - DNA, 498 bp, Streptococcus pneumoniae
gtgtcgtattttgaacagtttatgcaagccaatcaggcttatgttgccctacatgggcagttaaatctgccacttaaacctaaaaccagagtagccattgtgacctgtatggactcacgtttgcacgttgcgcaagctctaggtttggcacttggggatgctcatattttgcggaatgcaggtggtcgagtgactgaagacatgattcgttcgctagttatttcccagcaacaaatggggacaagagagattgtggtattgcaccatacagactgtggtgctcagacctttgaaaatgaaccttttcaggagtatttaaaagaggaattaggtgtagatgtgtcagaccaggatttcttgcccttccaagatatagaagagagtgtacgcgaggatatgcaactgcttatcgagtctcccctaataccagacgatgtcattatctctggtgccatttacaatgttgatacaggaagtatgacagtcgtagaattataa

SEQ ID NO: 1782 - DNA, 792 bp, Streptococcus pneumoniae
gtgtatgaagaaaagcagtattttatttttattttattgctatgtattggtttacagtatgaaaccatctactatacggacggttcgaggtcaggtgcggaatatggactaatgggagtttctatctttctagctctcttttacatgattccggctctttattttctcttccgtattgggaaaaaatgggaattgccaaagaaggttttgattctgtctttattgggagggatgttccttgcaggctggttgtctagttttgctaatacttatatccatgatttactgggggttcttttcccagatagtccatttttaaatgcctttgaaagtgctattgtggctcctttggtagaagaacccttgaaattattgccacttgtttttgttttggctttgattcctgtgcgaaaattaaaatttttgtttttacttggaattgcttccggtttgggattccaaatgattgaggatattggttatattcgtacggatttgccagagggctttgactttactatttcgcgaattttagagcgtatcatctcaggaattgcctctcactggactttttcaggtctagctgtagtaggtgtttacttgctttacagagcctataaaggacagaaggttggcaagaaacagggtcttatttttctaggtttagccttgggaactcacttcttgtttaactctcccttttgtggagttggaaacagagttgcctttagcgattccagtggttacggctattgctctctatggtttttatcatgcttattgctttgttga

SEQ ID NO: 1783 - DNA, 969 bp, Streptococcus pneumoniae
atgtctttttctgatttaaagctgtttgccctttcttctaataaagaattggcagaacgtgtggcgcaggagattgggatagagttggggaaatcaagtgttcgccaattttcagatggagagattcaggtcaacattgaagaatcaatccgtgggaaacacgtctttatcctacaatcaactagttcgcctgtaaatgacaatctgcttgaaattttgattatggtagatgctttgaagcgtgcgagtgcagaatctgtcaatgttgtcatgccttactatgggtatgcacgtcaggatagaaaggcgagagcgcgtgagccaatcacttcaaaacttgtcgcaaatatgcttgaagtagctggagtggatcgtttattgaccatcgacttgcatgctgcgcaaattcaaggattctttgatattcctgtggatcatttgatgggtgctcctctgattgcagattattttgagcgtcgtggtatggttggttctgactatgtggttgtcagcccagaccatggaggggtgactcgtgctcgtaagttggcagaatttttgaaaacatctatcgctattattgataaacgtcgtagcgttgataagatgaatactagtgaagttatgaacatcatcggtaaggttgaaggcaagacttgtatcttgattgatgatatgattgataccgctggaacgatttgtcatgcggcagatgctcttgcggaagctggtgctgttgaagtctatgcaagctgtacgcacccagttctttctggtcctgctacggacaatatccaaaaatcagctattaagaaattggttgttttggataccatctatctgccagaagagcgtttgattgataagattgagcagatttcaatcgctcatctcctaggggatgctatcgtacgtattcatgaaaaacgaccactttctccacttttcgatattgagaaaaaaatttaa

SEQ ID NO: 1784 - DNA, 480 bp, Streptococcus pneumoniae
atggaacaattacattttatcacaaaattactagacattaaagaccctaatgtccagattttaaacatcatcaataaggatacacacaaggaaatcatcgccaaactggactacgacgccccatcttgccctgagtgcggaaaccaattgaagaaatatgactttcaaaaaccttctaaaattccttatcttgaaacgactggtatacctactagaattctccttagaaagcgtcgattcaagtgctatcactgttcaaaaatgatggtcgctgaaacttctgatgacgtacagtcatatttcttctctttttattatatcacagttttaaatctagctttactagattcaccgctactatctatttattcggaaaaaagacgaaaaaacctgagaatcatctcaggcttggtcattaaatttttttctcaatatcgaaaagtggagaaagtggtcgtttttcatgaatacgtacgatag

SEQ ID NO: 1785 - DNA, 339 bp, Streptococcus pneumoniae
ttggagtttttcggcaacaagccctttacccagcaaccgcaacgagccattagccaagcaaatcaactgctggactacaagagctggtccgaggaggacaggaaaatgtttagtcaactacatatgcgagaagaacaagtcttgttagcacaggactatgccttggaaactgctagggctgaagaccttgaacaaggactagagcgtgggaaagttgaaggaagggcagaaaggaaactttttgccttcctagacatagtacgccaaggtcttctgacttctgaggttgccagccagcaattaggtatgtcagtatctgaatttgaggcactgttgtaa

SEQ ID NO: 1786 - DNA, 366 bp, Streptococcus pneumoniae
atctacaaacacatcgctcctgtttacgtcattgctatcgtggatagtaattatttctcagatgacctggcttttcatagctttagtatgcgcgaagacacaacaggtgaggtattggcgattaccaacaatggacaggaaaaccatctggttaagatggcattcttggaattaaaaaatacagagaaaccagcaaagacaaggttcgcaagccatggttggagtttttcggcaacaagccctttacccagcaaccgcaacgagccattagccaagcaaatcaactgctggactacaagagctggtccgaggaggacaggaaaatgtttagtcaactacatatgcgagaagaacaagtcttgttag

SEQ ID NO: 1787 - DNA, 393 bp, Streptococcus pneumoniae
gtgtttgtagatctagtgagtatcaccttctcgctgatgaattttttcaagattttgattaacctgactgcacaggtaagcccacaagtgattgatgaaaaaattctgatgatggacttgaatctcaataattacttgagtaccgttatccaactccgccaagacgtctatactggtataaaaatcctgcaccgagtagggcatggaaggcaagacatgaatgttacttccctccaaaatagtcacatttttggctggcaagtccagcatatcgcggataaattgacaagtgatttctgggttgctgaaaattttcttagcaaccaagtcattggtcgggctaattcccagatgtctgagaatcatccttttcctccttctatagtgaattga

SEQ ID NO: 1788 - DNA, 354 bp, Streptococcus pneumoniae
atgattctcagacatctgggaattagcccgaccaatgacttggttgctaagaaaattttcagcaacccagaaatcacttgtcaatttatccgcgatatgctggacttgccagccaaaaatgtgactattttggagggaagtaacattcatgtcttgccttccatgccctactcggtgcaggatttttataccagtatagacgtcttggcggagttggataacggtactcaagtaattattgagattcaagtccatcatcagaattttttcatcaatcacttgtgggcttacctgtgcagtcaggttaatcaaaatcttgaaaaaattcatcagcgagaaggtgatactcactag

SEQ ID NO: 1789 - DNA, 2670 bp, Streptococcus pneumoniae
atggtattttttgattctttcctttataatgggtgtatggataagaaaaaattattattgattgatgggtcttctgtagcttttcgggcgttttttgcgctgtatcagcagttggaccgttttaagaatgcggctggtttgcataccaatgcgatttatggtttccagttgatgttgagtcatttgttggagcgggttgagccgagtcatattttggtggcttttgatgcgggaaagacgaccttccggacagagatgtatgcggactataagggtggtcgggccaagactcctgatgagtttcgtgagcaatttcctttcattcgtgagttgctggatcatatggggattcgtcactatgagctggctcagtatgaggcggatgacatcattgggacgctggataagctagcagagcaggatggttttgatattaccattgtcagtggggacaaggatttgattcagctgacggatgagcatacggtggttgaaatttccaagaaaggtgtggctgagtttgaggcctttacgccagattacctcatggaagaaatgggcctcacaccagctcagtttatcgatctcaaggcgctcatgggtgataagtcggataatatccctggggtgaccaaagtcggtgaaaagacgggtattaagctcttgctggagcatggttcgcttgaggggatttatgaaaatattgatggaatgaagacttctaagatgaaggaaaatctcatcaatgacaaggaacaggcctttttgtctaaaacactagcgaccattgataccaaggcaccgattgcgattggtttagaggacttggtctatagtggtccagatgttgaaaatcttgggaaattttacgatgagatgggattcaaacagctcaagcaggctttaaatgtgtcgtcagctgatgtggctaagggtttggattttactattgttgaccaaatcagtcaagatatgctgagtgaagagtctatcttccactttgagctttttggtgagaattaccatacggataatttggttggatttgcctggtcttgtggggataagctctatgccacagacaagcttgagctgttgcaagacccgattttcaaggatttcttagaaaaaacatctctgagagtttatgactttaagaaggttaaagttcttttgcaacgttttggtgtggatttgcaggcgcctgcttttgacatccgtttggctaaatacctcctttcgactgtggaggacaatgaaattgcgaccatcgctagtctttatggtcagacttacttggttgatgatgaaactttctacggtaagggtgttaaaaaggccattcctgaacgtgagaaattcttggaacacttagcttgtaaacttgctgttttggtagaaacagagcctattttacttgaaaaactcagcgaaaatgggcaattagagcttctttatgatatggagcaacctctggcttttgttcttgccaagatggaaattgctgggattgtggtcaagaaagagaccttgcttgagatgcaggctgaaaatgagcttgtcattgaaaaactgactcaagagatttacgagctggctggtgaggagtttaatgtcaactcgcctaagcagttgggcgtgcttctctttgagaaattgggacttcctctagaatacactaagaaaaccaagacaggttattcgacagcagtggatgtgttggagcgtctcgctcctattgctccgattgttaagaaaatcctggattaccgtcaaattgctaagattcaatctacttatgtaattggcttgcaggactggattttggctgatggaaagattcatactcgctatatgcaggatttgacccagaccgggcgtttgtctagtgtggatccaaacttgcaaaatattcctgcccgattggaacaagggcgcttgattcggaaggcttttgtgccagagtgggaggatagtgtgctactcagctctgactattcacagattgaattgcgcgttttggcgcatatttctaaggatgagcacttgattaaggccttccaagagggggcagatatccatacttcgacagccatgcgggtctttggcattgagcgtcctgataatgtgactgcaaatgaccgtcgcaatgccaaggcagttaactttggagtggtttatgggatttcagactttggcttgtctaataatttgggaattagtcgtaaggaagccaaagcctacattgatacctactttgaacgttttccaggtattaaaaactacatggatgaagtggtgcgggaggcgcgtgataagagctatgtagagaccctctttaagcgtcgccgtgagttgccagatatcaattcgcgcaacttcaatattcgtggttttgcggagcgaactgctatcaactcacctatccagggttcggcagcagatattctcaagattgccatgattcagctggataaagccttggttgcaggtggttatcagaccaagatgctgttacaagtgcacgatgaaatcgtccttgaagtgcctaaatctgaattggtagagatgaaaaaattggtgaaacaaaccatggaagaagccattcaactcagtgttcctcttatcgcagatgagaatgaaggggcaacctggtacgaggctaaataa

SEQ ID NO: 1790 - DNA, 372 bp, Streptococcus pneumoniae
ttgctgtggtgggtttgtctgaccgtgaaaaaaacaaccagtaatcgagtaacaaaggaaatgcaggctcggggctataaaatcatcccagtcaatcccaagacggcaggtggcgaaatcttgggtgaaaaggcttatgctagcctcgctgaaattccttttcctgtagatattgtcaatgtttatcgtcgcagtgaatttctgcccgatgtggcgcgtgattttctcaaagctgatgccaagattttttgggcacagctaggacttgaaagtttagaagcgaaagagattttgcgtgatggtggatgtgatgatatcgtgatgaatcgctgtatcaagagagaacatactcgcttgattgaggaagcataa

SEQ ID NO: 1791 - DNA, 411 bp, Streptococcus pneumoniae; identical to SEQ ID NO: 1407
  unsure (48),(49),(51): n at each above location is unknown.

SEQ ID NO: 1792 - DNA, 315 bp, Streptococcus pneumoniae
  unsure (276),(278),(279): n at each above location is unknown.
ttgaggaagcataagaaaaaggtagctgatgggctaccttttgtgttatactcaatgaaaatcaaagagcaaactaggaaactagctgcgggttgctcaaaacactgttttgaggttgcagatagaactgacgaagtcagctcaaaacaccgttttgaggttgtagatagaactgacgaagtcagctcaaaacaccgttttgaggttgtagatagaactgacgaagtcagctcaaaacactgttttgaggttgcagatagaactgacgaagcatancnnccacacctacggcaaagtgaatctgaagtggtttga

SEQ ID NO: 1793 - DNA, 717 bp, Streptococcus pneumoniae
atgaaagtctttcagcatgtaaatatcgtgacttgtgatcaagatttccatgtttatcttgatggaatcttagcagtcaaggattctcaaatcgtctatgtcggtcaagataagccagcgtttttagagcaagctgagcagattatagactatcagggagcttggattatgcctggtttggtcaattgtcacacccattctgcaatgacaggtctgagagggatccgagatgacagcaatctccatgaatggctcaatgactatatttggccagcagaatctgagtttactcccgacatgactaccaatgcggtcaaagaagccctgacagagatgctccagtcaggaacaacaacctttaacgatatgtataatcccaatggtgtggatatccagcaaatttatcaggtggtgaaaacttccaagatgcgttgttatttttctccgactctcttttcttcagagacagaaacaactgctgagactataagtagaactcgatccatcatagacgaaatcttaaaatataaaaatccaaatttcaaggttatggtagcacctcattctccgtatagctgcagtagagacttgctggaagcgagtttggaaatggcaaaagagctaaatattccgctccatgtccatgtggcggagaccaaggaggagtcaggaattatcctcaaacgatactgcaaacgccccccttgcttttcttga

SEQ ID NO: 1794 - DNA, 513 bp, Streptococcus pneumoniae
ttgctcacggggtcgaatttaaacgagagagaaattgaacgcttggcatcttctcaagtggctatcgcccacaatcatatcagtaacctcaaactggcatcaggaattgctccaattatccagctccaaaaagcgggagtagcagtcggaattgcgactgactcggttgcttccaataacaatctagatatgtttgaggaagaaaggattgcagttcttcttcagaagataaaaagtgggaatgccagccagtttccaatcgaaacagctctcaaggtactgacaatcgaaggggctaaggtctttggaatgaaaaatcagatagaaagtctgaaagtcggcaagcaagcagattttctggtcattcaaccacaagggaaaattcatctccaacctcaggaaaatatgctgtctcacctggtttatgcagttaaatctagtgatgtagatgatgtttatatcgccggagaacaggttgttaagcaaggtcaagtcctgacagtagaactttaa

SEQ ID NO: 1795 - DNA, 378 bp, Streptococcus pneumoniae
atgcaagatttttgcaaactttttttaaaatttttcgtaatttttcttttaaagttctactgtcaggacttgaccttgcttaacaacctgttctccggcgatataaacatcatctacatcactagatttaactgcataaaccaggtgagacagcatattttcctgaggttggagatgaattttcccttgtggttgaatgaccagaaaatctgcttgcttgccgactttcagactttctatctgatttttcattccaaagaccttagccccttcgattgtcagtaccttgagagctgtttcgattggaaactggctggcattcccactttttatcttctgaagaagaactgcaatcctttcttcctcaaacatatctag

SEQ ID NO: 1796 - DNA, 501 bp, Streptococcus pneumoniae
atgagtgaagcaattattgctaaaaaagcggaactagttgacgtagtagctgaaaaaatgaaagctgctgcatctatcgtcgttgtagacgctcgtggtttgacagttgagcaagatacagttcttcgtcgtgagcttcgtggaagcgaagttgagtataaagttattaaaaactcaatcttgcgtcgtgcagctgaaaaagctggtcttgaagatcttgcatctgtatttgttggaccatctgcagtagcattttctaatgaagatgttatcgcaccagcgaaaatcttgaacgacttttctaaaaacgctgaagcacttgaaattaaaggtggtgcaatcgaaggcgctgtcgcatctaaagaagagattcttgcacttgcaactcttccaaaccgcgaaggacttctttctatgctcctttctgtacttcaagcgccagtgcgcaacgttgctcttgcagtcaaagcggttgcagaaagcaaagaagacgcggcttaa

SEQ ID NO: 1797 - DNA, 369 bp, Streptococcus pneumoniae
atggcattgaacattgaaaacattattgctgaaattaaagaagcttcaatccttgaattgaacgaccttgtaaaagctatcgaagaagaatttggtgtaactgcagctgctcctgtagctgttgctgcagctgatgctgctgatgctggtgctgctaaagattcattcgacgttgaattgacatctgcaggcgacaaaaaagttggtgttatcaaagttgtacgtgaaatcactggtcttggtcttaaagaagctaaagaacttgttgacggtgcaccagcacttgttaaagaaggcgttgcaactgcagaagctgaagaaatcaaagctaaattggaagaagctggagcttcagttactcttaaataa

SEQ ID NO: 1798 - DNA, 345 bp, Streptococcus pneumoniae
ttgatttcttcagcttctgcagttgcaacgccttctttaacaagtgctggtgcaccgtcaacaagttctttagcttctttaagaccaagaccagtgatttcacgtacaactttgataacaccaacttttttgtcgcctgcagatgtcaattcaacgtcgaatgaatctttagcagcaccagcatcagcagcatcagctgcagcaacagctacaggagcagctgcagttacaccaaattcttcttcgatagcttttacaaggtcgttcaattcaaggattgaagcttctttaatttcagcaataatgttttcaatgttcaatgccattgttatttcctccaaataa

SEQ ID NO: 1799 - DNA, 588 bp, Streptococcus pneumoniae
atgaaaagaataattccagtttatatattccaacaagtaaatgtcctattggtatctctatacttattgaaatttctttgtatcggtgagttaactatactacagattctctatggttcgtcactcatttcttttttatggatgtatggccaacgcaaacaagctcataaggtaaatatgaaatctaggatgaaatggcttggtattggattcgttagcctactgattataagtctatgttttagcctaatccatgcgcaagaaagcacgaatcaagcaaacttaattggacttcaacatcaagttccttggttttcatttttattgtttttaatcaatgcgagtatggttgaagaatttctgtatagagaaattttatggaacttggttagaaaattagatattcgagttgctttgacaagtgttttatttgccttagcacatcatccaggaaccattatagcttggtgtttgtatgtatcgctggggatgtttttagggcttgtacgctacaaattggacttatggggcagtatggggctacatttggtgtggagcctactagtttatagtttgctgcttttttaa

SEQ ID NO: 1800 - DNA, 1515 bp, Streptococcus pneumoniae
atggattataatttcaatttggagcatcctttctttttcactaataatgattatagtacagatactagcataaagtaccaagtaagtctgccttttaattggcacgaagtaatgaataatgatgagtgggtttatcaataccctattggaaaatttgttgaaagacaagggtggaaaatacacattagttcagagtataacagttcacatgaattgttacaagatgtagcaaaaatttgccatgaaatgcgaattccatttaaacatcttagtacagaagacaaatttatcatgcgaaacgggaaattggttagtcgaggattttctggtaaatttattacatgttatccaaatcaaaatgaattagagtcggttttgcaaaggttagaaagtgccttaaagcaatataatggaccatatattttaagcgataaacgttgggatgaagcaccaatatatctgaggtatggtgtgtttaggccgtcaagggatgatgaaaagaaggttgctattgatgaattaattgttggcgatgaagttgttaaagatgaacgtttaccagtatttaaaattccaaaaggtatagtgccccctgactttttgaataaatggcttgacaagaaagataaaaaacagggagactttccctttattatagataatgcaattagattttcaaacagtggtgggatatataatgctaggctaaaagaagatgggaaaaaaataattttaaaagaggctagaccgtatacaggtctaggatttgatggtacttattcttcagagaaattagcttcggagtgcaaagcactaaaaattctaaatgaatggagtgagacgcctaaaatatactggcacggtaagatctgggagcacaccttcttaggaattgaacatatgaagggcgttccactaaatagatgggttaccaataattttcctttatatgaagttgttgataagaccaaagattatctattgagagtttcaaagatagtagaaaaactcatcgatttaacgaataagtttcattctgaaaatgtatatcatcaagatttacatttaggaaatatcttggttaaggatgaagatgagattagtataatagactgggaacaggctgtcttttcaaatgatgaaaaagttgtacataaagttgcagcccctggttttagagcatggcgagaaacacttcccagtgagatagattggtatggtattagacaaatagctcattatttatacatgccactagtaactacatcggatttgacatacaactatgtaagtcaaaccaggatagaaggaaaaaaactatttgagtctttgggttatacaagagaacatatagattatgtagaaagtttattgtcatatctagattctaaatgtccacagattgagaatatttccaggaaaaaagttttaaaacccatgcatgagattagaactatcgagagtgagcaagatatacaagattttattataaaagcttttcttttagtgaactga

SEQ ID NO: 1801 - DNA, 594 bp, Streptococcus pneumoniae
gtgatacacatgaaagatgttgtatattctattacaccagaaaataaattaagtattgacttctcatttaagtcaccatttagggtattattaacaggaacttctggtagtgggaaaacaacgattttaaatttaattaatggttctttaaagccacaaaaaggttatgtaaatttgttatcacatgggaaaaagagttcagattcaataccaacagttgatcagacaccatatatttttgacactactattcgtgagaacgtaactttatttcaaaatgaatatttttcagatgatcagataattgaggtgttaaaaaaggtaaatctatatgaagaattagaaaagatagatatactaaattatcaatgtggtgaaaatggtagtaatttgtctggaggtcaaaaacaaaaaatagctttagctagagctctgattagaaataataaagtgtacttatttgacgaaatatcagctaatttagataatgataattcaaattccatacatgatattctgttcaatttaggtatttcatttattgaagtttcacatcattatgacttaaatgacaagagatacactgatatataa

SEQ ID NO: 1802 - DNA, 291 bp, Streptococcus pneumoniae
cctttttgtggctttaaagaaccattaattaaatttaaaatcgttgttttcccactaccagaagttcctgttaataataccctaaatggtgacttaaatgagaagtcaatacttaatttattttctggtgtaatagaatatacaacatctttcatgtgtatcacatctattgatgaagtatacagtccgttattatcatgttcagcgtctataaaattcttctctccacttaagtattttaaaaacggtttccttaaatctttggttgtatttatcttatttaatgaatag

SEQ ID NO: 1803 - DNA, 741 bp, Streptococcus pneumoniae
atggataaagattatatattaaaagtgaaagggctgtatcatcaatttttactgggaaacaataaaacgttgcaagtgctgaaaaatgtttctctttctgcttcgagaggagaatttataagtattctaggaattagtggttctggaaagtcaactttattaaaatgtatttctagtttgcttgaaccaacaagtggggaagtaattttaaatggaatcaacccctataaaatcagaaatgcaaaattatcaagtataagacgtaatgaagtatcttttatatttcaagcatataatttaataccttccctgccggtaatagaaaatatagcacttcctttgcgattatcacaaaaaaaattaactattaaaaatgtagaaaacttactcaaaagaatgaagtttaatgctggcttaaacgattttgttggaactctgtctggtggagaacaacagaaggttgctatagctagagcggttattgctgatagtgatataatatttgctgatgagccaactggggctttagacagcgtttctcgtgaagtaatttttgaattattgagagagttagtaggggcgggtaagtgtgtaattatggtaacgcacgatatagaattggcctcgaaaactgatcgtgcattaatattgaaagatggaaaaattttcaaagaacttcatagacctagcggggaagagttgtataaaatcttagaggtacaatcaactacggaggaatag

SEQ ID NO: 1804 - DNA, 180 bp, Streptococcus pneumoniae
gggttgattccatttaaaattacttccccacttgttggttcaagcaaactagaaatacattttaataaagttgactttccagaaccactaattcctagaatacttataaattctcctctcgaagcagaaagagaaacatttttcagcacttgcaacgttttattgtttcccagtaaaaat

SEQ ID NO: 1805 - DNA, 387 bp, Streptococcus pneumoniae
ttgaaaatttttccatctttcaatattaatgcacgatcagttttcgaggccaattctatatcgtgcgttaccataattacacacttacccgcccctactaactctctcaataattcaaaaattacttcacgagaaacgctgtctaaagccccagttggctcatcagcaaatattatatcactatcagcaataaccgctctagctatagcaaccttctgttgttctccaccagacagagttccaacaaaatcgtttaagccagcattaaacttcattcttttgagtaagttttctacatttttaatagttaattttttttgtgataatcgcaaaggaagtgctatattttctattaccggcagggaaggtattaaattatatgcttga

SEQ ID NO: 1806 - DNA, 1320 bp, Streptococcus pneumoniae
atgctcagattagtttactatcaatttttacataataagaaacaatggttaggcgtttcaccagtaatttttgtttcgagtttagttatgggattggctgttaatggggtaattaatgttgagaataattcgcaagtatttgtcggacttccagatcctaaaccaatttttatgtttccgatagtattcggaggagtaacattattctttgtgctctctaacataataaatatgttggttgaaatttttagagatgattacgaacttctggaggtgttgggagcaagtcgccttcaactatcatttcttgtggggggacagatttttatcatttcctcgattattagttttattgcatatctatgctctatatttgttacgtcaaattattattattttttacaatactttttcggggaaaatatattacctgatatccaatttcaaatgagtgctgttggatgtatcattacagtagtgttgatttcatttttagcctttctaagtggttgcttttatacgttcaagaagattagaaataggaagagttctaaaataaggcatgttctttcaatagtaaaaagaatactgctattggctggttttagtgttatctggttgctttctttgcaacaaattttccaagatagcacaattttagcgaaggcccagataatattcaatattgtaatcttagatattgtgattatttatcaattatctccttttatacagtcatgttttatcaaactactttctataattatatttagaaataattttatgttcattgtttcgaagtggaatttactatatcgtaagccttatataaaatctatcagtgctgcaattacaggagctatattactaatttctagttttcaaatgatttctcagaatatactatctcaatttcaagatgacagtgatttagagctaaaagtggcatttattgtctatgtaggagcaccaattttgatagtacttgcaaatattatttcaattgcatttttgtcatcgcatcaagaaaggattgagattcagcaatttgaaattttaggaacttccaattaccagatggttaagattaaagttggtgaggctatatttttgacatttgttacttcattaattgcatttttacttaacattaaaattatggttttaatatactactctttagaggatattttaatagatgatatgaatcttttggggttaatacttccaaattttatagtgtctattattttatttattttaatatttattactaaaagttcctattttatctttaagaatgcaaaaattatttcttaa

SEQ ID NO: 1807 - DNA, 180 bp, Streptococcus pneumoniae
gtgagtgggataaaagtttcatttagtttattcagtacaaatttaacgggtcaagatttatatactggtggtgtttttggggctgagagaagtatcttgattttatgtgtggtttttatacttacagttgttctgctccaaagagcttgtagagaagaattagctcataaaggagattga

SEQ ID NO: 1808 - DNA, 222 bp, Streptococcus pneumoniae
atgaaggtagtaaacttgtatgatttgaaacaaatgggaaataaaggtggttgtaccatccaattgattcatcactttccttttggtatgggcttaggacatctcaaaaaagactacattgaatttaaacgtgttggtatctttgatgggaaagcagtagaagttactcttcgagaaccttattcgagagatctactgcaggttgtcaagtcaataaagtaa

SEQ ID NO: 1809 - DNA, 135 bp, Streptococcus pneumoniae
atgattatcttttattcgttatggacaatgctaatggacaatgctatatggcataaatcaagtgccttaaagattccgactaatattggctttgcatttattcctccatacacaccagaaatgaaccccattgaa

SEQ ID NO: 1810 - DNA, 264 bp, Streptococcus pneumoniae
ttggctgacagtggttatcaagggctcatgaagatatatcttcaagcacaaactccacgtaaatccagcaaactcaagccgctaacagctgaagataaagcctataaccatgcgctatctaaggggagaagcaaggttgagaatatttttgccaaagtaaaaacgtttaaaatgttttcaacaacctatcgaaatcatcgtaaacgcttcggattacgaatgaatttgattgctgatattatcaatcatgaactaggattctag

SEQ ID NO: 1811 - DNA, 699 bp, Streptococcus pneumoniae
atgtcacagattagcaaagaagccttgattgagcaaatcaaagatggaatcatcgtttcttgtcaggctcttcctcatgaaccgctttatacagaagcgggaggggtgattcccttgctggtcaaagcggctgagcaaggtggagcagtcggtatccgagcaaacagtgttcgcgatatcaaggaaattaaggaagtcactaaacttccaatcattgggattatcaaacgtgattatccacctcaggaacccttcatcacggctactatgaaagaagttgatgaattggcagaactggacatcgaggtgattgctctggattgtaccaagcgtgaacgctacgatggtttggaaattcaagagttcattcgtcaggttaaggagaaatatcctaatcagcttttgatggctgatactagtatcttcgaagaagggctagcagctgtagaagcaggaattgactttgtcggaacaaccttatcaggctacacatcctacagtccaaaagtagatggtccagattttgaattgattaagaaactctgtgatgccggtgtagatgtcattgcagaaggaaaaattcatacaccagaacaagccaaacaaatccttgaatatggagtgcgaggcatcgttgttggtggcgctattactagaccaaaagagattacagaacgttttgtagcgggattaaaatag

SEQ ID NO: 1812 - DNA, 924 bp, Streptococcus pneumoniae
atgaaaattgatgttataaatcatttagactcaccaggattagctgggatgatttgtagacggattaataatagaattttagtttatggaggtagttatttcccaaataacgatcctttaaaaagttcaaaagttcaatcaaataaaattagagtttatgatgagaaatttaatcttctatatgaacaagatggaaaaatttctccagataaaggaataacgattgaagttgaaaatgaaatctattacattctaggctcgagcatttatcgtattacgattggtgaaagtgtagaagaaacctgtatcgggaattttgatttccaactagagagtggttatggttgttattttgatggccacttattctttggatttcaggaaagttatttgttcaatattgagactcaagagctttttaaaaaatctgacttcccagtttctggtagaggccaaggtttgtcagtcaaatatcaaaatgaattgtattatttaggtggagcgaacaatgaagcttatttagatggatacaaatatagtttaaaaaaagataagtgggaaaaacttgagttcgaattaccaagctcagttctaggagcatcaagtatacaaataaatgaaagtggtttattaatacttggtggctttaatgaaattgtttataataaagcagttattgatttagcaacccctggctatagggaagaatatttttctaaagggagagatttctttaattggaatcgtagcatgcgaatactagatttagagacaggtaaggtcaagattattgcaaacgatgagcgttttgctctttgtggggcaggatttttaaaaactgataatggatattacgttgttagtggggaatgtagcccaggaagacgtacttctgacatacttttgttagaggaggaaatgtaa

SEQ ID NO: 1813 - DNA, 1629 bp, Streptococcus pneumoniae
atgaaaaaaattgttaaattagctttaacagctgcagcagttttaatagctgtagtaggattggttgcttgtagttcgggaagcaaaaaatctgatttttcagagtctggaaaagaaaaagtattctatttatcaggtttgcttcaaggaactggagatcgtatcccttacgtttggcaaaatggtgatggtttagttccatatttgttataccgtacactgttaatggcagattcaaaatatgaaaaatcaactccagatttagctaaagattggaaaaaatctgatgatgaaaaaacttatgaatttacacttaaagatggattgaaatggtctgatggagaagctttgacagcttccgatgtggaattcagtgttaaattagcattgaaagcttcagtaattaatggaattttcccttcaacattcacaaaaattgaaggagctaaagatttcaaagacgataaagcagataaaatttctggtcttacagttgatggaaataaagtaacatttaaacttactgctccagttggtgactttgagcaaatgatgactcaattctttattcttccaaaacataaattagagtctgaaaatcctcttgaattaaataatagctcattttggacagctcctgttacaagcggtatgtacaaagtaaaagaaattagtgcaggtaatttcttagagtatgacaaaaatgaaaactatgaaaatgaaaaaccaaaatttgataaagtagtattcaactatatttcagatccagttttagcattgcaagatggtaaatcatacttctattcaacaaacaaacctcaagaaattagtcagttggatgctgtatctactttaactaaaaaaccaattgatatcctattctatcgctactttatcgctaacttagcaggtgtcgaaggtaatggagattccttgattgctaatcctaaagttagagaagctattctatatgcaattaatcgtgatgaattagctaaatctgtatttagtggaattgcagatgttaataatactggtgttccttcaagcttagaagctcatctgaaatcagcaaataaatttgaatataatccagaaaaagcaaaacaacttcttaaagaagctaaatacgataatagcagaaatctaattttagcttattactataaagatcaagcctctcaagatttcatgcaagcagtaagttatcaattgaatgaggttggaatcaagaacgaagttgtccaaattacttctgatgcaacaacaggattgttcaaaacacgtaaatatgacctagcttataaaggattatcatcatttggttatgaaacttggtatggtgaatatagttcaacaaatactaactttaaaaatattacaaatggcgaaacaagttttgatgagttgagcaaaaaattgtctgaaacttctgatgtaaaagaaagaaacaaaattttagcaagtctacaaaaattagaacaagaaaaactattgaagttaaacttattcacatttaaaaacttcttgtatttaaatactgaaaaagttttaattcctgacgatgttcaatttggtaatccattctataaatttgattacaaattcgaaaaatgggatgctaaataa

SEQ ID NO: 1814 - DNA, 951 bp, Streptococcus pneumoniae
atgaaaaaatatattctaaaaaaagtattattcatgattcctatgttgttgattattagctttttagtattcattgcactagatttaacaccagcagatccattgacatatatggtatctccagatatggctagtagtgcagaacaaatcgaaaagctaagacagcaattaggtttaaatgatccagtattagttcgctatggaagatggctttggcaattactccatggtgattttggatacagtattgtaaatggtaacccaatttccaaaattgtaggacaagcattgcctgcaacttttgaattagcttttgtgtcattaattatttcaacaattgttggtattgtaattggggttatatcagccgttaaacaaaatggtattatcgataatgttgctcgttttctagctgttatcggaactgcgattccacaatttttctttggtattttaattttaaacttctttgcaattcagttaagaattttacctattggtggtagatttgccagtggagattttacatttattaatagagttgaacacttaattctaccagtaatggctatgtcaattgcattggtagctgctttaatgagatacacacgtaattctatgttggatgtttttaatgcagattatgttaaaacagctcgtgcaaaaggtgttcctgaatggaaagtttattttaaacacatatttagaaatgctatgcgaccaattttagtgttattgattttccgtctaccaatgttaattggtggatcagtaattatcgagagtgtcttttcttggcctggaattggttctatcatcctatctagtgtaacagcaggtgactatcctgtaattatgattaccacattaatgatttctgtcgtagtgttatttgctagtctacttgtagatattatggctgcaatattagacccacgtattcgttattag

SEQ ID NO: 1815 - DNA, 888 bp, Streptococcus pneumoniae
acccacgtattcgttattaggaaggaggtcaatgttatgaaacctatgcctttatggaaaagaaatttgaaaaaattctataataacaaattggcctttatcggctttatatgcttcatgctaattctattagcatgtattctagcacctttattgacaacctattctccagatgttgttgatttaggatctatgaaccgtcctccttcagcaaaacacattctgggaacagataaactaggtcgtgacgtatttgctcgaatcctatatggtggtcgagtttcaattcaagtagggatgtatggagcgatttgtggagcggttattggtactgtacttggtggtattgctggatattttggtgggaaaattgatgctcttctagttcgtctagcagaattattcttaacattcccgaatatgattgtcattctcttgctttcaagtatttttggacaaggtgtattcaatcttatcttcgtattctcagtaatgggttggatgacaacgttccgaatggttcgtaatgagttcatgtctttgaaacaagaaacatatgtggatgtatgtagagcttttggtttttctgacagtcgaattatctttaataatattttaagaaatgctatctcaccagtaattgtatcgttgtctttaaacgttgctggtttcattctcagtgaggcaggtcttagtttcttaggagtaggtgttccttctgatattcctacttggggaaatatcataaatgctgccaaaacagccgatgttattaaaaatagttggtggttgtggttagttccagggtcaatcattactcttttcgttctttctatcaactttattggtgatggattacgagatataatggatccgaaacaacagtag

SEQ ID NO: 1816 - DNA, 612 bp, Streptococcus pneumoniae
ttgtcaacctcctactgttgtttcggatccattatatctcgtaatccatcaccaataaagttgatagaaagaacgaaaagagtaatgattgaccctggaactaaccacaaccaccaactatttttaataacatcggctgttttggcagcatttatgatatttccccaagtaggaatatcagaaggaacacctactcctaagaaactaagacctgcctcactgagaatgaaaccagcaacgtttaaagacaacgatacaattactggtgagatagcatttcttaaaatattattaaagataattcgactgtcagaaaaaccaaaagctctacatacatccacatatgtttcttgtttcaaagacatgaactcattacgaaccattcggaacgttgtcatccaacccattactgagaatacgaagataagattgaatacaccttgtccaaaaatacttgaaagcaagagaatgacaatcatattcgggaatgttaagaataattctgctagacgaactagaagagcatcaattttcccaccaaaatatccagcaataccaccaagtacagtaccaataaccgctccacaaatcgctccatacatccctacttga

SEQ ID NO: 1817 - DNA, 1983 bp, Streptococcus pneumoniae
atgaatcaaacagttttagatgtaaaaaacttaaaaactgaattcatcactgataaaaaagcatttccgattattaaagatgtaaacttcactttggaaagagggaaagttttagggattgttggtgaatctggatgcggtaagagtgtaacagtgaatacagtgttaaacttattacctaaaaatggacgcattgctgaaggtgaaatcacatatttcgatgaagataagccgatagagcttcaaaaattaaagcaatatggtaaagaatttcgaaagttacgtggtgaaaacatatcaatgattttccaagatccaatgtctgcattgaatccagtatatacaattggtaatcaaattactgaagtccttcatgaacattatgacatttctaaagaggaggcaaataaacgtgctatagaaatgttagaaaaacttggaattcataatgctgcagaacgcatgaatgactatccacaccaatttagtggagggcagcgtcaaagaatagtcatagcgattgcaatggtatgtaatccagatattctaattgcagatgaaccaacaactgcccttgatgtaacaatccaagcacaaatacttgatttacttgatgatttacgtaaagagcatggaacttctattatcttaattactcacgatttaggcgttattgctcaaattgcggatgaagttgcagtgatgtatgctggtgaagtcgttgaagttggaactgtagctcagatctttgatcaacctaaacacccgtatactcgttctctattaagatctattcctaatcctgaaaatatggataaaaagctacatgttatccaggggagcgtaccttcaatttctgaaatatctgaaaaaggatgcagattcgcaaatcgtattccatggttagaaaaagaacatcatgaagaagaacctcaattgcatgatttaggtgacggacattttgtaaggtgttcttgctataaacatttctttttcgaagataaggaagaagaaacattagcggaaaaacatgtaggtaatgttgttttagaagtaaaaaatattaaaaagtactactatcctaagaagcaactattcaagccactaggttctccgttgaaagcacttgatgacgtatctctagagttaagaaaaggaactactattggtatcgtaggagagtctggaagcggtaagagtacgattgcgaaatcattaatgaaactccatgatattacagatggtgaaatcaatattgatttgaatgggaaaactcaaaatatttatggaattaaacgtaaggaagatttggatttccgtaagaaagttcaaatggtattccaagatccttatgcatcattgaacccaactaagaaaatttataattcatttgatgaaccgatgattgtccataatattggaaacaaagaggaacgctttgaacgtatgaaagaagccttgaagatggtaaacgtgccagttgagtacttggagcgttatcctcatgaattttcaggcggacaacgtcaacgtttatgtattgctcgtgccctttgtatgaaaccagaaattttaattttagatgaacctgtttcagcattagatctatctgtacaagcgcaagttttgaattatcttgttgaaatccaaaataaagaagatttgacttatgtatttatttctcatgacctaggtgttgtgaaatacatgtgtgactatctatatgttattcataaaggacgtattgtagaagctggttctcgagaagatatctacaataacccaatgcatatttacactaaaaaactattagctgctattccagaagttgattatcacttcaaagaggcattggcaacaaaacgtaaagaaaatgaagttgaatttaaagcacagtaccatgaattttatgatgaagatggccgtgcttatgatcttaagcaggtttcaccaacacattttgtagcgttaaaaccagaatag

SEQ ID NO: 1818 - DNA, 198 bp, Streptococcus pneumoniae
gttttcccattcaaatcaatattgatttcaccatctgtaatatcatggagtttcattaatgatttcgcaatcgtactcttaccgcttccagactctcctacgataccaatagtagttccttttcttaactctagagatacgtcatcaagtgctttcaacggagaacctagtggcttgaatagttgcttcttaggatag

SEQ ID NO: 1819 - DNA, 1410 bp, Streptococcus pneumoniae
atgaaattaaataaaaaaatatatttctttgataaaggaatttttaatccttatcgaatgagtaatgtaaaattaaaagttaatcaggcagtaaaggataaagaaattttcttcactgaggaaaaaccatgggaaattcgttttgataacagttatccaaatgttttctttgatgatttagcaggtgtttatcgttgctactattctacatttactgatgatgaggagtctgaaaaatactctttagaggagcgtaaggaacgtcaatatctacctcgtgcgaagcgtattgtttcactttgttatgctgaaagtaaagatggtgttaactgggtgaaaccaaatctaggtattacagaatttcgaggatcaactgaaaataatattatcggacattttttacatggtacatctgtttttctagataaacatgacgcagatgaaaatcgtcgttataaaatgtttacaaagattgattacggtaacggtgttcatttcattgctgtagcattttcaaaagatggtctacactttgatgaatacattaaagtaccaaacttcaatccacgtgcagacactcataaccatatcatatatgatgaagcattaaatcgctatgtgctaattactcgtacttggagagattcattgcgcttgccgtgtgtatctacgagtgctgatttcattaactggactccaattcaagaaattttgaatgtctgtgattatgaaaatcaaatttattctatgcctatttttaaacgtggcgattatatactaggtttagcttcagttttccatgaaggagatcaactgaacaagaattacgatacagtggaccttcaattgacttatagttatcgtcatgttggttggcattatctaaacactgatactccacttattcctcgtggtaaaggtcaatatggtgatggagaatttgactgtggatgtatctattcttctgcaccagttactatcggtgaccgtacttatttctactacatgggaggaaatggacaacatacaaacttccgtgaaacaagcttgtctcgtgcttatattgagaaagatcactttgcatattgggatactaaacgtccagaatatccaggtgttttgtataccaatggatttattttcctcaatgatcaagtttaccttgatgcagatattgcagctggaggctttgtaacaattgaattgttcgagaataatcacactccaatggaaattacagcttcccttgaaaaaatagaagatggtcgctatcaagtgttattcagcgaacctttacctcgaactcaaactcgactgaaaattagctttaaaaatgctaaaatctacgcaatcgaaggaaatttagatattttcagaattgaatcagacaatgctctattgagggggtaa

SEQ ID NO: 1820 - DNA, 489 bp, Streptococcus pneumoniae
atgaaatatgatttatatgataattgtattgaacttctaaaagaacgcgaagttacaattgaagatatggcagcgttagtaatattttcacaacaaaaatattaccctgaattaactcttgacgacgcttcatatgcaattcaacgtgtactaaaaaaacgtgaagttcagaatgtaattatgacaggaattgagttagataagttagctgaagcacaaaaactatctccagaatttcaaaagattatggagaaagataatccattgtatgggattgatgaagtaatcgtcttatcgatattgaatttatatggttctattgcctttacaaattatggctatttagataaattaaaaccactgattttagaaagattgaatgagaatcacgaaggtgtttgtaatgtatttctagatgatattgttggtgcaatagccgcagcagcatgtagtaaaattgcacacaatcatgctagtgatgaaatataa

SEQ ID NO: 1821 - DNA, 408 bp, Streptococcus pneumoniae
atgacagtaattaataaatttgttttaatggagcaagcaaaaaaagttttaaaaaatgcttactgtccgtattccaaatttcctgtaggtgcagcaattttatttaaagatggtaaagtaattacaggagcaaatatagaaaatgtatcgtttggtgtaactaactgtgcagaacgtagtgctattttttatggggcttctcaaggatatagaaaaggagatattcttgcgattgctgttgcaggtgaaactgaagactacttaccaccatgcaacatttgtcgtcaagttatggtagaattttgtgagcctgataccttagtctttctattaaatggtaagggaaacatacttgaattgcgattagaggaattagtcccatattcgttctcaagtctagaaatgtaa

SEQ ID NO: 1822 - DNA, 285 bp, Streptococcus pneumoniae
atggcgagcaagttccatactatctttagtattattgcaagcaacatgggcaataatggtcaatttacctttggctaccgccatgacttcttccaaaatcaacttgcgatcttcaacgctttggtagatacattcaccagaagaaccattgacataaagaccttgaacacctttatcaatgaagtattgaacctaggcacgcgtacgctctggacttacttctccttgctcatcataacatgcgtagaaggctggaatgacaccttcgtattttttcaaatctga

SEQ ID NO: 1823 - DNA, 822 bp, Streptococcus pneumoniae
gttcaatacttcattgataaaggtgttcaaggtctttatgtcaatggttcttctggtgaatgtatctaccaaagcgttgaagatcgcaagttgattttggaagaagtcatggcggtagccaaaggtaaattgaccattattgcccatgttgcttgcaataatactaaagatagtatggaacttgctcgccatgctgaaagcttgggagtagatgctattgcaacgattccaccaatttacttccgcttgccagaatactcagttgccaaatactggaacgatatcagttctgcagctccaaacacagactacgtgatttacaacattcctcaattggcaggggttgctttgactccaagcctttacacagaaatgttgaaaaatcctcgtgttatcggtgttaagaactcttctatgccagttcaagatatccaaacctttgtcagccttggtggggaagaccatatcgtctttaatggtcctgatgagcagtttctaggaggacgcctcatgggtgctagggctggtatcggtggtacttatggtgctatgccagaactcttcttgaaactcaatcagttgattgcggataaggacctagaaacagcgcgtgaattgcagtatgctatcaacgcaatcattggtaaactcacttctgttcatggaaatatgtacggtgtcatcaaagaagttttgaaaatcaatgaaggcttgactattggatctgttcgttcaccattgacaccagtgactgaagaagatcgtccagttgtagaagaagctgctgccttgattcgtgaaaccaaggagcgcttcctctaa

SEQ ID NO: 1824 - DNA, 204 bp, Streptococcus pneumoniae
atgacgcactacgttgccaatccagaggtggtcattctcgagggtggcatcatgggacaagaagctatcctcaaaccaaagattcgtgcagccttgaaagaagtcttggttccaagtttggctgagaacacaagattagaatttgctcatcatcaaaacactgctggtatgcttggagcctactatcattttaaaataaaataa

SEQ ID NO: 1825 - DNA, 519 bp, Streptococcus pneumoniae
atgcatattcactataacacaaatcaaacaactttaccactagaaatcaattctttcttgccgcaagaccatctcgtctttactattgaaaaagtggtgaataccgatgaaaaggaggtaaaccatctgattaaatatgccatgtttgataaggaacaaaagagaggctataaacagtcagctagaaacttagcgaattggcactataatgacaaggaggatagctatacacatcctgatggctggtattatcgttttcaccataccaaatatcagaaaacacagacagactttcaacaagaaatcaaggtttactacgccgacgaacctgaatcagcccctcaaaagggactgtatatgaacgaacgctatcaaaacttgaaagctaaagaatgtcaggcgcttttatctccccaaggtagacagattttcgctcaacgcaagattgatgtggaacctgtctttgggcagataaaggcttctttgggttacaagagatgtaatctgaggggcaagtga

SEQ ID NO: 1826 - DNA, 642 bp, Streptococcus pneumoniae
ttgactattgagccaggacagagaattgcactagtcggtcaatcggggtcaggaaaaagtacgttatcaaaaataccatcaggattatataagattgatacaggaaaagttttatttgatggtgtaaatattaatcaaatagataaaaaaatattaagtcaaaatttaggagtagttccacaggattcgtttttattgaacagaagtattcttgataatataactttaaagcacgaagttacttcacaaaagatagaggaagtttgtaaagcagttcaaatctatgatgaaatcatggctatgccgatgaaatttaatactatcatctcagagatggggtcaaatatttcaggtgggcaaaggcaacggatagcactggcacgtgcattaataaataatcctagtattgtaattttagatgaagcaactagtgcattagacactattaatgagaaaagaataacaaagtatatacaaagtcagggttgtactcaaataattatagctcatagattgtcaacgattaaggatgcggatattatttttgtaatgaaaggtggtaagattgttgagtcaggaaatcataagtacttaatgactcttggtggagagtactacagcttatatacaaaaaggaaatga

SEQ ID NO: 1827 - DNA, 189 bp, Streptococcus pneumoniae
acaatcagcgaacccaatactattccattcaacaagcctaaagaaataccatattcaactggaaaatctaaaaaaattgcaaacactattccaatcatcacccctagtgaggctattgttaaaattacatattcattttctttcttcattttctttacacctcatttcctttttgtatataagctgtag

SEQ ID NO: 1828 - DNA, 1347 bp, Streptococcus pneumoniae
atgacatctgctaaagaatatatccaaagcgtgtttgaaactgtgaaagctcgtaacgggcacgaggctgaattcctccaagctgttgaagaatttttcaacactttagaacctgtatttgaaaaacaccctgagtatatcgaagaaaatatcttggcacgtattactgagcctgagcgcgtggtttctttccgtgttccttgggttgaccgtgatggaaaaattcaagtaaaccgtggttaccgtgttcaattcaactcagctgttggaccatacaaaggtggacttcgtttccacccaactgtaaaccaagggatcttgaaattcctcggatttgaacaaatctttaaaaatgtcttgactggacttcctatcggtggaggtaaaggtggatcagacttcgatcctaaaggtaaaacagatgctgaagtgatgcgcttctgccaaagcttcatgactgaattgcaaaaacacatcggaccatcacttgacgtacctgctggtgatatcggtgttggtggacgtgaaattggttacctttacggtcaatacaaacgtcttaaccaatttgatgctggtgtcttgactggtaaacctcttggatttggtgggagcttgattcgtccagaagcaactggttacggtttggtttactatactgaagaaatgctcaaagctaacggtaacagctttgctggtaagaaagtcgttatttcaggttctggtaacgttgctcaatatgctcttcaaaaagcaactgaactcggtgcaactgttatttctgtttctgactcaaatggttatgtcatcgatgaaaatggtatcgacttcgatcttttggttgatgttaaagaaaaacgtcgtgctcgtttgactgagtatgcagctgaaaaagcaactgcaacctaccacgaaggtactgtatggacttacgctggaaactatgacattgctcttccatgtgccactcaaaacgaaatcaacggtgaagcagctaaacgtttggttgctcaaggcgttatctgtgtatctgaaggtgccaacatgccgagcgaccttgatgccatcaaagtttacaaagaaaatggtatcttatacggacctgcaaaagctgccaacgctggtggtgtagccgtttcagctcttgaaatgagccaaaacagtcttcgcctctcatggactcgtgaagaagttgatgaccgtctcaaagacatcatgacaaacatcttcaacacagctaaaacaacttcagaaacatacggtcttgataaagactaccttgcaggagctaacattgctgcctttgaaaatgtagcaaacgctatgattgcccaaggtattgtttaa

SEQ ID NO: 1829 - DNA, 414 bp, Streptococcus pneumoniae; identical to SEQ ID NO: 749

SEQ ID NO: 1830 - DNA, 171 bp, Streptococcus pneumoniae
atggacaatgctatatggcataaatcaagtaccttaaatattccgactaatattgattttacctttattcctccatacacaccagagatgaacccattgaacaagtgtggaaagagattcgtaaacgtggatttaagaataaagcctttcgaactttggaagatatcatga

SEQ ID NO: 1831 - DNA, 654 bp, Streptococcus pneumoniae; identical to SEQ ID NO: 150

SEQ ID NO: 1832 - DNA, 219 bp, Streptococcus pneumoniae
atgagtataagtcctcgttttgaaaccttagagcaggccattgcctccaaagatttggaaaaagtccgagaagcttttaagaaaatgaattccacttggaccatcaatgaaagtgtggttcgtgacaatagtacagctcattatggacgtgttgaaacagctatttccttcctgcctagtagcatggaaaccgaacctacagatgagtctggaacatga

SEQ ID NO: 1833 - DNA, 285 bp, Streptococcus pneumoniae
atggctcgcaaagagaccatggcagaaaggaaatattgcaaaatgaaaaaagatatccatccagaatatcgcccagttgtcttcatggacacaactactggttaccaattccttagcggttcaacaaaacgctctaacgaaacagttgagttcgaaggcgaaacttacccattgatccgtgtggaaatttcatcagactcacacccattctacactggacgtcaaaagttcactcaagcagatggacgcgtggatcgtttcaacaaaaaatacggtctcaaataa

SEQ ID NO: 1834 - DNA, 936 bp, Streptococcus pneumoniae
atggagatttgccaacaaattttagaaaaaattaaagaatacgacaccattatcattcatcgtcatatgaaaccagaccctgatgccttggtaagtcaggtgggattgaaagccttgctggaacatcatttcccagaaaaaaccatcaaagccgtcggttttgatgaaccaactcttacttggatggctgagatggatcttgttgaagatagggcctaccaaggcgcacttgtcatcgtctgtgatacagctaatactgctcgtatcgatgataaacgctatagtcaaggtgattttctcattaagattgaccaccatccaaatgatgatgtatacggtgacctgtcttgggtcgatactagttcaagtagcgctagcgagatgattaccctatttgcccaaacaacccaactagccttggcagatcgcgatgctgagttgctctttgcaggaattgtcggtgatacaggtcgcttcctctacccttctaccactgcacggactcttcgcctggctgcttatttgagagaacataactttgactttgcagctctcactcgcaaaatggacactatgagctacaaaattgctaaactgcaaggctacatctacaaccatctggaagtggatgaaaatggtgctgctcgcgttatcctgagtcagaaaatcttgaaacaatacaatgtaaccgatgctgaaactgcgaccattgtaggtgcacctggacgcattgacagagtgagtctctggggaatttttgtccacagggctgatggccactaccgagttcgcttacgcagtaaagtccatcctatcaatgaaattgccaaggagcatgatggtggaggccaccctctagcaagtggtgctaattcctatagcctaaaagaaaacgaaatcatctaccaaaagttaaaaaacttgcttaaaaactga

SEQ ID NO: 1835 - DNA, 432 bp, Streptococcus pneumoniae
atggcattagcaaaaattgtatttgccagtatgaccggtaataccgaagaaattgcagatattgtagcagacaaattacgtgacttgggcttggatgttgatgttgatgaatgtacaactgttgacgcttcagacttcttggaagcagacatcgctatcgttgcgacctatacttatggtgatggtgaattgccagatgagatgatggacttctacgaagacctagcagatctcaacttgaatggcaaaatctacggagtggtcggctcaggagataccttctacgatgaattctgtaaggctgttgatgactttgaccgtgtctttgtgtcaacaggagcagaaaaaggttcagagtgtgttaaagttgatctttctgccgaggaagaagatattgaacgcttggaacaattcgcagaagaattggttgct

SEQ ID NO: 1836 - DNA, 267 bp, Streptococcus pneumoniae
gtggatttagatattattcgtcaagaaatcgatcaaatcgacgaccaaattgtcaaactgttagaagaacgaatgcacttagttgaaggagttgtcgcttataagaaggcttcagggaaaccgattttagatactaagagagaagcagttatttttgaaaaggttagaagtcgtgtagaggacaagcgctatcaggagactattgtcgcgactttttcggacatactcaaacgttcgcgtgattatcaggatcaaaatatcaaatga

SEQ ID NO: 1837 - DNA, 375 bp, Streptococcus pneumoniae
atgaaaaaagaacaattttatccgctagggatttttctagctgctatgttgggcggacttgtccgctacctagtttccacttggttaccagccagtccagatttcccttggggcactctctttgtcaactatctgggaattttctgcttgatttatcttgtcaagggctatctggtctataaggggactagtaagggcttgattttagcactggggacgggtttttgcggaggtttaacaactttttccagcctaatgcttgatactgtgaagctgcttgatacagggcgttatcttagtttgatactgtatttgcttttgagtatcggtggaggcctgcttttagcttactatttggggaggaagaaatggtaa

SEQ ID NO: 1838 - DNA, 330 bp, Streptococcus pneumoniae
atggtaatcgtctatcttgcaatcgcctgtggcttgggagcactcgtacggtatttcttttctcgctataatcaagcttctaaattgccactcggaacgctcatagctaatcttttaggttgttttttaattggagtattctacaatcatgtagagtctaaggaagtatatgctattctagcaacaggattttgtggcggtttaacaactttttcgaccttgaatgacgaacttcaaagactgctaagtgataagaaggtcttttattcttacctgactttgacttacataggtggtttggttgcgatttttttaggaattttgctataa

SEQ ID NO: 1839 - DNA, 348 bp, Streptococcus pneumoniae
atgaatccattaatccaaagcttgactgaaggtcaacttcgtacagatatcccatcattccgtcctggtgacactgttcgtgtacatgcgaaagttgtcgaaggtaaccgtgaacgtatccagatttttgaaggtgttgttatcgcacgtaaaggtgctggaatctcagaaaactacacagttcgtaaaatctctaacggtgtaggtgttgagcgtatcttcccaatccacactccacgtgttgaaaaaatcgaagttgttcgttacggtaaagtacgtcgtgcgaaattgtactacttgcgtgctcttcaaggtaaagcagctcgtatcaaagaaatccgtcgttaa

SEQ ID NO: 1840 - DNA, 807 bp, Streptococcus pneumoniae
atgagtattaaactaatcgctgtcgatattgacggaaccctagtcaacagtcaaaaggagattactcctgaagtcttttctgccatccaagatgccaaagaagctggtgtcaaagtcgtgattgcaactggccgccccatcgcaggtgttgccaaacttctggacgacttgcagttgagagaccaaggtgactatgtggtgaccttcaatggtgcccttgtccaagaaactgctactggccatgagattatcagcgaatccttgacctatgaggattatctggatatggaattcctcagtcgcaagctcggtgtccacatgcatgccattaccaaggacggtatctatactgcaaatcgcaatatcggaacatacactgtacacgaatcaaccctcgtcagcatgcctatcttctaccgtacccctgaagaaatggctggcaaagaaattgttaaatgtatgtttatcgatgaaccagaaattctcgatgctgcgattgaaaaaattccagcagaattttacgagcgctactccatcaacaaatctgctcctttctacctcgaactccttacaaagaatgtagacaagggttcagccattactcacttggctgaaaaactcggattgaccaaagatgaaaccatggcaatcggtgacgaagaaaatgaccgtgccatgctggaagtcgttggaaaccccgttgtcatggaaaatggaaatccagaaatcaaaaaaatcgccaaatacatcactaaaacaaatgacgaatccggcgttgcccacgccatccgaacatgggtactgtaa

SEQ ID NO: 1841 - DNA, 1341 bp, Streptococcus pneumoniae
ttaccaaaaagagcaggattttgctataatggtcatatgaacgaaaaagtattccgtgacccagttcacaactacatccatgtcaataatcaaatcatctatgacttgattaatacaaaagaatttcagcgtttgcgccggatcaaacaactgggaacttccagttataccttccacggtggagaacacagtcgcttctctcactgtctaggagtctatgaaattgcacgacgcatcacagagattttcgaagaaaaatatcctgaggaatggaatcctgccgagtctctcttgaccatgaccgctgctctcctacatgaccttgggcatggcgcctactcccatacttttgaacatctctttgatacagaccatgaagccattactcaggagattattcaaaatcctgagacagagattcaccaagtcttgctacaagtagcgcccgattttccagaaaaagttgccagtgtcatagaccatacctatcctaataagcaggtcgtgcagctcatttctagtcagattgacgcagatcgcatggactatctcttgcgcgactcctattttacaggagcatcctatggggaatttgacctgactcgcatcctccgagtcattcgtcctgtcgaaaatggtatcgcctttcagcgcaatggcatgcacgccatcgaagactacgtcctcagtcgctaccagatgtacatgcaggtttatttccacccagcaacacgcgccatggaagttctcctacagaatcttctcaagcgcgccaaggaactctaccctgaggacaagaatttctttgcacgaacttccccacatctcctgcctttcttcgaaaaaaatgtgaccttgactgactatctggctctggatgatggcgtgatgaatacctacttccagctttggatgactagtcctgacaaaattcttgcagatttatctcaacgctttgtcaaccgcaaggtctttaaatccattaccttttcacaagaggaccaagatcaacttactagcatgagaaaattggttgaggacatcggctttgatcccgactactatactgccattcataagaactttgacctcccttatgatatctatcgtcccgaatctcaaaatccacggacacagattgagattttacaaaaaaatggagaactggccgaactctctagcctgtctcctatcgtccaatcccttgctggcagtcgccacggagataatcgcttttattttccaaaagaaatgttggaccaaaacagcatctttgcaagcattacccagcaatttttacacttgattgagaacgatcattttaccccaaataaaaactag

SEQ ID NO: 1842 - DNA, 378 bp, Streptococcus pneumoniae
gtgaagattcggatgcgaaatacgattcagtttgatgagcagttggaagtgattgaccagctttatgatgtggaagtgcatgaaaagggagattatagctatttactcttttataatgaggaaaaggaaaaagtagttattaaatttcatggtcaagaactggtgatgagccgattttctaatcccaagaccattatgcgctttttaaaggatagtgatagtttggcctatattcctacccctatgggcatgcaggaatttatcattcaaacgagccgttatcaagttgataggcaaaagattgagctagcttatcaactacaaaatcaagaggggcatccctttgccagctatcaattggaaattacttggggctag

SEQ ID NO: 1843 - DNA, 333 bp, Streptococcus pneumoniae
atggaaatcgaaaaaaccaatcgtatgaatgcgctctttgaattttatgcggcgcttttgacagataagcaaatgaattatatagagctttactacgctgatgattacagtcttgctgagatagctgaggagtttggtgttagtcgtcaggctgtctatgacaatatcaagcgaacagaaaagattctggaagattatgagatgaaattgcacatgtactcggactacattgtccgtagtcagatttttgaccaaatcttggagcgctatcccaaggatgattttctgcaggagcagatagaaattttaacaagcattgataatagagaataa

SEQ ID NO: 1844 - DNA, 555 bp, Streptococcus pneumoniae
ttgagtttgttggccaatttaccagcaaaggttgttttaccagccccttgtaaaccaaccatcatgatgatggttggaatcttaggtgacttgataatttctgccgtatcagaacctaaaacggctgtcagttcctcatcaacgattttaataatctgttgcgcaggattaagtgtatcaatgacctcatgcccgactgcacgctcacgaactttcttgataaagtcctttacaacaggcaaggcaacgtcggcctcgagcaaggccaagcgaatttctttggttgcctcttggacatcagattcagagatttttccttttttacgtagatttttaaagacgttctgcaaacgttctgttaaactttcaaatgccatttttcttcctcttattctctattatcaatgcttgttaaaatttctatctgctcctgcagaaaatcatccttgggatagcgctccaagatttggtcaaaaatctgactacggacaatgtagtccgagtacatgtgcaatttcatctcataatcttccagaatcttttctgttcgcttga

SEQ ID NO: 1845 - DNA, 1572 bp, Streptococcus pneumoniae
atggcatttgaaagtttaacagaacgtttgcagaacgtctttaaaaatctacgtaaaaaaggaaaaatctctgaatctgatgtccaagaggcaaccaaagaaattcgcttggccttgctcgaggccgacgttgccttgcctgttgtaaaggactttatcaagaaagttcgtgagcgtgcagtcgggcatgaggtcattgatacacttaatcctgcgcaacagattattaaaatcgttgatgaggaactgacagccgttttaggttctgatacggcagaaattatcaagtcacctaagattccaaccatcatcatgatggttggtttacaaggggctggtaaaacaacctttgctggtaaattggccaacaaactcaagaaagaagaaaatgctcgtcctttgatgattgcggcggatatttatcgtccagctgccattgaccagcttaagaccttgggacaacagattgatgtgcctgtctttgcacttggaacagaagtaccagctgttgagattgtacgtcaaggtttggagcaagcccaaactaatcataacgactatgtcttgattgatactgcgggtcgtttgcagattgatgagctcctcatgaatgagcttcgtgatgtgaaaacattggctcaaccaaatgaaatcttgcttgtcgttgatgctatgattggtcaggaagcagccaatgttgcgcgtgagtttaatgctcagttggaagtgactggggtcatccttaccaagattgatggcgatactcgtggtggtgctgctctgtctgttcgtcacattactggaaaaccaatcaagttcactggtacaggtgaaaagattacggacattgaaaccttccacccagaccgcatgtctagccgtatccttggtatgggggatatgctcactttgattgagaaagcttctcaggaatacgatgaacaaaaagcccttgaaatggctgagaagatgcgcgaaaacacctttgattttaatgatttcatcgatcaattagatcaggtgcaaaatatggggccgatggaagacttgctcaagatgattccaggtatggcaaacaatccagcccttcaaaacatgaaggtggatgaacgccagattgctcgtaaacgtgccattgtgtcttcgatgacacctgaagagcgtgaaaacccagatttgttaaatccaagccgtcgccgtcgtattgctgctggttctggaaatacattcgtcgaagtcaataaattcatcaaggactttaaccaggctaaacagctcatgcagggtgttatgtctggggatatgaataaaatgatgaagcaaatggggattaatccaaataaccttcctaaaaatatgccaaatatgggaggaatggatatgtctgcccttgaaggaatgatgggacaaggcggtatgcctgacttatcagctctcggaggagcaggaatgccagatatgagccagatgtttggtggcggtttgaaaggtaaaattggtgaatttgctatgaaacagtccatgaaacgtatggctaacaaaatgaagaaagcgaagaagaaacgcaagtaa

SEQ ID NO: 1846 - DNA, 489 bp, Streptococcus pneumoniae
ttgtcttacttgcgtttcttcttcgctttcttcattttgttagccatacgtttcatggactgtttcatagcaaattcaccaattttacctttcaaaccgccaccaaacatctggctcatatctggcattcctgctcctccgagagctgataagtcaggcataccgccttgtcccatcattccttcaagggcagacatatccattcctcccatatttggcatatttttaggaaggttatttggattaatccccatttgcttcatcattttattcatatccccagacataacaccctgcatgagctgtttagcctggttaaagtccttgatgaatttattgacttcgacgaatgtatttccagaaccagcagcaatacgacggcgacggcttggatttaacaaatctgggttttcacgctcttcaggtgtcatcgaagacacaatggcacgtttacgagcaatctggcgttcatccaccttcatgttttga

SEQ ID NO: 1847 - DNA, 771 bp, Streptococcus pneumoniae
ttgctgcctttatcaatacaaaagggaaaaggcttcctacgaatcattccattcctctttgccattatcggtggttaccttttcgcactaactcttggcttggttgactttacaccagttcttaaagccaactggttcgaaagtcctggtttctacttgccatttagcacaggtggtgcctttaaagagtacaatctttactttggtccagaagccatcgctatcttgccaatcgctatcgtaacaatttctgaacatatcggagaccatactgttttgggtcaaatctgtggccgtcaattcttaaaagaaccaggtcttcaccgtactcttattggtgacggtatcgcaacttctgtttctgccttccttggtggaccagccaatacaacttacggagaaaatacaggggttatcggtatgactcgtatcgcttctgtctcagttatccgtaacgctgccttcatcgcgattgccctcagcttccttggtaaattcactgccttgatttcaactattccaaacgctgtacttggtggtatgtcaatccttctctatggggttatcgccagcaatggtttgaaagtcttgattaaagaacgtgttgatttcgctcaaatgcgaaacctcatcatcgcaagtgctatgttggttcttggacttggaggagctatccttaaacttggtccagttacactttcaggtactgccctttcagccatgacaggaatcatcttgaacttgatcttgccatacgaaaataaagactaa

SEQ ID NO: 1848 - DNA, 441 bp, Streptococcus pneumoniae
  unsure (417): n at each above location is unknown.
atgacacaagaatcaactgttgatttgttactagacgttaaccaaggtccttcggatggcaaaggaattctccttagtttcctacatgttttcgccatgtttggtgcgaccatcttggtaccattgattttgggaatgcctgtatctgttgccctttttgcttcaggtgttggaacactcatctacatgattgctactggttttaaagttccagtttatctaggttcttcatttgcctttatcacagctatgtcactggctatgaaagaaatggggggggatgtatctgctgcccaaacaggggttatcttgactggtttggtctatgtccttgttgctaccagcatccgatttgtaggaccaaaatgccttgataaactcttgcccccaatcattatcggtcctatgatcatcgtnatcggtcttggacttgcacgttga

SEQ ID NO: 1849 - DNA, 714 bp, Streptococcus pneumoniae
atgaaaccagaaacattttacaacttgcttgccgagcagaatcttccactttcgaaccagcaaaaagaacaatttgaacgttattttgagctcttggtcgagtggaatgagaagattaatttgacggcgattacggacaaggaagaagtttatctcaaacatttttacgattcgattgcacccattcttcaaggtttgattcccaatgaaactatcaaacttcttgatatcggggctggggcaggatttcctagtctaccaatgaaaattctctatccggagttagatgtgaccattattgattcactcaataagcgcatcaacttcctacaactcttggctcaagaactggatttgaacggagttcatttctaccacggacgtgccgaagattttgcccaagacaagaacttccgtgctcaatatgattttgtaacagctcgtgcggttgcccgtatgcaggtcctatctgaattgactattccctaccttaaggttggtggcaaactattggcactcaaggccagcaatgcgcctgaggaattattagaagctaagaatgccctcaatctcctttttagtaaggtcgaagacaatctcagctacgccctaccgaatagagatccgcgctatatcacagtggtagaaaagaaaaaagaaacaccaaataaatatccacgtaaggctggtatgccaaataaacgcccactttaa

SEQ ID NO: 1850 - DNA, 561 bp, Streptococcus pneumoniae
atgacttggattattcttggagttatcgctcttattgttatttttgtgattgttagctataacggtttggttaaaaatcgtatgcaaaccaaggaggcttggagtcagattgatgttcagttgaaacgtcgaaatgacctcttgccgaacttgattgagactgtaaaaggttatgccaaatatgaaggttctacccttgaaaaggtggcagaactacgtaaccaagtggcggcagcgacttcaccagcagaagctatgaaagccagtgatgccctcactcgtcaggtttcaggtatttttgcagttgcagaaagctatccagatttgaaagctagtgctaactttgttaaattgcaagaggagttgacaaacacagaaaataaaatttcttactctcgtcaactctataacagtgttgtcagcaactacaatgtaaaattagaaactttcccgagcaatattatcgctggaatgtttggatttaaagcggcagatttccttcaaacacctgaagaggaaaagtcggttcctaaagttgattttagcggtttaggtgactaa

SEQ ID NO: 1851 - DNA, 909 bp, Streptococcus pneumoniae
gtgactaagatgttgtttgatcaaattgcaagcaataaacgaaaaacctggattttgttgctggtatttttcctactcttagctcttgttggttatgcggttggttatctctttataagatctggacttggtggtttggttatcgcactgattatcggctttatctacgctttgtctatgatttttcaatcgacagagattgtcatgtccatgaatggagcgcgtgaggtggatgagcaaacggcaccagacctctaccatgtagtggaagatatggctctggtcgctcagattcctatgccccgtgttttcatcattgatgatccagccttaaatgcctttgcgacaggttctaatcctcaaaatgcggctgttgctgcgacttcaggtctactagctatcatgaatcgtgaagaactagaagctgttatgggacatgaagtcagtcatattcgtaattatgatatccgtatttcgactattgcagttgcccttgctagtgctatcaccatgctttctggtatggcaggtcgtatgatgtggtggggtggagcaggtcgcagacgaagtgatgatgaccgagatggaaatggtcttgaaatcattatgctagtggtttccctactagctattgtactggcacctctcgctgcaaccttggttcagctcgctatttctcgtcagagggaatttctggcagatgcatctagtgttgagctgactcgcaatccccagggaatgattaatgccctagataagttggacaatagcaaaccgatgagtcgccacgtcgatgatgctagcagtgctctttatatcaatgatcccaagaaaggtggggggttccaaaaactcttttatacccacccacctatctcagaacggattgaacgtttaaaacagatgtaa

SEQ ID NO: 1852 - DNA, 1560 bp, Streptococcus pneumoniae
atgcactatgaacattctagaaagggaaatcatatgataaaaatcaatcatctaaccatcacacaaaacaaagatttacgagatcttgtatctgacctaaccatgaccatccaagacggggaaaaggttgctattattggtgaagaaggaaatggcaaatcaaccttacttaaaattttaatgggggaagctttgtctgatttcactatcaagggaaacatccaatctgactatcagtcactggcctacattcctcaaaaacttcccgaggagctgaaaaagaaaactttacacgactacttctttttagattctattgatttagactacagtatcctctatcgtttggcggaggaattgcattttgatagcaatcgtttcgcaagtgaccaagagattggcagtctatcagggggcgaagctttgaaaattcagcttatccatgagttagccaaaccctttgagattctatttttagatgaaccttcaaatgacctagaccttgagacagttgattggttaaaaggccaaattcaaaagaccaggcaaaccgttattttcatttcccatgatgaagactttctttctgaaacggcagacactattgttcacttgcgactggtcaaacaccgtaaagaagcggaaacgctagtagagcatttagactatgatagctatagtgagcagagaaaggctaattttgccaaacaaagtcagcaagctgctaacaaccaaagagcctacgataaaaccatggaaaaacatcggagagttaagcaaaatgtagaaactgcgcttcgagctaccaaagatagtactgccggtcgcctattggctaaaaagatgaaaactgtcctctcacaagaaaaacgctacgaaaagacagctcagtccatgactcaaaagccacttgaagaggaacaaatccaacttttcttttcagacatccaaccattaccagcttctaaagtcttagtccaactggaaaaagaaaatttgtccattgacgaccgagttttggttcaaaaactacaactaactgtccgtgggcaagaaaaaatcggtattatcgggccaaatggtgttgggaaatcaactctgttagccaaattaaagcaacttctgaatgataaaagagagatttcccttggttttatgccacaagattaccacaaaaaactgcaattggatttatcaccaatagcttatatcagcaaaactggggaaaaagaggaacttcagaaaatccactctcacctagccagtctcaatttcagttatccagaaatgcagcatcaaattcgctccttatctggcggacaacagggaaaactcctgcttttggatctagtcctgcgcaaaccaaactttctcctgctggatgaacccacacgaaacttttctcccacttctcaaccccaaatcaaaaaactctttgcaacctatccaggcggtctcatcactgtttcgcatgaccgtcgtttcttaaaagaagtctgctcgatcatctatcgcatgacagaacacggtttggagttagttaatttagaagatttataa

SEQ ID NO: 1853 - DNA, 276 bp, Streptococcus pneumoniae
tgcataacaaaaagctctactttacctagtagagcccaaagtctatgtcaaaaaaactctattaacatgccagaaaaagagcataaaagagcacacaaaaagagacaaaaacaagatctactaaataaaggttctttatttgatagacttagttgttcatgtctcccttacctccgagtattagtatctttatactatacctttaaggaaattttgtcaacagaaaactggaaattctatgctctaaaatccaaaaacaggtccatagagacttag

SEQ ID NO: 1854 - DNA, 366 bp, Streptococcus pneumoniae
gtgctatactatagggaaagagtacatcagatcaaggaggatgctcacatggaagacaagaaactcattcaactcctatccaagttaaataaaagctaccaaaactgtaaacagggtacggcagatgatattcgactacaagagctgctaaacactactatgcaagagctcaaaaaaacggaacagttgaacaacagtatcttaattgatcttgagaaattttaccaacccaccagtcctctgattggactgggtagcctaaaactaaacaatcaagcacgcactgcttggcgaaactatgataaaatccattacgagcatgtcaaacacgtactaagtctctatggacctgtttttggattttag

SEQ ID NO: 1855 - DNA, 543 bp, Streptococcus pneumoniae
atgaaattaaatattcaagaaattcgtaagcagtctgaaggtttgaactttgaacaaacgttagatttagttgatgacctgcgtgcacgtaatcaagaaattttagatgtaaaagatatccttgcagttgggaaagtacaatatgaagaccgtatgtatttcttagattatcaactatcttataccattgttcttgcttcgagtcgcagtatggagccagttgagttagttgaatcttatccagtcacggaagttttcatggaaggcgcaactaaccatctaaatcaagaaattttagatgatgacttggtcttgcccatcgaaaatggggcgcttgaccttgctgagagtgtatcagacaatatcctgctaaacattcctatcaaggtcttgacggctgaagaagaagctggtcaaggatttgtctcaggaaatgactggcaaatcatgacagaggaagaataccaagctcaacaagcagtaaagaaagaagaaaacagtccttttgctggcttacaaggactatttgacggagatgaataa

SEQ ID NO: 1856 - DNA, 186 bp, Streptococcus pneumoniae
ttggtaaaatcaagactaggcttggcatctgggaagagggcaatgatttcttctagcacctttcgtgctcgtttttttgacaagaccattattcatctccgtcaaatagtccttgtaagccagcaaaaggactgttttcttctttctttactgcttgttgagcttggtattcttcctctgtcatga

SEQ ID NO: 1857 - DNA, 630 bp, Streptococcus pneumoniae
atggtcttgtcaaaaaaacgagcacgaaaggtgctagaagaaatcattgccctcttcccagatgccaagcctagtcttgattttaccaatcattttgaactcctggttgcggtcatgttatcagcccagacgacagatgcagcggtaaataaggccacaccaggtctctttgttgcctttccaacaccccaagctatgtctgtagcgacagagagtgagattgcttcacatatttctcgcttgggattgtatcggaataaagctaaattccttaaaaaatgtgcccaacagttactagacgattttgatggtcaagtccctcagacacgtgaagaattggagagtttggcaggtgttggtcgcaagacagccaatgttgtcatgagtgtaggatttgggattccagcctttgcagtggatactcatgtggagcgtatttgcaaacaccacgatattgtcaaaaaatcagcgacgccacttgaggtggaaaagcgggtcatggatatcttgccgcctgagcagtggttagatgcccatcaggccatgatttattttggaagagccatttgccatccaaaaaatccagagtgtgaccagtacccacaattatatgattttagcaatttgtaa

SEQ ID NO: 1858 - DNA, 522 bp, Streptococcus pneumoniae
atgaaaacaaaagaagttgtagacgaattgaccgtcaaacgagcgattacgcgtattacttatgagattatcgaacgcaacaaagatttgaataagattgtcttggctggtattaaaactcgtggtgtctttattgcccaccgaatccaagaacgtttgaagcagttagaaaatctttcagttcctgttgtggaattggatactaaacctttccgtgatgatgttaaaagtggagaagatacttctttggtttctgtcgatgtgacagaccgcgaagttatcttggtggatgatgtgctctatacaggtcgtaccatccgtgctgctattgataatattgtcggtcatggtcgtcctgcgcgtgtgagtttagcagttctagtcgatcgtggacatagagaattgccaatccgtccagattacgttggaaaaaatatcccaaccagtcgttctgaagaaatcatcgtagagatgacagaacttgatgaccaagacagagttctgattactgaagaagcttag

SEQ ID NO: 1859 - DNA, 924 bp, Streptococcus pneumoniae
atgtcagaaaatcaacaagcattgaaccatgtggtgtccatggaagacctcactgtcgatcaagtaatgaaattgatcaagcgaggaattgagtttaaaaatggagcccagcttccctatgaagaccatccgattgtttccaatctcttctttgaggattctacacggacacataagtcctttgaagtcgcagagattaaacttggattggaacgacttgactttgatgtgaagactagttcggttaataagggtgagacactttatgacaccattttgactctgtctgctttaggagtggatgtctgtgtgactcgccatccagaggtcgactattatagagaattgattgatagtccaacgattacgacttccatcatcaatggtggagatggttcgggtcaacaccctagccagagcttgcttgatttgatgaccatttatgaggaatttggccactttgagggtcttaaagttgctattgcaggtgacttggaccactcacgcgttgccaaatccaatatgcagattttgaaacgcttgggagctgaactctttttcgctggacctgaggaatggagaagtcaagagtttgcagactatggaaagtttgtaaccattgatgaaatcattgatcaggttgatgtcatgatgtttctccgtgtgcaacacgaacgccatgatagtggagctgtattttcaaaagaagactaccatgcccaacatggcttgactcaagaacgttacgatcgtttgaaagaaacagcaatcctcatgcacccagctccaatcaatcgtgatgtagaaatagcagaccacttggttgaagcaccaaaatcacggattgtccaacaaatgaccaatggtgtctttgttcgaatggcaatcttagaatccgtactagcgagtagaaacgccaactaa

SEQ ID NO: 1860 - DNA, 1080 bp, Streptococcus pneumoniae
atgacaaaaagaattctagtattagaagatggcacagtttttgaaggcaaggccttcggagcagatattgatgtaacaggcgaaatcgtctttaatacagggatgaccggctaccaagaatccattacagaccagtcttataatggacaaatcttgacctttacttatcctttggtaggaaattatggtattaatcgtgatgattatgaatccattattccaacttgtaagggagtcgttgtttttgaagaagcgcgtagagctagcaactggcgcaaccaaatgaccttggatgaatttttgaaagccaagaaaattccagggatttcaggaattgatacgcgtgctcttaccaagattatccgtaagcatggtactatgcgtgcaaccttgacccatgttggggacagtatggaccatgtgacggaccagctccaagcaacagttttaccgacagacaatatcaaacaggtttctactaaaacgtcttatccagctccaggagttggtttgagcgtggtgctagtggactttggtctcaagcactcaatcctacgtgaactttctaaacgcaactgtaacgtgacagttgttccttattcgacaacggctgaagaaattctccatctcaatcctgatggagttatgttgtcaaatggtccaggtaacccagaagacgttccacaagcactcgacatgattcgcggtgtacaaggaaaaattccaatctttggtatttgtatgggacaccaactctttgcaatggcaaacggggctaagacctataagatgaagtttggccaccgtggattcaaccatgcggtacgtgaaatcgcaacaggacgagtagacttcaccagccagaaccatggttatgcagtcagccgcgaggatttgccagagcacttgattattacccacgaagaaatcaatgacaagtcagtggaaggtgtgcgccacagataccaacctgctttctctgttcaataccacccagatgcagctcctggaccacacgacgctagctacctatttgacgagtttatcgagatgatggaaatttttaaacaatcaaactaa

SEQ ID NO: 1861 - DNA, 3177 bp, Streptococcus pneumoniae
atgcctaaacgtactgatattcaaaaaattatggtgattggttctggtccgattattattggtcaggctgctgagtttgattacgctgggacccaggcttgcttgtcgttgaaagaggaaggttatgaggttgttttggttaactcaaatcctgcaaccatcatgacggacaaggaaattgctgacaaggtttacattgaaccgattacacttgagtttgtgacacgtattcttcgtaaggaacgtccagatgccttgctaccaacactcggtggtcagacaggtctcaacatggccatggaattgtctaaaaatggtatcttagatgagcttggcgttgaacttctgggtactaaattgtctgccattgaccaagcggaggaccgtgacctctttaaacaattgatggaagagcttgagcaacccattccagaatctgaaattgttaacacagtagaagaagcaattgcctttgcagcgacaattggctacccagtcatcgttcgtccagcctttacccttggtggtactggtggtggtatgtgtgccaacgagaaagaattgcgtgaaatcactgaaaatggtttgaaattgtcacctgttacccaatgtttgattgagcgttcgattgccggtttcaaggaaattgaatacgaagtgatgcgtgactcagctgacaatgccttggttgtttgtaacatggaaaactttgacccagttgggattcacacaggggattccattgtatttgcccctgcgcaaaccatgtcagactatgaaaaccaaatgcttcgtgatgcgagcttgagcattattcgtgccctcaagattgaaggtggatgtaatgttcagctagctcttgatcctaacagcttcaagtattatgttatcgaagtaaaccctcgtgtatcacgttcgtcagcccttgcttctaaagcgacaggatatccgattgctaagttggctgccaagattgcagtaggtttgaccttggatgaggttataaacccagttacaggttcaacctatgccatgtttgaaccagcccttgactacgtagttgctaagattccacgtttcccatttgacaagtttgaaaagggtgaacgccgtctcggtacacaaatgaaggcgactggagaagtcatggcaatcggtcgtaacatcgaggaatctcttctcaaggcctgccgctcccttgaaattggggtgcaccacaatgaaatacctgaacttgcagcagtttctgatgatgccttgattgaaaaggttgtcaaagcccaagatgaccgtctcttctatgtgtcagaagccattcgccgtggttacacacctgaagaaattgcagagcttacaaaaattgatatcttctatcttgataaactcttgcatatctttgaaattgagcaagaattgggtgctcatccacaagatctagaagttttgaaaacagccaaacttaatggtttttcagaccgtaagattgctgaactctggggaacgactgatgatcaagttcgccaacttcgtttggaaaacaagattatcccagtttataagatggtagacacttgtgcggcagagttcgactctgaaacgccatatttctattcaacctatggttgggaaaatgaatctatcagatctgataaagaatctgtacttgtcctaggttcaggtccaatccgtatcggtcaaggggttgagtttgactacgcaaccgttcactctgttaaggctatccaggcagctggttatgaagctattatcatgaactcaaacccagagaccgtttcaacagacttctctgtatcagataagctttactttgagccattgacattcgaagatgttatgaacgtcattgacttggaacaaccaaagggagttatcgttcagttcggtggtcaaacagccatcaaccttgcggagccattggcaaaagcaggtgtgaccatccttggtacacaggttgctgacctagaccgtgccgaagaccgtgacctcttcgagcaagctctcaaagaattggatattccacagccaccaggacaaacggctaccaatgaagaagaagcagctcttgcagctcgtaagattggcttcccagttcttgtccgcccatcttatgtacttggtggacgtgccatggaaatcgttgaaaacgaagaagaccttcgttcttacatgcgaactgctgttaaggctagtccagaccacccagttcttgtcgactcttacatcgttgggcaagagtgcgaagttgatgccatttcagatggtaaaaatgtactcattcctggtattatggagcatatcgaacgtgctggtgtccactcaggtgactcaatggctgtttacccaccacaaaccttgtcgcaaaaggttcaggagaccatcgcagactacaccaaacgcttagcaatcggtcttcactgccttggaatgatgaacatccagtttgttatcaaggatgaaaaagtctacgttattgaggtcaatccacgtgccagccgtacagttccattcctatctaaggtaaccaatatttctatggctcaagtagcgaccaagctcattcttggtcaaagtttatcagaacttggctaccaaaatggactttaccctgaaagcacccgtgttcatatcaaggcacctgtcttctcctttaccaaactagctaaggtagacagcttgctcggtcctgaaatgaagtcaacaggtgaagttatgggttctgatgctactttggaaaaagctctctataaagcctttgaagcttcttatctacacttgccaacttttggtaatgtcgtctttaccatcgctgatgatgccaaagaagaagccttgaacttggctcgtcgtttccaaaacattggttatggaatccttgcgacagaagggacagcagccttctttgctagtcatggcttgcaagcccaacctgttggtaagattggtgatgatgataaggatatcccaagttttgtacgcaaaggaagaattcaagctatcattaacacagtaggaacaaaacgaactgctgacgaagatggtgagcaaattcgtcgttcagccattgaacacggggtgcccctcttcacagcgctagatacagctaatgccatgcttaaggtacttgaaagtcgtagctttgttacagaagcgatttaa

SEQ ID NO: 1862 - DNA, 210 bp, Streptococcus pneumoniae
aaaaaagtctttaaaattataaaacgcatcatatcaagttttttcaaaaaccttgatatgatgcgttttattgtgggaatatttatttcattttctactaaaattatgtttttgaataacctctatcttagtagtttgtataatccccctcaatcagcttttacgataagctttaatactatgactataccattcttgcatttcttttga

SEQ ID NO: 1863 - DNA, 843 bp, Streptococcus pneumoniae
atgaatttcacgcttataaattggaggattaggatgcaatatttagaaaaaaaagaaattaaagaaattcaactagccctgctggactatattgatgagacttgtaagaaatatgatattccttattttctcagttatggaaccatgcttggagccatccgccacaaaggtatgattccttgggatgatgatattgatatttccctttatcgtgaggattatgagcgtttactgaagattattgaagaagaaaatcaccctcgctacaaggttctttcctacgatacatcttcttggtacttccataatttcgcatcgattttggacacttctactgttatagaagaccatgttaagtacaagcgtcatgataccagccttttcatcgatgtcttcccaattgatcgatttacagacttgagcattgtcgacaagagctataagtatgtggcccttcgtcaactagcttacatcaaaaaatcacgagcagttcacggtgatagcaaactaaaagattttcttagattatgtagctggtacgctctccgatttgtcaatcctcgctacttttacaagaaaattgatcaactagtcaaaaatgctgtaaccaacactcctcaatatgaaggaggagttgggatcggtaaggaagggatgaaagaaatcttcccagttgatacctttaaagaactcatcttaactgagtttgagggccgtatgttgcctgttcccaaaaaatatgaccaatttttaacccagatgtatggcgattatatgacaccaccatcaaaagaaatgcaagaatggtatagtcatagtattaaagcttatcgtaaaagctga

SEQ ID NO: 1864 - DNA, 804 bp, Streptococcus pneumoniae
atgaaacaactaaccgttgaagatgccaaacaaattgaattagaaattttggattatattgatactctctgtaaaaagcacaatatcaactatattattaactacggtactctgattggggcggttcgacatgagggctttatcccttgggacgacgatattgatttatccatgcctagagaagactaccaacgatttattaacatttttcaaaaggaaaaaagcaagtataagctcctatccttagaaactgataagaactactttaacaactttatcaagataaccgacagtacgactaaaattattgatactcgaaatacaaaaacctatgagtctggtatctttatcgatattttccctatagatcgctttgatgatcctaaggtcattgatacttgttataaactggaaagcttcaaactgctgtctttcagtaaacataaaaatattgtctataaggatagccttttaaaagattggatacgaacagccttttggttgctccttcgaccggtttctcctcgttattttgcaaataaaatcgagaaagaaattcaaaaatatagtcgtgaaaatgggcagtatatggcttttattccttcaaaatttaaggaaaaggaagtcttcccaagtggtacctttgataaaacaatcgatttaccctttgagaatttaagccttcctgcacctgaaaaatttgatactattttgacacaattttatggagattatatgaccctaccaccagaagaaaaacgcttctacagtcatgaatttcacgcttataaattggaggattag

SEQ ID NO: 1865 - DNA, 1488 bp, Streptococcus pneumoniae
atgaaaagtataaaattaaatgctctatcttacatgggaattcgtgtcttgaatattatttttcccatcctaactggaacctatgtcgcgcgtgtcttggaccgaactgactatggttacttcaactcagtcgacactattttgtcatttttcttgccctttgcaacttatggtgtctatagctacggtttaagggctatcagtaatgtcaaggataacaaaaaagatcttaacagaaccttttctagtcttttttatttgtgcatcgcttgtacgattttgaccactgctgtctatatcctagcctatcctctcttctttactgataatccaatcgtcaaaaaggtctaccttgttatggggattcaactcattgcccagattttttcaatcgaatgggtcaatgaagctctggaaaattacagttttctcttttacaaaactgccttcatccgtatcctgatgctggtctctattttcttatttgttaaaaatgaacacgatattgttgtctatacacttgtgatgagtttatcgacgctgattaactacctgattagttatttttggattaaaagagacatcaaacttgttaaaattcacctaagtgattttaaaccactctttctccctctgacagccatgttagtctttgccaatgccaatatgctcttcacttttttagatcgcctcttcctcgttaaaacagggattgatgtcaacgttagttactataccatagctcagcgaattgtgaccgttatagctggggttgtaacaggtgcaattggagtgagtgtgcctcgtctcagttactatctggggaaaggagacaaagaagcctatgtttctctggttaatagaggtagtcgaatctttaacttctttatcattccactgagttttggactcatggttttaggaccaaatgccatcctactttacggtagtgaaaaatatatcggaggcggcatcttgacctctctcttcgcttttcgtacgattatcctggccttagataccattcttggttcccaaattctctttaccaatggctatgaaaaacgtatcacagtctatacagtctttgctgggctactcaatttgggcttgaatagtctcctttttttcaaccatatcgtggctcctgaatactacttactgacaactatgctatcagagacttctctacttgttttctatatcattttcatccatagaaaacaactcatccacttgggacatatctttagctatactgttcgatactctctcttttcactttcctttgtagcaatttatttcctgattaatttcgtgtatcctgtagatatggtcattaatttgccatttttgattaatactggtttgattgtcttgctatcagctatctcttatattagtctacttgtcttcacaaaagatagcattttctatgaatttttaaaccatgtcctagccttaaaaaataaatttaaaaaatcatag

SEQ ID NO: 1866 - DNA, 708 bp, Streptococcus pneumoniae
atgatttatgcaggaattcttgccggtggaactggcacacgcatgggaatcagtaacttgccaaaacaatttttagagctaggtgatcgacctattttgattcatacaattgaaaaatttgtcttggaaccaagtattgaaaaaattgtagttggggttcatggagactgggttttacatgcagaagatcttgtagataaatatcttcctcttcataaggaacgtattatcattacaaagggtggtgctgaccgcaatacaagtattgagaacatcattgaagccattgatgcttatcgcccgcttactccagaggatatcgttgttacccacgattctgttcgtccatttattacgcttcgcatgattcaagacagtatcaaacttgctcaaaatcatgacgcagtggatacagtagtagaagcagtggatactatcgttgaaagtaccaatggtcaattcattacaggtattccaaatcgtgctcacctctatcagggacaaacacctcaaacattccgttgcaaggacttcatggacctttatggatctctttctgatgaagagaaggaaatcttgacagatgcatgtaaaatctttgtgatcaaaggaaaagatgtagccttggccaaaggcgaatactcaaatctgaagattacaaccgtaacagatttgaagattgcaaaaagtatgattgagaaagactag

SEQ ID NO: 1867 - DNA, 1041 bp, Streptococcus pneumoniae
ttgagaaagactagtaaaatgattaatcaaatttatcaactaactaaacctaagtttatcaatgtcaaatatcaggaagaggctattgaccaagagaatcatatccttatccgtcccaactacatggctgtctgtcatgcggatcagcgttactaccagggaaaacgtgatcccaagattttgaataaaaagcttccaatggcaatgattcacgagtcatgtggaatcgtcatttctgacccgagcggaacctacgaggttggtcaaaaagttgtcatgattcccaatcagtctcctatgcagagtgatgaagaattctatgaaaactacatgacagggacccatttcttgtctagtggatttgatggctttatgagagagtttgtttctctccctaaagatcgtgtggtggcttatgatgctattgaagatacggttgcagccattacagagtttgtcagtgtgggcatgcacgctatgaatcgtctattgactcttgctcatagcaagcgggagcggatcgccgttattggagatggaagtttagcttttgtggttgccaatattatcaactatactttgccagaagcagagattgtggttattggtcgtcattgggaaaagttggaactcttctcatttgccaaagaatgctatattacggataatattcctgaagagttggcctttgaccatgcttttgaatgttgtggtggtgatggtactggaccagctattaatgacttgattcgctacattcgtcctcagggaacaattctcatgatgggagttagcgaatataaagtcaatctcaatactcgcgatgccttagaaaagggcttgctcttggttgggtcatctcgttctggtcgcattgattttgaaaatgctatccaaatgatgaaagtcaagaaatttgccaatcgtcttaaaaatatcctttatctagaagaacctgtaagagaaattaaagatattcaccgtgtctttgcaaccgatttaaacacagcctttaaaacagtgtttaagtgggaagtataa

SEQ ID NO: 1868 - DNA, 870 bp, Streptococcus pneumoniae
gtggagaaaatcattaaagaaaaaatttcttccttacttagtcaagaagaagaagtcctcagtgttgaacaactgggtggaatgaccaatcaaaactatttggccaaaacaacaaataagcaatacattgttaaattctttggtaaagggacagaaaagcttatcaatcgacaagatgaaaagtacaatcttgaactactaaaggatttaggcttagatgtaaaaaattatctttttgatattgaagctggcatcaaagtaaatgagtatatcgaatctgcgattacgcttgattcaacgtcaatcaagaccaagttcgacaaaattgctccaatattacaaactattcatacatctgctaaggaattaagaggagaatttgctccttttgaagaaatcaaaaaatacgaatccttgattgaagaacaaattccttatgccaactatgaatctgttagaaatgcagtcttctccttagagaaaagactggctgacttaggtgttgacagaaaatcttgtcatatcgatttggtgcctgaaaactttatcgaatcacctcaaggacgactttatttgattgactgggaatattcatcaatgaatgatccaatgtgggatttggctgccctctttttagagtctgaattcacttcccaagaggaagaaactttcttatctcactatgagagtgaccaaacaccggtttctcatgaaaagattgctatttataaaattttacaagatactatttggagtctatggactgtctataaggaagagcaaggtgcagattttggttactatggtgtgaatcgttaccaaagagctgttaaaggtttggcttcttatggaggatcagatgaaaagtaa

SEQ ID NO: 1869 - DNA, 879 bp, Streptococcus pneumoniae
atgaaaagtaaaaacggagttccttttggccttctctcaggtattttctggggcttgggtctaacggttagtgcttatatcttttcgatttttacagatttgtcaccctttgtggtggctgcagctcatgattttttgagcatctttatcttactagcttttctcttggtaaaagaagggaaagttcgcctctcaattttcttaaatattcgcaatgtcagtgttatcatcggagccttgctagcaggccctatcggtatgcaggccaatctttatgcagttaagtatatcggaagttctttagcttcatctgtatcggctatttaccctgcgatttcagttctattggctttcttctttttgaagcacaagatttcgaaaaatactgtatttgggattgtcttgattattggagggattattgcccagacctataaggttgaacaggttaattccttctacattgggattctctgtgctttggtttgtgctattgcatggggaagtgagagtgttcttagctcctttgctatggaaagtgaactgagtgaaatcgaagccctcttaatccgtcaagtgacttcgttcttgtcctatcttgtgattgtgctcttctctcatcagtcatttactgcagtagtcaatggacaattgctaggtctcatgattgtttttgcagcctttgatatgatttcctacttggcttattatatcgctatcaatcgcttgcaaccagccaaggctacaggcttgaacgtgagctatgtagtatggacggtcttgtttgcagttgtttttttgggtgcaccgctagatatgctgaccattatgacgtcacttgtcgtcattgctggagtttatattattattaaagaataa

SEQ ID NO: 1870 - DNA, 690 bp, Streptococcus pneumoniae
gtgaaagccattatcttagcagcgggattgggaactcgcttgcgtcctatgactgaaaatacccctaaagccttggttcaggttaatcaaaaacctttgattgaataccaaattgagtttctcaaagaaaaaggaatcaatgacatcatcatcattgttggttatcttaaagaacaattcgattacttaaaagaaaaatacggtgttcgcctcgttttcaatgataaatacgctgactacaataacttttactctctctatcttgtaaaagaagaattggccaacagctatgttattgatgcagataactatctctttaaaaatatgttccgcaatgatttgactcgttcgacttattttagtgtttatcgtgaagattgtaccaacgaatggttcttggtctatggagatgactacaaggttcaagacattattgttgatagcaaggcaggtcgcatccttagtggtgtatccttctgggatgctccaactgcagaaaagattgtcagctttatcgacaaggcttatgcaagtggcgaatttgttgatctctactgggacaatatggttaaggataatatcaaagagctagatgtctatgttgaagaattagaaggcaatagcatttatgagatcgatagtgtccaagactatcgtaaattagaagaaattcttaaaaacgaaaattaa

SEQ ID NO: 1871 - DNA, 849 bp, Streptococcus pneumoniae
atgaaaatcacaaactatgaaatctataagttaaaaaaatcaggtttgaccaatcaacagattttgaaagtgctagaatacggtgaaaatgttgatcaggagcttttgttgggtgatattgcagatatatcaggttgtcgtaatccagccgtttttatggaacgttattttcagatagacgatgcgcatttgtcgaaagagtttcaaaaatttccatctttctctattttagatgactgttatccttgggatttgagtgaaatatatgatgcgcctgtacttttattttacaagggaaatcttgacctcctgaaattcccgaaggtagcggtcgtgggcagtcgtgcttgtagcaaacagggagctaaatcagttgaaaaagtcattcaaggcttggaaaatgaactggttattgtcagtggtctggccaagggcattgacacagcagctcatatggcagctcttcagaatggcggaaaaaccattgcagtgattggaacaggactggatgtgttttatcctaaagccaataaacgcttgcaagactacatcggcaatgaccatctggttttaagtgaatatggacctggcgaacaacctctgaaatttcattttcctgcccgtaatcgcatcattgctggactttgtcgtggtgtgattgtagcagaggctaagatgcgttcaggtagtctcattacgtgtgagcgagcaatggaagaaggacgcgatgtctttgctattcctggtagcattttagatggactatcagacggttgccatcatttgattcaagaaggagcaaaattggtcaccagtgggcaagatgttcttgcggaatttgaattttaa

SEQ ID NO: 1872 - DNA, 513 bp, Streptococcus pneumoniae
ttgataatatgcgttttttctaagtggattagtagagtagaggatttttctcatataatactcttcgaaaatctctgcaaactacgtcagcttccatctgcaacctcaaaacagtattttgagctgacttcgtcagtcttatctgcaacctcaaaacagtattttgagctgacttcgtcagtcttatctgcaacctcaaaacagtattttgagctgacttcgtcagtcttatctgcaacctcaaaacagtattttgagctgacttcgtcagtcttatctgcaacctcaaaacagtattttgagctgacttcgtcagtcttatctgcaacctcaaaacagtattttgagctgacttcgtcagtcttatctgcaacctcaaaacagtattttgagctgacttcgtcagtcttatctacaacctcaaagcagtgctttgagcaacctgtggctagcttcctagtttgcgctttgattttcattgagtataagggaaagtatagtgaattgaaataa

SEQ ID NO: 1873 - DNA, 456 bp, Streptococcus pneumoniae
ttgactttcctgatagagttgttcacatcttatttcaattcactatactttcccttatactcaatgaaaatcaaagcgcaaactaggaagctagccacaggttgctcaaagcactgctttgaggttgtagataagactgacgaagtcagctcaaaatactgttttgaggttgcagataagactgacgaagtcagctcaaaatactgttttgaggttgcagataagactgacgaagtcagctcaaaatactgttttgaggttgcagataagactgacgaagtcagctcaaaatactgttttgaggttgcagataagactgacgaagtcagctcaaaatactgttttgaggttgcagataagactgacgaagtcagctcaaaatactgttttgaggttgcagataagactgacgaagtcagctcaaaatactgttttgaggttgcagatggaagctga

SEQ ID NO: 1874 - DNA, 207 bp, Streptococcus pneumoniae
aatggttattataaaaaatggtctgaaatagatgatgatacttttcgaaaatctttttacgtcagctcagctttgccttgctgtgttttgagcaagctacggttagcttccgagtttgattttcatttactagaaatgaaactgatgagagatatcagtagacatttgagtcaggatattatggaaaatgataaaaagagctcgtga

SEQ ID NO: 1875 - DNA, 1044 bp, Streptococcus pneumoniae
gtgacaaataataaactgtattcgttgatagaatttagaaataaaatatatgaagaattagaactttccagaagtgatttagcgattttactatgtgccatgcttatcgcctctatcggattaaatatggattcgactcccgtgattattggagccatgttaatctctcctttgatgacacctattctgggagtggggctctctctagctatatttgattttaaattgttaagaaaatcttttaaaatattagctattcaaattcttgccagtctaatagcttcaacactttatttttatctttctcccatttcgtatgctagttcggagattgttgctagaacctctccgactatttgggatgttctcattgcttttgtaggagggatagcaggtattattggtgctaggaaaaaagagaccaataatattgttcctggtgttgctattgcaaccgccttgatgcctcctctttgtacagtaggttatgctattgcttctgctaatctaaaatttatcataggctcctcttacctatttctcatcaattgtagctttattgtcattgcgacttatataggtgttaggttgatgatggttaagaaacattattttaaagataatgaagaagactctaaaatgcgtaggattttgcttctagttgctgttttgctgatgattccgagtttcatctctgcaacgactttagtgagagaaacgttgaaaaaagagtcccttaagaaatttatatcagagcagtttcaggggcataatattttgaaaaaaacctattctaaaaagactcataccctaaagctaaccatttcaggaaattatttgacagaagaagaactcgatatgatttcaagtaagagaggtgactatggtttaagtgatgtttctgttcaagtttcacaattgtctgattcagaacaacttagtaaggaagaactggtggagtatttcttccagtatatcaaggataaggaagcaaaagaaaaggaaaaagctaataagttttatacagagtctgaggagcaataa

SEQ ID NO: 1876 - DNA, 2106 bp, Streptococcus pneumoniae
ttgaaaaggtgtgatactgtggctacggtaacaaaaaagaaaaaatcaacagttaaaaaaaatctagtcatcgtggagtcgcctgctaaggccaagacgattgaaaaatatctaggcagaaactacaaggttttagccagtgtcgggcatatccgtgatttgaagaaatccagtatgtccgtcgatattgaaaataattatgaaccgcaatatatcaatatccgaggaaaaggccctcttatcaatgacttgaaaaaagaagctaaaaaagctaataaagtttttctcgcgagtgacccggaccgtgaaggagaagcgatttcttggcatttggcccatattctcaacttggatgaaaatgatgccaaccgtgtggtcttcaatgaaatcaccaaggatgcagtcaaaaatgcttttaaagaacctcgtaagatcgatatggacttggtcgatgcccaacaagctcgtcggatcttggatcgcttggtagggtattcgatttcgcctattttgtggaagaaggtcaagaagggcttgtcagcaggtcgcgttcagtccattgcccttaaactcatcattgaccgtgaaaatgaaatcaatgccttccagccagaagaatactggacagttgatgctgtctttaaaaagggaaccaaacaatttcatgcttccttctatggagtagatggtaaaaagatgaaactgaccagcaatgacgaagtcaaggaagtcttgtctcgtctgactagtaaagacttttcagtagatcaggtggataagaaagagcgcaagcgcaatgctcctttaccctataccacttcatctatgcagatggatgctgccaataaaatcaatttccgtactcgaaaaaccatgatggttgcccaacagctctatgaaggaattaatatcggttctggtgttcaaggtttgattacctatatgcgtaccgattcgactcgtatcagtcctgtagcgcaaaatgaggcggcaagcttcattacggatcgttttggtagtaagtattctaagcacggtagcaaggtcaaaaacgcatcaggtgctcaggatgcccatgaggctattcgtccgtcaagtgtctttaatacaccagaaagcatcgctaagtatctggacaaggatcagctcaagctatatacccttatctggaatcgttttgtggctagccagatgacagcggccgtttttgataccatggctgttaaattgtctcaaaaaggggttcaatttgctgccaatggtagtcaggttaagtttgatggttatcttgccatttataatgattctgacaagaataagatgttaccggacatggttgttggagatgtggtcaaacaggtcaatagcaaaccagagcaacatttcacccaaccgcctgcccgttattctgaagcaacactgattaaaaccttagaggaaaatggggttggacgtccatcaacctacgcgccaaccattgaaaccattcagaaacgttattatgttcgcctggcagccaaacgttttgaaccgacagagttgggagaaattgtcaataagctcatcgttgaatatttcccagatatcgtaaacgtgaccttcacagctgaaatggaaggtaaactggatgatgtcgaagttggaaaagagcagtggcgacgggtcattgatgccttttacaaaccattctctaaagaagttgctaaggctgaagaagaaatggaaaaaatccagattaaggatgaaccagctggatttgactgtgaagtgtgtggcagtccaatggtcattaaacttggtcgttttggtaaattctacgcttgtagcaatttcccagattgccgtcatacccaagcaatcgtgaaagagattggtgttgagtgtccaagctgtcatcagggacaaattattgagcgaaaaaccaagcgtaatcgcctattctatggttgcaatcgctatccagaatgtgaatttacctcttgggacaagcctgttggtcgtgactgtccaaaatgtggcaacttcctcatggagaaaaaagtccgtggtggtggcaagcaggttgtttgtagcaaaggcgactacgaggaagaaaagattaaataa

SEQ ID NO: 1877 - DNA, 360 bp, Streptococcus pneumoniae
atgcgtcttatctatctgataattggttttttatcactggccttggctattgttggggttgttttacccttgttgccgacaacgcctttccttttgttgtctattgcttgtttctccagaagttccaagcgtttcgaagactggctttatcataccaagctctatcaaacatatgtagctgattttcgcgagaccaagtctattacgcgtgaacgaaagaaaaaaatcatcgtctctatctacgtcttgatgggaatttctatttattttgcacctcttttaccagtcaaaatcggtttgggtgctttgaccatctttatcacttattatctcttcaaggtcattccagacaaagaatag

SEQ ID NO: 1878 - DNA, 633 bp, Streptococcus pneumoniae
atgatttacgaattttgtgctgaaaatgtgactttacttgaaaaagcgatgcaggctggagctcgtcggattgaactctgtgataatctagcagttggtgggacaacacctagctatggagtgactaaggcagcggttgaactggcagctaactacgatacaaccatcatgaccatgattcggccacgtggtggtgactttgtctataatgacctagaaattgctatcatgctagaagacatttgtttgactgctcaggctggaagtcaaggggttgtatttggagctttaactgctgataaaaagttggataagcctaatctggaaaagttaattgctgcatcaaaaggaatggaaattgtctttcacatggcctttgatgaactaagtgatgaagatcaaccggaagctattgactggctcagtcaagccggtgtcactcgtatcctaactcgtgctggtgtgtctggcgactccttagaaaaacgttttgttcactatcacagaattttggagtacgctaaaggtaaaattgaaattctaccaggtggggggattgaccttgacaaccgtcaaacctttattgaccaggtgggggtaacacaattgcatggtactaaggttgttttttaa

SEQ ID NO: 1879 - DNA, 657 bp, Streptococcus pneumoniae
atgtttgaaatttttaaatcctatcaatttaatcaagaaaaggctcatgattatggttttatagaaaatagcgaagtctggacatatagttgccagattttgcaaggtgactttgtcatgactgtgtccatcactgctgataatgtgaactttcaagtctttgaccaagagactggtgacctctatcctcacgttcatatggaaagcatgaggggaagttttgtcggaaatgtccgtgaggcttgtctggagattctttaccagattcggaaggcttgttttgatgtgcaagattttatctgtcatcagactaagcgtatcatgactcaagttcaggaaaagtatggaaaccagttggagtatctgtgggaaaaatcgcctgatacagctgtattgcgccatgaaggcaatcaaaagtggtatgccgtcttgatgaaaatctcttggaataagctggaaaagggcagagaaggacaagtggaagcagtcaacctcaagcatgaccaagtagctaatttgctttcacaaaaggggatttatccagccttccatatgagcaagcgctactggattagtgtgtcccttgatgatactttatcagatgaagaagtactggaattgatagaaaaaagttggaacttaacctctaaaaaatga

SEQ ID NO: 1880 - DNA, 633 bp, Streptococcus pneumoniae
atgaactttcaattagctaaatattctttactgaagaaatttttagaaaatataggatttaccacactagaggaatatggtgccatcttcaaatacctgattgagaatgtcaagacggatcgtcagatcatctgttcgcctcactgtcatgatgacctcggaatggcagtggcaaatagccttgctgctgtcaagaatggtgcaggacgtgttgaagggactatcaatggtattagggagcgagctgaaaatgctgctttggaagaaattgcagtggctctcaatattcgccaagattactaccaagtagaaaccagtattgtcctaaatgagaccatcaatacgtcagaaatggtttctcgcttctctggtattccagttcctaaaaacaaagccgtcgttggtggcaataccttctcccacgaatctggtattcaccaagatggagtccttaaaaatcctctcacttatgagatcatcacacctgaattggttggtgttaagattccgcttggagaattatctggtcgccatgcttttgttgagaaactgagagaattggccctagattttacagaagaggatatcaaaccactctttgctaagttcaaggcactggccgataagaagtaa

SEQ ID NO: 1881 - DNA, 210 bp, Streptococcus pneumoniae
atggttccagctaccaaagctcgagtatctgcatctgtgatttcttacttcttatcggccagtgccttgaacttagcaaagagtggtttgatatcctcttctgtaaaatctagggccaattctctcagtttctcaacaaaagcatggcgaccagataattctccaagcggaatcttaacaccaaccaattcaggtgtgatgatctcataa

SEQ ID NO: 1882 - DNA, 435 bp, Streptococcus pneumoniae
ttggtagctggaaccatggttgaaaatccagaaggcttccactttgatgatttacaacttcaaactcatgcagataatgacattgaagcgctcgttagcctagccaatatggatggtgagaaagtcgaatttaatgcgacagggcaaggttccgttcaagcaatctttaacgctatcgataagttctttaaccaatctgttcgtttggtgtcctacactatcaatgcggtaacagatggaatcgatgcccaggatcgggttttggtcactgttgaaaacagagatacagaaaccatctttaatgcagcagggcttgattttgatgtgttgaaggcttctgctattgcctatataaacgctaatacctttgttcaaaaagagaatgcaggtgagatgggacgcagtgtttcttaccacgatatgcctagtgtgtaa

SEQ ID NO: 1883 - DNA, 1038 bp, Streptococcus pneumoniae
atggcaaagaaaatagtagctctagtaggagacggaattggcccagaaatcatggaggctggtttagaagttctggaggctctagctgaaaaaacaggttttgactatgagattgacagacgaccgttcggaggtgcagatattgatgcagcaggacctcccttacctgatgaaacccttaaggcaagtagggaagcagatgctatcctactagcagctatcggtagtcctcagtatgatggagcagcggttcgccctgaacaaggcctgatggctctccgtaaggaactcaatctttacgctaatattcgtcctgtaaaaatctttgacagtctcaagtatttgtcaccactcaaaccggaacgaatttctggtgtagactttgtcgtggtgcgtgaattgacaggcgagatttactttggagatcatattcttgaagagcgcaaagcgcgtgatatcaacgactatagctatgaggaagtggagcggattattcgcaaagcctttgaaattgcaagaaatcgcagaaaaatcgttactagtatcgataagcaaaatgttctagcgacctcaaaactctggcggaaagtagctgaggaagtcgcacaggatttcccagatgtaaccttggaacaccagctggtagactcagctgctatgcttatgattaccaatcctgctaagtttgatgttattgtaacggagaatctttttggagatattttatctgatgaatcaagcgtcttatctggtacacttgaggttatgccatcagccagtcattctgaaaatggaccaagtctctatgaacctattcacggttcagcacctgatattgcaggtcaaggaattgccaatcctatttccatgattttattagttgtcatgatgttgagagatagtttcggacgttatgaggatacagagcgtatcaaacgtgctgttgagacaagtctggcggcaggaattttaacgagagatataggaggtcaggcttcaacaaaggaaatgatggaagctattattgcaaggttatga

SEQ ID NO: 1884 - DNA, 270 bp, Streptococcus pneumoniae
atgaagttagacgaaaaaattactctagtccttttgatttggaatgtcatcattttcttgatttatggcattgacaaattcaaggcaagaagaagagcttggcgcatcccagagaaaatcttactcattttagcccttacttgtggtggttttggggcctggttagctggaatcacttttcaccacaagactcgaaaatggtactttaaaacagtttggtttcttgggatggtgaccacactagtagccttatattttatttggaggtaa

SEQ ID NO: 1885 - DNA, 360 bp, Streptococcus pneumoniae
atggtagggtcttcgagggaacacgctgcttgggctctagcggactatggttttaaggtcgtgattgcaggatctttcggtgacattcattacaataatgaactcaataatggcatgttgccaatcgttcagcctagagaggttagagagaaactagcccagctaaaaccaaccgaccaggtaactgtggacttggaacaacaaaaaatcatctcaccagttgaagaattcaccttcgagatagatagcaagtggaaacataaactcctaaatagtttggatgatatcggtattaccttgcagtatgaagagttgattgctgcttatgaaaaacaacgaccagcctactggcaggattag

SEQ ID NO: 1886 - DNA, 237 bp, Streptococcus pneumoniae
aattatgacaaaacacattcacaagaaggctacgacattttaaaaggtgagggcggatgtatcgtttgccctactaaagttggttacattatcatgaccagcaacaaggcaggacttgagcgtaagttcgcagccaaagaacgtaagcgtaacaaaccaggtgttgttctctgcggtagcatggatgaacttcgcgctttagcgcaactcaacccagaaattgaagcattctactaa

SEQ ID NO: 1887 - DNA, 267 bp, Streptococcus pneumoniae
ttggatgaagatattcttcttggttgtatccttccttggaaaccagaagcctttgaaaaactcaaagcatacggggatggccgtgaagaacttatgactgatgtacgtggtactagctgttttgttatcaagtttggaaaagcaggtgaacaattggctgccaagctttgggaagaaggtaaaatggtctacgcctcatatgcttcaatgacaaaacgattgaaactcgctatgagagcaaggtgtaatggtgtctatggtcgataa

SEQ ID NO: 1888 - DNA, 1935 bp, Streptococcus pneumoniae
ttgatgaataaaagaaaagttagtttagaagatttttataaatggtatagtctaaataaagaagagttattaaataaggcaactgttggtgaaaagtttaatgataaattaaaagaagagtttctccaggaatggcctttggataggattttaacaatgtcaatcgatgaatatgtaataggaaagggacagcaaaataagtctttatgctacgctcttgagaagggaaaatacaaaaatctatttcttggaatttctggtggctcagcttcaaaatttggtatttattggaataaaaaaacaaacaaatataaagatcaagctaataatgagatttcagagttggatcagcgattttcaaaattaaaatcagatttgtatgaaattatcaaagaaggtattcgttttaactttgaaaatcctatttttgatatgaaaagatcaacaaatgaatttattggtcgttctgctatggtgacaaaattactttgtatctatactgagggagatcctttctttggtgtaaatattaatagtcagaaagaattttggaaccactttgtttctcagacaaatcaaggtggaccttatctgcaaaatcataaaataattgaactggtgtccaaaacttatcctgagttggagccatcgaaattaggaactatgctttttgagtattctaagctttttatggaaaataaggaagacaatagtacaatggattcatcaaacaattttagtcatcaattaactcaatctctattaaagtctccaaaccttatccttcgtggtgctcctggcacaggaaagacttatcttgctaaagaaattgccaaagaattaacggatggcaacgaagatcaaatcggatttgtacaatttcacccatcatatgattatacggattttgtagaaggtttaagaccagtatcaaatggggatggagctattgagtttaggctacaggacggtatttttaaagatttttgtcagaaagcaaaagaaacccaattgattggaggacaagataattttgatgaggcttgggattcttacttagaatatataaatgttgctgaagaaaaagaatatataacaaaaacatcttacttatctgttaatagtagacaaaatttgtcagtaaattatgatagtggtgttccaggatggtcactacctagcaaatatgtttacgagttgtataaagataaaaattataataagcaagaatactacaaaagtggtggaaaaactgtcctagaaacattgagaaagagatttggtttgaaagactatgtttccccaacagaaattgatactgataagaaattcgttttcatcatcgatgaaatcaatcgtggggagatttctaagatttttggcgaactctttttctctatcgaccctggctatcgtggtgaaaaaggaagtgtttctacccaatatgcaaatctacacgaaactgatgaaaagttctatatccccgaaaatgtttacatcatcggaactatgaatgatattgatcgttcagtggatacctttgattttgctatgcgtcgtcgttttcgttttgttgaagttactgccgagggtcaagttggcatgttggataaagagctgaatatccatgcagaagaagcaaaaattcgtctaagaaacttgaacgctgctatcgaaaatgttcaggaattaaacagtcattatcatattggaccaagttattttcttaagttgaaggatgtagattttgactatgaattactctggtccgattatattaagcctctcctagaagactacttgcgaggttcttatgatgaggttgaaactttggaaactttgaaaaaagcatttgaactgacaaataatgagcaaaaagatcaggcagtagctgatgacaatgaaagcgatgaaaacgatgatgcggattactga

SEQ ID NO: 1889 - DNA, 1344 bp, Streptococcus pneumoniae
atgacaatgaaagcgatgaaaacgatgatgcggattactgataatcaacacaagattattaaagaaaaatttgttgaagaatatcctaaactaagcaatcttcttttagacagaaccttggaaagtctatcccaagatgaacgtattttcatttttccaaatgatttgactcatactccagatttggataaaaaacaaaagattttggaaacgatcaatcaggaaatcaagacaggaaatgtgattggttttcttggatatggtcaggaaagattaacgatttcctcacgattttctgatgagagtaatgaccattttttgcattatctcttaaacaaggttcttcatatcaatctcactagtttagatgttgctttgtctcgtgaagagaggctttatcaacttttgatgtatctcttccccaagtatctacaagctgctattcgaaaaggtctttataaggaatatcatcgattttctcataacgacagtcatgttaagggagtgattgatgtaagaaaccatctcaagaaaaatcttcctttcacgggaaatattgcctacacaacgagagagttcacctatgataatcccctcatgcagttggtccgtcacactattgaatacattaagaatcagaaaagcattggtcaaggggtactagataatctctcaactagtcgtgaaaacgtatctgaaatcgtgcgtgtaacgccctcttataaactagctgatcgtgctaagattattcggggaaatcaatctaaacctatacgtcatgcatactttcacgagtacagaaatttacaagaactttgtctgatgatcctaaaccaagaaaagcacggtttagggtatcaagatcaaaaaatctatggtattctctttgatgttgcctggctttgggaagagtatgtttacaccttgttgccaaaaggttttgtacatcccagaaataaggataagacggatggaatttcagtattttctgttgggaaacgaaaagtatatccagatttttatgacagagaacgaaagattgttctagatgcaaaatataaaaaactggaattgactgaaaaaggaatcaaccgtgaggacttattccagctgatttcctattcttatattttaaaagctgagaaggctggactgatttttcctagtatggagcagtcagtaaatagtgaaataggaaaagtagctggctatggagctcaattgaagaagtggtctattcgaatccctcagaatgcctcatcctatagtgcattttgtaaaatgatggaaaattcagaagaaaattttaaagcgattattgatgaagaagtggggagaaaataa

SEQ ID NO: 1890 - DNA, 987 bp, Streptococcus pneumoniae
atgttaaatgaatttccaatttttgattacgaagatattcaattgattccaaataaatgtgtcattaaaagccgtgcagaagcggatacaagtgtcactttaggaaatcacacctttaaactacctgttgtgccagcgaatatgcagacgattttggatgaaaatgtagcagagcaactggctaaaggtggttacttctacattatgcaccgttttgatgaggcaggacgcattccttttattaaacgcatgcacgatcaagggctcattgcttctatctctgtcggtgttaaggactatgagtatgatttcgttagccagctcaagactgatgctcctgagtatatcactattgatattgctcatggtcatgcggatagcgtgatttctatgattcaacacatcaagaaagaattgccagatacctttgtcattgctggaaatgtgggaacaccagaagctgtgcgtgaattggaaaatgctggtgcggatgctactaaggtcggaatcggtcctggtaaggtttgtatcaccaaggttaagactggttttggtacaggtggttggcagttggctgctctacgctggtgtgccaaggctgcgcgtaaaccgattatcgctgatggaggaattcgtactcacggtgatattgccaagtctatccgcttcggtgctagcatgatcatgattggttccctctttgcaggacacattgaaagtccagggaaaacgattgaagtcgatggtgaacagttcaaagaatattatggttcagcctcacaatatcaaaaaggtgcttacaaaaatgtggaaggcaaacgtatcttgcttcctgctaaaggtcatctgcaagacactttaactgagatggaacaagaccttcaaagtgctatttcttatgcaggtggacgtcaggttgctgaccttaaacacgttgattatgtgatcgtgaaaaactccatctggaatggggatgcttcccactaa

SEQ ID NO: 1891 - DNA, 234 bp, Streptococcus pneumoniae
cctccatcagcgataatcggtttacgcgcagccttggcacaccagcgtagagcagccaactgccaaccacctgtaccaaaaccagtcttaaccttggtgatacaaaccttaccaggaccgattccgaccttagtagcatccgcaccagcattttccaattcacgcacagcttctggtgttcccacatttccagcaatgacaaaggtatctggcaattctttcttgatgtgttga

SEQ ID NO: 1892 - DNA, 201 bp, Streptococcus pneumoniae
ttctttcataccaacctctttctaactgataatagtcctttttattatatcaaaaaaagccccctgagtcactctaaaacgggactggaaagcatttgggaattctttagacagagattctcagttttagcggcaaatttgggtcaggataaagaaaaaagccctattaaaggctttttaggatgtttacatccaccctga

SEQ ID NO: 1893 - DNA, 699 bp, Streptococcus pneumoniae
atgaaagaattacaaactgtactaaagaaccattttgcaatcgaatttacagacaaaaagttactggaaactgcctttactcatacgagttatgccaatgagcaccgcctcttaaaaatttcacacaatgaacgcttggaatttttaggagacgctgttctacagttattgatttcagaatatctgtataaaaaatatcctaaaaagcctgaaggtgacctatcaaaactccgtgctatgattgtccgtgaggagagtttagctggttttgcgcgtgattgccagtttgaccagtttatcaagttgggtaaaggggaagaaaaatctggtggtcgcaatcgtgacaccattcttggtgatgcctttgaagcctttcttggtgcccttcttttggataaggatgtggccaaggtcaaggaatttatctatcaagtcatgattcctaaggttgaagcaggcgagtttgagatgattacagactataaaacccatctccaagagttgcttcaggtcaatggtgatgtggctattcgttatcaggtgatttctgaaacagggcctgctcacgataaggtctttgatgtagaagttcttgttgaaggtaagagcatcggtcaaggccaaggtcgttctaagaaattagcagagcaggaagctgccaaaaatgccgttgagaaagggctggattcatgtatttaa

SEQ ID NO: 1894 - DNA, 2211 bp, Streptococcus pneumoniae
atgtatttaaaggaaatcgaaattcaggggttcaagtcttttgctgataagaccaaggtcgtttttgaccaaggtgtgacggcagttgttggacccaatggatctggaaagtccaatattacagaaagtctgcgttgggctttgggggagtctagtgtcaagagtctccgtgggggcaagatgccggatgtcatctttgctggaacagaaagtcgcaaaccgctcaattatgcttctgtagttgtgactctggataatcatgacggatttatcaaggatgcaggtcaagaaatcagggtggaacgccatatctatcgtagtggagatagcgaatacaagattgacggcaagaaagtccgtctgcgtgatattcatgacctcttcttggatactggattgggacgagattccttctctattatttcccaagggaaggttgaggagatttttaattccaagcctgaggaacgacgagctatttttgaagaagctgctggagttttaaaatacaagactcgcagaaaagaaaccgagagtaaactgcagcaaactcaggataatctggaccgcttagaggacattatctacgagttggataatcaaatcaagcctcttgagaagcaagctgagaatgcccgtaagtttttagacttggaaggacaacgtaaggctatttatttagacgttctggttgctcaaatcaaggaaaataaggcagaactagagtcgacagaagaagagttggctcaggttcaagaactcttgatgagttattaccaaaagcgtgaaaaattagaagaagaaaatcaaactcttaaaaagcaacgccaagatttacaggctgaaatggccaaagaccaaggcagtttgatggacttgactagtctgattagtgatttagaaagaaaattagccctatcgaaactggagtccgagcaagtggccctgaatcaacaggaggcacaagctcgtttggctgctttggaggataagagaaattcactcagcaaagaaaagtatgataaagaaagctctttagctctgttagagggaaatctagtccaaaataatcaaaaactcaatcgtttagaagctgaattgctggctttctcagacgatcctgatcagatgattgagctcttacgtgaacgctttgtagctcttttacaagaagaagcggatgtctcaaaccagttgacccgtattgagaatgagttggaaaatagtcgtcagctttctcaaaaacaagcagatcaactagaaaagctgaaagagcaattagctacagctaaagagaaggctagtcagcaaaaagacgagcttgaaactgccaaggtgcaggttcagaaattattggctgactatcaagctattgccaaggagcaagaggagcagaaaacttcctatcaagctcaacaaagtcaactctttgaccgtctggatagtctcaaaaacaagcaggccagagctcaaagtttggaaaatatcctgagaaatcatagtaacttttatgcaggtgttaagagtgttctccaagaaaaagatcgcctaggtgggattattggtgcagtcagtgagcatctgacctttgatgtttattatcaaactgccctagagattgccttaggggcaagtagccagcatatcatcgtagaagatgaagagtcggcaaccaaagctattgatttcctcaaacgaaacagagtcggtcgtgcaacctttcttcctttgaccactattaaggcgcgtacgatttctagtcagaaccaagatgctatcgctgtaagcccaggtttccttgggatggcagatgagttggtgacttttgatactagactggaagccattttcaagaacttgctagctacgacggctatctttgataccgtagaacatgcgcgtgaagctgctcgacaagttcgttatcaggttcgtatggtgacattggatgggacagaattacgcacgggtggttcctatgcgggtggtgccaatcgccaaaataacagtattttcatcaagccagaactggagcaattacaaaaagaaattgctgcagatgaagcaagcttgggttcagaagaagcggctttgaagaccttgcaagaccagatggctgcattgacagaaagattagaagccatcaaactctcaaggagagcaggcacgtattcaggagcaaggcttgtccctcgcttatcagcaaactag

SEQ ID NO: 1895 - DNA, 651 bp, Streptococcus pneumoniae
ttgtccctcgcttatcagcaaactagtcagcaagttgaagaactggaaactctttggaaactccaagaagaggaaatagatcgtctttctgagggagattggcaagcggataaggaaaaatgtcaagagagccttgctactatcgccagtgacaagcaaaatctggaagctgagattgaagaaattaagtctaataaaaacgccatccaagaacgctatcaaaatttgcaggaagaggtggcgcaagctcgcttgcttaagacaaaactgcaagggcaaaaacgttatgaagtagctgatattgagcgtttaggcaaggaattggacaatcttaatatcgaacaagaagaaattcagcgcatgctccaagaaaaagttgacaatcttgagaaggttgatacagaattgctcagtcaacaggcggaagaatccaaaactcagaaaacaaatctccaacaaggtttgattcgcaagcagtttgagttggatgatatagaaggtcaactggatgatattgccagtcacttggatcaagctcgccagcagaatgaggagtggattcgcaagcaaacacgtgctgaagccaagaaagaaaaggtcagcgagcgtgcgccatctacaaaatcaattaacagaccagtaccagattag

SEQ ID NO: 1896 - DNA, 306 bp, Streptococcus pneumoniae
atgatattgccagtcacttggatcaagctcgccagcagaatgaggagtggattcgcaagcaaacacgtgctgaagccaagaaagaaaaggtcagcgagcgtgcgccatctacaaaatcaattaacagaccagtaccagattagctatactgaagcactagaaaaggcacatgaattggaaaacctcaatctggcagagcaagaggtgcaggatttagagaaggctattcgctcattgggacctgtcaacttggaagctattgaccagtacgaagaagttcacaaccggtctggactttctaaatag

SEQ ID NO: 1897 - DNA, 588 bp, Streptococcus pneumoniae
ttgaccagtacgaagaagttcacaaccggtctggactttctaaatagtcagcgagatgatattttgtcagcgaaaaatctgctccttgaaaccattacagagatgaatgatgaggtcaaggaacgctttaaatcaacctttgaagctattcgtgagtcctttaaagtgaccttcaagcagatgtttggcggaggtcaggcagacttgatattgactgagggcgaccttttaacagctggtgtggagatttctgttcaacctccaggtaagaaaatccagtcgcttaacctcatgagtggtggtgaaaaagctctatcggctcttgccttgcttttctccattattcgtgtcaagaccattccttttgtcatcttggatgaggtggaagctgcgctggatgaagccaatgttaaacgttttggggattacctcaaccgctttgacaaggacagccagtttatcgtcgtaacccaccgtaagggaaccatggcagcggctgattccatctatggagtgaccatgcaagaatcaggtgtctcaaaaattgtttcggttaagttaaaagatttagaaagtattgaaggatga

SEQ ID NO: 1898 - DNA, 795 bp, Streptococcus pneumoniae
atgacaattaaactagtagcaacggatatggacggaaccttcctagatgggaatggacgctttgatatggatcgtctcaagtctctattggcttcctacaaggaaaaagggatttactttgcggtggcttcgggtcggggatttctgtctctggaaaaattatttgctggtgttcgtgatgacattattttcatcgcggaaaatggcagtttggtagagtatcaaggtcaggacttgtatgaagcgactatgtctcgtgacttttatctggcaacttttgaaaagctgaaaacgtcaccttatgtagatatcaataaactgctcttgacgggtaagaagggttcatatgttctagatacggttgatgagacctatttgaaagtgagtcagcattataatgaaaatatccaaaaagtagcgagtttggaagatatcacagatgacattttcaaatttacaaccaacttcacagaagaaacgctggaagctggggaagcttgggtcaatgataatgtccctggtgttaaggccatgacaactggctttgaatctattgatattgttctggactatgtcgataagggagtggccattgttgaattagttaaaaaacttggtatcacaatggatcaggtcatggcttttggagacaatcttaatgacttacatatgatgcaggttgtgggacatcctgtagctcctgaaaatgcacgacctgaaattttagaattagcaaagactgtgattggtcaccataaggaccagtcggttatagcttgtatggagggcttataa

SEQ ID NO: 1899 - DNA, 819 bp, Streptococcus pneumoniae
atggcagatataaaattgattgcattggacttggacgggaccttgctgactactgataaaaggctgacggatcgtaccaaggaaaccttgaaagctgcgcgtgatcgtggtatcaaggtcgtattgacaactggtcgtcccttaaaagctatggatttctttctccatgagctagggactgacggtcaggaagaagagtataccattacttttaatggtggtttggttcagaaaaatacaggtgaaatccttgataagacagtcttttcatatgatgatgtggcacgcttgtatgaagaaacagagaaattatcactgcctcttgacgctatctcagaaggaactgtttatcaaattcaatcggaccaagaaagtctttatgccaaattcaatccagctttgacttttgttccagttgattttgaagacctgtctaatcaaatgacctacaacaaatgcgtgaccgcctttgctcaagaacccttggatgcagccattcagaagatttctccagaattgtttgaccaatatgaaatctttaaatcacgtgaaatgttgctagaatggtcaccaaagaatgttcataaagcaacaggtttggcaaaactaattagccatcttggaattgatcaaagtcaagtgatggcctgtggtgacgaggccaatgacctctctatgattgaatgggcagggctcggtgttgccatgcaaaacgctgttcctgaagtcaaggcagtcgcaaatgtggtaactcctatgaccaatgatgaagaagctgtcgcctgggctatcgaagaatatgtgctaaaggagaactaa

SEQ ID NO: 1900 - DNA, 1290 bp, Streptococcus pneumoniae
atgggattatttgaccgtctattcggaaaaaaagaagaacctaaaatcgaagaagttgtaaaagaagctctggaaaatcttgatttgtctgaagatattgagcctgccttcacagaagctgaggaagtttctcaagaagaagcagaggttgaaagttctgaagaatctgtgttccaagaagaggatagtcaagacacagtcgaagaaaatctggatttagagccagttgtagaggtttctcaagaagaagtagaagaatttccaaactcacaagaagtcacagaggaagagaagcttgagcacgaaggaactgtagaagaaaataattttgaagtgcttgaaccagaagctcctcaaacagaagaaactgttcaggaaaaatatgaccgcagtcttaagaaaactcgcacaggtttcggtgcccgcttgaatgccttctttgctaacttccgctctgttgacgaagaatttttcgaggaactggaagaactgttgattatgagtgatgttggtgtccaagtcgcttctaacttaacggaggaactacgttacgaagccaagcttgaaaatgccaagaaacctgatgcacttcgtcgtgtcatcattgagaaattggttgagctttatgaaaaggatggtagctacgatgaaagcatccacttccaagataacttgacagttatgctctttgttggtgtgaatggtgttgggaaaacaacttctatcggaaaactagcccaccgctacaaacgagctggtaagaaggtcatgctggttgcagcagataccttccgtgcgggtgcagtagctcagctagctgaatggggccgacgagtagatgttccagtagtaactggacctgaaaaagctgatccagccagcgtggtctttgatggtatggaacgtgccgtggctgaaggtatcgatattctcatgattgatactgctggtcgtctgcaaaataaggataaccttatggctgagttggaaaagattggtcgtattatcaaacgtgttgtgccagaagcaccacatgaaaccttcttggcacttgatgcatcaacaggtcaaaatgccctagtacaggccaaagaattttcgaaaatcacacctttaacgggaattgttttgactaagattgatggaactgctcgaggaggtgtggttctagccattcgtgaagaactcaatattcctgtaaaattgattggttttggtgaaaaaatcgatgatattggagagtttaactcagaaaacttcatgaaaggtctcttggaaggtttaatctaa

SEQ ID NO: 1901 - DNA, 1257 bp, Streptococcus pneumoniae; identical to SEQ ID NO: 293

SEQ ID NO: 1902 - DNA, 255 bp, Streptococcus pneumoniae
gctcaggctgaaacagtctcccagactgtttcactcccgaatgctaaaatcgttcttgatcgctttcacattgtacaacatcttagccgtgctatgagtcgtgtgcgtgtccaaatcatgaatcagtttcatcgaaaatcccatgaatacaaggctatcaagcgctactggaaactcattcaacaggatagccgtaaactgagtgataaacgtttttatcgtcctacttttcgtatgcacttaaccaataaatag

SEQ ID NO: 1903 - DNA, 327 bp, Streptococcus pneumoniae
aacagtccggggagtgactgtttcaatcgggagatggagatgagcttcattgcgcaagattttaacaatctcaatatcatcactgttcttgagggaagaacacaagctatcattcgaaatcactttcttcgctacgatagagctgtccgatgtcgcgtcaaaattattactatggatatgtttagcccttactatgacttggctaaacagcttcgctttcaaatttctaggctcaggctgaaacagtctcccagactgtttcactcccgaatgctaaaatcgttcttgatcgctttcacattgtacaacatcttagccgtgctatga

SEQ ID NO: 1904 - DNA, 519 bp, Streptococcus pneumoniae
atggaacaattacattttatcacaaaattactagacattaaagaccctaatatccagattttagacatcatcaataaggatacacacaaggaaatcatcgccaaactggactatgaagctccatcttgtcctgagtgcggaagtcaaatgaagaaatatgactttcaaaaaccttctaaaattccttatcttgaaacgattggtatgccttctagaattctccttagaaaacgccgtttcaagtgctatcactgttcaaaaatgatggttgctgagactcccctggtaaagaaaaatcaccaaatccctcgtatcatcaaccaaaaaattgctcaaaagttaattgaaaagatttctatgactgatattgcccatcagctttccatctcaacttcaactgtcattcgcaagctcaatgattctcactttgagcatgatttttcgcgtcttcctgagattatgtcctgggacgttgaaacagtccggggagtgactgtttcaatcgggagatggagatga

SEQ ID NO: 1905 - DNA, 1488 bp, Streptococcus pneumoniae
atgtcatctaaggttattgttacaattttcggtgcgagtggagacctggctaaacgcaagctctacccttccctttttagactatatcaatccggcaatctttccaagcactttgccgttattggaactgcccgtagaccttggagtaaggaatattttgaatctgtagttgtcgagtccatccttgatttggcagatagtaccgagcaagcccaagaatttgctagccacttctactatcaaagccatgatgtcaatgattcggaacattatattgctttgcgtcaattacaagctgagcttaatgaaaaataccaagctgaacacaataagctcttcttcttgtctatggcacctcagttctttggaaccattgccaaacacctcaaatctgaaaacattgtcgatggcaaaggttttgagcgcttgatcgttgaaaaaccatttggtacagattacgcaactgcaaacaagttgaatgacgaactcctagcaacatttgacgaagaacaaattttccgtatcgaccattatcttggtaaggaaatgatccaaagcatctttgcagttcgctttgcaaacttgatttttgaaaacgtttggaacaaggattttatcgacaatgttcaaattacctttgcggagcgcttgggtgtagaagaacgtggtggctactatgaccaatccggtgccctccgtgacatggtccaaaaccacactctacaacttctttcgctcctcgccatggacaaaccagcaagcttcacaaaagacgagattcgtgctgaaaagattaaggtctttaaaaacctctatcatccaactgatgaagaactcaaagaacactttatccgtgggcaataccgctctggtaagattgatggcatgaaatacatctcttatcgtagcgagccaaatgtgaatccagaatcaacaactgaaacctttacatctggtgccttctttgtagacagcgatcgattccgtggtgttcctttctttttccgtacaggtaaacgactgactgaaaaaggaactcatgtcaacatcgtttttaaacaaatggattctatctttggagaaccacttgctccaaatattttgaccatctatattcaaccaacagaaggcttctctcttagcctaaatgggaagcaagtaggagaagaatttaacttggctcctaactcacttgattaccgtacagatgcgactgcaactggtgcttctccagaaccatacgagaaattgatttatgatgtcctaaataacaactcaactaactttagccactgggatgaagttggtgcatcatggaagttgattgaccgtattgaagagctctgggctgaaaatggtgccccacttcatgactataaagctggaagcatgggacctcaagccagctttgacctacttgaaaaattcggtgccaaatggacttggcaaccagatatcgcctatcgtcaagatggtcgtttcgaataa

SEQ ID NO: 1906 - DNA, 741 bp, Streptococcus pneumoniae
atggcaaaattaaaaattgatgtaaatgatttacacaagcactatggaaaaaatgaagtcctaaaaggaattacgactaagttctatgaaggagatgttgtttgtatcatcggtccttcaggttctggtaagtcaactttcctccgtagcctcaatcttttagaagaagtcactagcggtcacatcactgtgaacggctatgatttaactgaaaaaacaaccaatgttgaccacgtccgtgaaaatatcggcatggtattccaacacttcaacctcttccctcatatgtctgtattggacaacatcacctttgctcctattgagcacaagttgatgactaaggaagaagctgagaaattgggaatggagttgcttgaaaaggttggactagcagataaagctaatgccaatccagatagcctatcaggtggtcaaaaacaacgtgtggccatagctcgtggcctagcaatgaatccagacatcatgctcttcgatgaaccaacttctgcccttgaccctgagatggttggagacgtacttaacgttatgaaggaattggctgagcaaggcatgaccatgattatcgtaacccatgagatgggatttgctcgtcaggttgccaaccgcgttatctttactgcagatggcgagttccttgaagacggaacacctgaccaaatctttgataacccacaacaccctcgtctgaaagagttcttagataaggtcttaaacgtctaa

SEQ ID NO: 1907 - DNA, 1479 bp, Streptococcus pneumoniae
atgaaaaaagatggtagtcttgataaaattatcaagaaatggactgcttcatcatcttcagcagtgccaactacaactactctcgcaggattaaaagctattcctgttaaggctaaatatatcattgccagcgattcttcttttgcaccttttgttttccaaaattcaagcaaccaatacactggtattgatatggaattgattaaggcaatcgctaaagaccaaggttttgaaattgaaatcaccaaccctggttttgatgctgctatcagtgctgtccaagctggtcaagccgatggtatcatcgctggtatgtctgtcacagatgctcgtaaggcaacttttgacttctcagaatcatactacactgctaataccattcttggtgtcaaagaatcaagcaatattgcttcttatgaagatctaaaaggaaagacagtcggtgttaaaaacggaactgcttctcaaaccttcctaacagaaaatcaaagcaaatacggctacaaaatcaaaacctttgctgatggttcttcaatgtatgacagtttaaacactggtgccattgatgccgttatggatgatgaacctgttctcaaatattctatcagccaaggtcaaaaattgaaaactccaatctctggaactccaatcggtgaaacagcctttgccgttaaaaaaggagcaaatccagaactgattgaaatgttcaacaacggacttgcaaaccttaaagcaaacggtgaattccaaaagattcttgacaaatacctagctagcgaatcttcaactgcttcaacaagtactgttgacgaaacaacgctctggggcttgcttcaaaacaactacaaacaactccttagcggtcttggtatcactcttgctctagctcttatctcatttgctattgccattgtcatcggaattatcttcggtatgtttagcgttagcccatacaaatctcttcgcgtcatctctgagattttcgttgacgttattcgtggtattccattgatgattcttgcagccttcatcttctggggaattccaaacttcatcgagtctatcacaggccaacaaagcccaattaacgactttgtagctggaaccattgccctctcactcaatgcggctgcttatatcgctgaaatcgttcgtggtggtattcaggccgttccagttggccaaatggaagccagccgaagcttgggtatctcttatggaaaaaccatgcgtaagattatcttgccacaagcaactaaattgatgttgccaaactttgtcaaccaattcgttatcgctcttaaagatacaactatcgtatctgctatcggtttggttgaactcttccaaactggtaagattatcattgctcgtaactaccaaagtttcaagatgtatgcaatccttgctatcttctatcttgtaattatcacacttttgactagactagcgaaacgcttagaaaagaggattcgttaa

SEQ ID NO: 1908 - DNA, 711 bp, Streptococcus pneumoniae
atgaagaataaaagaatatttaaagacttccaagcttcaaaaatgaatttaaacatttacacaagccccttgttagcctttgtttttgtcttcataggagagtttgtggcttatactttatatggtattagtttgttagctctcatcggacttgctagaaattttggagaggctggtcaaaatcttgcaagctacttgcagaccttgcatcagagcttgacggataaaacaagtgactttcgtttaattttaggattactggcctttggttttattcttaacactgtgttcagatggacaagaaaagttgagaaaagacctattcgaaccttgggattttatatagagaatttcctcagcaatcttctgaaaggatttagtctaggcctggcactttttcttctgaccttgttaggtttagtggtcttaggtcaatatcgtttggaatccattcacttgaatccttattctcttgcctttgtcgtctttactatcccattttggattttacaggggacagcagaagaagtggtggcccgtgcttggctacttcctcaattggcctcaagaaccaatctaaaactagctattcttatatctagcctgttctttaccctgcttcatatgggcaattctggcctcacccctctatctctagtaaatctctttttattcggagtctgccatggctctttaccttctcaaaactga

SEQ ID NO: 1909 - DNA, 270 bp, Streptococcus pneumoniae
atggctctttaccttctcaaaactgatacagtttggggtgttgcaggtattcatggtgcttggaattttgctcagggtaatctctttgggattttagttagtggtcaaccgtcaggaacgtctctgatgacctttttaccacaaggcaatcaagattggctatcaggtggttcttttggcatagaaggttccattatgacaagtctggtattactactgctgattgtctatcttgctaataaattaaagaaagaaaatgaaaggatgtga

SEQ ID NO: 1910 - DNA, 1989 bp, Streptococcus pneumoniae
atgatcaatcacattacagataatcaatttaaactagtatcaaaatatcaaccatcaggagatcaaccccaagctatcgagcagttggtggataacattgaggggggagaaaaagctcagattctgatgggggcgactggaacagggaagacctatactatgagtcaggtcatttctaaagtcaataaaccaactctggttattgcccacaataaaactctggctggtcagctctatggggagtttaaggaatttttccctgaaaatgcagttgagtatttcgtatcctactatgattattaccagccagaggcctatgtcccttctagcgatacctatattgagaaggatagttctgtcaatgacgagattgacaagcttcgccactcagctacctcagcccttttggagcgtaatgatgttattgtcgtggcctcagtctcttgtatctatggtttgggttcgcccaaggaatacgctgatagtgtcgttagtctccgtcctggtctagagatttctcgtgataaactcttgaatgacttggtcgatattcagtttgaacgcaatgatattgatttccaacgcggaagatttcgcgttcgtggggatgtggtagagattttcccagcttcccgagatgaacatgcctttcgagtagaattttttggagacgaaattgaccgtattcgtgaagttgaggctctgacaggtcaggtgttgggagaagtggatcatttagcgattttcccagcgacacactttgtgaccaatgacgaccacatggaagttgccattgcaaagattcaggccgagttggaagaacaattagctgtctttgaaaaggaaggtaaactgcttgaagcccagcgtttgaaacagcggacagagtatgatatcgaaatgttgcgtgagatgggctataccaatggggttgaaaattattctcgccacatggatggacggagcgaaggagagcctccttatacgcttctcgacttcttcccagatgatttcttgattatgattgacgagagtcatatgaccatagggcaaatcaagggcatgtacaatggagaccgttcgcgtaaagaaatgctggttaattatggtttccgtttgccgtctgctttggacaatcgtcctctacgtcgggaggagtttgagagtcacgttcatcagattgtttacgtttcagcgacacctggtgactatgaaaatgaacagaccgagacagtgattgagcaaatcattcgtccaacgggactcttggatccagaggtggaagtccgtccgactatgggacagattgatgacctcttgggtgaaatcaatgcccgcgttgaaaaaaatgagcgtacctttatcacaactttgaccaagaaaatggcagaggacttgaccgactacttcaaggaaatgggtatcaaggtcaagtacatgcactcggatatcaagaccttggaacggacggagattatccgtgacctgcgcttgggtgtctttgatgtcttggtcggaattaacctgctccgtgaaggaattgacgttcctgaagtgagcctcgtagctattctcgatgctgacaaggaaggtttccttcgcaacgaacgtggactcatccagactattggacgtgctgctcgtaacagtgaaggccatgtcatcatgtatgcagacacggttacccagtctatgcaacgtgctatcgatgaaactgcccgccgtcggaaaattcagatggcctataatgaagagcatggtatcgtaccacagacaatcaagaaagaaatccgtgacctgattgccgtgaccaaggcagttgctaaggaagaggacaaggaagtcgacatcaatagcctcaacaaacaagagcgcaaagaactcgtcaagaaactagaaaaacaaatgcaagaagccgtcgaagtgcttgactttgaactggcggctcagatccgtgatatgatgttggaagtcaaggccttggattag

SEQ ID NO: 1911 - DNA, 564 bp, Streptococcus pneumoniae
atgatttatttaagaaagttaaagagagaagatttgatgtctttatgggaaatggcttattcacaacttaatccagtttggaaacagtatgatgctccctattatgatgattatcagtatttttcaaattttaaagaattcgaactacaaaaatcagaatccattttaagcaactcaaatcgccttggtatttttgttgatgataaactagttgggactgtttcgcgttattgggtatgtaaacaaacaagatggatggaattgggaattggtatttatgataaaaaattctggaacactggtattgggaaagttgctatgttgcagtggatagataggacgtttcaggattacttggagttggagcatctgggtttgacaacttggtcaggaaatcttggtatgatgaaacttgctgaaaaattaagaatgaaaaaagaagctcatattccaaaagttcgttattatcaaggtaaatattttgatagtattaaatatggtattttgagagaagactgggagaaaatgaatgacggttattatcaaatcaatggaaactcctga

SEQ ID NO: 1912 - DNA, 390 bp, Streptococcus pneumoniae
atgacattagaaagatgtcgattctttagtcaaaagtatccagaaaatacattgattgcgataggtgatctgaaggtagttggttttatcagttatggtaactttcgtgatgagactattcaagctggtgaaattattgctttatatgttttaaaagactattacggaaaaggcatagcacaaaagttaatgaaagcagctttgactgctctgaatcatttttctgaaattttcttatgggtattgaaagataacaagcgagccattgctttctatcaaaaaatgggttttacttttgatggacaagaaaagatacttgaacttggaaagcctataaaggaaaaacgaatggtattctattctaaaataattttaaaaagtagaagctaa

SEQ ID NO: 1913 - DNA, 468 bp, Streptococcus pneumoniae
atgtcccgttcccaattaacgattttaacaaatatttgtctgattgaagaccttgaaactcagtgcgtggttatgcagtaccgtgctcctgaaaccaatcgctggtctggttatgcctttcctggaggtcatgtagaaaatggtgaggcttttgcggagtctgtcattcgtgaaatttacgaagaaacaggattgactatccaaaatccgcaactggtaggtgttaaaaattggcctttggatacaggggggcgctacattgtcttttgttacaaggcgaccgagtttactggaactcttcaatcttcagacgagggagaagtttcttgggtgcaaaaagaccagattccaaacttgaatctggcctatgatatgctaccattgatggaaatgatggaagctcccgacaagtcagagtttttctaccctcgccgtacagaagacgattgggaaaagaaaatcttctag

SEQ ID NO: 1914 - DNA, 516 bp, Streptococcus pneumoniae
atgacaaaagatcgcaaacaagccctgctccaactcttgaaagaagctcctaaagcccttaatggccaaagtttggcggaacattttcatgtcacacgtcaggtcattgtgcaggacattgcaattttgagagccgatggcgctcctatcctatccaccaatcgtggctacatctataagcaaattgataccaatccttatgttcacaaacttttcaaagtgaaacatgaagttgaagaaatcggtcaggaactccttgctattgtcgataatggtgggcatgtccagaataccttgattgaccatcccgtttatggagaaattgaaaccttgcttaaactgtcttgtcgcagagatgtgcaacattttctagaacaagtcgagcattctgactttagacctctatctgaattgacagatggcatccattaccacctagtcgaagccgaaacacaacaagacctccactatatcgaggaagccttggatcagctaggttatttagtaaaagactag

SEQ ID NO: 1915 - DNA, 582 bp, Streptococcus pneumoniae
ttgtctggtttattgtaccatactagtgtatatgcagttaaaaaggagattcttgtgaatacacggaaaaagacacaatttatgacaatgacagcccttttaacggctattgcgattttgattccaattgttatgcctttcaagattgtcattccacctgcttcctatactttggggagccacatcgctatttttatagccatgttcttgtcgcccttgatggcagtttttgtcatcctagcctctagttttggatttttgatggctggctatcccatggttatcgtttttcgggctttttcccatatatcttttggtgctttaggagctctttacctacaaaaattccccgataccctagataaaccaaaatcttcctgggttttcaattttgttttggctgttgttcatgcccttgctgaagtattagcctgtgtccttttttacgcaacttcgggtaccaatgtagaaaatatgttctatgttctatttgtactagttggatttggcacaattatccatagtatggtagactatacattagcactagctgtctataaagtgcttcgaaaacgccgttaa

SEQ ID NO: 1916 - DNA, 501 bp, Streptococcus pneumoniae
atgaaaaaacgctctaatattgcacccattgctatcttttttgctaccatgctcgtgatacactttctgagctcagttatctttaacctttttccatttccaatcaaaccgaccattgttcatattcctgtcattattgccagcattatttatggtccacgagttggggttacacttggatttttgatggggctacttagcttgacggttaacacgattacgattctaccgacaagctacctcttctctcccttcgtaccaaacggaaacatctactcagctatcattgccatcgtcccacgtattttgattggtttaactccttacttagtctataaactgatgaaaaacaagactggtctgattttagctggagcccttggttccttgacaaatactatctttgtccttggaggaatcttcttcctatttggaaatgtttataatggaaatatccaacttcttctggctaaccgttatctcaacaaattcaattgctga

SEQ ID NO: 1917 - DNA, 552 bp, Streptococcus pneumoniae
atggcaaacattctcttggctgtaacgggttcaatcgcctcttataagtcggcagatttagtcagttctctaaaaaaacaaggccatcaagtcactgtcttaatgactcaggctgctacagagtttatccaacctttgacactacaggtactctcacagaatcctgtccacttggatgtcatgaaagaaccctatcctgatcaggtcaatcatatcgaacttggaaaaaaagcagatttatttatcgtggtacctgcaactgctaacactattgcaaaactagctcacggatttgcggacaacatggtaaccagtacagctctagccctaccaagtcatattcccaaactaatagctcctgctatgaatacaaaaatgtatgaccatccagtaactcagaataatctgaaaacattagaaacctacggctatcagctgattgctcctaaggaatccctactagcttgtggagaccacggacgaggagctttagctgacctcacaattattttagaaagaataaaggaaactctcgatgaaaaaacgctctaa

SEQ ID NO: 1918 - DNA, 759 bp, Streptococcus pneumoniae
atcttcgtttttaccaaaaatttatcactttcattttacttaccgcttatttttgtgtacaatagtgctatgaaaattttagttacatcgggcggtaccagtgaagctatcgatagcgtccgctctatcactaaccattctacaggtcacttggggaaaattatcacagagactttgctttctgcagggcatgaagtttgtttaattacgacaaaacgagctctgaagccagagcctcatcctaacctaagtattcgagaaattaccaataccaaggaccttctaatagaaatgcaagaacgtgttcaggattatcaggtcttgatccactcaatggctgtttctgactacactcctgtttatatgacagggcttgaggaagttcaggctagctccaatctaaaagaatttttaagcaagcagaatcatcaggccaagatttcttcaactgatgaggttcaggttttgttccttaaaaagacacccaaaatcatatccctagtcaaggaatggaatcctactattcatctgattggtttcaaactgctggttgatgttaccgaagatcatctggttgacattgcacgaaaaagtcttatcaagaatcaagcagatttaatcatcgcgaatgacctgactcaaatttcagcaaatcagcaccgagctatatttgttgagaaaaatcagcttcaaacagtccagactaaagaagaaattgcagaactcctccttgaaaaaattcaagcctatcattcttag

SEQ ID NO: 1919 - DNA, 543 bp, Streptococcus pneumoniae
atggcggagcgcacggtcgttcaagtccacaacgcgtttccagaggatacgacgttgatcaattcccagctcattcccttggtgcaagtggttgtcaatcaaggcagaaagggcattgttggcagttgtaatagcatgcatatctccagtaaagtggaggttgatgtcttccattggcagaacttgtgcatacccaccaccagcagcaccacccttgatccccatgactggaccaagagacggttcgcggatagcaatcatggttttcttgccaatcttgttcaaggcatccgcaagaccaatggtaagcgtcgactttccttcacctgcaggtgttgggttgatggcagtaaccaagatcaatttaccgactggattgctctcaactgcccgaattttatcaaagctgagtttagccttgtactttccgtacaactccaaatcgtcgtaagaaataccaagtttctctacaacatcaacaattggcttcaactcaatactctgtgcgatttcaatatctgttttcattcaaaattcctctaa

SEQ ID NO: 1920 - DNA, 1671 bp, Streptococcus pneumoniae
atgaaaacagatattgaaatcgcacagagtattgagttgaagccaattgttgatgttgtagagaaacttggtatttcttacgacgatttggagttgtacggaaagtacaaggctaaactcagctttgataaaattcgggcagttgagagcaatccagtcggtaaattgatcttggttactgccatcaacccaacacctgcaggtgaaggaaagtcgacgcttaccattggtcttgcggatgccttgaacaagattggcaagaaaaccatgattgctatccgcgaaccgtctcttggtccagtcatggggatcaagggtggtgctgctggtggtgggtatgcacaagttctgccaatggaagacatcaacctccactttactggagatatgcatgctattacaactgccaacaatgccctttctgccttgattgacaaccacttgcaccaagggaatgagctgggaattgatcaacgtcgtatcctctggaaacgcgttgtggacttgaacgaccgtgcgctccgccatgtgactgttggtcttggtggtcctctaaacggtattccacgtgaggatggttttgatattacagttgcttcagaaatcatggcaattctttgcttggcaacggacatcgaggacttgaaacgtcgtttggcgaatatcgttattggttatcgctatgaccgtacgcctgtttctgtaggtgatttgcaggttgagggtgccttggctttgattttgaaggatgctattaagccaaacttggttcagacaatttacggtacacctgcctttgtacacggtggtccatttgccaatatcgctcatggctgtaactctgttttggcgacgacaacagcccttcacttggctgattacactgttactgaagctggttttggtgcggaccttggtgctgagaaattccttgatatcaagacaccaaacttgccaacatctccagatgcagttgttattgtcgcaacccttcgtgcccttaagatgaatggtggtgtggctaaagacgctctgactgaagaaaatgtagaggcagttcgtgcaggttttgctaacttgaaacgccacgttgaaaatatccgtaagttcggtattccagcagttgtagctattaacgaatttgtatctgatacagaagctgaaattgcagtcttaaaagaactctgtgcctcaatcgatgtaccagttgaattggctagtgtctgggctgatggagcagaaggtggagtagcacttgccgaaacagttgttaagacaattgctgaaaatccagctaactataaacgtttgtacgataatgacctttctgtccaagaaaagattgaaaaaattgtcactgaaatctatcgtggtagcaaagtgaactttgagaagaaatctcaaacacaaattgctcaaatcgttcaaaacggttgggacaaattgccaatctgtatggctaaaactcaatacagtttctcagacaatccaaatgcgcttggagcaccagaaaactttgaaattaccattcgtgaattggtaccaaaattaggtgcaggcttcatcgttgccttaactggtgatgttatgaccatgccaggtcttccaaaacgtccagcagctctcaacatggatgttgaaagcgatggaactgtactaggcttgttctag

SEQ ID NO: 1921 - DNA, 240 bp, Streptococcus pneumoniae
ttgaaattgactttaagtgagtttggaaataatatccaagctcattttttctcagactgcaagcagttcatcaataagatttatactcttcgaaaatctcttcaaactacgtcagcttcaccttgccgtaggtatatgatactgactctgtcagttctatccacaacctcaaaacagtgttttgagcaacctgcggctagcttcctagtttgctctttgattttcattgagtataagtag

SEQ ID NO: 1922 - DNA, 1176 bp, Streptococcus pneumoniae
atgttagatttgaaagaatacggtatcgtcatgtggccggaggagaaagtcatttctttccgtgagaaacttctcgcttggtatgatgaaaacaaaagagatttgccttggaggagaagtaaaaatccttatcacatctgggtatctgaaatcatgcttcagcagaccagggtggatacagttatcccttactacgaaagattcctggactggtttccaactgtcgaaagtctggcaactgcgcctgaggagagtttactgaaagcttgggagggcttgggctattattctcgagttcgcaatatgcaggctgcagcccagcagattatgactgactttggtggccaatttccaaatacctatgaaggaatttccagcttgaaagggattggaccttacacagcaggagccatttccagtattgcttttaacttgcctgagccagctgtagatggtaatgtcatgcgggtcttggcgcgtctgtttgaagtcaaccacgatattgggattccaagtaatcgaaaaatttttcaggcaatgatggagatcttgattaatccggatcgtccgggtgattttaatcaagccttgatggacttagggtctgatattgagtctcctgtaaatcccagacctgaagaaagcccagtcaaggactttagtgcggcatatcagaatggaaccatggaccgttatccaattaaatctcctaagaaaaagccggttcctatttatcttaaagccttagttgtgaaaaattctcaaggacaatttttacttgaaaaaaatgaaagcgaaaagctcttggcaggtttttggcatttcccctttatagaagttgataacttttcgcaagaagagcagtttgacctctttcatcaggttgcggaagaaagtgtgaactttggccccagtccagaagagagtttccagcaggactatgacctagatgttgattggcttgatgtttgttttgatacagtccagcatgtttttagtcatcgaaaatggcatgtacagattgtagcaggtcaggtgagtgacttccatgatttttcagatagggaagttcgttggctttcaccagaagaattcaagaattacccacttgccaaaccccaacaaaaaatctggcaggcttatgcacaagccaacttagacagtagccaagactag

SEQ ID NO: 1923 - DNA, 705 bp, Streptococcus pneumoniae
atgaaaaaaatactaattgtagatgatgagaaaccaatctcggatattatcaagtttaatatgaccaaggaaggttatgaagttgtaactgcttttaatggtcgtgaagcgctagagcaatttgaagcagagcaaccagatattattattctggatttgatgcttccagaaattgatggtttagaagttgctaagaccattcgtaagacaagcagtgtgcccattcttatgctttcagccaaagatagtgaatttgataaggttatcggtttggaacttggggcagatgactatgtaacgaaacccttctccaatcgtgagttgcaggcgcgtgttaaagctcttctgcgtcgttctcaacctatgccagtagatggtcaggaagcagatagtaaacctcaacctatccaaattggggatttagaaattgttccagacgcctacgtggctaaaaaatatggcgaagaactagacttaacccatcgtgaatttgagcttttgtatcatttagcatcgcatacaggtcaagtcatcacgcgcgaacacttgcttgagactgtctggggttatgactattttggtgatgtccgcacagttgatgtgactgtacgacgtctgcgtgagaagattgaagatacgcccagccgaccagagtatatcttgacgcgccgtggtgtagggtattacatgagaaataatgcttga

SEQ ID NO: 1924 - DNA, 1356 bp, Streptococcus pneumoniae
gaaataatgcttgatttactgaaacaaaccatttttaccagagattttatctttatcctgattttgttaggtttcatccttgttgtgaccctcttattactggaaaatagacgtgataatattcagttgaagcaaatcaatcaaaaggttaaagatttgattgcaggagattattccaaggttcttgatatgcaaggtgggtctgaaatcaccaatattaccaataatttgaatgacttgtcggaggttattcgtctcactcaggaaaatctagaacaagagagtaagaggctaaatagtattctgttttatatgacagatggggttcttgcgaccaaccgtcggggtcagattatcatgattaacgatacagccaagaagcaactggggttggttaaggaagatgttctgaatagacgcattttggaattgctcaagatagaagaaaactatgaattgcgtgatttgattacccaaagtccagaattgttgctagattcccaagatatcaatggtgaatatttgaaccttcgagttcgctttgccttgatacgtcgagagtctggctttatttcaggtttggtggctgttttgcatgatacgacggagcaggagaaggaagaacgcgaacgaagactctttgtttccaatgttagccatgagttacggactcctctgactagcgtaaaatcctatcttgaagccttggatgagggggctttgtgtgaaactgtagcaccagactttatcaaggtttctcttgatgagaccaaccgtatgatgcgcatggtgacggatctcctccatctttcacgtattgataatgctaccagtcacctagatgtggaactgattaacttcactgcttttattacctttatcctcaatcgttttgacaagatgaaaggacaggaaaaggagaaaaaatatgagttggtgagagattatcccatcaattctatctggatggaaattgatacagataagatgacgcaggttgtcgacaatattttaaataatgctattaagtattcgccagatgggggtaaaatcactgtcagaatgaagacaactgaagaccagatgattttatccatttctgaccacggtttggggattcctaagcaggatttaccacgtatctttgaccgtttctatcgtgtggatcgtgctagaagtcgtgcacaaggtggtacaggtctaggactgtctatcgctaaagaaattatcaaacaacataagggctttatttgggccaagagtgaatacggcaagggttcaacctttaccattgtgctcccttatgataaggatgcagtgaaagaagaagtatgggaggatgaagtagaagactag

SEQ ID NO: 1925 - DNA, 810 bp, Streptococcus pneumoniae
atgagtgaaataggctttaaatacagtattttagcgtcgggttccagtggaaattctttttatctggaaacctcaaaaaagaagcttttagtagatgcaggcttgtctggcaagaaaattaccagtctgctagctgaaattaaccgtaagccagaagacctggatgccatcttgattacccatgagcattcagatcatatccatggagtaggcgttttggctcgcaagtatggtatggatctttatgccaatgaaaagacctggcaagctatggaaaatagtaaatatcttggcaaggtggattcttcgcaaaagcatatttttgaaatgggtaaaaccaaaacctttggagatatcgacatcgagagttttggtgtaagccatgatgcagtcgcaccgcagttctatcgctttatgaaggatgataagagttttgtccttttgacagatacaggttatgtcagtgaccgtatggcgggcattgtcgaaaatgcggatggctatcttatcgaggccaaccatgatgtagagattttgcgatcaggttcttacgcttggcgactcaaacaacgaatcctatctgaccttggtcacctttctaacgaggacggtgctgaagctatgattcggacgctaggaaatcgtactaagaagatttaccttgggcatttatctaaggaaaacaatatcaaggaactggctcatatgaccatggtcaatcagctggctcaagctgatctgggagtcggagtagactttaaggtttatgatacctcaccagataccgcaacaccattgacagagatatag

SEQ ID NO: 1926 - DNA, 243 bp, Streptococcus pneumoniae
atgactactattacattaaaagtttctgaagctgataaaacatttatgaaagcaatggctaagtttgaaggagtttccctttcggaacttattcgcaccaaaactcttgaagccctagaagatgaatacgatgctcgtgtggcagatttagcctatcaagagtatttagaagacttggaaaaaggagttgaacccattacttgggaagaaatgatgcatgatttaggcttgaaggatgaataa

SEQ ID NO: 1927 - DNA, 264 bp, Streptococcus pneumoniae
atgaataatttgtataaattagttccaacaagacgttttatcaagcaattgaaaaaattggaccgttatacgcagaagctaattacaaactatttacaaaccaatgttttggaagacccaagacgacacggaaaggctttggttggtaatcgcgttggtcaatggcgctatagaattggtaattatcgagttatcgtacaaattgtagatgatgaattagtcgttgctactctagaagttggtcatcggagagatatttattaa

SEQ ID NO: 1928 - DNA, 774 bp, Streptococcus pneumoniae
ttgaagaaaaaatggttttttgcagattattatgacacaacaattattttacttgctttaatctctgttattctggtattacttggatttgctgaaatgattgatttggacaatccgccttatagtattattgatttagtaatctggggtgtttttgtaattgactatagttggcgcttttttacgactaaaagaaaatggcgctttattcttgaaaatatttttgatttattggctattctccctttaaatgctatttttacagtgtttcgattagggcgtatctttcgtttagctaaactaacaaaattactgaaactgactcgtttacttagaataattggacttacaggtaaattagaaagaaaaattagtagattcttacggacaaatggcctgatttatatcttgtatgttaatatctttattgttctagtagggagttcgattttatccgttgttgaagaaaaatccttctcagatagtctttggtgggctcttgtgacagtaactactgttggatatggggatattgttcctgcttccatttttgggaaatggctagcagttttactgatgcttgtcggtattggaacaatagggatgttaacaagtgccttgacgaacttttttgtaaaggataatccagatgaacagataaaacttgataaactcaaagatgaattatcgagccaaagaatattactagagaaacaatctacaaagatagaagaactacataaaatgatacaagatttgattgaaaaaacataa

SEQ ID NO: 1929 - DNA, 510 bp, Streptococcus pneumoniae
ttgatttgttcagattttattttatttctctataaaacgcatagtatcaagtttttatacctgataatatgcgttctattgtgtcaaaacttacttgatttctcctcagctcaaactttgtctcatctttatttttattatgttttttcaatcaaatcttgtatcattttatgtagttcttctatctttgtagattgtttctctagtaatattctttggctcgataattcatctttgagtttatcaagttttatctgttcatctggattatcctttacaaaaaagttcgtcaaggcacttgttaacatccctattgttccaataccgacaagcatcagtaaaactgctagccatttcccaaaaatggaagcaggaacaatatccccatatccaacagtagttactgtcacaagagcccaccaaagactatctgagaaggatttttcttcaacaacggataaaatcgaactccctactagaacaataaagatattaacatacaagatataa

SEQ ID NO: 1930 - DNA, 999 bp, Streptococcus pneumoniae
atgtttaaaacaatgacttcaactaaacaacacaaaaaagttatccttgtcggtgatggtgctgtaggttcatcttacgcttttgcacttgttaaccaaggaattgcacaagagcttggaattatcgaaattccacaattgcatgaaaaagctgttggtgatgcgcttgaccttagtcacgcccttgccttcacttcacctaaaaaaatctatgcagctcaatactctgactgtgcagacgctgaccttgttgtgatcactgcaggtgcacctcaaaaaccaggtgaaactcgtcttgaccttgtaggtaaaaaccttgctatcaacaaatcaatcgtaactcaagttgttgaatctggtttcaaaggtatcttccttgttgctgctaacccagttgacgttttgacttactcaacttggaaattctctggtttccctaaagaacgcgttatcggttcaggtacttcacttgactcagctcgtttccgtcaagcacttgctgaaaaattggatgtggatgctcgttcagtgcacgcctacatcatgggtgaacacggtgactctgagttcgctgtttggtcacacgctaacatcgctggtgtaaaccttgaagaattccttaaagacactcaaaatgttcaagaagctgaattgattgaattgttcgaaggtgttcgtgatgcagcctacacaatcatcaacaaaaaaggtgcaacatactacggtatcgcagtagcccttgctcgtatcactaaagcaatccttgacgatgaaaacgcagtacttccactttcagtattccaagaaggtcaatacggagttgagaatgtctttatcggtcaaccagctgttgttggtgcacatggtatcgttcgtccagtaaacattccattgaacgatgcagaaactcaaaaaatgcaagcatctgctaaagaattgcaagctattattgacgaagcatggaaaaatccagaattccaagaagcttctaaaaactaa

SEQ ID NO: 1931 - DNA, 948 bp, Streptococcus pneumoniae
atgcaggataaaaatttagtgaatgtcaatctgacaaaggagatgaaggcaagttttatcgactacgccatgagtgttatcgtagcgcgagctcttcctgatgttcgagatggcttaaaacctgttcaccgtcgcattctctacggaatgaatgaattgggtgtgaccccagacaaaccccataaaaaatctgctcgtattacaggggatgtcatgggtaaatatcacccacacggggattcctctatttatgaagccatggtccgtatggctcaatggtggagctaccgttacatgcttgtagatggtcatgggaattttggttccatggatggagatagtgctgccgctcaacgttataccgaggcacgtatgagcaagattgctctggaaatgcttcgtgatatcaacaaaaatacagttgatttcgttgataactatgatgccaatgaacgggaacccttggtcttgccagcgcgttttccaaaccttttggttaatggagcaactggtatcgcggttgggatggcaaccaatattccacctcataatctgggtgaaaccattgatgcagtgaagttggtcatggataatcctgaagtgactaccaaggacttgatggaagtcttgcctggaccagattttccaactggtgctcttgtcatggggaaatcaggtatccataaggcttatgaaacaggtaaaggttcgattgtcctacgttctcgtacagagattgaaacgactaagactggtcgtgagcgcatcgttgtaacagaatttccttacatggtcaataaaaccaaggtgcatgagcatattgttcgcttggttcaggaaaaacgcattgagggtatcacagcagtacgtgatgagtcaaaccgtgaaggtgttcgatttgttattgaagtcaagcgcgacgcctcagccaatgttattctcatataa

SEQ ID NO: 1932 - DNA, 357 bp, Streptococcus pneumoniae
cagaatttccttacatggtcaataaaaccaaggtgcatgagcatattgttcgcttggttcaggaaaaacgcattgagggtatcacagcagtacgtgatgagtcaaaccgtgaaggtgttcgatttgttattgaagtcaagcgcgacgcctcagccaatgttattctcatataacctcttcaaaatgacccaaatgcaaaccaattttggtttcaatatgctcgctatccaaaatggtataccgaaaattttgtctcttcgtcagattttggatgcttatatcgagcaccaaaaagagtggttgttcgtcgtacacgttttgataaggaaaaagcggaagcgcgcgctcatatcttag

SEQ ID NO: 1933 - DNA, 1521 bp, Streptococcus pneumoniae
cctcttcaaaatgacccaaatgcaaaccaattttggtttcaatatgctcgctatccaaaatggtataccgaaaattttgtctcttcgtcagattttggatgcttatatcgagcaccaaaaagagtggttgttcgtcgtacacgttttgataaggaaaaagcggaagcgcgcgctcatatcttagaaggtctcttgattgcgctagaccatatcgacgaagtgattcgtatcatccgtgctagtgaaacggatgcggaagctcaagctgagttgatgagcaagtttaagctttctgaacgtcaaagtcaagctatccttgatatgcgtcttcgtcgtttgacaggtttggaacgcgataagattcaatctgagtatgatgacctcttggctctgattgcggatttagcagatattcttgctaagcctgaacgtgtttctcaaattatcaaagacgaattggatgaagttaaacgtaaattttctgataaacgccgtacagagttgatggttggacagatcttgagtctcgaggatgaggacttgattgaagaatcggatgtcttgattaccctttctaacagaggctacattaagcgtttggatcaggacgagttcactgctcaaaaacgtgggggtcgtggtgtccaaggaacgggagtgaaagatgatgactttgttcgtgagttagtgtcaactagcacacatgatcatctgctcttcttcacaaacaagggacgtgtctatcgtcttaaaggttatgaaattcctgagtatggtcggactgccaaagggctaccagtagtcaatctcttgaaattggatgaagacgaaagtattcagacggttatcaatgttgagtctgatcgcagtgatgatgcttatctcttctttacaacccgtcacggtattgtgaagagaactagtgttaaggagtttgccaatattcgtcaaaatggtctcaaagcgctgaatttaaaggatgaagatgagttaatcaatgtcttgttggcagaaggagatatggatattatcattggtaccaagtttggttatgcagttcgctttaatcaatcagccgttcgtggtatgagccgtatcgccactggtgtgaaaggtgttaaccttcgtgaaggagacacagttgttggtgccagcttgattactgatcaagatgaggttcttattatcacagaaaaaggatatggtaagcgtacagtcgctactgaatacccaacaaaaggtcgtggtggtaagggaatgcagacagctaaaattaccgaaaaaaatggcttgctggccggtcttatgactgttcaaggggatgaggatttgatgattatcactgatacaggtgtcatgattcgaaccaatcttgccaatatttcacaaacaggacgtgcaactatgggagttaaagtaatgcgcctggatcaagatgctcagatagtgactttcacaacggttgcggtggcagaaaaagaagaagttgggacagaaaacgaaacagaaggtgaagcataa

SEQ ID NO: 1934 - DNA, 744 bp, Streptococcus pneumoniae
atgtctcaaaaaaataataaaaagaaaaacaagcgaaaaaatctgctgacaaatatcctagcaggatttctgatattactgtcactggctttgatttttaatactcaaattcgaaatattttcatagtctggaataccaataagtatcaagttagccaggtatcaaaagaaaaattagaagaaaatcaggatacagaaggcaattttgactttgattctgtcaaagctatctcttcggaagctgttctaacttctcaatggaatgctcaaaaattaccagttattgggggaattgcaattcctgaattggaaatgaatttgccgatttttaaaggacttgataatgttaatctcttctacggagctggtacaatgaaacgcgagcaagtaatgggagaaggaaattatagtctagctagtcaccatatctttggtgttgataatgctaataaaatgttattttctcctttagataatgctaaaaatggcatgaagatttatctaaccgataaaaataaagtttatacttatgaaatacgtgaagtcaaacgtgtgacaccggatcgtgttgatgaagttgatgatagagatggggtcaatgaaatcacattagtaacctgtgaagaccttgctgctacagaacgtattattgtcaaaggtgatttgaaagaaacaaaagattattcacaaacatctgatgaaatcctaacagctttcaatcaaccatataaacaattttattaa

SEQ ID NO: 1935 - DNA, 798 bp, Streptococcus pneumoniae
atggtttcttcagaatttatctcaaagattgaatttgcttgcaataagaaagaaagtctttatagtcaaagcaaatttaagtatgcgattcgttcgatgttcgcaggtgcatttttaaccttcagtactgctgcaggtgcagttggggctgacttgattaataaaattgcaccaggtagtggacgcttcctctttccattcgtttttgcttggggcttggcctacattgtttttttgaatgccgagttggtcacttcaaacatgatgttcttgactgctggtagtttcttaaaaaaaatctcttggagaaaaacagctgagattttactatactgtaccttgttcaaccttatcggagccttgatagcagggtggggctttgctcattcggcagcctatgcgaatctgacacacgatagtttcatctcaggtgttgttgagatgaagttaggccgctcaaatgaattggtcttgcttgaggcgattttggcaaatattttcgtaaatattgcgattctgtcatttattttggtcaaagatggtggtgccaaactttggcttgtgttgtcagctatttacatgtttgtattcttaacaaacgagcacattgcggcgaactttgcttctttcgcgattgtgaaattcagtgttgctgcggattcaattgccaacttcggtgttggaaatatgcttcgccactggggtgtgactttcatcggaaactttatcggaggaggcctcttgatgggtcttccatatgccttcctcaataaaaacgaagatacttatgtagattaa

SEQ ID NO: 1936 - DNA, 1116 bp, Streptococcus pneumoniae
ttgaggaaaccagggaacatttatactcgtatcaccaatcctacaacagctgcccttgaaggtggtgttgaagcgctagcaacagcatcaggtatgactgcagtgacttatacgattttggcgcttgcccatgctggtgagcatgtagtggctgcttcgactatttacggtggaaccttcaatcttttgaaagaaccccttcctcgttatggtatcacaacaacctttgtcgatgttgataatttggaggaagtagaagcagctatcaaagacaataccaagcttgtcttgattgaaaccttgggtaaccccttgattaatattccagacctggaaaaactggcagagattgctcataaacatcaaatcccacttgtgtcagacaatacttttgcaacaccttatttgattaacgtcttctctcatggcgttgacattgccattcactctgcgactaagtttatcggtgggcatggtacaactattggaggaataattgtcgatagtggtcgttttgactggacggcttcagggaaattccctcaatttgttgacgagagtccaagctgccacaatttgagctatactcatgatgtgggtgcagcagcctttattatagctgttcgagttcaattgcgtcgtgatacaggtgcagccttgtcaccattcaatgctttcctcttgctacaaagacttgaaaccctttcacttcgtgtggaacgccatgtacaaaatgctgagacaattgttgattttcttgtcaaccatcctaaggtagaaaaggtaaattatccaaaacttgcagatagtccttattatgccttggctgagaaatacttgccaaaaggtgtcggttcaatctttaccttccacgtcaaaggtgacgaggaggaagcacgcaaggtcattgataatttagaaatcttttctgaccttgcaaacgcggcagatgctaaatcgcttgttgtccatccagcaacaatcactcacggtcaattgtcagaaaaagacctagaagcagcaggtgtcacaccaaatcaaatccacttgtctatcggtcttgaaaatgtagaagatttgattgaagacttacgcttggccttggaaaaaatttaa

SEQ ID NO: 1937 - DNA, 1275 bp, Streptococcus pneumoniae
atgaacgaaatcaaatgtcccaactgtggggaagtctttacagtaaatgaaagccagtatgctgaacttttgtcccaagtgagaacggcagagtttgataaggaactacacgataggatgaggcaggaactggccttggctgagcaaaaggctatgaatgagcaacagactaaactggctcagaaggatcaagaaattgcgcaattgcagagtcaaatccaaaactttgatacagaaaaagaattggccaagaaagaagttgaacagacaagccatcaggccttattggctaaggacaaggaagtacaggccttggaaaaccagttggcgaccttgcgtttggagcatgaaaatcaattgcaaaagaccctttctgacctagaaaaagaacgcaatcaggtcaaaaatcagctcctactgcaagaaaaggaaaatgagttgtctttggcttctgttaagcaaaactacgaagcccagctcaaagcagccagtgaacaagtcgagttttataagaattttaaggctcaacaatctacaaaagcgattggggaaagcctagaacagtatgcagagagtgagtttaacaaggttcgtagtttcgcctttccaaatgcttactttgagaaggataacaaggtctcttcgcgtgggtctaaaggggactttatcttccgtgagtgtgatgaaaatggagttgaaatcatttctatcatgtttgagatgaaaaacgaagcggacggaacagagaagaagcacaagaatgcagatttttacaaggaattggacaaggaccgtcgggagaagaactgtgagtatgccgttttggtgaccatgcttgaggctgataatgactactttaacacagggattgttgacgtcagtcacgagtatgaaaaaatgtatgttgttcgtcctcaattctttatccaattgattggtctcttacgtaatgcggcgctaaattccctaaaatacaagcaggagttggccttggttcgcgagcaaaatattgacattacgcattttgaggaagacttggatgcctttaagctagcttttgctaagaactataattcagcttcgactaactttggaaaagctattgatgaaatcgacaaggccatcaaacgcatggaagaggttaagaaattcctgactacatctgaaaaccaactccgtctagctaacaacaaattggaagatgtctctgttaaaaaattgacccggaaaaatccaacaatgaaagcgaagttcgaagcactgaagggggagtag

SEQ ID NO: 1938 - DNA, 879 bp, Streptococcus pneumoniae
atgaacggtattatcaacttaaaaaaagaagcaggaatgacctcgcatgatgcggtttttaaactgcgtaagattttgggaaccaagaaaattggtcatggcggaaccttggatccggatgtggtgggtgttttgccgattgcggttggcaaggcgacacgcatggtcgagtttatgcaggacgagggtaagatctatgagggggaaatcactctgggttattccacgacgactgaggatgctagtggggaagtggtcgcagaaacccctgttttgtctcccttggatgaaaagcttgttgatgaagcgattgctagcttgactgggcctattacccagattccccctatgtattcggcagttaaggttaatggtcgcaagctctatgagtatgcgcgtgctggtcaggaagtggagcgtccagaacgtcaggtgaccatttatcaatttgagcgaacaagtccgatttcttatgatggccaacttgcccgattcacttttcgtgtaaaatgcagtaaagggacttacatccgtactttgtcagttgatttgggtgaaaagcttggttatgcggctcatatgtcccatttgactcgtactagtgctgctggcttacaattagaagacgctctttccttggaggaaattgctgaaaaagtagaggctgggcaattagattttctccatcctttagagattgggacaggtgaccttgtcaaagttttcctaactccagaagaggctacagaagttcgctttggtcgttttattgagctagaccaaacggacaaagaactggctgcctttgaagatgataaattgttagccattctagaaaaacggggcaatctctataagccaaggaaggtttttagctag

SEQ ID NO: 1939 - DNA, 303 bp, Streptococcus pneumoniae
atgatgcgaaatgagtttcgagaaagggtggagcaacttcttcaacaaaaagaaataaatgaaaatagtgagttgagtcacctgtttcgtcttgctatacaaaatttagacagaaatgaaaaataccaatcggtcatggccaatttgagtcaagggttgtcactttacctcatgacgcatcattaccaggcacctaagtctgtcattgattttggtttatggattgccaaagctcctagccaggaaagagggagactggctttcttgcagatgcttgctcaaaccctacagggctttcgttaa

SEQ ID NO: 1940 - DNA, 717 bp, Streptococcus pneumoniae
  unsure (51): n at each above location is unknown.
gtgttttttgctgatgagactataaattttgtaaaaaatgtgataaaatanacgacggataaaataacggaagatagcatgcaaaataaaccaatcattattggagtgacaggtggttctggtggtggtaaaaccagtgtttcaacaaccattttatcgcattttcctgatgaaaagatttccatgattgagcatgattcatactacaaggatcagtctcatttgacctttgaagagcgtgtcaaaaccaactatgaccatccttttgcctttgatacagacttgatgatcgagcagattaaggaattgttggcagggcgtccggtggacatcccgacctacgactatacagagcatacacggagtagcaagacctatcgtcaggagcctcaagatgtctttatcgttgagggcattttggtcttggaggacaagcgtctgcgcgatttgatggatatcaagatttttgtggatacggatgacgatgtgcgcattattcgtcgtatcaagcgtgatatggaggagcgtggccgtagccttgatagcgttattaaccagtacttaggtgtggtcaaaccaatgtaccaccagtttatcgagtcaactaagcgttatgctgatatcgtcattcctgaaggggttagcaataccgtggctatcgacctgttgacgaccaagattgcaaagattttggaagaagctcgaaacagcaaataa

SEQ ID NO: 1941 - DNA, 1341 bp, Streptococcus pneumoniae
atggaaaagtatttatcggtaacaactttgaccaagtatctgaaaatgaaattcgataaagacccatacttggaacgggtctatttaactggtcaagtttccaactttcgtaaacgacctactcaccaatatttctccctaaaggatgaccatgcagttattcaagcgaccatctggtctgggatttatcagaaattagggtttgacctggaagaaggaatgaagatcaatgtgattgggcgtgtacaggtctatgaaccaagtggtagctactccatcatcattgaaaaagctgagcctgatggggttggggcgcttgcgattcagtttgaacaacttaagaaaaaattgacagaagaaggcctgtttcaagaacgcttcaagcaagctctaccccaattttctaagagaattggggtagtaaccagccgtagtggagccgttattcgagatattatcacgaccgtcagcaggcgattcccaggtgttgacatccttctttatccgaccaaggttcaaggtgaaggggctgcggaggaaattgctagaaatattgcgcgtgctaatcaatgggacgatttggatttgctcattattggtcgtggaggtggttctattgaggatctctgggcctttaacgaagaaattgtggtacgagctatttttgaatctcgtttgccagttatctctagtgtggggcatgagacggatgtgaccttggcagattttgtggcagatcgacgcgctgcaacgccaacagcggcggctgaactggcaacacctgtgaccaagttggatgtattagctcatttgcaaaatcaggaaaaacggatggtaacggcagtccgaaatgttctatctaagaaacaagaggctttgaaaaaatgcagtcagtctgttatctttagacaacctgagcgcttgtatgacggttatttgcaacgcttggaccaactgcaactgcgtttgaaacaaagtttgcgaactcggatttctgataacaaacaattagttcaagcaagaactcatcaattagtacaattatcacctgttaccaaaatccaacgctatcaagaccgtttaggacagttggacaagctcttaggtagcaaaatggcgttagtttatgacgccaaggttgctgaggtcaagcgactttcggaagctttgctcatgttggatactagccgaatcgtggcgcgtggttatgctattgtcaaaaaagaagagtccgttgtagattcggttgagagtttgaagagaaaagaccaagtaacgcttttgatgcgagatggtcaagtagaattagaggttaaagatgtcaaaacaaaagaaatttga

SEQ ID NO: 1942 - DNA, 213 bp, Streptococcus pneumoniae
atgtcaaaacaaaagaaatttgaggaaaatctagcagaactggaaaccattgtccaaagtttggaaaatggtgaaattgctctggaagatgcgattactgcctttcaaaagggcatggtcttgtcaaaagagctccaagctacgctggacaaggctgaaaagaccttggtcaaggtcatgcaagaagacggaacagaaagtgattttgaatga

SEQ ID NO: 1943 - DNA, 876 bp, Streptococcus pneumoniae
atgaaaaagcaagaaaaattagctcttgtcgagtcggctttggaagatttttatggagaccagcagtttgcctctagtttacgggagtctgttctctattctattcatgctggtggcaagcgtattcggccttttctcttgttagaagttctggaagccttgcaggttaccatcaaacctgctcacgcgcaggtagctactgccttggagatgattcatacagggagcttgattcacgatgaccttcctgctatggatgatgacgattatcgaagagggcggttaaccaatcacaagaaattcggtgaagctatggccattttggctggagatgccttattcttagactcatatgccttgattgcgcaggcagatttgccaagtcagattaaggtggacttgattgccaacttatcccttgcttcaggtagtctgggtatggtggcagggcaagttttggatatggagggcgaacaccagcacttgtctttggaagaacttcagactattcatgccaataagactgggaagttactagcctatcccttccaagcggcagctattatagctgaattgtcacctgaaatgcaggtgaagctgaaaactgtgggtgaattgattggacttgcttttcaagtcagagatgatgtactggatgtgacagctagttttgaggaaatcggcaagacacctcaaaaggatctgcaggcagaaaaatcaacctatcctgccctgttgggcttggaagagtccattgccttttgtaaccaaaccctggatcaagctaatgaaaaattagaagaaattgcccagcagattccctttgaaacagaatcgattgtaagtgtagtagaaagtttgagaatcaatggctaa

SEQ ID NO: 1944 - DNA, 738 bp, Streptococcus pneumoniae
atggctggcctagtcgtagcagtccttaatggagaacggtttgacaagccaggagagaaaattccagatgacaccgaattaaaactcaagggggagaaactcaagtatgtcagccgtggtggtttgaaactggaaaaggccttgcaggtctttgatttgtcggtggatggcgcgactacgattgatatcggggcctctactggaggttttaccgatgtcatgctacagaatagtgccaagttggtctttgcagtcgatgttggtaccaatcagttggcttggaaattacgccaagacccacgagttgtcagtatggagcagttcaatttccgctatgctgaaaagactgatttcgagcaggagccgagctttgccagtattgatgtgagtttcatttcccttagtctgattttgccagccttgcaccgtgtcttggctgatcaaggtcaggtggtagcacttgtcaaacctcagtttgaggcaggacgtgagcagattgggaaaaatggaattattcgagatgctaaggttcatcagaatgtccttgaatctgtaacagctatggcagtagaggtaggtttttcagtccttggcttggacttttctcccatccaaggtggacatggaaatattgaatttttagcgtatttgaaaaaagaaaagtcagcaagcaatcagattcttgctgagattaaagaagcagtagagagggcgcatagtcaatttaaaaatgaataa

SEQ ID NO: 1945 - DNA, 432 bp, Streptococcus pneumoniae
atgaataaaaaagagagacttgaaaaaattagaagattggtgacagattatcaaatcggcacgcaagaagaaattgtagaacatttgaaagaagcaggtatcactgccactcaggcgacggtatcccgagatatcaaagagttaggtattgtcaaaattcctttgagagacaacacctatgtctacgaattgccaaaatcaatcgtaaaaagtctgcaactggctgaagacaatatcgaatcggctgaattgatggataagatgatcaatctccaagttattccaggaaatacggcttttgtaaaagctcagttaatcgatacttttgcagacaagatttttagttgtttgactgatgatagctcgattttagtcattgccagaagtggaagtctagcagaggaaatctttgaacaagtaaaaaattggtag

SEQ ID NO: 1946 - DNA, 894 bp, Streptococcus pneumoniae
atgttacttgaaatttcgataaaaaactttgccattattgaggctatttccctcaattttgaaaaggggatgactgtcctgactggtgaaacgggtgcagggaagtcgattatcattgatgccatgaatatgatgttgggagctcgtgcgacgacagatgttattcgtcatggtgcaccaaaggcagagattgaggggcttttctcagttgagaatagtcgtcttttacaggaaatttttgatgagcaaggtttagagttaggtgatgaaattatcatccgtcgggaaatcttgcaaaatggtcgtagtatcagccgtgtaaatggtcagatggttaatctgtctgttttgcgagctattgggcaacatcttgtagatattcatggtcagcatgaccatgaggagttaatgcgtccccaactgcatatccagatgttggatgaatttggtgatgccgctttttgggacttgaaagaaacctatcaaacgagttttgatgcctatcggaaaatgcgcaagcaggttctggaagtcaagaaaaaccaacaggaacacaaggcacgtatcgaaatgttggaatttcaaatggcagagattgaggcagcaaacttgcaggctggagaagacttggatctcaatcaagagcgagataaactcctcaaccacaaaaatattgcggatacactgaccaatgcctacagtatgttggacaatgaagatttttcaagtctggccaatgttcgttcagccatgaatgacatggaaagtgtcgaagagtatgaccctgaataccgtgaaatttcaagctctctgtctgagacctactatgttttagaagacattagcaaacgtttggaagctatcattgaggaccttgattttgatggcaatcgc

SEQ ID NO: 1947 - DNA, 783 bp, Streptococcus pneumoniae
tggcaatcgctgatgcaggttgagaatcgtttggacctccttcatactattactcgtaagtatggtgggactgttgatgatgttttgctttattttgccaagattacggaagaatacaatctcttgacaggcaataatctttcgtctgaggacatggaagcagagcttaagaagttggaagtcaatcttgtcaatttggcaggtcaacttgcttctgctcgtcataatttggctcagcaactcgaagctgagattaaacaagaactgcaagatctttatatggaaaaagcccagtttcaggttcgttttagtaagggaaaattcagtcgtgagggaaatgaaatggttgagttttatatttcaaccaaccctggagaagactttaaacccttggttaaggttgcttctggaggggaattatctcgtctcatgttagccattaagtctgccttttcacgtaaagaaggcaagactagcattgtctttgatgaggtggatacgggagtttcaggtcgtgttgctcaagctattgctcagaaaattcataaaattggtcagtatggtcaggttttggctatctcccatttgccacaagtaattgcgattgcagattatcaattctttattgagaagattagtaatgaccattcaacggtttcgactgttcgtctcttgacagtcgaagagcgagtggaggaagttgccaagatgttggcaggtgatgatgtgacagaagcagccctgacgcaagccagagaattgttgagaaacagggagaaataa

SEQ ID NO: 1948 - DNA, 729 bp, Streptococcus pneumoniae
atgacagattattatgtaattggagatgttcacggaaaagctgggatgctggaagaccttcttaaaacctgggatggtcagacccagttgctctttctaggtgatttgattgacagaggtgaggatagtcaccgtgttcttgaaatggtcaaggacttggtggacaatcaaggggctatctgtttgtctggaaaccacgagtatatgtttttgacttggctagattacccagaagaaagttatgaccattatcgtcgcaatggtggagatacaaccattaactctatcctaggtcgtcccttggatgcaccagttgatggagtagaagatgccaagcgggttgccgctgaagcggcagacttggtcgaattcattcgtcaaatgccatttgtagtagagacagacaagtatatctttgttcacgcaggtattgatttgaccttggacgactggcatgaaacaacagattataaaaaagtatggcttagaaaaccattccacggagctgaaaatcatactggaaaaaccattgtcttcggtcatacaccggtctatggtttgttacagcaagaacgcggtacatctgagctttggactacagaagatggcaagattggaatggatggaggagctgtttatggtggtgtccttcacgggattgtctttacagaccaaggaatgacagaacaccactttatcgaaaatgacggctttgtcgctgaagattag

SEQ ID NO: 1949 - DNA, 1035 bp, Streptococcus pneumoniae
atggtcttgtcaaaatatcaaaaacaatttataataaatagataccctgaaaggaagagaatcatgaacttagaagaattgaaaaaacgacagaggaagatccgtaacttctctattatcgcccatattgaccacgggaaatcaactctagcagaccgcattttggaaaaaacagagacggtttcaagtcgtgaaatgcaggcccagcttttggatagcatggatctagagcgggaacgtggaattactattaagttgaatgccatcgagttgaattacactgcaaaagatggggaaacttatattttccacttgattgacacaccagggcacgttgactttacctatgaagtttcacgttcgctagctgcctgtgagggtgctattttggtggtcgatgcggctcaaggaattgaggctcaaactcttgccaacgtttatctggctttggataatgatttggaaatcatgcctatcattaataaaattgacctgccggctgcagatccggagcgcgtgcgtacagagattgaagatgtgattggtttggatgccagtgaagcagttttggcttctgccaaggctggtattgggattgaagaaatcctcgagcaaattgtagaaaaagtaccagcaccaacgggtgatgtgacggcgccacttaaggccttgattttcgactctgtttacgatgcttaccgtggggttatcctccaagtgcgtgtcatggacggagtggtcaaacctggtgataagattcagctcatgagcaatagtaagacctttgatgtggccgaagtcggtatttttacaccaaaagcggttggtcgtgatttccttgcgactggtgatgttggttacattgcggcgtctatcaagacggttcaggatactcgtgtgggtgataccgttaccttggcaaccaatcctgcggcagaaccattacatggttataagcagatgaatcctatggtctttgcgggtctctacccaatcgaatcaaacaaatacaatgacctgcgtgaagccgcttga

SEQ ID NO: 1950 - DNA, 912 bp, Streptococcus pneumoniae
ttgcgggtctctacccaatcgaatcaaacaaatacaatgacctgcgtgaagccgcttgaaaaattgcaactgaatgatgctagtcttcagtttgaaccagaaacatctcaggcacttggatttggtttccgttgtggatttcttggacttctccatatggatgttatccaggaacgtttagagcgtgagttcaatattgacctcatcatgacagctccgtctgttatttacaaagttaatttgaccgacggtgagtctatggatgtgtctaacccatctgagtttccagacccaactaagattgcgaccattgaagagccttatgtcaaggcgcaaatcatggtaccacaggagttcgtcggagcagtaatggagctagctcagcgtaagcgtggggactttgtgactatggactatattgatgataaccgtgtcaatgttatctatcaaattcctcttgctgaaattgtctttgacttctttgataaacttaagtcttcgacacgtggttatgcaagctttgactacgaattgtcagaatatcgcccatctaagctggtgaaaatggatatccttctcaatggagataaggtggatgccctcagctttatcgttcacaaggactttgcctacgaacgtgggaaactcatcgttgataaactcaagaaaatcatccctcgccaacaatttgaagttccaatccaagcggctattggacacaagattgtcgctcgtactgatatcaaggcccttcgtaagaacgtacttgctaaatgttatggtggtgacgtttctcgtaagcgtaaactccttgaaaaacaaaaagctggtaagaaacgcatgaaatccatcggatcagttgaagttccgcaagaagccttcctcagcgtcttgagtatggatgaagaataa

SEQ ID NO: 1951 - DNA, 333 bp, Streptococcus pneumoniae
atgaaaatcaaagagcaaactaggaagctagccgcaggttgttcaaaacacagttttgaggttgtagatgaaactgacgaagtcagctcaaaacatggttttgaggttgtagatgaaactgacgaagtcagctcaaaacatggttctgaggttgtagatgaaactgacgaagtcagctcaaaacatggttttgaggttgtagatgaaactgacgaagtcagctcaaaacatggttttgagattgtagatgaaactgacgaagtcagtaaccatacatacggtaaggcgacgctgacgtggtttgaagagattttcgaagagtataaaaactaa

SEQ ID NO: 1952 - DNA, 336 bp, Streptococcus pneumoniae
ttatactcttcgaaaatctcttcaaaccacgtcagcgtcgccttaccgtatgtatggttactgacttcgtcagtttcatctacaatctcaaaaccatgttttgagctgacttcgtcagtttcatctacaacctcaaaaccatgttttgagctgacttcgtcagtttcatctacaacctcagaaccatgttttgagctgacttcgtcagtttcatctacaacctcaaaaccatgttttgagctgacttcgtcagtttcatctacaacctcaaaactgtgttttgaacaacctgcggctagcttcctagtttgctctttgattttcattgagtattag

SEQ ID NO: 1953 - DNA, 288 bp, Streptococcus pneumoniae
ggtcttggggtaaaaaaacaaaaggcttgcttttcagccatagaggaggtcatcatgtataaacacttatttttcctagattccaaaactttagatcggttgacaccctatattctagtcttggcttctgacaccattgcttttaatgtttttgtgctaacctttgtatctgcggtggtttttaatttcctaaattccatgctagctttaatggctatattcataggggctggctatgtggtcggattttggttactaatactcaatgaaaatcaaagagcaaactag

SEQ ID NO: 1954 - DNA, 690 bp, Streptococcus pneumoniae
atgaaaaagtatcaacttctattcaaaataagtgcagtcttctcttacttatttttcgtatttggtctttctcagctgacgcttatcgtccaaaattattggcaattttcttcccagattggcaatttcgtctggattcaaaatatcttgagtttactatttagcggagtcatgatttggattctggttaagacaggccatggctatctctttcgcattccaagaaaaaaatggctttggtattctattttgacagtattagtggtagtgctccatatctcttttaacgttcagacagctaaacatgttcagtcaactgctgagggttggaacgtattgattggttatagtgggaccaactttgctgagctaggtatctatgtaaccctgtttttcctgactccactaatggaagagttgatttataggggattacttcaacacgccttctttaagcattcgcgatttgggcttgatttgcttcttccttccattttgtttgctcttcctcattttttgagtctgcctagtctgttagatatcttcgtctttgcaacatttggaatcatctttgccggtttgacccgctataccaagagtatttatccatcctatgcggtgcatgtgatcaataatattgtagcgaccttcccgtttttgctcacttttctacatagggtcttggggtaa

SEQ ID NO: 1955 - DNA, 180 bp, Streptococcus pneumoniae
atgagggaggatttctatgaaaaagtatcaacttctattcaaaataagtgcagtcttctcttacttatttttcgtatttggtctttctcagctgacgcttatcgtccaaaattattggcaattttcttcccagattggcaatttcgtctggattcaaaatatcttgagtttactatttag

SEQ ID NO: 1956 - DNA, 246 bp, Streptococcus pneumoniae
gtgatatactatatggatacaaaaatgatgtcacaattttctgttatggataatgaaatgcttgttcgtacagaggatggggatgtctctgatatttatagagggtacgctaatcagagaagtccattcgcttcttacccttctatattaaaaaattcaggtccttttccagtaagtgggtactgcctgcgtggttatcatgaccgtggttatataggagcaggttttcatttatgtggaatatag

SEQ ID NO: 1957 - DNA, 210 bp, Streptococcus pneumoniae
atgaaggctatattctttattattctcttcgcttttcaaacctatcttatttatctatccataagtatctccgataaaaaacaaaagactattgaattaacatcattgaattgttttgtcatattatttctaatctatgataaattaatttttctctttattgcttatgtttttttgataatttttatattaaacttgttccgtaactga

SEQ ID NO: 1958 - DNA, 204 bp, Streptococcus pneumoniae
atgaatacttattgtaatataaatgaaacaatgctgagtgaggtttatggaggtaattccggaggagcagctgtagttgctgctttaggttgtgcagcgggtggagtgaaatatgggagacttctaggaccatggggcgctgcaataggaggaattggaggagcagtggtttgtggatatttagcctataccgctacatcataa

SEQ ID NO: 1959 - DNA, 255 bp, Streptococcus pneumoniae
atggatacaaaaattatggaacaatttcatgaaatggatataactatgttatctagtattgaaggaggcaagaataattggcaaactaatgtcttagaaggtggtggtgctgcttttggtggctgggggttagggacagctatttgtgctgcgagtggtgttggagcgccatttatgggagcatgtggatacataggagctaaatttggtgtggctctttgggcaggagtaacaggggcaacgagtggattttaa

SEQ ID NO: 1960 - DNA, 168 bp, Streptococcus pneumoniae
atgtatccacatgctcccataaatggcgctccaacaccactcgcagcacaaatagctgtccctaacccccagccaccaaaagcagcaccaccaccttctaagacattagtttgccaattattcttgcctccttcaatactagataacatagttatatccatttcatga

SEQ ID NO: 1961 - DNA, 546 bp, Streptococcus pneumoniae
ttgatgcgacggaagtataaatcaatcgccctaaaaaaagaattagcgaattattctggtaaaaagaaatgccacgctatgaaggctcaagcgattgtcacaagtcaagggagaattgtttctttggatatcactgtgaactattgtcatgatatgaagttgttcaaaatgagtcgcagaaatatcggacaagctggtaaaatcttgactgacagtgattatcaagggcccatgaagatatatcctcaagcacaaactccacgtaaagccagcaaactcaaaccgctaacagctgaagataaagcctgtaaccatgcactatctaaggatagaagcaaggttgagaacatccttgccaaagtaaaaacgtttaaaatgttttcaacaacctatcgaaatcatcgtaaacgcttcggattacgaatgaatttgattgctggtattatcaatcatgaactaggattttggtttcgcaggaagtctaatgtaatttttgcaattcaagacgtttcgatgactattcaagatctggatgaaaaattttaa

SEQ ID NO: 1962 - DNA, 399 bp, Streptococcus pneumoniae
ttgatttatcctgttcttatttcattttactatagttctatgaattatgaaggaagtaaacaactaactgatgcacgatttaaatgtcttgttggtgttcaacgcacgacttttgaagagatgttagctgtattaaaaacagcttatcaacttaaacacgcaaaaggtggacgaaaacctaaattaagcctagaagaccttcttatggccactcttcactatgtgcgagaatatcgaacttatgaagaaattgcggctgattttggtatccacgaaagcaacttactccgtcggagccaatgggttgaagtaactcttgttcaaagtggtgttacgatttcaagaactcctctcagctctgaggacacggtaatgattattgatgcgacggaagtataa

SEQ ID NO: 1963 - DNA, 165 bp, Streptococcus pneumoniae
atgaagaaaaaaatacttatcattttcatcttgtatctaatcatgtccatctttctttatccgcttagggaaagtatttggtatcagctattttataccatagcctatgtgattgcagttatgatctattttgctttaactaaaaagaaaggagcaaagaaatga

SEQ ID NO: 1964 - DNA, 204 bp, Streptococcus pneumoniae
atggaaaaaattgattatattactttgaatgaagtagaattagagacgattagtggtggagatgactgttttattggagatatcggatgtatcggctgggggcttttgaagagtatcggagggatgataaaacctgctccatatgttcctccagtatgcattccaaaaagttcgtggaatcctgcacctccagttccatgttaa

SEQ ID NO: 1965 - DNA, 207 bp, Streptococcus pneumoniae
atgttgcaggtagcattgttgatacagcaattgatgattttacgaatcaatgccggaaaaatcctcatcagtggttctgtgttcgtgtatagatatagtagtgttgtattgtataagaatttatataacttaatgacctatgcagtgatagaaactattcttttgcaaacgagtcgcttattctgttataagtttacgtgctcctag

SEQ ID NO: 1966 - DNA, 204 bp, Streptococcus pneumoniae
atgaatacaaaaatgatggaacaattttctgttatggataatgaaatgcttgataggatagagggaggaatatttggagttgacgatgctttgttttgggcagggttaggctatgttgcaggtagcattgttgatacagcaattgatgattttacgaatcaatgccggaaaaatcctcatcagtggttctgtgttcgtgtatag

SEQ ID NO: 1967 - DNA, 219 bp, Streptococcus pneumoniae
ttgtcttgttgcaactttgacaagtttagtatatcattattttttaatttttttcatccaaatcttgaattggcatcgaaacgtcttgaattagcttttttatttcaagccacctctaaatgtttaaaaaaaataatttctaatcacttttttaccattcaggaagttttaatgactattcaagatttcataaaatatgaacttagttttatggcataa

SEQ ID NO: 1968 - DNA, 2154 bp, Streptococcus pneumoniae
atgacttcttataaacgtacatttgttcctcaaatagatgcgagagactgtggtgtcgctgccttagcctcgattgctaaattctatggttcagatttttctctagctcacttgagagaacttgcaaagaccaataaagaagggacgactgctcttggcattgtaaaagccgctgatgaaatgggctttgaaacaaggcctgttcaagcagataaaactctctttgacatgagtgatgtcccctatccatttatcgttcacgttaacaaagaaggaaaactccaacattactatgttgtctatcaaacaaagaaagactatctgattattggtgatcctgacccttctgtaaaaatcactaaaatgtcaaaagaacgctttttctctgaatggactggagtagctatttttctagctcccaaacccagctatcaaccccataaagataaaaagaatggtctactaagcttccttcctctgattttcaaacaaaaatctctcattgcttacattgttctctcaagcttattggtcactattatcaatatcggtggttcttattatctccaaggaatcttggatgaatacatcccaaatcagatgaaatcaactttaggaatcatctcagttggtctggttatcacctatatcctccaacaagtcatgagcttttccagagattatctcctaaccgttctgagccagagattaagcattgatgtgattttatcctatattcgccatatttttgaacttcccatgtctttctttgcgacacgtcgtacaggagaaatcatttcacggttcacagatgctaactctattatagatgccttggcttctaccattctttctctttttctggatgtttctattctgattcttgtagggggcgtcttactggcacaaaaccctaatctcttcctcctttctcttctttccattcctatatacatgttcatcatcttttcttttatgaaacctttcgaaaaaatgaaccatgatgtcatgcaaagtaattctatggttagctctgccattatcgaagatatcaacgggattgaaactataaagtcgctcacgagtgaagaaaatcgctatcaaaatatagacagcgaatttgtagattatttggaaaaatcctttaagctcagtaaatattctattttacaaacgagtttaaagcagggaacaaaattagttctgaatatccttatcctatggtttggcgctcaattagtcatgtcgagtaaaatttctatcggtcagctgattacctttaacacacttttttcttactttacaactcctatggaaaatattatcaacctccaaaccaaactccaatctgcgaaggtcgctaataaccgtttgaacgaagtctatctagtcgaatctgaatttcaagttcaagaaaaccctgttcattcacattttttgatgggcgatattgaatttgatgacctttcttataagtatggttttggacgagataccttaacagatattaatctcacgattaaacaaggagataaggttagcctagttggagttagtggttctggtaaaacaactttagccaaaatgattgtcaatttctttgaaccctacaaagggcatatttccatcaattatcaggatattaaaaacattgataaaaaagtcttgcgccgtcatattaattacctaccccaacaagcctatatctttaatggctctatcttggaaaatttaaccttgggcggtaatcatatgattagccaagaagatattctaagagcttgtgaattagctgaaatccgtcaagacattgaaagaatgcctatgggctatcaaactcagctctctgatggagctggtctatcaggaggacaaaagcaacgaatcgctctcgctcgtgctcttttaactaaagctcctgttttaatactagatgaagctactagcggtcttgatgtcttgactgagaaaaaggttatagataatcttatatccctaactgataaaaccattctctttgtagcccatcgtctcagtatagccgaacgaactaaccgtgtcattgttcttgaccaggggaaaatcattgaagttggtagtcaccaagagttaatgcaggcgcaaggcttctaccatcatctattcaataaataa

SEQ ID NO: 1969 - DNA, 249 bp, Streptococcus pneumoniae
atgattttcccctggtcaagaacaatgacacggttagttcgttcggctatactgagacgatgggctacaaagagaatggttttatcagttagggatataagattatctataacctttttctcagtcaagacatcaagaccgctagtagcttcatctagtattaaaacaggagctttagttaaaagagcacgagcgagagcgattcgttgcttttgtcctcctgatagaccagctccatcagagagctga

SEQ ID NO: 1970 - DNA, 1362 bp, Streptococcus pneumoniae
atgaatcctaatctttttagaagtgtcgagttttatcagagacgttaccataactatgcgacagtgttcattatacctctttcattactatttactttcatcttgattttctcccttgttgccacaaaagaaattactgttacttcccaaggagaaatcgcccctacaagtgtcattgcatctattcagtcgaccagtgataatcctatccttgctaatcatttagtggcaaatcaagtagttgagaaaggtgacttactcatcaaatactctgaaacaatggaagaaagtcagaaaactgccttagcaactcaattacaaagacttgagaagcaaaaagaaggacttggaatcttgaaacaaagcttagaaaaagcgactgatcttttttctagcgaggatgagtttggctaccataatacctttatgaattttactaaacaatcccatgatattgaactgggtatctcaaagactaacactgaagtttcaaatcaagctaatcttaccaatagcagttcatcagccatcgaacaagaaattacaaaagttcaacaacaaattggagaatatcaagagttgagagatgctatcataaataacagagcacgcttaccaactggcaatccgcaccagtcaattttaaatcgttatcttatagcctctcaaggacaaacacaaggaacggcagaggagccatttttatctcaaattaatcaaagtattgcaggtctggaatcatctatcgcaagcctcaaaattcagcaagctggtatcggaagtgtagcaacttatgataatagtttagcaaccaaaattgaagtactccgcactcagtttttacaaacagcctcacagcaacaactaaccgtggagaatcaattaacagaattaaaagtacaactagatcaagcgacacagcgcttagaaaataataccttaaccgctccaagtaaaggtatcgttcatctgaacagcgaatttgaaggtaaaaatagaattccaactggtacagaaattgctcaaatattccctgtcatcacagatacaagagaagtactaatcacttactacgtatcatctgactatctccccttactagataaaggacaaactgtaagattaaaactggagaagattggaaatcacggcaccaccatcatcggccaacttcagagtattgatcaaactcctaccagaacagagcaaggcaatctctttaaattaaccgctcttgcaaaactatctaacgaggatagtaaactcatccaatatggcttacaaggtcgcgtcactagtgtaactacaaagaaaacatattttgattatttcaaagataaaattttaacccattctgattaa

SEQ ID NO: 1971 - DNA, 201 bp, Streptococcus pneumoniae
cactctataactatttattatcttatcaaaaaggagaatcataacatggataagaaacaaaacctaacttcatttcaagaactaacaactaccgaactcaaccaaattataggtggaggatggtgggaagatttcttatatagatttaatataattgaacaaaaaaatacaaaaggattttatcagccaatacaactataa

SEQ ID NO: 1972 - DNA, 330 bp, Streptococcus pneumoniae
ttgaacaaaaaaatacaaaaggattttatcagccaatacaactataaaaaaacaagaccaagagaacgcactctcggtcttattttttcttcattctatatgtattacagtaagtacctgacgaaaaacgtgatcttggcaggtggtattgagactggtattgggatgactttccacaattttcataacggtatagagaccaactcctctctcctcccctttagaacttgctccaaaggagaagatttcagaaatatcgattccctcttctttgatggaattttcaatgataaaggtctcctgtgctccatttttaaaaaaggcaattga

SEQ ID NO: 1973 - DNA, 1341 bp, Streptococcus pneumoniae
atgaatgttgcttggatattgttgtatacacttgttactcacggattaaaaattgtcatattctttaaggtagatggaattagtctcacttttgagaggatttttaaggcctttctttttaagatactgttggccgttgtttttggaatgcttggctatatggtaggaaatgtttacctatcttattttatggaacccttgtacggcataggcttatctttcttattgttaagagaacttcctaaaaaactccttctcttttatggtctctttccaatgatattagtgaatctcttttatagaggtgtttcctattttgtgcttccatttttgggacaagggcaagtatatgatgactactcatttatttggttatgtataataattttcaatttcttcatttctctagcttttttgaaatggttggactatgatttcactagcttgagaaaggggattctcgataaagattttcaaaagtccctgactcagattaactggataatgggggcttactatttggtgatacaaaatctgtcttactttgaatatgaacaggggattcaatcaacgactgttcgccatctcatcctagtcttttacctgctcttttttatggggattatcaagaaattggatacctatttgaaggacaaactccatgagagactgaaccaagagcaggacttgcgctacagagagatggagcggtatagtcggcatatagaggagctttataaggaagtacggagttttcgccatgactacaccaacctcttgactagcttacgtctgggcattgaagaggaggatatggagcagataaaagagatctacgactcggtcttaaaggattctagtgaaaaattgcaggacaataaatatgaccttggccgattggtgaatgttcgggatcgtgccctcaaaagtctcctagctggaaaatttataaaagctagagataagaacattgtctttaatgtcgaagttccagaggagattcaggtagagggggtgagtctacttgattttctaaccgttgtgtctatcctttgtgacaacgctattgaagctagtgtagaagcctgtcaacctcatgtttcaattgccttttttaaaaatggagcacaggagacctttatcattgaaaattccatcaaagaagagggaatcgatatttctgaaatcttctcctttggagcaagttctaaaggggaggagagaggagttggtctctataccgttatgaaaattgtggaaagtcatcccaataccagtctcaataccacctgccaagatcacgtttttcgtcaggtacttactgtaatacatatagaatga

SEQ ID NO: 1974 - DNA, 645 bp, Streptococcus pneumoniae
gttcttttgaagtttttggtaagccagatcaattgctggcagaggtgcatgagaaggggggcccatcagctattctttttggatattgagattcgaaatgaggagatgaagggtctggaagtggctagaaagattcgggatcgggatccgtatgccctgattgtctttgtgacgactcactcggagtttatgcccctgtcctttcgctaccaagtgtctgctctggattatattgataaggccctttcggcagaggagtttgaatctcgtatcgagacagccctcctctatgccaatggtcaagacagtaaaagtctagcggaagattgcttttactttaaatcaaaatttgctcaattccagtatccttttaaagaggtttactatctcgaaacgtccacaagaccccatcgtgttattctctataccaagacagacaggctggaatttacagcgagtctagaggaggttctcaagcaggagcctcgtttcttgcagtgccatcgctcttttctcatcaatcctgccaatgtggtgcatttagataagaaagaaaaactgcttttctttcccaatggtggaagttgtctaatcgcgcgttataaggtcagggaagtgtctgaggctattaataacttacactga

SEQ ID NO: 1975 - DNA, 183 bp, Streptococcus pneumoniae
atgagaatatttgttttagaagatgatttttcccaacagactagaattgaaacgacgattgagaaactcttgaaggaacatcatatcactctgagttcttttgaagtttttggtaagccagatcaattgctggcagaggtgcatgagaaggggggcccatcagctattctttttggatattga

SEQ ID NO: 1976 - DNA, 339 bp, Streptococcus pneumoniae
atgaaacatatgattattcagacacagaaaacagtctataaagtaaacgtcgacgatgtctactatatccaaacacatccaactaaagcccatactgtaaagattgttacagaagaggctagttttaatatggttcaaaatttaagtaatcttgagaaccaatatggggaaaccttgatgagatgtcatcgaaattgtttggtcaatcttgataaagtaaaatcgattgattttcaagaaagaatcctttttcttggagaagaaggtcaatacgctgtcaagtatgccagacgtcgctatagagaaattcgtcaaaaatggttgaaagaaggagagtaa

SEQ ID NO: 1977 - DNA, 330 bp, Streptococcus pneumoniae
atgacagatacagaccctatcaaaagagctcagactttgattactgacttaaacaaagcctatcaagcatgcaaacaggcaaccgctgacgacgtccgctttcaggagcaattaaactctattcttggttttctagccaaggctgaaacagtggataatcgattcttgattgaattggaaaaattttaccagacttccagtcttctcatgggactcagcgctcttgatccagatgctccaactcgcgccgcttggcgggcctatgaccgcttccactttgaccaagtcaagaccaagttaatactcaatgagaatcaaagagcaaactag

SEQ ID NO: 1978 - DNA, 207 bp, Streptococcus pneumoniae
ccgcaagctgtacttgagtacggtgagacgacgctgacgtggtttgaagagattttcgaagagtataagtctctacggaccaaccattatcctgtagtaacaaaaaagaagttgagacagactgaactcaacttcttttttagtgtcgtatcagcaatgttagtcctgcatctgacgttttacctgataaggcgaatacaagactag

SEQ ID NO: 1979 - DNA, 972 bp, Streptococcus pneumoniae
ccactttgtcttgttcctgcttgtcctgttgggctttctagctaccagtacagtcaactcttacaacattttcctgaaaatcattggcctatccttttgtttgtaggaattacgtctgttttacttttactttggggaggaattgccacctatatggaggctccagacaagctctttctcttagttggagaagaggaaatcaagctccatctcaagcgtcaaactggcatttccctagtcttttggctctttgtacagacccttttcttgctgttatttgcgcccttgtttttagcaatgggttatggcttgccagtttttctgctctatgtgcttttattgggggtaggaaaatatttccactttcgtcaaaaggccagcaaatttttcactgaaactggactggactgggactatcttatttctcaagaaagcaagcgtaagcaagtcttgcttcgtttctttgccctctttacgcaggtcaagggaatttcaaacagtgtcaagcgtcgtgcctatctggactttatcttaaaggctgttcagaaggtgcctgggaagatttggcaaaatctctatctgcgttcttatctgcgaaatggcgacctctttgctctcagtcttcgtcttctcttactttccgtactggcgcaggtttttatcgagcaagcttggattgcgacagcagtggtagttctctttaactacctcttgctcttccagttgctggccctctatcatgcctttgactaccagtatttgacccaactctttccgctggacaaggggcaaaaggaaaaaggcttacaggaggtagttcgaggattgaccagttttgttttacttgtggaagtagttgttgggttgataacctcccaagaaaaactagcccttctagccttactaggagctggtttggttttactagtcttgtattcgccttatcaggtaaaacgtcagatgcaggactaa

SEQ ID NO: 1980 - DNA, 222 bp, Streptococcus pneumoniae
atgatatttactatggctcatgaccaaagaggaggatctatgaaagacttgtttttaaagagaaagcaggcctttcgtaaggagtgtcttggttatctgcgctatgtgctcaatgaccactttgtcttgttcctgcttgtcctgttgggctttctagctaccagtacagtcaactcttacaacattttcctgaaaatcattggcctatccttttgtttgtag

SEQ ID NO: 1981 - DNA, 345 bp, Streptococcus pneumoniae
gcaaaaagtggctttcgaacgagtagagcccttgttaaaaatgttccgtttggacagaaattagactggttccctgttcatttttcaaaagggatgaagcagaaggtcatgattatctgtgcttttgtggtggatccaagtcttttcatcgtggatgagcctttccttggtcttgatccgctggctatttctgatttgattcagcttttggaagtggagaagcaaaagggcaagtctattctcatgagtacccacgtgctggattcggcggagaagatgtgtgatgcctttgtcattcttcacaagggagaggtgcgtgcaaacaactctcctgcaactacgtga

SEQ ID NO: 1982 - DNA, 378 bp, Streptococcus pneumoniae
atgttagaaattaaaaacctgacaggtggctatgttcatgttcctgttttgaaagatgtgtcctttactgttgaaagtgggcagttggtcggtttgattggtctcaatggtgctgggaaatcaacgacgatcaatgagattatcggtctgttggcaccttatagtggctccatcaatatcaatggcctgactctgcaaggagatgcgactagctaccgcaagcagattggctacattcctgagacgcctagtctgtatgaggaattgaccctcagagagcatatcgaaacggttgctatggcttacggtattgagcaaaaagtggctttcgaacgagtagagcccttgttaaaaatgttccgtttggacagaaattag

SEQ ID NO: 1983 - DNA, 411 bp, Streptococcus pneumoniae
atgtcagattgcattttttgtaaaatcatcgcaggggaaattcctgcttcaaaagtatatgaagatgagcaggtccttgcctttcttgatatctctcaagtaacactaggacacaccttggtcgtgccaaaagaacactatcgcaatcttttggagatgaatgctacgagcgccagccaactctttgcccaagtaccaaaagtagctcaaaaagtcatgaaagtcactaaggctgctggtatgaatatcatttccaactgtgaagaagtcgctggtcaaacagtttttcatactcacgttcaccttgtgcctcgctacagtgctgacgatgacctcaagattgattttatcgcccacgaaccagactttgacaaacttgctcaagtcgctgaaaccatcaaaaacgcttaa

SEQ ID NO: 1984 - DNA, 288 bp, Streptococcus pneumoniae
atgaaattatccaacctactgctatttgcaggagctgcagccggaagttatctggttacaaaaaatcgccaaaccatcacagatgaagtcttgaataccactgaccgcgttcaagctatcaaagacgatgtggatattatccaaaatagcctgcaaatcatcgaccagcaaaaagaacttatcaaggaataccaagaagacttgacttacaagtttaaggtcttggaaaaggatatccagactagactagctgtgataaaagaaatgcagggaactgaagataagtaa

SEQ ID NO: 1985 - DNA, 255 bp, Streptococcus pneumoniae
ttgttagagattactttaaaatcctcttatcaatttgttcatattctatttcaatctactatatatatcccatcaactatgcatcataatttaggtaactcatactcaataaaaatcaaaaagcaaactagaaagctaggcacagactgctcaaaacaccgttttaaggttgtggatagaactgacgaagtcagctcaaaacactgttttgaggttgtagatacgactcacatatatacgacaaggcaacgctga

SEQ ID NO: 1986 - DNA, 1137 bp, Streptococcus pneumoniae
atgaacaatactgaattttatgatcgtctgggggtatccaaaaacgcttcggcagacgaaatcaaaaaggcttatcgtaagctttccaaaaaatatcacccagatatcaacaaggagcctggtgctgaggacaagtacaaggaagttcaagaagcctatgagactttgagtgacgaccaaaaacgtgctgcctatgaccagtatggtgctgcaggcgccaatggtggttttggtggagctggtggtttcggcggtttcaatggggcaggtggcttcggtggttttgaggatattttctcaagtttcttcggcggaggcggttcttcgcgcaatccaaacgctcctcgccaaggagatgatctccagtatcgtgtcaatttgacctttgaagaagctatcttcggaactgagaaggaagttaagtatcatcgtgaagctggctgtcgtacatgtaatggatctggtgctaagccagggacaagtccagtcacttgtggacgctgtcatggcgctggtgtcattaacgtcgatacgcagactcctcttggtatgatgcgtcgccaagtaacctgtgatgtctgtcacggtcgaggaaaagaaatcaaatatccatgtacaacctgtcatggaacaggtcatgagaaacaagctcatagcgtacatgtgaaaatccctgctggtgtggaaacaggtcaacaaattcgcctcgctggtcaaggtgaagcaggctttaacggtggaccttatggtgacttgtatgtagtagtttctgtggaagctagtgacaagtttgaacgtgaaggaacgactatcttctacaatctcaacctcaactttgtccaagcggctcttggtgatacagtagatattccaactgttcacggtgatgttgaattggttattccagagggaactcagactggtaagaaattccgcctacgtagtaagggggcaccgagccttcgtggcggtgcagttggtgaccaatacgttactgttaatgtcgtaacaccgacaggcttgaacgaccgccaaaaagtagccttgaaagaattcgcggctgctggtggcttgaaagtaaatccaaagaaaaaaggcttctttgaccatattaaagatgcctttgatggagaatga

SEQ ID NO: 1987 - DNA, 141 bp, Streptococcus pneumoniae
ttgcgcgaagaaccgcctccgccgaagaaacttgagaaaatatcctcaaaaccaccgaagccacctgccccattgaaaccgccgaaaccaccagctccaccaaaaccaccattggcgcctgcagcaccatactggtcatag

SEQ ID NO: 1988 - DNA, 357 bp, Streptococcus pneumoniae
atgagtgtattggatgaagagtatctaaaaaatacacgaaaagtttataatgatttttgtaatcaagctgataactatagaacatcaaaagattttattgataatattccaatagaatatttagctagatatagagaaattatattagctgagcatgatagttgtgtcaaaaatgatgaagcggtaaggaattttgttacctcagtattgttgtctgcatttgtatcggcgatggtatcagctatgatatcattagaaatacaaacatataaatttgtaataccgttcataattggtatgatttggacagtagttgtatttcttatgatcaattggaattatataggcaaatactaa

SEQ ID NO: 1989 - DNA, 258 bp, Streptococcus pneumoniae
ttgatcataagaaatacaactactgtccaaatcataccaattatgaacggtattacaaatttatatgtttgtatttctaatgatatcatagctgataccatcgccgatacaaatgcagacaacaatactgaggtaacaaaattccttaccgcttcatcatttttgacacaactatcatgctcagctaatataatttctctatatctagctaaatattctattggaatattatcaataaaatcttttgatgttctatag

SEQ ID NO: 1990 - DNA, 1824 bp, Streptococcus pneumoniae
atgtctaaaattatcggtattgacttaggtacaacaaactcagcagttgcagttcttgaaggaactgaaagcaaaatcatcgcaaacccagaaggaaaccgcacaactccatctgtagtctcattcaaaaacggagaaatcatcgttggtgatgctgcaaaacgtcaagcagttacaaacccagatacagttatctctatcaaatctaagatgggaacttctgaaaaagtttctgcaaatggaaaagaatacactccacaagaaatctcagctatgatccttcaatacttgaaaggctacgctgaagactaccttggtgagaaagtaaccaaagctgttatcacagttccggcttacttcaacgacgctcaacgtcaagcaacaaaagacgctggtaaaattgctggtcttgaagtagaacgtattgttaacgaaccaactgcagcagctcttgcttatggtttggacaagactgacaaagaagaaaaaatcttggtatttgaccttggtggtggtacattcgacgtctctatccttgaattgggtgacggtgtcttcgacgtattgtcaactgcaggggacaacaaacttggtggtgacgactttgaccaaaaaatcattgaccacttggtagcagaattcaagaaagaaaacggtatcgacttgtctactgacaagatggcaatgcaacgtttgaaagatgcggctgaaaaagcgaagaaagacctttctggtgtaacttcaacacaaatcagcttgccatttatcactgcaggtgaggctggacctcttcacttggaaatgactttaactcgtgcgaaatttgatgatttgactcgtgaccttgttgaacgtacaaaagttccagttcgtcaagccctttcagatgcaggtttgagcttgtcagaaatcgacgaagttatccttgttggtggttcaactcgtatccctgccgttgttgaagctgttaaagctgaaactggtaaagaaccaaacaaatcagtaaaccctgatgaagtagttgctatgggtgcggctatccaaggtggtgtgattactggtgatgtcaaggatgttgtccttcttgatgtaacgccattgtcacttggtatcgaaacaatgggtggagtatttacaaaacttatcgatcgcaacactacaatcccaacatctaaatcacaagtcttctcaacagcagcagacaaccaaccagccgttgatatccacgttcttcaaggtgaacgcccaatggcagcagataacaagactcttggacgcttccaattgactgatatcccagctgcacctcgtggaattcctcaaatcgaagtaacatttgacatcgacaagaacggtatcgtgtctgttaaggccaaagaccttggaactcaaaaagaacaaactattgtcatccaatcgaactcaggtttgactgacgaagaaatcgaccgcatgatgaaagatgcagaagcaaacgctgaatccgataagaaacgtaaagaagaagtagaccttcgtaatgaagtggaccaagcaatctttgcgactgaaaagacaatcaaggaaactgaaggtaaaggcttcgacgcagaacgtgacgctgcccaagctgcccttgatgaccttaagaaagctcaagaagacaacaacttggacgacatgaaagcaaaacttgaagcattgaacgaaaaagctcaaggacttgctgttaaactctacgaacaagccgcagcagcgcaacaagctcaagaaggagcagaaggcgcacaagcaacaggaaacgcaggcgatgacgtcgtagacggagagtttacggaaaagtaa

SEQ ID NO: 1991 - DNA, 360 bp, Streptococcus pneumoniae
agaacgtggatatcaacggctggttggttgtctgctgctgttgagaagacttgtgatttagatgttgggattgtagtgttgcgatcgataagttttgtaaatactccacccattgtttcgataccaagtgacaatggcgttacatcaagaaggacaacatccttgacatcaccagtaatcacaccaccttggatagccgcacccatagcaactacttcatcagggtttactgatttgtttggttctttaccagtttcagctttaacagcttcaacaacggcagggatacgagttgaaccaccaacaaggataacttcgtcgatttctgacaagctcaaacctgcatctgaaagggcttga

SEQ ID NO: 1992 - DNA, 654 bp, Streptococcus pneumoniae
ttgtatcttagttatacaccactaccattgctgggcgtaggatgcggtcatggagtttgtagcctttttgaaagacttgggcgatggtatctactgggtgttcatcgtctgctgggagagtttggatggccatatggtagttatggtcaaattcgccatctgctgcgatttcttcaattccttcttctttcaaagcgtgaatcaagctttcttgcaccatccccaagcccttcttcacatcatctgtcaaaccttcaactgcaagtgcacgctcaaggttgtcaagagatggtaagattgcttttgccaagtcctggctacgataacgttgcaagttttgacgttcttcattggcacggcgttggatattttgcatttctgcatgagcgcgaagatatttgttttcgaactcatctgcacgttcatttgccaagtccaactcagacttttcaggagttgtttcttcagctgtttccacaacttcctcttcttgaacttcttctacttcttcattttttatatcttgggccatgttcgcctcctttaatgatttcaatcttaatgtacttcataatgattactgctgaggtagcggtaaaaatctgtcaacttcatggtcaaaacacggttgaccacattgacttgattgattag

SEQ ID NO: 1993 - DNA, 549 bp, Streptococcus pneumoniae
ttgaaatcattaaaggaggcgaacatggcccaagatataaaaaatgaagaagtagaagaagttcaagaagaggaagttgtggaaacagctgaagaaacaactcctgaaaagtctgagttggacttggcaaatgaacgtgcagatgagttcgaaaacaaatatcttcgcgctcatgcagaaatgcaaaatatccaacgccgtgccaatgaagaacgtcaaaacttgcaacgttatcgtagccaggacttggcaaaagcaatcttaccatctcttgacaaccttgagcgtgcacttgcagttgaaggtttgacagatgatgtgaagaagggcttggggatggtgcaagaaagcttgattcacgctttgaaagaagaaggaattgaagaaatcgcagcagatggcgaatttgaccataactaccatatggccatccaaactctcccagcagacgatgaacacccagtagataccatcgcccaagtctttcaaaaaggctacaaactccatgaccgcatcctacgcccagcaatggtagtggtgtataactaa

SEQ ID NO: 1994 - DNA, 1068 bp, Streptococcus pneumoniae
gtgctaattgatcagacagagaggagtgatgagatggttacagagcgtcagcaggatattttaaatctgattattgacatctttaccaaaacgcacgaacctgtcggatcaaaagccttgcaagagtctattaactctagcagtgcaaccattcgtaatgacatggcggaactagaaaaacaagggttgcttgagaaggctcatacttcaagcggtcggatgccaagtgttgctggttttcagtactatgtgaaacactcactggattttgaccggctggctgaaaatgaggtatatgagattgtcaaagcctttgatcaggaattcttcaaattggaggatattctgcaagaggctgctaacttgctaacagacctgagtggctgtacggtagtggcactggatgttgagccgagcaggcaacgtttgacagcctttgatatcgttgttttggggcaacatacagccttggcggtatttaccctagacgagtcgcgaacggttactagtcagtttctgattccaaggaacttcttgcaggaggatttgctgaaactgaagagcatcattcaggaacgtttcctcggtcacaccgttttagatattcactacaagattcggacggagattccgcagattatccagcgttactttacaacaacggataatgtcatcgatctctttgaacacatctttaaggaaatgttcaacgaaaacattgtgatggcgggcaaggtcaatctcttgaattttgccaatctagcagcctatcagttctttgaccaaccgcaaaaggtggccttggagattcgtgaggggttgcgtgaggatcagatgcaaaatgttcgtgttgcagacggtcaagagtcctgtttagctgacctagcggtgattagtagtaagttcctcattccttatcggggagttggaattctagccattaccggtccagttaatctggattaccaacagctaatcaatcaagtcaatgtggtcaaccgtgttttgaccatgaagttgacagatttttaccgctacctcagcagtaatcattatgaagtacattaa

SEQ ID NO: 1995 - DNA, 510 bp, Streptococcus pneumoniae
atgaatagcagagtagaatttcggattttcactattgttgatttggacaaggaagaagaatatttacatgagatgcatttgaaaggttggaggtatagaacgagtcgttttggtttgttctattttgaccaatgtcaaccagacgatgtcatctaccgtatctatgattctagatttcttaaaaaatataagcatgaactgcaagattttagagatagaggttgggaattgataggagcaggttcttgttcgattcttcgtaaatcgtcttctgatttacttccagaggatcaagtctatatgagtaaggggctcaaatgggaagttatgcgatctagacttcgttcctgtacaactactttcttaggtggtcttgttgtttgtacgagtttgtttagagaggatctttctatgtctttctttcttatttttgttttatatgcttttctgatttcttatctaattcatggttatttcagactaaaaaggaaataccgagtagatgaatag

SEQ ID NO: 1996 - DNA, 2334 bp, Streptococcus pneumoniae
atggttgagtttataaagtctaagaaagaaatgagtgaggaggatattaaagcaaatttcatcactcctgctattgtatccaaaggatggaaaaatggtgagcatatcgcttacgaagaatacttcactgatggtcgaattgaggttagaggagataaggctcgtcgtaaagaaggaaaaaaatcagactattcactgtattaccaatttggaactcgaattgcaattgttgaggcaaaggataataaacacagcgttcgagcaggattacaacaagctattgaatatggagagattttagatgttccatttgtttattcttcgaatggtgatggctttattgaacacgaccgtatcacgagagaagaacgtgagctggagttagacgaattccctactcgtgaagaattattttctcgtatgacgaaggaaaaaggattgacgtacgaaattacagaagctatctcaactccatactatacagacgccttctcaatgaaaacgccacgctattatcagcaaatagctatcaaccgtactattgaaacagttgccagaggacaaaaacgagtaatgtttgtgatggcaacaggaacggggaaaacgttcatggcttttcaaattattcatcgccttcgaaaagctggtttggctaaacgagttttattcttagcggatagaaacatcttagtagaccaaacgatggctgaagactttaggccattcgaaaaggtaatgacgaaaattacaccaaaacttttgactgctcctgaaaaattaaattcttttgaaatttatctagggctttatcagcaactaactggtgaagatggaactgaaacacattatcaaaaatttgacaaagacttctttgatttaatcgtaattgatgaagcgcaccgtggttcagctaaggaaaacagtaactggcgtaagataattgattatttcagttctgcgacacagattgggatgaccgctactcctaaagaaaccaagaatgcttccaatacggaatactttggtgagccaatctatacttatagtttaaaacagggaatcgaggatggttttttggctccatatcgtgttatgagagttaatttagatgtagatgtggatggttatcgtccagaaactggaaaagttgatgctaacggacaattaatagaagataggtactacggcaggaaagattttgataaaaccattgtcattgatgatagaacgcaaagagttgccaagtttgtttctgattatatgaagcaaaacaatgcacgatttgataaaacaattgttttttgtgttgatattgaccatgccgagcgaatgcgtgctgcacttgtaaaagagaatctagacttagtccaagaagactatcgttatgtcatgcaagtaactggtgacaacgctgaaggaaaagctcaactggataactttatggatgtcaattctaattttcccgctattgtaacaacgtctaaattattaacgacaggagttaatgctaaaacatgtcgtttgattgttttagactctaatatccaatccatgactgaatttaaacaaattattggtcgtggcacacgtctttatcctcaaaaggggaaagaattttttacgattattgattttcgaaatgttaccaatttgtttgctgaccctgattttgatggtgatccagtgaaggtgctggaaacaggtgcgaaaacagtcagtggttctacgcccggtttcgtaggtgaggaaggtgacccagtagaaaaatatatcgttacagacaagcaggttaccattcttaattctactgttcaagtattggatgaaaacgggaaactgattaccgaaagcctgaccgactacactcgaaagaatatcttaggtagctacgccactttgaacgattttatcacagtttggcatacggcagataaaaagaagcttatcttagacgaactttataaaaaaggagtttatctagatgctattcgagagtcggagggaatatcagaacaagaaatcgatgattttgatttactcctaaaacttgcctatggtcaaaaagaattaaccaaaacggaacgtatcaataaactcaaacaaagcggatatttatataaatatagtgaggaagcgcgtgctgttttggaaattttactgaacaaatacatggataaaggtattggagaactcgaaagcattgaaacattaaaacttccagaatttcagatatatggtggaaccttcaaaatcatcaatacttattttggagataaaaaacgatatttacaagcaattaaagaattggagcaagagctatttacagtagcttaa

SEQ ID NO: 1997 - DNA, 1464 bp, Streptococcus pneumoniae
atgtcaattacatcatttgtaaaaagaattcaagatatcactcgaaacgatgctggtgttaatggtgatgctcaacgtattgagcaaatgtcttggttattattcttaaaaatttatgatagccgtgaaatggtttgggaattagaagaagacgagtatgagtcaattatcccagaggaattaaaatggcgaaattgggctcatgctcaaaatggggaacgggtattgacaggcgatgaattacttgattttgtcaataacaagttattcaaagagttgaaagagcttgaaataacttcaaatatgcctattcgaaaaacgattgttaaatcagcttttgaagatgcgaacaactatatgaaaaatggcgtcttgttacgccaagtcatcaatgttattgatgaagttgatttcaatagccctgaagatcgtcattcgtttaatgatatttacgaaaaaattcttaaagatattcaaaatgctgggaactcaggagaattttatacgccacgtgcagcgactgattttattgccgaagttcttgacccaaaacttggagaatcaatggcagaccttgcttgcggaacaggaggcttcttgacttcgactctgaaccgtttaagtagtcaacgtaaaactagtgaagataccaaaaaatataatacagctgtttttggtattgaaaagaaagcatttcctcatcttttagcagttacaaatctgtttcttcacgaaattgatgaccctaaaattgttcatggaaatactttggagaaaaatgttcgtgaatatacggatgatgaaaaatttgacattattatgatgaatccaccttttggagggtcagaattagaaacaataaaaaataactttccagcagaattacggagttctgaaacagctgatttatttatggctgtcattatgtatcgtttgaaagaaaatggtcgtgttggagttattttacctgatggttttctatttggtgaaggtgtaaaaactcgcttgaaacaaaaactggtagatgagttcaacttacatacgattattaggttgcctcatagtgtctttgcaccgtatacaggaatccatacgaacattcttttctttgataaaacaaagaaaacagaagaaacttggttttatcgtttagatatgccagatggttataaaaatttctcgaaaactaagccgatgaagtcagaacacttcaatcctgttcgtgactggtgggaaaatcgtgaagagattctggaaggtaagttctacaaatctaaatcatttacacctagtgaattggctgagttgaattataatttagaccagtgtggctttccaaaagaggaagaggaaatcttaaatccctttgagttgattcagaattatcaagcggaaagagcaactttaaatcataagattgataatgtattagctgatattttgcagttgttggaggacaaataa

SEQ ID NO: 1998 - DNA, 1551 bp, Streptococcus pneumoniae
atgacaccagaacaacttaaagcaagtattctccaaagagcgatggaagggaaattagtgccgcaaaatcccaatgacgaacctgcaagtgaattattaaagagaattaaagctgaaaaagaaaaacttatcagtgaaggaaaaatcaaacgagataaaaaggaaactgagatatttcgtggtgatgatgggaaacattatgggaagtttgctgatggaagtactcaagaaattgatgttccttatgatattcctgatacttgggagtgggtgaggataaaatcaatttattggaattttgggcaaaataagccagagaaatcctttaggtatatagatacgtctagtattgatagaaaaaagaacataatcaactacaaaaatctacaatatctttcacctgaacaagcgccttcccgtgccagaaaattagtttcgcagaatagtgtcttattttcaacagttagaccatatctaaaaaatattgctgtagttagagaacttaaagagtatttgatagctagtacagcatttattgttttggatactttacttaacgaaacatatttgaaatattatttattatcagataattttatcaatcgtgttaataataaatctactggaacaagttatcctgcaatcaatgattataattttaatctattattaattgctctccccccactatccgaacaacaacgaatagtagaagcaatcgaatcagctttagaaaaagtagatgaatatgctgaaagttataatagactagaacagctagataaagaatttccagataaactaaaaaaatctattcttcaatatgctatgcaaggaaaattagttgaacaagacccaaatgatgaatcagtcgaagttttacttgaaaaaatacgagcagaaaaacaaaaactctttgaagaaggcaagattaaaaagaaagatttggacatttctattgtttcccaaggagatgataactcttattatgggaacaaagacgaaacaacctcttatcctatatataaaatcccagaagcatggagatatattaaatttgctagcctagttaacttcagaataggaaaaactcctccacgcagtgaagctactttttggggaactgaaataccttgggtatctatatcagatatgcctatatctggttatgtaactaatacgagagaatctatttctaaattagcattaaaatcaaagaaaatagacatttcacctaaaggaactttattaatgagttttaaattatctattggaaaagttgccatattggatattcctgccactcataatgaagccattatatcgatattcccctatgctaataaagaaaatattatcagagattacttaatgatatttttgccacttatctctactttaggtgattcaaaagatgctatcacagggaaaacattaaatagtaccagtatctccgaattattaatccctatttctaatcatgaagagatgaaaagaatcattttcaaagttgatttactttttcaaaaagtttctcaactttttgagtaa

SEQ ID NO: 1999 - DNA, 1290 bp, Streptococcus pneumoniae
gtgaggttttctacattggttgaaattgtcagaggtggctctccacgaccaatcaaagattatcttacttctgaagtagatggaataaattggataaaaataggtgatactgaaaagggtgaaaagtatataaataatgttaaagaaaaaatcaaaaaatcagggcttaacaaaactagatttgtaaaaaaaggtacatttttgttaactaattctatgagttttggtagaccttatattttgaatgttgatggtgcaatacacgatggatggttggctatttcgaactatgaaaactcattaaataaagattacctattctatattctttcatcaaatgtagtttattctcaatttctatctctaattagtggagctgttgtgaaaaacttgaatagtgataaagttgcttctattcttatccctctccccccactatccgaacaacaacgcataatagaagcaatcgaatcagctttagaaaaagtagatgaatatgctgaaagttataatagactagaacagctagataaagaatttccagataaactaaaaaaatctattcttcaatatgctatgcaaggaaaattagttgaacaagacccaaatgatgaatcagtcgaagttttacttgaaaaaatacgagcagaaaaacaaaaactctttgaagaaggcaagattaaaaagaaagatttggacatttctattgtttcccaaggagatgataactcttattatgggaatatacctatgaattgggttgttataaaaataaaagatattttttcaatgaatacaggtctttcttacaagaagggcgatttaagcattaataataaaggtgttagaattatacgtggtggtaatattaagcctttagaattttctctgttggataatgattactacattgatacacaattcatctcctctgaacaagtttatttaaaacataatcagctaataacacctgtatcaacctctttagaacatattggaaagtttgcaagaatcgataaagactatgatggtgttgtggctggtggatttattttccaattaacaccattcgaaagttcagagattatttcaaaatttctattatttaacttgtcttctccgttattttataaacaattgaaagcaataactaaactatcaggtcaagctttatataatattcctaaaactacactgagcgagctattaattccgttagctccttttgaggaacaggaacttattactcaaaaagttgagaaactttttgaaaaagtaaatcaactttga

SEQ ID NO: 2000 - DNA, 222 bp, Streptococcus pneumoniae
tcgatttgtttacatcttatttcaatctactatattatctcaataaatgatgatggcgactgttttgtttgtgcttgtcgatttttgaatcctgatcgagcggaagaatatttctgccgaggttgccaaggggaaaatcctgaagatattgaattttatgatgaacaattacaggcagaaaaggtggaggttttgaatattcgattggaagtaaaaaattga

SEQ ID NO: 2001 - DNA, 1347 bp, Streptococcus pneumoniae
atgccaatcacagctgcagatattcgtcgtgaagtcaaggaaaaaaatgttacctttattcgtcttatgttctcagatattttgggaaccatgaaaaacgtcgaaattcctgctacagatgaacagttagataaggtcttgtcgaacaaggttatgtttgatggatcttctattgaaggttttgtacgtatcaatgagtcggatatgtacttgtacccggacttggatacatggacagtcttcccttggggagatgaaaatggaagtgttgcaggtctgatctgtgatgtctatacaacagaaggtgaaccatttgcgggtgaccctcgtggtaatttgaaacgagctcttcgtcacatggaagaagttggattcaaatccttcaaccttggtccagagccagaattcttcctatttaagttggatgaaaatggggacccaacacttgaagtgaatgacaagggtggctactttgatttggcacctactgaccttgcggacaacacacgtcgtgagattgtgaatgtcttgaccaaaatgggatttgaagtagaagcgagtcaccacgaggttgcggttggacagcatgagattgactttaagtacgatgaagttctccgtgcttgtgataagattcaaatctttaagcttgttgttaaaaccattgctcgcaaacacggactttacgcaacatttatggcgaagccaaaatttggtattgctggatcaggtatgcactgtaatatgtccttgtttgatgcagaaggaaataacgccttctttgatccaaatgatccaaaaggaatgcagttgtcagaaacagcttaccatttcctaggcggtttgatcaagcatgcttacaactatactgccatcatgaacccaacagttaactcatacaaacgtttggttccaggttatgaagcgcctgtttacattgcttgggctggtcgtaaccgttcgccacttgtgcgcgtacctgcttcacgtggtatgggaactcgtcttgagttgcgttcagtggatccaatggcgaacccttacgttgctatggctgttcttttggaagttggtttgtatggtattgaaaataaaatcgaagcaccagctcctatcgaagaaaatatctacatcatgacagcagaagagcgcaaggaagctggtattacagaccttccatcaactcttcacaacgctttgaaagctttgacagaagatgaagtggttaaagctgctctcggagatcacatctatactagcttccttgaagccaaacgaatcgaatgggcaagttatgcaaccttcgtttcacaatgggaaattgataattatttagacctttactaa

SEQ ID NO: 2002 - DNA, 357 bp, Streptococcus pneumoniae
atgaaggaaaaagaatttcgccgaaatatggctgtttttcctatcggcagtgttatgaagttgaccgatctatcggcgcgtcagattcgttattatgaagatcaagagttgatcaagcccgatcgaaacgaaggaaatcgtcgcatgtattccttgaatgacatggatcgtctgcttgaaatcaaagattatatctctgaaggttataatatcgctgccattaagaaaaaatatgctgaacgtgaagcgaaatccaagaaagcggttagtcagactgaagtacgtcgtgcacttcacaatgaactcctccaacaggggcgttttgcttcagtacagtcaccttttggtcgcggttag

SEQ ID NO: 2003 - DNA, 528 bp, Streptococcus pneumoniae
atgagttattttaaaaaatataaattcgataaatcccagttcaaacttggtatgcgaacctttaaaacaggtattgctgtttttctagttctcttgatttttggcttttttggctggaaaggtcttcaaattggtgctttgacagccgtttttagcctgagggagagttttgatgagagtgttcattttgggacttcgcgtattctaggaaatagtatcggtggactctatgccttggtcttcttcttattaaatacttttttccacgaagccttttgggtgaccttggtagttgttccaatctgcaccatgttaaccattatgacaaatgtagccatgaataacaaagcaggggttattggtggtgtagcagctatgttaatcattaccctatcaattccaagtggcgagacaattttgtacgtgtttgtgcgtgtattagaaacgtttatgggagtttttgtcgcaattatcgtaaattacgatattgatcgtattcgtctctttttagagaaaaaagaaaaataa

SEQ ID NO: 2004 - DNA, 378 bp, Streptococcus pneumoniae
ttgtttataaaatcttatttttctgtcaaggctgcaagtcctggaagaaccttaccttcaagaagttccattgatgctccaccacccgtactaatccatgagaacttgtctgcacggccaaggttaatcgctgcggcagctgagtcaccaccaccgatgattgatttaactcctggttgtttcacgatagcgtccatcacaccgattgtaccagcttggaaatctgggttttcaaatacacccataggtccgttccatacaactgttttggcaccagtcaaagcttcgtcaaatttggcgatagattttggaccgatgtcaagaccaaggaagccttcagaaactgcttcaccttcagtgtcacgcacttcagtgtaa

SEQ ID NO: 2005 - DNA, 1197 bp, Streptococcus pneumoniae
atggcaaaacttactgttaaagacgttgacttgaaaggtaaaaaagtcctcgttcgtgttgacttcaacgtaccattgaaagatggcgtaatcactaacgataaccgtatcacagcagctcttccaactattaagtacatcatcgaacaaggtggacgtgcaattcttttctctcaccttggacgtgtgaaagaagaagctgataaagctggtaaatcacttgctcctgtagcagcagacttggcagcaaaacttggtcaagatgttgttttcccaggtgtcactcgtggtgctgaattggaagcggcaatcaacgctcttgaagatggacaagttctcttggttgaaaacactcgttacgaagatgttgacggcaagaaagaatctaaaaacgatcctgaacttggtaaatactgggcatcacttggagatggtatcttcgtaaacgatgcattcggtacagctcaccgtgcacacgcatctaacgttggtatctcagcaaacgttgaaaaagcagttgctggtttccttcttgaaaacgaaattgcctacatccaagaagcagttgaaactccagaacgtccattcgtggctatccttggtggttcaaaagtttcagacaagatcggtgttatcgaaaacttgcttgaaaaagctgataaagtccttatcggtggtgggatgacttacacattctacaaagcacaaggtatcgaaatcggtaactcacttgtagaagaagacaaattggatgttgcgaaagctcttcttgaaaaagcaaatggtaaattgatcttgccagttgactcaaaagaagctaacgcatttgctggttacactgaagtgcgtgacactgaaggtgaagcagtttctgaaggcttccttggtcttgacatcggtccaaaatctatcgccaaatttgacgaagctttgactggtgccaaaacagttgtatggaacggacctatgggtgtatttgaaaacccagatttccaagctggtacaatcggtgtgatggacgctatcgtgaaacaaccaggagttaaatcaatcatcggtggtggtgactcagctgccgcagcgattaaccttggccgtgcagacaagttctcatggattagtacgggtggtggagcatcaatggaacttcttgaaggtaaggttcttccaggacttgcagccttgacagaaaaataa

SEQ ID NO: 2006 - DNA, 4941 bp, Streptococcus pneumoniae
atgaagaatccattttttgaaagacgttgtcgttgcagtattcgtaagttatcagtaggagcctgctcgctgatgattggtgctgttttatttgctggtccagccttggctgaagaaactgcagttcctgaaaatagcggagctaatacagagcttgtttcaggagagagtgagcattcgaccaatgaagctgataagcagaatgaaggggaacatactagagaaaacaagctagaaaaggcagaaggagtagcgacagcatctgaaactgcagaagcagctagcgcagctaaaccagaggaaaaagcaagtgaggtggttgcagaaacaccatctgcagaagcaaaacctaagtctgacaaggaaacagaagcaaagcccgaagcaactaaccaaggggatgagtctaagccagcagccgaagctaataagactgaaaaagaagtccagccagatgtccctaaaaatacagaaaaaacattaaaaccaaaggaaatcaaatttaattcttgggaagaattgttaaaatgggaaccaggtgctcgtgaagatgatgctattaaccgcggatctgttgtcctcgcttcacgtcggacaggtcatttagtcaatgaaaaagctagcaaggaagcaaaagttcaagccttatcaaacaccaattctaaagcaaaagaccatgcttctgttggtggagaagagttcaaggcctatgcttttgactattggcaatatctagattcaatggtcttctgggaaggtctcgtaccaactcctgacgttattgatgcaggtcaccgtaacggggttcctgtatacggtacactcttcttcaactggtctaatagtattgcagatcaagaaagatttgctgaagctttgaagcaagacgcagatggtagcttcccaattgcccgtaaattggtagacatggccaagtattatggctatgatggctatttcatcaaccaagaaacaactggagatttggttaaacctcttggagaaaagatgcgccagtttatgctctatagcaaggaatatgctgctaaggtaaaccatccaatcaagtattcttggtacgatgccatgacctataactatggacgttaccatcaagatggtttgggagaatacaactaccaattcatgcaaccagaaggagataaggttccggcagataacttctttgctaactttaactgggataaggctaaaaatgattacactattgcaactgccaactggattggtcgtaatccttatgatgtatttgcaggtttggaattgcaacagggtggttcctacaagacaaaggttaagtggaatgacattttagacgaaaatgggaaattgcgcctttctcttggtttatttgccccagataccattacaagtttaggaaaaactggtgaagattatcataaaaatgaagatatcttctttacaggttatcaaggagaccctactggccaaaaaccaggtgacaaagattggtatggtattgctaacctagttgcggaccgtacgccagcggtaggtaatacttttactacttcttttaatacaggtcatggtaaaaaatggttcgtagatggtaaggtttctaaggattctgagtggaattatcgttcagtatcaggtgttcttccaacatggcgctggtggcagacttcaacaggggaaaaacttcgtgcagaatatgattttacagatgcctataatggcggaaattcccttaaattctctggtgatgtagccggtaagacagatcaggatgtgagactttattctactaagttagaagtaactgagaagaccaaacttcgtgttgcccacaagggaggaaaaggttctaaagtttatatggcattctctacaacttcagactacaaattcgatgatgcagatgcatggaaagagctaaccctttctgacaactggacaaatgaagaatttgatctcagctcactagcaggtaaaaccatctatgcagtcaaactatttttcgagcatgaaggtgctgtaaaagattatcagttcaacctaggacaattaactatctcggacaatcaccaagagccacaatcgccgacaagcttttctgtagtgaaacaatctcttaaaaatgcccaagaagcggaagcagttgtgcaatttaaaggcaacaaggatgcagatttctatgaagtttatgaaaaagatggagacagctggaaattactaactggctcatcttctacaactatttatctaccaaaagttagccgctcagcaagtgctcagggtacaactcaagaactgaaggttgtagcagtcggtaaaaatggagttcgttcagaagctgcaaccacaacctttgattggggtatgactgtaaaagataccagcctaccaaaaccactagctgaaaatatcgttccaggtgcaacagttattgatagtactttccctaagactgaaggtggagaaggtattgaaggtatgttgaacggtaccattactagcttgtcagataaatggtcttcagctcagttgagtggtagtgtggatattcgtttgaccaagccacgtaccgttgttagatgggtcatggatcatgcaggggctggtggtgagtctgttaacgatggcttgatgaacaccaaagactttgacctttattataaagatgcagatggtgagtggaagctagctaaggaagtccgtggcaacaaagcacacgtgacagatatcactcttgataaaccaatcactgctcaagactggcgcttgaatgttgtcacttctgacaatggaactccatggaaggctattcgtatctataactggaaaatgtatgaaaagcttgatactgagagtgtcaatattccgatggccaaggctgcagcccgttctctaggcaataacaaggtacaagttggctttgcagatgtacaggctggagcaactattaccgtttatgataatccaaattctcaaactccgctcgcaaccttgaagagcgaagttggaggagacctagcaagtgcaccattggatttgacaaatcaatctggtcttctttattatcgtacccagttgccaggcaaggaaattagtaatgtcctagcagtttccgttccaaaagatgacagaagaatcaagtcagtcagcctagaaacaggacctaagaaaacaagctacgccgaaggggaggatttggaccttagaggtggtgttcttcgagttcagtatgaaggaggaactgaggacgaactcattcgcctaactcacgcaggtgtatcagtatcaggttttgatacgcatcataagggagaacagaatcttactctccaatatttgggacaaccggtaaatgctaatttgtcagtgactgtcactggccaagacgaagcaagtccgaaaactattttgggaattgaagtaagtcaggaaccgaaaaaagattacctagttggtgatagcttagacttgtctgaaggacgctttgcagtggcttatagcaatgacaccatggaagaacattcctttactgatgagggagttgaaatttctggttacgatgctcaaaagactggtcgtcaaaccttgacgcttcgttaccaaggtcatgaattcaattttgatgttttggtatctccaaaagcagcattgaacgatgagtacctcaaacaaaaattagcagaagttgaagctgctaagaacaaggtggtctataactttgcttcaccagaagtaaaagcagctttcttgaaagcaattgaagcggccgaacaagtgttgaaagaccatgaaactagcacccaagatcaagtcaatgaccgacttaataaattgacagaagctcataaagctctgaatggtcaagagaaatttaaggaagaaaagacagaacttgatcgcttaacaggtgaggttcaagaactcttggctgccaaaccaaaccatccttcaggttctgccctagctccgcttcttgagaaaaacaaggccttggttgaaaaagtagatttgagtccagaagagcttgcaacagcgaaacagagtctaaaagatctggttgctttattgaaagaagacaagccagcagtcttttctgatagtaaaacaggtgttgaagtacacttctcaaataaagagaagactgtcatcaagggtttgaaagtagagcgtgttcaagcaagtgctgaagagaagaaatactttgctggagaagatgctcatgtctttgaaatagaaggtttggatgaaaaaggtcaagatgttgatctctcttacgcttctattgtgaaaatcccaattgaaaaagataagaaagttaagaaagtatttttcttacctgaaggcaaagaggcagtagaattggcttttgaacaaacggatagtcatgttatctttacagcaccacactttactcattatgcctttgtttatgaatctgctgaaaaaccacaacctgctaaaccagcaccacaaaacaaagtccttccaaaacctacttatcaaccggcttctgatcaacaaaaggctcctaaattggaagttcaagaggaaaaggttgcctttcatcgtcaagagcatgaaaatactgagatgctagttggggaacaacgagtcatcatacagggacgagatggactgttaagacatgtctttgaagttgatgaaaacggtcagcgtcgtcttcgttcaacagaagtcatccaagaagcgattccagaaattgttgaaattggaacaaaagtaaaaacagtaccagcagtagtagctacacaggaaaaaccagctcaaaatacagcagttaaatcagaagaagcaagcaaacaattgccaaatacaggaacagctgatgctaatgaagccctaatagcaggcttagccagccttggtcttgctagtttagccttgaccttgagacggaaaagagaagataaagattaa

SEQ ID NO: 2007 - DNA, 513 bp, Streptococcus pneumoniae
ttgatttcctttggttttaatgttttttctgtatttttagggacatctggctggacttctttttcagtcttattagcttcggctgctggcttagactcatccccttggttagttgcttcgggctttgcttctgtttccttgtcagacttaggttttgcttctgcagatggtgtttctgcaaccacctcacttgctttttcctctggtttagctgcgctagctgcttctgcagtttcagatgctgtcgctactccttctgccttttctagcttgttttctctagtatgttccccttcattctgcttatcagcttcattggtcgaatgctcactctctcctgaaacaagctctgtattagctccgctattttcaggaactgcagtttcttcagccaaggctggaccagcaaataaaacagcaccaatcatcagcgagcaggctcctactgataacttacgaatactgcaacgacaacgtctttcaaaaaatggattcttcattttctcctcctaa

SEQ ID NO: 2008 - DNA, 1632 bp, Streptococcus pneumoniae
atgtccattaattggcaggaaattttatttcactttttaggtggtctggggctattcttatatagtatcaagaccatgggagacggtttacaacaagctgctggagatcgccttcgtttttacattgacaaatatactagtaatcctttctttggagttctggttggtattgggatgactgctctaattcagtctagttctggtgtaacagttatcacagtcggcctggtcagtgccggtctcttaaccttacgtcaggctatcgggattgtcatgggtgctaatattgggacaactgtcacatcctttctcatcggttttaaattaggtaactatgccctacctatgctctttatcggtgccgtctgtctcttttttacaaaaaatcggacagtcaataatatcggacgcatcctctttggtgtcggtggtatcttttttgccctcaatctcatgagcggcgcaatggctccactcaaggatttacaggtctttaaggactatatgattgagctaagtaaaaatcctgttttgggtgtctttgtcggtactggcttgaccttgctaattcaagcttcttcggctaccattgggattttacaaaacctctacgccggcaatctaattgacctacagggagctttgccggttctatttggtgacaatatcgggacaaccattacagccatcattgcctctttaggggctaatattgcagctaaacgggtagcaggagctcatgttgccttcaacgttatcggaacagtcgtctgcgttatttttctagttccttttactgtcctgattcattggtttgaagctacgctaaatctagcaccggaaatgaccatcgcctttgctcacggaacctttaatattaccaacaccattgtccaatttccatttatcggagctctggcttactttgtaaccaagattattcctggagaggacgaggttgtcaaatacgaacccttatatcttgatgaacatttcatcaaacaggccccatctatcgctctaggaaatgctaagaaagagctcttgcacttaggaaactacgctgctaaagcctttgacctttcctataagtacatcattgacttggatgaaaaagttgctgaaaaagggcataaaaccgaagaagcaattaacaccatcgatgagcaattaacacgttatctcattgccctttcaagcgaagctctcagccaaaaagaaagtgaagtgcttaccaatatccttgattcctcccgtgatttggaacggattggagaccacacggaggctctactcaatctgactgactatcttcaacggaaaaatgttgaattttctgatgccgccttgaaagaattagaggaagtttaccgccaaactagtgactttatcaaagatgctctggatagtgtggaaaacaatgatattgaaaaagcacgcagtcttgtagaacgtcatgaagcaatcaataagatagaacgtgttctcagaaaaacccacatcaaacgcctcaacaaaggcgaatgttcaacacaagctggggtcaactttatcgacatcatctcacactacactcgtgtatcagaccacgctatgaaccttgctgaaaaggtttttgcagaacaaatctaa

SEQ ID NO: 2009 - DNA, 1608 bp, Streptococcus pneumoniae
atgtctacgaaatatatttttgtaactggtggtgtggtatcgtctattgggaaagggattgtggcagcgagtctaggccgtctcttgaaaaatcgtggtctcaaagtaaccattcaaaagtttgacccttatatcaatattgatccgggaaccatgagtccttaccagcacggggaagtttttgtgacagatgacggagctgagacagatttggacttgggtcactatgaacgtttcatcgatatcaatctcaacaaatattccaacgtgacaactgggaaaatttatagtgaagttcttcgtaaagaacgccgtggagaataccttggggcaactgttcaagtcattcctcatatcacagatgctttgaaagaaaaaatcaagcgtgccgctctaacgaccgactctgatgtcattatcacagaggttggtggaacagtaggagatatcgagtccttgccattcctagaggctcttcgtcagatgaaggcagatgtgggtgcggataatgtcatgtatatccatacaaccttgcttccttacctcaaggctgctggtgaaatgaaaaccaaaccaacccaacactctgtcaaagaattgcgtggcttgggaatccaaccaaatatgttggttattcgtacagaagagccagctggtcaaggaattaaaaataaactggcccagttctgtgatgtggcaccagaagccgttatcgaatcgttggatgttgaacacctttaccaaattccactgaacttgcaggcacaagggatggaccaaattgtttgtgatcatttgaaattagacgcaccagcagcggatatgacagaatggtcagccatggtggacaaggtcatgaacctcaagaaacaagttaagatttcccttgttggtaagtatgtggagttgcaagatgcctatatctcagtggtcgaagccttgaaacactctggctatgtcaatgatgtagaagttaaaatcaattgggtcaatgccaatgatgtgacagcagagaatgtagcagaactcttgtctgatgcggacgggatcatcgtaccaggtggttttggtcaacgtggtacagaagggaaaatccaagccatccgctatgcgcgtgaaaatgatgttccaatgttgggagtctgcttgggaatgcagttgacatgtatcgagtttgctcgtcacgttttaggtcttgaaggtgccaattctgcagagcttgcaccagaaacaaaataccctatcattgatatcatgcgtgatcagattgatattgaggatatgggtggaacccttcgtttgggactttatccgtctaagttgaaacgtggctctaaggctgctgctgcttatcacaatcaagaagtggtgcaacgccgtcaccgtcaccgttatgagtttaataatgccttccgtgagcagtttgaggcagcaggttttgtcttttcaggagtttctccagacaatcgtttggtagaaatcgtggaaattcctgaaaataaattctttgtagcttgtcagtatcaccctgaactgtcaagccgtccaaaccgaccagaagaactctacactgcctttgttactgcagcggttgagaacagcaattag

SEQ ID NO: 2010 - DNA, 132 bp, Streptococcus pneumoniae
gtgttcctgactttgtcagtcttatctacaacctcaaaacagtgttttgagcagcctacggctagtttcctagcttgctctttgattttcattgagtataaaatacaagaagataacttcttgaaaaaataa

SEQ ID NO: 2011 - DNA, 588 bp, Streptococcus pneumoniae
ttggaattagaagtatttgctgggcaagaaaaaagtgaactatctatgattgaggtagcgcgtgctatcttggaacttcgtggtcgcgatcatgagatgcattttagcgatcttgtaaacgaaattcaaaactaccttggaacatcaaacagcgatatccgcgaagctttgcctttgttctacacagagttgaactttgacggtagcttcatctcacttggggacaacaaatggggtcttcgttcatggtatggtgtggacgaaatcgacgaagaaatcatcgctcttgaagaaaatgacgacgatgaagtagcaccaaaagctaagaaaaaacgtgtcaatgcctttatggatggtgattcagatgccattgactacaatgcagatgatccagaagacgaagatgcatacgaagcagatccagctctttcatacgatgatgaaaatccagatgatgaaaaaaatgaagtggaagcttatgatgcagaaatcaacgaaatcgctccagatgacttgggagaagatgtggatctcaacgaagacgacgacgagttttcagatgacgacgctgaaaccagcgaggaataa

SEQ ID NO: 2012 - DNA, 450 bp, Streptococcus pneumoniae
ttgtgttttgttccttattataaggtcaattattgtgaggaagcttttgcttggtatcagaatgtgaacttggtttacctcgtagatggggtgaagcttccttacagtcaagcgaccttgaaagccatgtattccaatttggatcggcatggtgagcttttttggattgaagtcaaggagaagggagaatggtttccaattggggatattacactatctcaggataatctccccattgtgattgggaattccgcttaccaacatcgaggacttggaaaaaagattctaagtgctttgattgaattggctcgagtaaaaggatggaaagaattgagagtcaaggaaatctacacctacaataatgcttctaggaggtgtttcaagtcgcttggatttgtggaaaatggagcaacagaaaaaggaaggagttttatattggaattagtctaa

SEQ ID NO: 2013 - DNA, 390 bp, Streptococcus pneumoniae
atgaaagtcaatatagcagatcttcatccgactcaactatatttatcagaaaagaagttgcaagatattcagatgctttaccagtcggcagaaacaatccaagtcgatccaatcagtattcttgcctttggagattgtttgctgattacagatgggcatcacagggcttatcaggctttattggcaggtcgggatacgatttctgctgagtgggatagagatggtggtgatgaactatatcatctctatgcgcaagcttgcgaggaaagaaagatttactctgtttttgatttagaagatcgtatcctagctcaagatgggtatgaagcaaaatggtataactggtgtgatggttttaatcaagcagcaactcttttgttgaaaaggtag

SEQ ID NO: 2014 - DNA, 651 bp, Streptococcus pneumoniae
atgaaagataaacaaacatttttaatgaagggcagttttgcccttttacttttcgttattcttggctatatggtcaaattttaccctgaaatgttggtcaattttgaccaatcgattcagactgccattcgaggagacttaccagattatttgactattctttttcgatccctcacacgtctgattgatatcccagtgattatcacttgggttgtcattacagcttttgtcttttatcgtaagcgatggaagatagaaagtttcttcatgctgggaaatctggctttggcaggtcttttaatcgtgacctttaaaaatatctaccagcgcccacgaccagctatcttacatctggtggaggagaagggattttccttcccaagtgggcattctctggctgtaaccttgatggtaggtactttgattgttattcttagtcagcggattaaagatccagtctggagaaaaatcgtacaaatcgtccttggcctctacctagtcagtgtgctggtatcaagagtctatctgggagttcattacccatcagacgtccttgccagtctctgtgtgggcttgggagtcctgtttatcgagtttcccttctatgacaagctccgcttccaatggcgatttaaaggcaaacagaagtga

SEQ ID NO: 2015 - DNA, 564 bp, Streptococcus pneumoniae
atgacaaacacacgtcgactttcgaccattgcaattttatcagccatctcatttgtgctgatgtactttgactttccgcttttaccagcggcatctttcctcaagatcgaatttagtatcttgccagtccttgtgggtctggtggtcatggatttgcctgctgctctaggagtgctcttgcttcgctcactattgaaattgcttcttaacagccaaggagtgaatacttacattggtttgccgatgaatatcgtagctttgggagtttttgtcatcgtatttgctttgatttggaaaaaggaacggacaacccttcgtttcctactaggctctctagctggaactgttggtttaaccttggccatgttggttctcaactatgtttatgctgttcctttgtacgctaagtttgctaactttgatattggaaaaattttgggactttccaactacctaatgaccatggtattaccttttaacttgattgagggtgtaatcttttccgtttcattctggttgttgtacgtccttttgaaaccaaccttaaaacactatgaaagataa

SEQ ID NO: 2016 - DNA, 219 bp, Streptococcus pneumoniae
ttggaaaggattcctctatctattctcactttttatatcccaaaagttccctcttactctattaaagaaaaacaaagcaagtggttacaatccggctataaatctatcaaaacagacaaagctattctttcgtcttctcccatccagactatactgtcggttgtggaatctcaccacatcagcttgcgctcgcggacttctttaaagagaaggaaatag

SEQ ID NO: 2017 - DNA, 468 bp, Streptococcus pneumoniae
atgacaaatcacattgtattatttgaacctcaaattccacaaaatacgggcaatatcgcgcgtacttgcgctgcgaccaattctcccctccacatcatcaagcctatgggctttcctattgatgaccgcaagatgaagcgggctggattggattactgggataagctagagatttatttttacgagagtttggaagatttcatatctcagatgaagggaaaactctatctgatttcgaaattcgcggaaaaagtctattctgaggtggatttatcgactgacgaggaccattattttctctttggacgtgaagacaagggcttacctgaagattttatgcgagaacattctgagaaggctctccgtattcccatgaatgatgaacattgtcgcagtcttaatgtgtctaataccgtctgcatgattgtctatgaagctcttttccagcagaacttttgcaggtcttga

SEQ ID NO: 2018 - DNA, 831 bp, Streptococcus pneumoniae
atgcaagctaaattaatcggttaccagcatagagatactgtgattcatcgcttgtcaggagctgggaaacttctctttttcattctggtatcattggcggccatgattagctatgataccagaatgctcttgctgattgccatcttttcagtctttctcctctatttatcagaaattcgctttaaagatgtttcctttgtagccgtttttgcgacggtatttgccgttttaaacgttttgatggtctatcgcttttctcccgagtatggggttggactttatggagagagaagtgtgatttggcagggaatcggtgtctacactctaaccagccaggagctcttttatctgctaaatttggccattaagtatctttgcaccattcctctggctattatctttttgatgacaacccatcctagtcagtttgcttccagtttaaatcaaattggtgtgccctataagattgcttattctgtcagcctgaccttgcgctatattccagatttgcaggaagaattctttactatcaagatgtctcaggaggcgcgtgggatggaattatccaagaaagcttctcttatgcaacgaatcaaaggcaatctgctcattattacgcccttgatttttagctcgctagaacgcattgataccattgcgactgccatggagcttcgccgctttgggaaagagaaaaaacgcacatggtatagttatcaggccttgaaaaaaggagactatattaccttgctcttggcaaccttgtttttagtagttagtttactacttatcttgcagaatcagggacgattttacaacccttggaaatag

SEQ ID NO: 2019 - DNA, 1248 bp, Streptococcus pneumoniae
  unsure (783): n at each above location is unknown.
ttgtcaggtggacaaaagcagcgagtcagtctagctggtgtcttgattgatgaaagtccgattctcttgtttgatgagccactcgccaatctagatcccaagtcaggtcaggatattatcgaattgattgaccagattcataaggaagaggggacgacgactctgattatcgagcaccgtttggaggacgttctgcatcgccctgtggatcggattatcttgataaacgatggtcgtatcctttttaatgggagccctgaccagttgcttgcgactgatttattgactcaaaatggaattcgagaacccctttatctaacgactctccgtcaattaggtgtggacttagtcaaggaagaacagttagcgaatctggataacatgtctatctcaaaaggtcaggttcagctgcagaatgaactggcaaaagaaactccagaattgcagtcactctttaaattagaggacgtgtctttctcttatgatgatagaccgattttaaaatccctacatttagatattaaaaagggtgaaaagattgctattgtcggaaaaaatggagcagggaaatcaactctagccaaggctataagtagctttattcagacggaaggacgctatctttgggaaaaacaggatataaaaggcgattctgttgcagagcgggcggaacgagtaggctatgtgctacaaaatcctaatcaaatgatttcaaccaatatgatttttgatgaggtggctctagggctccgtttgcgaggtgtggatgagaaggaaattganacgagagtctatgaaaccttgaaaatctgtggactttatgaattccgtaattggcctatttctgccctgtcatttggtcagaaaaaacgtgtcaccattgcttcaattttggtcttaggagctgaaattattctcctagatgaaccgactgcaggtcaagatcagaagaactatactgagattatggaatttctcgaagagttacatcaaaaagggcataccattgtcatgattacccatgatatgcaattgatgctggattattcagaccgggtccttgtcatggtggatggagaattgattgccgatactgttccagccagtctgttgagcgatcctgagctgttagtaaaagccaatctaaaagaaacctccatctttaacttggctaagaaactagatgtggatccactggatttaacggcattttacaaagaaaggagagagggatgcaagctaaattaa

SEQ ID NO: 2020 - DNA, 384 bp, Streptococcus pneumoniae
atgaaagaagctataattgagtggaaggatttctctttccggtatgaaacacaacaagaaccgaccttgcaagggatagacttgaccatttacaagggagagaaagtcttaattgttggaccatctggatcaggtaaatctaccttgggtcagtgtttgaatgggattattcccaatatttacaagggtcagacatatggagaatttttgataaagggtcaaacagcctttgatatgagcatctatgataagtctcatctggttagcacagttttgcaggatacagatgggcagtttattggcttgtctgtggcagaagatttggcgtttgctctggaaaatgatgtgacagccctagatgagatgaaagggtcgtgtttataa

SEQ ID NO: 2021 - DNA, 213 bp, Streptococcus pneumoniae
gactttctctcccttgtaaatggtcaagtctatcccttgcaaggtcggttcttgttgtgtttcataccggaaagagaaatccttccactcaattatagcttctttcatcttactctcttcattcgcttcttagacttctattttatcataaatcaagcccttcttgcagtctcttctcttaaaatcttagcgccaaaaagattcctatcctag

SEQ ID NO: 2022 - DNA, 258 bp, Streptococcus pneumoniae
atgaaaatcaaagagcaaactaggaagttagccgcaggttgctcaaaacagtgttttgaggttgtagatgaaactgacgaagtcagctcaaaacagtgttttgaggttgtagatgaaactgacgaagtcagtaaccatacctacggcaaggcgaaactgacgtggtttgaagagattttcgaagagtataaaatgatggggaaggctgggcaactagtctttttcgatgtttatagattagttaggcaagtaagctag

SEQ ID NO: 2023 - DNA, 549 bp, Streptococcus pneumoniae
atggaaatcaaatttacaattaaacaagttgttgctgtcggaattggcgctgccctctttgtcgtcatcgggatgatcaacattccaacccctgttccaaatacaagcatccagcttcagtatgcggtacaagcgctactttctattatttttggaccgattatcggtttgcttgtcgggttgattggtcatgcaatcaaagactctcttgttggttatggtctatggtggacttggattatctctagcggactctttggtttagttgtgggactttttagaaagtacgttcgcgtgatcaatagtgtttttgactggaaagatattcttatttttaatctcattcaactacttgcaaatgcccttgtttggggtgtcttggcaccacttggagatgttgtgatttatcaagaagcggcagaaaaagtatttgcacaagggattgttgcgggaattgccaatggtgtatctgtagctattgcaggaactcttctcttacttgcctatgcaggaacccaaactcgtgcaggaagtttgaaaaaggactaa

SEQ ID NO: 2024 - DNA, 876 bp, Streptococcus pneumoniae
atgataaaggatatacaaggagataaaatgaataataatttactggtattacaatcagactttggtctggttgatggtgcggtatcggctatgattggagtggctttagaagagtctccaaccttaaaaatccatcacttgacgcacgatatcacgccttataatatttttgaggggagctatcgtctctttcagacggtggattactggcctgagggaacgacgtttgtatcggttgtcgatccaggtgtcggttcgaaacgtaagagtgtagttgccaagactgcaaaaaatcaatacattgtcacgccagataatgggacgctttcctttatcaagaaacacgttggcattgtagccattcgtgagatttctgaggtggccaataggcgtcaaaacacagagcattcttataccttccacggtcgtgatgtctatgcctatactggtgctaaactggccagtggtcacattacttttgaggaagtagggccagagctcagtgtggaacagattgtagagcttccagtcgtagcgaccatcatagaagatcatctggtgaagggagccattgatattctggatgtgcgtttcggttcgctttggacctctatcacacgggaagaattttacaagctggaaccagaatttggtgatcgttttgaagtgaccatctatcatgctgatatgctggtctatcaaaatcaggttgtctatggcaaatcatttgcagatgtgagaattgggcaacccatcctttacatcaactctctctatcgtttaggtttggctatcaaccaaggttcctttgccaaggcctataatgtaggtgtcggttcatcttggaccattgaaataaagaaaatagaaggataa

SEQ ID NO: 2025 - DNA, 1350 bp, Streptococcus pneumoniae
atgaaaattatccttgtcggagggggaaaagttggttttgccctctgtcgctccttggttgcagaaaagcatgatgttttgctgattgagcaagacgaagctgttctcaatcatattgtcagtcgctttgatatcattggtatccttggtaacggggccgattttgccattcttgagcaagccagcgtccaagattgtgatatctttatcgccctgactgagcacgatgaagtcaacatgattgcagcagttctagccaagaaaatgggagctaaagaaactatcgttcgggtgcggaaccctgaatattctaactcttatttcaaggaaaagaatattctcggtttttctcttatcgttaatcctgagctcttggctgcccgcgctatcgcgaatatcattgacttccccaacgccctgtctgtcgaacgctttgctggtggacgcgttagcctcatggaatttgtcgtcaagtccaccagcggtctttgccaaatgcccatttctgattttcgtaaaaaatttggtaatgtcattgtctgtgcgatagagagggagcatcaaattatcattccaagcggtgacatgactgtacaggataaagatagaatctttgtcactggtaaccgtgtcgatatgatactcttccataattattttaaatcacgcgccgtgaagagccttctcatcgttggggcaggtagaattgcctattatctacttggtattctcaaagatagtcgtatcgatacaaaagtcattgaaatcaatcctgaaatcgccagcttctttagcgagaaattcccaaatctctacatcgttcaaggagatggaaccgcaaaagatatcctgctggaagaaagtgctcaacactatgatgccgttgcgactctaacaggtgtcgatgaggaaaatctgattacatctatgttccttgacagggtaggtgtacagaaaaatattactaaggtcaatcgtaccagtctcctcgagattatcaatgcgcctgatttttcaagtatcatcacacctaaaagcatcgctgtagatacgattatgcactttattcgtggtcgagttaatgcccagtattcagaccttcaagccatgcaccatctagccaatggccaaatcgaaaccctgcaattccatatcaaggaagccaataaaatgactgccaaacctctttctcaactgaaattgaaaaaaggggttcttattgcagccattattcgaaagggcaagactattttcccaactggggaggatatgttggaagttggagacaagctcctagtaacaaccttgttgccaaacatcaccaagatttatgacttgattgcgaggtaa

SEQ ID NO: 2026 - DNA, 1437 bp, Streptococcus pneumoniae
atgaataaaagtatgattcgttacctcctttcaaagttacttttgattgaagctgttctcctcttggttcctgtggctatcgctgtctattaccgtgaatcgagccaagtctttacggccctcttttcgaccatagggattctcgtattgttaggcggttcagggagtttacagaagccaaaaaatcaacggatttatgccaaggagggagtcttgatcgttgccctctgttggatcctttggtctttctttggtggtctcccctttgtcttttctgggcaaatccctagcgttattgatgccttttttgaaattagttctgggtttacaactactggagcaagtattttgaacgacgtttcggttctcagccgttccctcctcttctggcgaagttttacccacttgattggagggatgggagtgcttgtttttgcacttgctattatggacaatgccaaaaatagccacctagaggtgatgaaggctgaggttccaggtcctgtttttggcaaggttgtatccaaactaaaaaacactgcccagattctctatctcctttatctagctctcttctccctctttgtcatcatctattatctagctggtatgcctctctacgatagttttgtcattgctatggggacagcgggaactggaggctttaccgtctataacgacggaattgcccactatggcagctcactgattacctatctggtcagtatcggagttctgatttttggggtaaatttcaacctctactactacctcatgctccgtcgcatcaaggccttctttggtgacgaagaacttcgggcttacttggtcattgtactggtttctacaggcttgattagcctcaacaccctctacctctacccagggttttcaaagagctttgaaatgaccttcttccaggtttccaacatcattacaacaactggttttggatatggagatattaccaactggcccctcttctcccagtttatcctcctcttcctcatgacaatcggtggttctgctggatcaactgcaggtggactcaagattattcgaggcctcatcctttcaaaaattgccaaaaatcaaattttgtccattctatctccccaccgtgttttgactctccatgtgaataaaacggtgattgataaggatacccagcataaaattctcaagtactttgtcatctatgctatgattttgctatcccttatctttattgtcagcctagatagcaatgattttctgatcgtgaccagcgctgtctttagctgtttcaataatatcgggcctattctaggaaccacttctagtttctcaatctttagtcctatctcaaaaattctcctctcctttgcaatgattgcaggccgcttggagatttacccaatcctacttctctttatgaagagaacttggtctaagaga

SEQ ID NO: 2027 - DNA, 1680 bp, Streptococcus pneumoniae
atggataagctagtcgctgccattgaaaagcaacaagggaaatttgaaaaaatttctactaataactatatgatggctattaaagatggattcattgctactatgcctttaattatgttttcaagctttttgatgattattattatgattcctaaaaatttcggagtagagttaccgagtccagctattgtctggatgagaaaagtgtatatgttaaccatgggagttttgggtattattgtttcagggactgttggaaagtcattagttggaaatgttaacagaaaaatgcctcacggaaaggtaataaatgatacttctgcaatgttggcagccatatgtagttatctggtattaactgtaacgcttgtagttgatgagaagacgggatctacaagtttgtcgacaaactatttaggatctcaaggattgataacttcgtttgtcagtgcctttattactgtaaatgtttaccgattctgtattaagcgagacattactattcatttacctaaggaagttcctggggctatatcacaagcttttagagatatttttcctttttcttttgttttacttattagtggtttgttagatattgtatctcggtttagtttagatgttccttttgcccaagtatttcaacaactattgactcctatttttaagggggcagaatcatatcctgctatgatgttgatttggtttatgtgtgctttgctttggtttgttggaattcatggaccatctattgtcttacctgctgttacagctttacaactgagcaatatggaagagaatgctcaacttcttgcaaatgggcagttcccttatcattctttaacacctaatttcgggaattatatcgctgctattggaggaacgggggctacctttgttgtaccatttattttgattttctttatgcggtctaaacaattaaaatcggtaggtaaagctacaattactcctgttttatttgcggtaaatgaacctcttctatttggtatgcctgttattttgaatccctatctttttgtcccttttttgatgactccaccagtaaatgtatttctaggaaaggtatttattgatttctttggaatgaatggattttatatccagttaccttgggcttttcctggtcccttgggattgttaattggaacgaattttcaacctatctcctttgtgcttttatctttgatgttagttgtcgacatattgatttatttgccattctgtagagcgtatgatagacagttactgatgaaagaagatgttgcaagctcaaatgatattattttagaggaggatacaagtgaaataatgcctggtgagatagatgtaataaaaagtaaggagttgaaagtactggttctttgtgcagggtctggaacaagtgcgcaattagccaatgcaattaacgagggcgctcaattagcagaagttagagtgattgcgaattcaggagcgtacggagctcattatgatattatgggtgtttatgatttaattattctggctccacaagttcggagttattatagagagatgaaggtggatgcagaaagattaggtattcagatagttgctaccagaggaatggaatatattcatttaacaaagagtccaagtaaatccttacaatttgtattggagcattaccaagctgtgtag

SEQ ID NO: 2028 - DNA, 1413 bp, Streptococcus pneumoniae
atggaaaatttacagtttaaagccttaccgaaggagtttttattaggagctgctaccgctgcttatcaagtagagggtgcaactagggtagatggtaaaggaataaatatgtgggatgtttatttgcaagaaaatagtccgttcttaccagatccagctagtgatttttattatcgttacgaagaggatatagctttggcggcagaacatggtttgcaggctttgcgtttatctatttcttgggttcgtatatttcctgatatagatggagatgctaatatattggctgttcgttattaccatagagtctttcagtcttgcttaaaacataatgtgattccgtttgtttctttacatcattttgattcgcctcagaaaatgttagaaacaggggattggttggatagagagaatattgatcatttcatacgatatgctcgcttttgtttccaagaatttacagaagtcaagcattggtttacaatcaatgaactgatgtctcttgctgcaggtcaatatataggaggtcagtttcctccaaatcatcattttcaattatctgaagcaattcaagcgaatcataatatgttgttggcgcatgctcttgcagtcctcgaatttcatcaattaggaattgagggagagataggttgtattcatgctttaaagccaggctatcctattgatgggcaaaaagaaaatattttggcagctaaacggtatgatgtttataataataaatttctattagatggaacttttttgggctactacagtgaggacacgctttttcacttgaatcaaatattggaagctaataattctagctttattattgaagatggtgatttagaaattatgaagagagctgcacctcttaatacgatgtttgggatgaattattatcgttcagaatttattcgtgaatacaaaggtgaaaatagacaagaatttaattcaacaggaataaaaggacagtcttcttttaaattaaatgctctaggtgaatttgtaaaaaaaactggtattccgacaacagattgggattggaatatttatcctcaagggttatttgatatgttgcttcgtatcaaagaagaatatcctcaacatccggtcatttatttaactgaaaatggtacagcccttaaagaagttaagccagagggcgagaatgatattattgatgacagtaagagaatccgttatattgagcaacatttacacaaagttttagaggctcgagatagaggagtcaatattcaaggctattttatatggtctttgcaagatcaattttcttgggcgaatggctacaataagcgatatggtcttttctttgttgattatgaaacacagaagagatatattaagaaaagtgctctttgggtaaaagggctaaaacggaattaa

SEQ ID NO: 2029 - DNA, 195 bp, Streptococcus pneumoniae
gatagcctggctttaaagcatgaatacaacctatctctccctcaattcctaattgatgaaattcgaggactgcaagagcatgcgccaacaacatattatgattcgcttgaattgcttcagataattgaaaatgatgatttggaggaaactgacctcctatatattgacctgcagcaagagacatcagttcattga

SEQ ID NO: 2030 - DNA, 345 bp, Streptococcus pneumoniae
atgaaatcaaaagaagaaataaatatgcttggttttacaattgtcgcttacgcaggagatgcaaggtcagatttgatggatgctttggcgtttgcgagagatggatattttgaacaggcaagagaattggttgagtctgcaaacgactcaatagtgtctgcccatcgagaacagactaatttattagcggaggaggcatctggagataattttgaagtgagttttatcatgattcatggtcaagatactttgatgacaacgatgctattgtatgatcaggtcaagttttttattgatgaatatgaacgaattcgaaagattgaagaacatattggtttgcaatga

SEQ ID NO: 2031 - DNA, 1941 bp, Streptococcus pneumoniae
ttgcagataaacgcaatcttgaaaaagaaaaagctactgttggagggaaataagatggttatcagagtatttgatcaacagaaaaatacttattctagctttgccttagaggaattaagttactatatgaatcgggtctttaagactaacatagagcttgtcgaggagaaggaagcggatatttttgtaggattagtcaataaagaggacagaaaagaccatgttcttatctcattagacaagggtaaggggagaattgagtctaatacaattgtaggtttacttattggaatttaccgaatgtttcatgaatttggggttgtgtacactagaccagggcgcagacatgactttgttccagagttacgatttgaagattttttagataaagagctatctatagatgaaacagccagttactatcataggggagtatgtatagagggagcggattcatttgaaaatatactagatttcattgattggctacctaagattgggatgaacagttttttcatccagtttgaaaatccttactcttttttgaaacgttggtatgaacatgagtttaatccatacctaaataaagaaaaattctcaaatgaattagtacaagaattgagtgataggttggataaagaattgcaaaaaagaggtcttattcatcatcgtgttggtcatggatggacaggtgaggttttaggttactcttcaaaatttggctgggaatcaggtcttagtatttcagaggagaagaaaccgtatgtcgctgaaataaacgggaaacgagaattatttaatacggctccgattttaaccagtctggatttttcaaatccagatgtggcggataagatggtagaaattatcaaggattatgccaagaaaagacctgatgttaactacttacatgtatggttgtcggatgctcgtaataatatttgtgaatgcgaaaactgtagacaagaattggtttcggatcagtatattcgtattctcaatcaattggatagggctttaacgagtgagggattagatacaaagatttgttttctgctttaccatgagttgctatgggcgcctcagaaagaaaaattagataatcctgaacgctttaccatgatgtttgcaccgattacaagaacatttgaaatgagttatgcagatgtagattttgacaattccatacctacgcctaaaccttatctgcgtaataaaattatacttccgaattctcttgaggaaaatttatcttatctttttgagtggcaaaaaacatttaaaggagatagtttcgtatatgactatcctttagggcgtgctcattatggcgatttaggctatatgaaaattagtcaaaccatttacagagatgtatcttatctttctaacctacatttgaacggttacatttcgtgtcaagaattacgtgccggattccctcataattttcctaattatgttatgggggaaatgctctggaagaagacaagaagttatgaagaattgattgaagaatacttttctgctttgtatggggaaaattggcagtctgttgttgaatatttagaaaaattatccagttattcctcatgtgattattttaatgcaattggcagtcgtcaaaatgatgttttagcgaatcattattatatagcttacaatctagctgataattttttgccaattattgaggaaaatatttctaagttattaaatagtcaaaaggatgaatggaaacagctcagttatcatcgtgaatatgttgttaagatggcgaaggctttatatcttcaagcaaccggaaaaacaaggcaagctcaagatgaatggagaaatgtgttgaattatatccgtgggcacgaactgctattccaatctaatttggatgtttatcgtgtaattgaagtagcaaaaaattacgctggtttccacttataa

SEQ ID NO: 2032 - DNA, 1323 bp, Streptococcus pneumoniae
atgaacaatattttagcgtttttagaaacaaaagtcgctccgtttggtgaaaaagttggcaaccaacggcatttgaaagctattcgtgaaggatttatgatggcaatgcctttgattttagtcggctctttatttcttattctaatcagttggcctcaagaggcttttacaaattggctgaatagtgttggattgctaagtatcttgacaactatgaatcagtcaacagtagcgattatctccttggtcgcttgtttcggtattgcctacaggttgtcggaaggatatggtacagatggtccgtcggcagggatcatagccttatccagttttgtattgatggcacctcgtttttcgagtatggtttatgataaaaatggggagcaggtcaagcagttatttggcggcgcaataccattttctagcctgaatgcatcttctttgtttatggcgattactattggattggttacagcagagatttatcgtatgtttatccagcgcggaattacgataaaaatgccaagtggtgtcccagatgtagtaagtaaatcattttcagctcttttacctggttttactacttttgttttgtgggctttggtcttaaaaggtcttgaagcggcaggagttgcaggaggtctcaacggactcctaggtgcaattgttggaacaccgcttaagttaattgcaggaacgcttccaggtatgattctatgtgttattgtaaactcattcttttggttctgtggagttaatgggggacaagttttaaatgcttttgtagacccagtttggttacaatttactacagaaaaccaagaagctgtggctgcaggacaaacactccaacacattattacattaccgtttaaagatttatttgtatttattggtggcggtggagcgactattggtcttgcgatttgtctcttcctatttagtaagagtcgtgcgaataaaacattaggtaagctagctattataccgtctatttttaatatcaatacagctattctatttacgtttccaacagttttaaatccgattatgctgattccgtttattgctactcctacaatcaatgccttgattacctatgtatcaatggctgtaggattagtaccctatacaacaggtgtaatccttccgtggacaatgccaccgattataggaggcttccttgcaacaggggctagttggcgaggagctctattacaagttgttttgattttggtttctgtagcaatttattatccattcttcaaaattgcagataaacgcaatcttgaaaaagaaaaagctactgttggagggaaataa

SEQ ID NO: 2033 - DNA, 1224 bp, Streptococcus pneumoniae
atgattacaaaacaatcagcctttttacaaaatagagccactatactggagtttctatatcgaaatccagcaacatcccgtacagatattgttaatgaaacaggacttactccagcaacaacgactaacatcataaaagaactaagcgaacagtccctcatatacgaaactggtgatgaatttagcgagttttccggatctggaagacgtagaaaaactatttctatcacagataatattccgtatgttgttggaggtattgaaataaacgtcctaggtatctttctcagtctatgtgacttacaagggaaaactcttttcgagacagaaattttgaatgaagattatcctatttcagaaatcaattccaccattaccaatatgataaaaacagctatagagtacgtccctttggaaacaaaattacttggatttggcttatcaatacctggacattattacaaagactccggaagtatcattacaaacaaccccatatgggaatcttttaatttattaaatgtaattaaaagattcaattttccttttattgtaaaaaataatatcgattgtatggctataggacaatacctttttaatccacacaatacccccgataactttattttcctacacgctggattaggtatttacacttcctttttcacaaaagaaaaaataggagcctctaaaaatccttatatcggagaaattggacacaccattgtcgaattgaatgggcaatattgtgaatgcggaaaaaaaggttgtttacaaacatatatttcggatgcttggttaatcaaacacgcccaattattatttaaaaattcccaactaactgtactaaaaagccttgtaaagactgaaaaagacattcatttagacacccttttaacggcttataatttaggcgactccgctttacgtcaacaaattgataaaggagtcaatttattagccacttctattgcaaatctcctcctcatcaatcctgctgataaaatctatatcaacagtcaattgcttaattatcaacctttcactcatgaagtcagggataaaatccaagaccagctccacttcgttccctttactcgtaatatagaaattgaaattttaccttacaacaaacatcgtggaagtataggagcttgtgcattagctatcgtcgcttttttcatagaacatagcaatgtattacaagatattatttcaccttaa

SEQ ID NO: 2034 - DNA, 219 bp, Streptococcus pneumoniae
aaagaaacgtcaaatgctcatgaaacaacgaatacaggtatcaaaactatgacaaaacaaatccctaaatttactaaagatactgctcaactttacacctgtaaatggttgttgtataataaagttacaaagatgtacgaccacactgttgtaaatcatagtgttcgcgaatatattactgatagcatttctacaaatacaagtaaagagagcggatga

SEQ ID NO: 2035 - DNA, 174 bp, Streptococcus pneumoniae
ttgcttattatcaatcgtttttttagcttatttgtcttagattggtatagaactgagctatggattaatactcttgtatcttatcctgttcctaaatatgttggtagaaaaatgaagcagttgttacgagtgtctgtattggaaaaaattttgtctatagaattctttaaatga

SEQ ID NO: 2036 - DNA, 186 bp, Streptococcus pneumoniae
attccaaattttctctatctgctcattttaataaacaatactagtgtaactatccttccagtcagaagcttgtcaaatcacaccgaaaattcttctaaaatttatctcgttaggcaatcaagcaaaaactcgacgatagtacaaacattatcatacaggattgacttcctaaattatatactttag

SEQ ID NO: 2037 - DNA, 285 bp, Streptococcus pneumoniae
atggattggtacgattatatgatacaggcatccaaacaatcacaattcaacgcaagccattggtttcgctatttgcgaaaagttatttttgaagactattcttatttaacaaaccaagatgtagaaaagttgctagactccaaagaactaacccgttttcaaaaaattagcttgaagtatgcctttcaagagcatactccaactcataaatatgtgatttcattaaataaacctgctaagttaaccaatgttcaaaaattgatggagaaatacaaacatggataa

SEQ ID NO: 2038 - DNA, 519 bp, Streptococcus pneumoniae
atggaacaattacattttatcacaaaattactagacattaaagaccctaatatccagattttagacatcatcaataaggatacacacaaggaaatcatcgccaaactggactacgacgccccatcttgccctgagtgcggaaaccaattgaagaaatatgactttcaaaaaccgtctaagatcccttacctcgaaacaactggtatgccttctagaattctccttagaaaacgccgtttcaagtgctatcactgttcaaaaatgatggtcgctgaaacttctatcgtcaagaagaatcatcaaattcctcgtattatcaaccaaaaaattgcgcaaaagttgattgagaagatttctatgaccgatattgctcatcagctggccatttcaacttcaactgtcattcgcaagctcaatgattctcactttgagcatgatttttcgcgtcttcctgagattatgtcctgggacgttgaaacagtccggggagtgactgtttcaatcgggagatggagatga

SEQ ID NO: 2039 - DNA, 768 bp, Streptococcus pneumoniae
atggagatgagctttattgcgcaagattttgaaaagctcgatatcatcactgttcttgaaggtagaacacaagctgtcatccgagatcactttcttaaatatgatagagccgtccgatgtcgcgtcaaaatcattactatggatatgtttagtccttactatgacttagctagacaacttttcccgtgtgctaaaatcgttcttgatcgctttcacattgtacaacatcttagccgtgctatgagtcgtgtgcatgtccaaatcatgaatcagtttcatcgaaaatcccatgaatacaaggctatcaagcgctactggaaactcattcaacaggatagctgtaaactgagtgataagcgattttatcgtcctatttttcgtatgcacttaaccaataaagagattttaaacaagcttttgagctattcggaagacttgaaacaccactatcaactctatcagctcttgctttttcacttccagaataaggaaccagagaaatttttcggacttattgaggacaatcttaagcaggttcatcctatttttcagactgtctttaaaaccttcctcaaagataaagaaaagattatcaacgcccttcaactacactattctaatgccaaactggaagcgaccaataatctcatcaaacttatcaagcgcaatgcctttggttttcgaaactttgaaaacttcaaaaaacggatttttatcgctctgaatatcaaaaaagaaaggacaaaatttgtcctttctcgagcttag

SEQ ID NO: 2040 - DNA, 1263 bp, Streptococcus pneumoniae
atggaacacatcaatcataccacattactcatcggaataaaagacaaaaacatcaccttaaataaagccattcagcacgatacccatatcgaagtcttcgctacacttgattatcacccacctaaatgtaaacactgtaaaggaaaacaaatcaaatacgacttccaaaagccttctaaaatcccttttatcgagattggtggtttccctagcctcattcatttgaaaaagagacgatttcaatgcaagtcctgtcggaaagtcactgtagctgaaacaactctcgttcagaaaaattgccaaatctcggaaatggtgagacagaaaattgcccaactcctactcaacagagaggctcttacacatatcgcttctaaattagccatctctacctctacctctaccgtctatcgtaagctcaagcaatttcatttccaagaggattacaccactttgcctgaaatcctctcctgggatgaattctcctaccagaaggggaaattggctttcattgctcaggatttcaacactaagaaaatcatgaccattcttgataacagacgtcaaacaaccatccgaaatcatttcttcaagtactcgaaagaagctagaaaaaaagttaaagtcgtcactgttgatatgtctggaagttatatccctctcattaagaaattatttcccaatgctaaaattgttctcgatcgtttccacattgtccaacacatgagcagggctcttaatcagactagaatcaacatcatgaagcaatttgatgataaatctctggaatacagagctcttaaatattactggaaatttatcctaaaagatagtcggaaactctctcttaagcctttctatgctagaactttcagagagaccttaactcctagggagtgtctgaagaaaatctttactctagtacctgaacttaaagattactatgacctgtatcaactactcctatttcatctacaagagaagaatactgaccagttttggggcttaattcaagacacgttacctcatctcaaccgcacctttaaaaccactttgagcacatttatttgctataaaaactacatcactaacgccattgaattgccttattctaacgctaaacttgaggccactaacaaactcatcaaagacatcaagcgcaatgcctttggttttcggaactttgaaaacttcaaaaaacggattttcatcgctctgaacatcaaaaaagaaaggacaaaatttgtcctttctcgagcttag

SEQ ID NO: 2041 - DNA, 258 bp, Streptococcus pneumoniae
tgggttgaagaaaagctaagctcgagaaaggacaaattttgtcctttcttttttgatgttcagagcgatgaaaatccgttttttgaagttttcaaagttccgaaaaccaaaggcattgcgcttgatgtctttgatgagtttgttagtggcctcaagtttagcgttagaataaggcaattcaatggcgttagtgatgtagtttttatagcaaataaatgtgctcaaagtggttttaaaggtgcggttgagatgaggtaa

SEQ ID NO: 2042 - DNA, 2325 bp, Streptococcus pneumoniae
atggttgttaagacagttgttgaagcacaagatatttttgacaaagcttgggaaggcttcaaaggcgtagattggaaagaaaaagcaagtgtatcacgctttgtacaagctaactacacaccttatgatggagacgaaagcttccttgcaggaccaacagagcgttcacttcacatcaagaaaattgtagaagaaactaaagcacactacgaagaaactcgtttcccaatggacactcgtccaacatctatcgctgatatccctgctggatttatcgacaaagaaaatgaagttatctttggtatccaaaatgatgaactcttcaaattgaacttcatgccaaaaggtggtatccgtatggctgaaactactttaaaagaaaatggatacgaaccagacccagctgttcacgaaatcttcactaaatatgtaacaacagttaacgacggtattttccgtgcctacacttcaaatattcgtcgcgctcgtcatgcacacactgtaactggtcttccagatgcatactcacgcggacgtatcatcggtgtttacgcacgtcttgctctttacggtgcagactacttgatgcaagaaaaagtaaacgactggaatgcaatcaaagaaatcgatgaagaaacaatccgtcttcgtgaagaagtaaaccttcaataccaagcattgcaacaagttgttcgcctgggtgacctttacggggttgatgttcgcaaaccagcgatgaacgtgaaagaagcaatccaatgggttaacattgctttcatggctgtctgccgtgtgattaacggtgctgctacatctctaggtcgtgtaccaatcgtattggacatctttgcagaacgtgaccttgctcgtggtacatttactgaatcagaaatccaagaattcgttgatgatttcgttatgaaacttcgtacagttaaatttgctcgtaccaaagcttatgaccaattgtactcaggtgacccaacctttatcacaacttctatggctggtatgggtaacgacggtcgtcaccgtgttactaagatggactaccgtttcttgaacactcttgacaacatcggtaactcaccagaaccaaacttgacagttctttggactgacaaattgccatacaacttccgtcgctactgtatgcacatgagccacaaacactcttctatccaatacgaaggtgtaacaacaatggctaaagacggatatggtgaaatgagctgtatctcatgctgtgtgtctccacttgatccagaaaatgaagaacaacgccacaacatccagtacttcggtgctcgtgtaaacgttcttaaagcccttcttactggtttgaatggtggttacgacgatgttcacaaagactacaaagtatttgatatcgaaccaatccgtgacgaagttcttgaatttgaatcagttaaagcgaactttgaaaaatctcttgactggttgactgacacttacgtagatgccttgaacatcatccactacatgactgataggtacaactacgaagctgttcaaatggccttcttgccaactaaacaacgtgccaacatgggattcggtatctgtggatttgctaacactgttgatacattgtcagctatcaaatacgctacagttaaaccaatccgtgacgaagatggctacatctacgattacgaaacaatcggtgactacccacgctggggtgaagatgacccacgttcaaacgaattggcagaatggttgatcgaagcttacacaactcgtctacgtagccacaaactatacaaagacgcagaagctacagtatcacttttgacaatcacatctaacgttgcttactctaaacaaactggtaactcaccagttcacaaaggtgtatacctcaacgaagatggttctgtgaacttgtctaaacttgaattcttctcaccaggtgctaacccatctaacaaagctaaaggtggttggttgcaaaacttgaactcactttctagccttgactttagttatgcagctgacggtatctcattgactacacaagtatcacctcgcgctcttggtaagactcgtgatgaacaagttgataacttggtaacaatccttgatggttacttcgaaaacggtggacaacacgttaacttgaacgttatggacttgaacgatgtttacgaaaaaatcatgtcaggcgaagacgttatcgtacgtatctctggatactgtgtaaacactaaatacctcactccagaacaaaaaactgaattgacacaacgtgtcttccacgaagttctttcaatggatgacgccttggatgcattgagctaa

SEQ ID NO: 2043 - DNA, 276 bp, Streptococcus pneumoniae
cacctttttatactcttcgaaaatctcttcaaaccacgtcagcttccatctgcaacctcaaaacagtattttgagctgacttcgtcagttctatttacaacctcaaagcagtgctttgagcagcctgcggctagtttcctagtttgcttttcgatttccattgagtgtaactgcttattttcttttattatacccttttttctgaaaaaaagaaaaaaggactttatttttttcaaaaatataatacagtttgaaataaaatatagactgttttag

SEQ ID NO: 2044 - DNA, 234 bp, Streptococcus pneumoniae
aacagtctatattttatttcaaactgtattatatttttgaaaaaaataaagtccttttttctttttttcagaaaaaagggtataataaaagaaaataagcagttacactcaatggaaatcgaaaagcaaactaggaaactagccgcaggctgctcaaagcactgctttgaggttgtaaatagaactgacgaagtcagctcaaaatactgttttgaggttgcagatggaagctga

SEQ ID NO: 2045 - DNA, 1071 bp, Streptococcus pneumoniae
gtgctaggcatgttgatttttcctttgttaaatgatttgtcaagaaaaatcatccatattgacatggatgccttttttgctgcagtggaaatcagggataatcctaaactcagaggaaaacctgtcattattggaagcgaccctcggcaaacaggtggacggggagtcgtttctacctgtagttatgaggcaagagcttttggtgtccattctgccatgagttccaaggaagcttatgaacgttgtccccaggctgtctttatctcagggaattatgagaaatacaagtctgtgggactccggattcgagctatttttaagcgctatacagatttgattgaacccatgagcattgacgaagcctatttggatgtgacagaaaataaactcggtatcaagtcagcggtcaaaattgctcgcctcattcaaaaagatatctggaaagaactccatctaactgcttccgcaggcgtttcttacaacaaattcttagctaaaatggcgagtgattatcaaaaaccacatggtttgacagtgattctacctgaacaggctgaggattttctcaaacaaatggatatttccaaatttcatggagtaggaaaaaagacagtagaacgtcttcatcaaatgggcgtttttactggtgctgatttacttgaagttcctgaggtaaccctaatagaccgttttggtagactaggctatgatctgtatcgaaaggctcgtggcattcacaactctccagtcaaatccaatcgcatccgtaaatcaatcggcaaggagaaaacctacgggaagattctccgtgccgaggaagatatcaaaaaagagctgactcttctatcagaaaaagtcgctctcaatctacatcaacaagaaaaagctggaaaaattgtcattttgaaaatccgctacgaggacttttcaactcttaccaaacgaaaaagtcttgctcaaaaaacacaagatgctagtcagataagccaaatagccctgcaactctatgaagaattaagcgagaaagaaagaggtgtccgcctattggggattaccctgactggattttaa

SEQ ID NO: 2046 - DNA, 189 bp, Streptococcus pneumoniae
ttggtaaataccgtatcgtgcttggtagtgttttgctactttacagttttgtccgtttatttgtataagaaaaaccttgaaggggtaactcttcaaggttttatactcttagaaaatctcttcaaaccgcgtcagctttatctgcaacctcaaaacagtgttttgagcagcctgcggctagcttcctag

SEQ ID NO: 2047 - DNA, 846 bp, Streptococcus pneumoniae
atgtatcttattgaaattttaaaatctatcttcttcgggattgttgaaggaattacggaatggttgccgatttccagtacaggtcatttgattttagcagaggagtttatccaataccaaaatcaaaatgaagcctttatgtccatgtttaatgtcgtgattcagcttggtgctattttagcagttatggtgatttattttaacaagctcaatccttttaaaccgactaaggacaaacaggaagttcgtaagacttggagactatggttgaaggtcttgattgctactttacctttacttggtgtctttaaatttgatgattggtttgatacccacttccataacatggtttcagttgctctcatgttgattatctacggggttgccttcatctatttggaaaagcgcaataaagcgcgtgctatcgagccaagtgtaacagagttggacaagcttccttatacgaccgctttctatatcggactcttccaagttcttgctcttttaccagggactagccgttcaggtgcaacgattgtcggtggtttgttaaatggaaccagtcgttcagttgtgacagaatttaccttctatcttgggattcccgttatgtttggagctagtgccttaaagattttcaaatttgtgaaagccggagaactcttgagctttgggcaattgtttttgctcttggtcgcgatgggagtagcttttgcggtcagcatggtggctattcgcttcttgaccagctatgtgaaaaaacacgacttcaccctttttggtaaataccgtatcgtgcttggtagtgttttgctactttacagttttgtccgtttatttgtataa

SEQ ID NO: 2048 - DNA, 651 bp, Streptococcus pneumoniae
ttggataaaatcgttggaaagcattcagaatatacctaccaactcttgacacgctaccctaatcctcagaaaaggcttgaggcaggatttgataagctgatagaaattaagcgattgaccgcttctaaaattcaggatatcctctcagtcgcacctcgttctatcggaacaacatctcctgctcgtgaattcgaaatcatcgaaatcatcaaacattacaagaggctcattgacaaggcggaaacatgtgtcaatgacttgatggctgagttcaactcggtcatcacgacggttactgggattgggggtcgtttaggggcggtcattttagccgagattcgaaatattcatgcctttgataatcctgctcaattacaagctttcgctggactggattcttctatttatcagtcaggtcagattgatttagctggaagaatgatcaaacggggttcccctcatctgcggtgggcactcatacaagctgccaaagcatgcgctcgcttttcacctgcttttaaggtctatcttaagactaagttagaacaaggaaaacattacaatgtagccatcatccaccttgcaaaaaaacttatccgaaccctgttttatatcctaaaaaagagctgccatttgacgaacaaaaagtga

SEQ ID NO: 2049 - DNA, 186 bp, Streptococcus pneumoniae
atgctagtgtcgcaaatacagcaagtacctactccgtatcttctggaagtggaagttctggcggtggcttctctggaggcggaggtggcggcagtatcggagccttttaaagagagctaccatagactgaaaaagtatgatataatggaagatagaagaaagacaaactataagaaaagtcaatag

SEQ ID NO: 2050 - DNA, 1893 bp, Streptococcus pneumoniae
ttgatgaaaaaaacttttttcttactggtgttaggcttgttttgccttcttccactctctgtttttgccattgatttcaagataaactcttatcaaggggatttgtatattcatgcagataatacggcagagtttagacagaagatagtttaccagtttgaggaggactttaagggccaaatcgtgggacttggacgtgctggtaagatgcctagcgggtttgacattgaccctcatccaaaggttcaggctgcgaaaaacggtgcagaactagcagatgtgactagcgaagtaacagaagaagcggatggttatactgtgagagtctataatccaggtcaggagggcgacatagttgaagttgacctcgtctggaacttaaaaaatttacttttcctttatgatgatatcgctgaattaaattggcaacctctgacagatagttcagagtctattgaaaagtttgaatttcatgtaaggggagacaagggggctgaaaaactctttttccatacagggaaactttttagagagggaacgattgaaaagagtaaccttgattatactatccgtttagacaatcttccggctaagcgtggagttgagttgcatgcctattggtctcggaccgattttgctagcgctagggatcagggcttgaaagggaatcgtttagaagagtttaataagatagaagactcgattgttagagaaaaagatcagagtaaacaactcgttacttgggtcctcccttcgatactttctatctccttgttattgagtgtctgcttctattttatttatagaagaaagaccactccttcagtcaaatatgccaaaaatcatcgtctctatgaaccaccaatggaattagagcctatggttttatcagaagcagtctactcgacctccttggaggaagtgagtcccttggtcaagggagctggaaaattcacctttgatcaacttattcaagctaccttgctagatgtgatagaccgtgggaatgtctctattatttcagaaggagatgcagttggcttgagattggtgaaagaagatggtttgtcaagatttgagagagactgtctaaatctagccttttcaggcaaaaaagaagccactctttccaatttgtttgcggattacaaggtatctgatagtctttatcgtagagccaaagtttctgatgaaaaacggattcaagcaagagggcttcaactcaaatcttcttttgaagaggtattgaaccagatgcaagaaggagtgagaaaacgagtttccttctgggggctcccagattactatcgtcctttaactggtttggaaaagactttgcaagtgggtatgggtgtcttgactatcttgcccctatttatcggatttggtttgttcttgtacagtttagacgttcatggctatctttacctccctttgccaatacttggttttctagggttagttttgtctgttttctattattggaagcttcgactagataatcgtgatggtgttctaaatgaagcgggagctgaggtctactatctctggaccagttttgaaaatatgttacgtgagattgcacgactggataaggctgaattggaaagtattgttgtttggaatcgtctcttggtctatgcaaccttatttggctatgcggacaaggttagtcatttgatgaaggttcatcagattcaagttgaaaatccagatatcaatctctatgtagcttatggctggcacagtatgttttatcattcaagcgcgcaaatgagccattatgctagtgtcgcaaatacagcaagtacctactccgtatcttctggaagtggaagttctggcggtggcttctctggaggcggaggtggcggcagtatcggagccttttaa

SEQ ID NO: 2051 - DNA, 1566 bp, Streptococcus pneumoniae
atgagaaaaatatacttatctattttcacaagtctcttgctgatgctaggacttgtcaatgttgctcaagccgatgaatatttacgcatcgggatggaagcagcatatgctccctttaactggacccaggatgatgatagcaacggagctgtcaaaatcgatgggaccaatcagtatgccaacggatacgatgttcaaatcgccaagaaaatcgctaaggacttaggtaaagaacctttggttgttaaaaccaagtgggaaggtctagtccctgcccttacttctggtaagattgacatgattatcgcaggtatgagtccaactgcagaacgcaaacaagaaattgccttttcgagcagttactacactaccgatccagttttgcttgtcaaaaaagattctgcgtacgcaagtgctaaatctttggatgactttaatggtgcgaaaatcacttctcaacaaggtgtctacctctacgacttgattgcacaaatcccaggtgctaaaaaagaaacagccatgggagacttcgctcaaatgcgccaagctcttgaggctggtgtcattgatgcttatgtttctgaacgtccagaagcactgactgctgaagctgcgaactctaagttcaagatgattcaagtagaacctggtttcaaaactggggaagaagatacagctatcgctatcgggcttcgtaaaaatgacaatcgtattagccaaatcaatgccagcattgaaaccatttcaaaagatgaccaagttgccttgatggatcgtatgatcaaggaacaacctgccgaagctacaacaactgaagagactagcagtagtttctttagccaagtcgctaaaattctttctgaaaactggcaacaactcttgcgtggtgctggtatcactcttttaatctctatcgtcggaaccatcataggtctcattattggacttgccattggtgtcttccgtactgctcctctctctgaaaacaaagccatttatggccttcaaaaactagtcggctgggttctcaatgtctacattgaaattttccgtggtacgccaatgattgttcaatcgatggttatctactatggaactgcccaagctttcgggatcaaccttgaccgtacactggctgctatcttcatcgtttcaatcaataccggtgcctacatgactgaaatcgtccgtggtggtatcctagcagttgacaagggacaatttgaagctgcgactgctcttggtatgacccataaccagaccatgcgtaagattgtcctacctcaggtagtccgtaacatcctacctgcaactggtaatgaatttgtcatcaatatcaaagatacatctgtattgaacgttatctctgttgtcgaactttatttctcaggaaataccgtggcaacacaaacctatcaatacttccagacatttacaatcatcgccgtgatttactttgtcctcaccttcaccgtaacacgtatcctacgatttatcgagcgccgaatggacatggatacctatactacaggtgctaaccaaatgcaaacggaggatttgaaataa

SEQ ID NO: 2052 - DNA, 741 bp, Streptococcus pneumoniae
atgacacaagcaatccttgaaattaaacacctcaaaaaatcctatggacaaaacgaagtgctaaaagacatttcactcactgtccacaagggagaggtcatctctatcatcggaagctctggaagcggaaaatcgaccttcctacgctccattaacctacttgaaacaccaactgatggacaaatcctttatcatggacaaaacgtcctcgaaaaaggctatgacctcacgcaataccgtgaaaagttggggatggttttccaatcctttaacctctttgaaaatctcaatgttcttgaaaacacaatcgtcgctcagacaactgtcctaaaacgcgaacgcacagaagctgaaaagattgccaaagaaaacctggaaaaggtcggcatgggagaacgctactggcaagccaaaccaaaacaactctcaggtggtcaaaaacaacgtgtggccatcgctcgtgccctctccatgaatccggacgctattctctttgatgaaccaacatcagctctcgatccagaaatggttggagaagtcctcaaaatcatgcaggacctggctcaggaaggcttgaccatgattgtcgtaacccatgaaatggaatttgcccgtgatgtctctcaccgtgttatctttatggataagggcgtgatcgctgaagaaggtaaaccagaagacctcttcaccaatcctaaagaagaccgaacaaaagagttccttcaacgctatctcaaataa

SEQ ID NO: 2053 - DNA, 216 bp, Streptococcus pneumoniae
atggctaagtcaaactttgaaaaagtagaatcagttgttggctgggttcgtgataagaaaatcacaggctaccgtatctctaaagaaacgaatgcgcgtgaaatgtctatcattgctctggcgcagggtcgtgcaaaagtaaaaaatatttcatttgaaacagccctaggcctaattgatttctatgaaaaaaattatgaaaaatttgaagattaa

SEQ ID NO: 2054 - DNA, 231 bp, Streptococcus pneumoniae
ttgttccatatgaatctttctaatgatggttttgtcgcttttcattataggtcatatgggactttttttctacacaaaaataggctccataatatctatagtggatttacccactacaaatattatagagccttttttttattgacaaaagtagtaaaaacgtatacaattaaatattataaagaagaaaataggagaaaaacatggctaagtcaaactttgaaaaagtag

SEQ ID NO: 2055 - DNA, 198 bp, Streptococcus pneumoniae
atgaaaagcgacaaaaccatcattagaaagattcatatggaacaattacattttatcacaaaactgctcgatattaaagacccaaacatcaagattctagatatcatcaatatggatacccacaaagaaattatcgctaagctggattatgaggcttcatcttgccctgattgtggaagtctaattgaagaaatatga

SEQ ID NO: 2056 - DNA, 384 bp, Streptococcus pneumoniae
atgattaaagaattgtatgaagaagtccaagggactgtgtataagtgtagaaatgaatattaccttcatttatgggaattgtcggattgggaccaagaaggcatgctctgcttacatgaattgattagtagagaagaaggactggcagacgatattccacgtttaaggaaatatttcaaaaccaagtttcgaaatcgaattttagactatatccgtaagccggaaagtcagaagcgtatatccgataaagaaccctatgaagaagtgggtgagatcagtcatcgaataggtgagggaggctctggcttagagattattatctcttttcttgaaccctttggagttttggaaccatcttggttaggggaaacccgagaactttag

SEQ ID NO: 2057 - DNA, 552 bp, Streptococcus pneumoniae
atgaaaggaaatatcatggatagttttgataaaggatggtttgttttacaaacttattctggttatgaaaataaggtgaaagaaaatctattacaacgtgcacaaacctacaatatgttggataatattctacgcgttgaaattccaacacaaacagtgcaagttgaaaaaaatggaaagagaaaagaagttgaagaaaatcgctttccaggttatgttcttgtagaaatggtcatgacagatgaagcttggtttgttgttcgaaacacaccaaatgttacaggatttgtcggatcacacgggaacagatcaaaaccaactccattattggaacaagaaattcgtgacattttggtatctatgggacaaactgttcaagaatttgatttcgatgttgagattggtcaaactgtacgtattattgatggtgcttttgcagactacactggtaagattacagaaattgataataacaaagtgaaaatgattatctctatgtttggtaatgacacagttgcagaagtaaacctaaaccaaatcgcagaattataa

SEQ ID NO: 2058 - DNA, 177 bp, Streptococcus pneumoniae
atgcgttttattggagatatttttagacttcttaaagacacaacatggccaactcgcaaggaaagctggagagattttcgttctatcatggaatacacagctttctttgtagtaattatttacatttttgaccagttgattgtttcaggtttgattcgatttattaacattttttag

SEQ ID NO: 2059 - DNA, 2196 bp, Streptococcus pneumoniae
atgaaattagataaattatttgagaaatttctttctctttttaaaaaagaaacaagtgaactagaggactctgattctactatcttacgtcgctctcgtagtgatcgaaaaaaattagcccaagtaggtccgattcgaaaattctggcgtcgttatcatctaacaaagattatccttatactaggtttgagtgcaggattgctagttggaatctatttgtttgctgtagccaagtcgaccaatgtcaatgatttgcaaaatgccttgaaaactcggactcttatttttgaccgtgaagaaaaagaggctggtgccttgtctggtcaaaagggaacctatgttgagctgactgacatcagtaaaaacttgcagaatgctgttattgcgacagaagaccgttctttctataaaaatgacgggattaactatggccgtttcttcttggctattgtcactgctggacgttcaggtggtggctctaccattacccaacagctggctaaaaacgcctatttatcgcaggatcaaactgttgagagaaaagcgaaagaatttttccttgccttagaattaagcaaaaaatatagtaaggagcaaattctaaccatgtaccttaacaacgcttattttggaaatggtgtgtggggtgtagaagatgcgagtaagaaatactttggagtttctgcatcagaagtgagtctggatcaagctgcgactctggcagggatgctcaaggggccggaactgtataatcccttgaattctgtagaagattctactaatcggcgcgatactgtcttgcagaatatggttgcagcaggatatattgataaaaaccaagaaaccgaagctgctgaagttgatatgacttcgcaattgcacgataagtatgaaggaaaaatctcagattaccgttacccctcttattttgatgcggtggttaatgaagctgtttccaagtataatctaacagaggaagagattgtcaataatggctaccgcatttacacagagctggaccaaaactaccaagcaaatatgcagattgtttatgaaaacatatcgctatttccgagggcagaggatggaacgtttgctcaatcaggaagtgtagctctcgaaccgaaaacagggggagttcgtggagttgtcggtcaagttgctgacaatgataaaactggattccggaatttcaactatgcaacccaatcaaagcgtagtcctggttctacaattaagcctttagttgtttatacgccagcagttgaagcaggctgggctttgaataagcagttggataaccataccatgcagtatgacagctataaggttgataactatgcagggatcaaaacgagtcgagaagttcctatgtatcaagccttggcagaatcgcttaatctacctgctgttgccactgttaatgatttgggtgtcgacaaggcttttgaggcaggcgaaaaattcggactcaacatggaaaaggtcgaccgtgttcttggtgtcgccttgggaagcggtgttgaaaccaaccctcttcaaatggctcaagcatacgctgcctttgcaaatgaaggtttaatgcctgaagctcattttattagtagaattgaaaatgctagtggacaagttattgcgaatcataaaaattcacaaaaacgggtgattgataagtctgtagctgacaagatgaccagtatgatgttggggactttcaccaacggtaccggtattagttcatcgcctgcagactatgtcatggcagggaaaactggaacaactgaagcagttttcaatccggagtacacaagtgaccagtgggtaattggttatactccggatgtagtgattagccactggcttggctttccgaccactgatgaaaatcactatctagctggctctacttcaaacggtgcagctcatgtctttagaaacattgccaataccattttaccttatacgccaggaagtacctttacggttgaaaatgcttataagcaaaatggaattgcaccagccaatacaaaaagacaagtacaaaccaatgataatagccagacagatgataatttgtctgatattcgagggcgtgcgcaaagtctagtagatgaggctagccgggctatctcagatgcgaagattaaggaaaaggctcaaacaatatgggattcgatagtcaatctatttcgctaa

SEQ ID NO: 2060 - DNA, 876 bp, Streptococcus pneumoniae
atgcaattcacatttacattacccgcctctctacctcaaatgacggtaaagcaattacttgaggaacaactcctcatccctagaaaaatccgtcattttttgagaatcaagaaacatattttgataaatcaagaagaagtccactggaacgaaatcgtaaatcctggagatgtttgccagttgacttttgacgaggaagattattcccaaaagacgatcccttggggcaacccagacttagtgcaggaagtttatcaagatcaacacttgattattgtaaacaaaccagaggggatgaaaacgcatggtaatcaaccaaacgaaattgcccttcttaaccatgtcagtacctatgttggccaaacctgctatgtcgttcatcgtctggacatggaaaccagtggcttagttctctttgccaaaaatccttttatcctgcccattctcaatcgcttattggagaaaaaagagatttctagagaatattgggctctagttgatggaaatatcaacagaaaagaacttgttttcagagacaaaattggacgtgatcgccatgatcgtagaaaaagaatagttgatgcaaaaaatgggcaatatgctgaaacgtatgtaagcagattaaagcaattctcaaacaagacttccttggctcattgcaagctaaagacagggcgaacccatcagattcgtgtgcacctttcgcatcataacttccctattttgggcgaccctctctataacagcaattcaaagacaagtcggcttatgcttcatgcctttcgactttcctttacccatccacttacattagaaaaattaaacttcactgccctctcaaatacttttgaaacagaattaaaaaagaatggatga

SEQ ID NO: 2061 - DNA, 1080 bp, Streptococcus pneumoniae
gtgatttgtagtgattcaagttactcttttcacaataaaaatttcatgattttcataaggaggaaatcactaatggtagttaaagttggtattaacggtttcggacgtatcggtcgtcttgctttccgtcgtatccaaaacgtagaaggtgttgaagttacacgcatcaacgaccttacagatccagttatgcttgcacacttgttgaaatacgacacaactcaaggtcgtttcgacggtactgttgaagttaaagaaggtggattcgaagttaacggtaaattcgttaaagtttctgctgaacgtgatccagagcaaatcgactgggctactgacggtgtagaaatcgttcttgaagctactggtttctttgctaagaaagaagcagctgaaaaacaccttaaaggtggagctaaaaaagttgttatcactgctcctggtggaaacgacgttaaaacagttgtattcaacactaaccacgacgttcttgacggtactgaaacagttatctcaggtgcttcatgtactacaaactgcttggctccaatggctaaagctcttcaagataactttggtgttgttgaaggattgatgactactatccacgcttacactggtgaccaaatgatccttgacggaccacaccgtggtggtgaccttcgccgtgctcgcgctggtgctgcaaacatcgttcctaactcaactggtgctgctaaagctatcggtcttgtaatcccagaattgaacggtaaacttgacggatctgcacaacgcgttccaactccaactggatcagttactgaattggtagcagttcttgaaaagaacgttactgttgatgaagtgaacgcagctatgaaagcagcttcaaacgaatcatacggttacacagaagatccaatcgtatcttcagatatcgtaggtatgtcttacggttcattgtttgacgcaactcaaactaaagttcttgacgttgacggtaaacaattggttaaagttgtatcatggtacgacaacgaaatgtcatacactgcacaacttgttcgtactcttgaatacttcgcaaaaattgctaaataa

SEQ ID NO: 2062 - DNA, 276 bp, Streptococcus pneumoniae
ccgtatgattcgtttgaagctgctttcatagctgcgttcacttcatcaacagtaacgttcttttcaagaactgctaccaattcagtaactgatccagttggagttggaacgcgttgtgcagatccgtcaagtttaccgttcaattctgggattacaagaccgatagctttagcagcaccagttgagttaggaacgatgtttgcagcaccagcgcgagcacggcgaaggtcaccaccacggtgtggtccgtcaaggatcatttggtcaccagtgtaa

SEQ ID NO: 2063 - DNA, 951 bp, Streptococcus pneumoniae
atgggcaagaaaagatgggcaagaaatggatctgagtcaaacgatgcttcttatgctcaagtagtgagtctttatgatgatacaagtatctctgttagtaataatgagacggacaaagtgttgactggatccctctatactgaaacaaatgaacagggattaacgattccaagcagtttactaaaaaattggaatgaacagacaggaaaaaatttgacaactaatgatcttattggcaaatcagtctcagccagcattgtagaaagtgctgccgaaactagtaagattgctcaatttcaaacgaagattgtacgtgtaatcaatgatgaagatgacatggaggacagcaacagtttcatgctgtctcatcaaatggaaacgattttgaaagaggctggatttacgaaagctgtatcttattttatcttggaactcaaagatccatcacagacaaaagtagtaacagaagaattacagaaaaataagaagtatactgtgctttctcaacagagagttcttgatattgtgattacctttattcgtgttattcagggattattgattgtgctttcatcacaagctattgtggtagcagcggttatgattggtatcattatttacatcaatatcatgcaacgttccaaggaaataggtgtcatgaaagcagttggttatcagaatcgtggtgtcaaaggaatttttatttacgaggctatctggattgtaggcatcgccttgctgctggcatttttggttgcacaaggggtgggaagtttggcgaatgcgattgtaagtcacttttacccatccatcactaaggtttttgaattaaatcttttatctgttttaggaactctagttttcgctctattacttggttatgtctcagcctacttcccggcgcgtaagattagtaaaatggatcctgtagaatcgttacgctatgaataa

SEQ ID NO: 2064 - DNA, 339 bp, Streptococcus pneumoniae
ttggttgcaggtctaacaaatggtgagttaatcgctccaatgacttacgaagagatgatgacgagcgacttttttgaagcttggtttcagaagtttctcttaccaacattaaccacaccatcggttattattatggataatgcaagattccatagaatgggtaagttagaacttttatgcgaggagtttgggcataaacttttatctcttcctccctactcacctgagtacaatcctattgagaaaacatgggctcatatcaaaaagcacctcaaaaaggtattaccaagttgcaataccttttatgaggctcttttgtcctgctcttgtttcaattga

SEQ ID NO: 2065 - DNA, 261 bp, Streptococcus pneumoniae
atggtgtggttaatgttggtaagagaaacttctgaaaccaagcttcaaaaaagtcgctcgtcatcatctcttcgtaagtcattggagcgattaactcaccatttgttagacctgcaaccaaagaaatcctctgatatcttcttccagatactttacctcttcttaactgaccttttaatgagcgaccatattctcgataaaaataagtatcgaatcctgtttcatcaatctaaacaggtgctaggtgctttaaactattaa

SEQ ID NO: 2066 - DNA, 348 bp, Streptococcus pneumoniae
atgtggtataatcttcttatggcatattcaatagattttcgtaaaaaagttctctcttattgtgagcgaacaggtagtataacagaagcatcacacgttttccaaatctcacgtaataccatttatggctggttaaagctaaaagagaaaacaggagagctaaaccaccaagtaaaaggaacaaaaccaagaaaggttgatagagatagacttaaaaactatcttactgacaatccagacgcttatttgactgaaatagcttctgaatttggctgtcatccaactaccatccactatgcgctcaaagctatgggctacactcgaaaaaaagaaccacacctactatga

SEQ ID NO: 2067 - DNA, 900 bp, Streptococcus pneumoniae
gtgatattaaaaatagaggacttagtgatgtcaatcatttcaactgatttaaccccttttcaaatagatgatacattgaaagcagccttgcgagaagatgttcattccgaagattacagtaccaatgccatttttgatcatcatggccaagccaaggtgtcgctttttgccaaggaagctggtgttttagcgggactaaccgtttttcaaagggtttttaccctatttgatgccgaggtgaccttccagaatcctcatcaatttaaggatggggatcgtttgactagtggcgatttagttttagaaatcataggctcggtgagaagtctcttaacatgtgaacgcgttgccttgaattttttacaacatttatcagggattgcttcgatgacagctgcttatgtagaagccttaggcgatgattgcattaaggtatttgatactcgaaaaactactcctaatttacgtctttttgagaaatatgccgtgagagttggcggtggctataatcatcgctttaatttatcagatgctatcatgctaaaagacaatcacattgcggcagtaggtagtgttcagaaggcaattgctcaagcgcgtgcctatgccccttttgtgaaaatggtcgaggtggaagtggaaagccttgctgctgccgaagaagctgcggcggcgggtgctgatattatcatgttggataatatgtcattggaacagattgaacaggccattaccctaattgcaggacgttctcggattgaatgttctggaaatattgatatgaccactattagccgttttcgtggtttagcgattgattacgtctccagtggtagtttaacccatagtgctaagagtcttgatttttccatgaagggtttaacctaccttgatgtctaa

SEQ ID NO: 2068 - DNA, 1311 bp, Streptococcus pneumoniae
atgattcatttaataatgattagcgccattgctctagccattggaattggttaccgcaccaaaatcaatattggcctgctggctattgctttttcttacctcatcgcaaccactctcatgggattaagccccaaagaacttcttcatttttggccaacctcactcttttttaccatttttagcgtctctctcttttataacgttgcaacaactaacggtactcttgatgttttggctcaacacattctctaccgcacacgcacccaccctaacgccctctacatgattttatacctgatggcaacccttttgtctgctttaggtgctggatttttcactactatggccgtttgctgtcctctagcgattaccctctgtcaaaaagcggacaaacaccctttgattggagctcaagccgtcaattggggagcttcaggaggggctaatttgataaccagtagctcaggcattgtctttcaaggcctgtttaagcaaatgggatgggaagagcaagctttttcacttggcaatcatatctttatcgtcagcattatctacccactcatcgtcttgcttttattatcctgttacagtcactatagtaagggaagaacaaactcatccttgactattgaccaaccaccactcctcagcaaggttcaaagacaaaccaccttgctcatgatcagcagcatggttttggtttggctttttcccttgttgcatctcattttcccaaacatcgcctggatagctacttatcaaaaaacatttgatattggctttgtctcaatactcatggtctgcctcgccttaaggctcaaattagggaagcaagaagccattttagctaaggttccctgggctacaattatcatgctctgcggcatgagcttactaatgtctctagcggtcaagtcaggtttagtcacactgatagggcacctcatgacaacaaccattcctcatttctggttacctctgttcttttgtgtgatagccggagtgatgtcactctttagttccaccctatccgttgtagctccagccctctttcccatcattgctatcatcagtgctcaaaatcctcagattgatattcacttactcacaacagccaccgttattggcgctctatctactaatatctcacccttttcatcagctggttctctcattcaactctcacttcccaatatagaggaacgtggccttgccttcaaaaagcaaattattctgggtgtccccatcagcttaagtttgggactcttgaccacctggattctcatccttctagcttccttaagttag

SEQ ID NO: 2069 - DNA, 186 bp, Streptococcus pneumoniae
aatattgttagaaatcgatttgactatcctgatctatttgtcctgttcttatttcatttcactatatctcaaattgagtatgacgaagtgcgctcccatgtcctgggaacgcactttcttcatatttttcatattcttgaatccatcgataaagactattgggatgaatttttaaagttgaactaa

SEQ ID NO: 2070 - DNA, 195 bp, Streptococcus pneumoniae
atgaaggggaaagagtatgaaaacagaactgtttcttttgctattagttcaaaaggagaaaaaatgaaagtagaaaatatttcgtatagggtggatcatcgtatattgtttgataatatttcttttgatacttcgagttcaggcgtgacattaattactggtaaaaatggtacaggaaagtcaactttactatag

SEQ ID NO: 2071 - DNA, 729 bp, Streptococcus pneumoniae
atgagtacaaaatatttatttatttacaatgagattcgtgaaaagattctttgtaataaatataccatgaacgaacaattacctgatgaaatgacattagctaaacagtttgcctgtagtcgaatgacgatcaaaaaagctttagacttgttagtttctgagggcttaatttttagaaaacgtgggcagggaacctttgttctctctcgtggcagctcaaaaagaaaattaatcgttccagaaagagatatccggggactgacaaaaatatctgaagatgctcattctacaattgactcgaggattattcacttcaaattagaatttgcaaatgaatttttagcagaaaaactacaggtcgctttgcagagtccagtttataatatttaccgcctgcgtattattgacggtaaaccttatgttctggaacaaacttatatgagtaccgatgttattccaggtattactgaagatattttacaaaaatcgatttacaattacattgaaggaaagttaggattgcatattgccagtgctacaaaaatcttacgagcttcttctagttcagaaaatgagcaacattacttgcagctccttccaacggaaccggtatttgaagtagaacaagtggcttatttggataacggaactccgtttgagtactcgattagtcgtcatcgctatgatttatttgaatttaattcttttgcattacgacattcttcctag

SEQ ID NO: 2072 - DNA, 1410 bp, Streptococcus pneumoniae
atgaaaaaaaagttagtatttcctaatctgttttggtggggagcagcttctagcggacctcagacagaaggtcaatatggaaaagtacatgaaaatgtgatggactactggttcaaaacgcatccagaagattttttcgataatgtcggacctcttgtagccagtaacttttttcatacttacaccgaagatttccacttgatgaaggaaattggagttaattctttccgcacttccatccaatggagtcgactcatcaagaatttagagacaggtgagcctgatccaaaaggtattgctttctacaatgccatcattgaagaagctaaaaagaaccagatggatcttgtgatgaatttacatcattttgatttaccagtggaacttcttcaaaaatacggtggttgggaaagcaaacatgtagtggagttattcgtgaagtttgccaagactgctttcacatgctttggagataaggttcattactggacaactttcaatgagccaatggtcattccagaagcaggatacttatatgctttccattatccaaatctaaaaggaaagggaaaagaggccgtacaagtcatctataatctaaaccttgctagtgcaaaagtgattcaactatatcgctcattagaacttgatggaaagattgggattattttaaacttgacacctgcttatccaagaagtaattctccagaagacttagaagcaagtcgatttacagatgacttctttaacaaagtcttcttgaatccagctgttaaaggaactttcccagaaagattggtaaaacagctagagagagatggcgtgttatggagtcataccgaaaaagagcttcaactgatgaaatcaaatacggttgattttcttggagtaaactactaccatccaaaacgtgttcaagcacaagcaaatcctgaggaatatcagacgccctggatgccagaccaatacttcaaagagtatgaatggccggagcgtcgcatgaatccatatcgtggttgggaaatttttccgaaatccatttatgatattgctatgattgtgaaggaagaatatggtaatatcccatggtttatcagtgaaaacggaatgggtgttgaaaacgaagcacggtttatcgatgaaaatggagttatcgatgacgtgtatcgtattgaattttatgaagaacatttaagatggctacataaagccattgaagagggaagtcactgttttggataccacgcttggaccgcatttgattgctggtcttggaataatgcatataagaatcgttacggatttatctccgttgatttagaaacgcaaaagagaaccatcaagagctcaggaagatggtatcgcaaagtaagtgacaataacggttttgaagtagaaattgaggagtaa

SEQ ID NO: 2073 - DNA, 1296 bp, Streptococcus pneumoniae
atgaaaaactcaaaatttatagaccaatttgccacctttgctggtaaactagggaaccaaattcatttaaaaaccctaagagatgcattcgtaacagtaatgccattatatattttggcaggtttaatcgttcttttgaacaacacggtatttaagtggattttccaaggggatacattaacaagattccaatattggggaataacaattgcaaacggtactttaagtatttcaggtatgattattgctgtaatggttggttatttcttagctaaaaacagagatttcgaaaacccgttagcagcatcaatgctatcattagtttctttaattgtgatgatgccaaatacagtttctgtagttcctgacggagcaaaagatgctgtaaacatttcaggtgttctttcattcaacaacacaggtacaggcgcaatgttcgccggggttatcgtagcgattattgcaacagaattattcattgaattatcaaatgttaaagctttacaaatgaaccttggtgaaaatattccaccagctgttagtagatcatttagcgtattacttccagtcatgaccgtcatctccttatttggggttgtttcagcattattattcaatataactggaatgaacttaatctcaatcattacaatctttattcaagaaccaattcgtcatattggtacaagcttaatcggggtcattattatttactctttaggaaatatgttatggctatttggtattcaccaagcagttatttacagtgccatcctagaaccattactattaattaacattactgaaaacatcactgcagcaaataatggacaagccattccacacatcatcaacctatcacaaatacaaacattcgctttaatgggtggtagtggatctacattatgtttattaatagcaacattcttagtgagtcgcaatgctgtctctaaaaacgtggctaaattatcttttggacctggtatcttcaatatcaatgaaccagtattattcggttacccaatcgtttataacatttcattagctattccatttatcacagttccagtccttggtattttaatcagctacttagcaacagttacaggattcatgagtcctgcatttatacaagttccttggactacaccagtattcttaaatgcatggttagcaacagcaggggacgtgagagcagttctagttcaattcatcatctttgcacttggagttcttctatacattccatttatcaaagttaatgacaaagttgttgaacaagaaatggaaggttaa

SEQ ID NO: 2074 - DNA, 387 bp, Streptococcus pneumoniae
atgattgagattaagttcattccagttatattgaataataatgctgaaacaaccccaaataaggagatgacggtcatgactggaagtaatacgctaaatgatctactaacagctggtggaatattttcaccaaggttcatttgtaaagctttaacatttgataattcaatgaataattctgttgcaataatcgctacgataaccccggcgaacattgcgcctgtacctgtgttgttgaatgaaagaacacctgaaatgtttacagcatcttttgctccgtcaggaactacagaaactgtatttggcatcatcacaattaaagaaactaatgatagcattgatgctgctaacgggttttcgaaatctctgtttttagctaagaaataa

SEQ ID NO: 2075 - DNA, 309 bp, Streptococcus pneumoniae
atgaaacaaattttattagtatgtaatgcgggaatgtcgacaagtatgcttgttaaaaaaatgcaacaaagtgcgactgaacgtgggattgaaatctctatccaagcaaaatcaatgacagaagctaaaaagaatatccatgaagcagatgtcattctaattgggccacaaattcgttatgagttacttgctgtgaaagaaattgcaggaaatatccctgtagataccattgatatgcgggattacggaatgatgaatggagcaaaagttctggaacaagcacttgcatggataggagaaataagatga

SEQ ID NO: 2076 - DNA, 309 bp, Streptococcus pneumoniae
atgacagaagaaatggaatatatctgttttcagctcattgccaatagtggagcagccaaatcatcctttattgaagccatccaactagctaaggcaggaaatttaaaagaagcgaaaattaaagttgaagaagcggaagactccttagtagaagcgcacaagattcactctaatctcatacaaaaagaagctactggagaaaaaataggattctccttgctatttatgcatgcagaagaccaaatggcttcaacagagattattcagttgctatctaaagaattcatcgatctctatcaaaataaatag

SEQ ID NO: 2077 - DNA, 225 bp, Streptococcus pneumoniae
gatagtattttaaaacgaaaggactataaaagctcatttccttcgcacttattttatagagatctatcattatactctttagaaatcaaaaagcaacacaccttgtcatcgttttatcgtaaacctgttaatgaggggctagtcttatctgcaatctcaaatcagtgttttgagctgaatggcactcgttttctagtttgctctttgattttaattgggccttag

SEQ ID NO: 2078 - DNA, 2673 bp, Streptococcus pneumoniae
ttgaaagctatggaggaaaatatggctgataaaaaaactgtgacaccagaggaaaagaaactcgttgctgaaaaacacgtagatgagttggttcaaaaagctctagttgcccttgaagaaatgcgtaaattggatcaagagcaagttgactacatcgttgccaaagcatcagtagcagctttggatgcccacggagaattggctttacatgcctttgaagaaacaggacgtggtgtatttgaagacaaagcaactaagaacttgtttgcctgtgaacacgtagtaaacaacatgcgccacactaagacagttggcgttatcgaagaagacgatgtaacaggattgactcttattgctgaaccagttggtgttgtttgtggtattactccaacaacaaacccaacatcaacagcaatcttcaaatcattgatttcattgaagacacgtaacccaatcgtctttgccttccatccatcagcacaagaatcatctgctcatgcagctcgtatcgtccgcgatgcagctatcgcagctggtgctcctgaaaactgtgtgcaatggattactcaaccatctatggaagcaacaagtgcccttatgaaccacgaaggtgttgcgacaatccttgcaacaggtggtaatgccatggttaaggcggcttattcatgtggtaaaccagctcttggggtaggtgccggaaacgttccagcttatgttgaaaaatcagcaaacattcgtcaagcagcacacgatatcgtcatgtctaaatcatttgataacggtatggtctgtgcatctgaacaagcagttatcattgataaagaaatttacgatgaatttgtagcagagttcaaatcttaccacacttactttgtaaacaaaaaagaaaaagctcttcttgaagagttctgcttcggcgtcaaagcaaacagcaaaaactgtgctggtgcaaaattgaacgctgacatcgttggtaaaccagcaacttggattgcagaacaagcaggatttacagttccagaaggaacaaacattcttgctgcagaatgtaaagaagttggcgaaaatgagccattgactcgtgaaaaattgtcaccagttattgcagttttgaaatctgaaagccgtgaagatggtattactaaggctcgtcaaatggttgaatttaacggtcttggacactcagcagctatccacacagctgacgaagaattgactaaagaatttggtaaagctgttaaagctattcgtgttatctgtaactcaccttctacttttggtggtatcggggacgtttacaatgccttcttgccatcattgacacttggatgtggttcttacggacgcaactcagttggggataacgttagtgccattaacctcttgaatatcaaaaaagtcggaagacggagaaataacatgcaatggatgaaacttccttcaaaaacatactttgaacgtgattcaattcaataccttcaaaaatgtcgtgacgttgaacgtgtcatgatcgttactgaccatgccatggtagagcttggtttccttgatcgtatcatcgaacaactggaccttcgtcgcaataaggttgtttaccaaatctttgcggatgtagaaccggatccagatatcacaactgtaaaccgtggtactgagattatgcgtgccttcaaaccagataccatcatcgcactcggtggtgggtctccaatggatgctgccaaagtaatgtggctcttctacgagcaaccagaagtggacttccgtgaccttgtccaaaaattcatggatatccgtaaacgtgccttcaagttcccattgcttggtaagaagactaaattcatcgcgattccaactacatctggtacaggatctgaagtaacaccatttgccgttatctctgataaagcaaacaaccgtaaatacccaatcgctgactactcattgacaccaactgtggcaatcgtagatcctgctttggtattgacagttccaggatttgttgctgctgatactggtatggacgtattgactcacgcgacagaagcatacgtatcacaaatggctagtgactacactgatggtttagcacttcaagccattaaattggtctttgaaaatctcgaaagctcagttaagaatgcagacttccactcacgtgagaaaatgcataacgcttcaacaatcgctggtatggcctttgccaatgccttcctaggtatttctcactcaatggcccataagattggtgcgcaattccacacaatacacggtcgtacaaatgctatcttgcttccatacgttatccgttacaacggtacacgtccagctaagacagcaacatggcctaagtacaactactaccgtgcagatgaaaaataccaagatatcgcacgcatgcttggacttccagcttctactccagaagaaggggttgaatcttacgcaaaagctgtctacgaactcggtgaacgtattgggatccaaatgaattttagagaccaaggaattgacgaaaaagaatggaaagaacattctcgtgaattagccttcctggcttatgaagaccaatgttcaccagctaacccacgtcttccaatggtagaccatatgcaagaaatcatcgaagatgcatactatggctacaaagaaagaccaggacgccgtaaataa

SEQ ID NO: 2079 - DNA, 411 bp, Streptococcus pneumoniae
gtggaaaatcttacgaatttttacgaaaagtatcgtgtttatctgactcgtccacgtttagagattttggcagtagttaccattgttttctgtgctgtactcgtcttttttctaaatattccaggaaaaggtgtcttaaaactcgataatggaacgattgtttatgatggcagtcttgtccgcggtaaaatgaatggccaaggtaccattaccttccaaaatggagaccaatatacaggtggcttcaacaatggagccttcaacggaaaaggtacctttcaatctaaagaaggctggacctacgaaggtgattttgtaaatggtcaggctgaaggaaaagggaaactaacaacagaacaagaagtcgtttatgaaggaacttttaaacaaggcgtttttcaacaaaaataa

SEQ ID NO: 2080 - DNA, 429 bp, Streptococcus pneumoniae
atgaaaaaattagtctttgtctgtctgggaaatatttgccgtagccctatggccgagtttgttatgaaatcaatgacagataactacgaaatccaaagtcgagcaacttcctcttgggaacatggcaatccgattcataaggggactcagggaatttttcaagagtatgagattccttatgacaagaacaagacatcgcttcagattagtaaggaagattttgaagcctttgattatattatcggaatggacgcttcaaatgtttccgacttacgtcagatgtgtccagtagactgtcaagataagatttactcattttcatctgaaagtgttccagacccttggtatacaggagattttgaagaaacctatcgacgtgttcaagagggttgtcaagcttggttagaacgtttagaaaaggagagttaa

SEQ ID NO: 2081 - DNA, 300 bp, Streptococcus pneumoniae
atgaatccaaatattacttttttaatcatgcttgtaggtatgatggccttgatgttctttatgcaacgttctcaaaagaaacaagctcaaaagcgtatggaaagcttaaataaactacaaaaaggctatgaagtgattacaatcggtggactttatggaacagtcgatgaagtagatacggagaagggaacaatagttcttgacgtagatggagtttacttgacttttgaactagctgctatcaagacagtattaccgctgaaagaaacagcttcactagaaggcgcaattgaaaaataa

SEQ ID NO: 2082 - DNA, 1977 bp, Streptococcus pneumoniae
atgtcaaatctatctgttaatgcaattcgttttctaggtattgacgccattaataaagccaactcaggtcatccaggtgtggttatgggagcggctccgatggcttacagcctctttacaaaacaacttcatatcaatccagctcaaccaaactggattaaccgcgaccgctttattctttcagcaggtcatggttcaatgctcctttatgctcttcttcacctttctggttttgaagatgtcagcatggatgagattaagagcttccgtcaatggggttcaaaaacaccaggtcacccagaatttggtcatacggcagggattgatgctacgacaggtcctctagggcaagggatttcaactgctactggttttgcccaagcagaacgtttcttggcagccaaatataaccgtgaaggctacaatatctttgaccactatacttacgttatctgtggagacggagacttgatggaaggtgtctcaagcgaggcagcttcatatgcaggcttgcaaaaacttgataagttggttgttctttatgattcaaatgatatcaacttggatggtgagacaaaggattcctttacagaaagtgttcgtgaccgttacaatgcctacggttggcatactgccttggttgaaaatggaacagacttggaagccatccatgctgctatcgaaacagcaaaagcttcaggcaagccatctttgattgaagtgaagacggttattggatacggttctccaaacaaacaaggaactaatgctgtacacggcgcccctcttggagcagatgaaactgcatcaactcgccaagccctcggttgggactacgaaccatttgaaattccagaacaagtatatgctgatttcaaagaacatgttgcagaccgtggcgcatcagcttatcaagcttggactaaattagttgcagattataaagaagctcatccagaactggctgcagaagtagaagccatcatcgacggacgtgatccagtcgaagtgactccagcagacttcccagctttagaaaatggtttttctcaagcaactcgtaattcaagtcaagatgccttgaatgttgtggcagctaaattaccaaccttcctaggtggatcagctgaccttgctcactcaaacatgacttatataaagacggatggacttcaagacgatgccaatcgcttgaatcgtaacattcagtttggtgttcgtgaatttgcaatgggaacaatcttgaacgggatggcccttcatggtggacttcgtgtatacggtggaactttcttcgtcttctctgactatgtgaaggcagctgtccgcttgtcagccttacaaggacttcctgtgacttatgtctttacccatgattcaatcgcagttggggaagatggtccgactcacgaaccagttgagcatttagcaggtcttcgtgctatgccaaatctaaatgttttccgtccagcagatgcgcgtgaaactcaagcagcttggtaccttgcagtgacaagtgagaaaacaccaactgcccttgttttgacacgtcaaaacttgactgttgaagatggaacagacttcgacaaggttgctaaaggtgcttatgttgtatatgaaaatgcagccgactttgataccatcttgattgcgacaggttcagaggttaatcttgctgtctcagctgctaaagaattggctagtcaaggcgaaaaaatccgcgtagtcagcatgccatctacagatgtctttgataaacaagatgcagcttacaaggaagagattcttccaaatgcagtccgtcgtcgtgttgcagtcgaaatgggtgcaagtcaaaactggtacaaatatgttggtctcgatggtgccgttctaggtattgataccttcggagcctctgccccagcaccaaaagtattggcagaatatggctttactgtagaaaatcttgtaaaaattgttcgaaacttgaaataa

SEQ ID NO: 2083 - DNA, 243 bp, Streptococcus pneumoniae
tggaaggtgtctcaagcgaggcagcttcatatgcaggcttgcaaaaacttgataagttggttgttctttatgattcaaatgatatcaacttggatggtgagacaaaggattcctttacagaaagtgttcgtgaccgttacaatgcctacggttggcatactgccttggttgaaaatggaacagacttggaagccatccatgctgctatcgaaacagcaaaagcttcaggcaagccatctttga

SEQ ID NO: 2084 - DNA, 306 bp, Streptococcus pneumoniae
ttgacgccattaataaagccaactcaggtcatccaggtgtggttatgggagcggctccgatggcttacagcctctttacaaaacaacttcatatcaatccagctcaaccaaactggattaaccgcgaccgctttattctttcagcaggtcatggttcaatgctcctttatgctcttcttcacctttctggttttgaagatgtcagcatggatgagattaagagcttccgtcaatggggttcaaaaacaccaggtcacccagaatttggtcatacggcagggattgatgctacgacaggtcctctag

SEQ ID NO: 2085 - DNA, 735 bp, Streptococcus pneumoniae
gtgatcatatcgacccatacacagttgcagcaattctcaacatttcctaagttagagcatgttaagtttatcggtcttacccactgtggacgaatctgggaaggatggggtgttccaaaagaacgtatcatcgttgttaaagcaggtgacactatcgaattaaaagatatgaagattcatgcagtagaatcatttgaccgtacttgcttggtaactctcccagtgaacggtgctgatgagacaggcggtgaacttgctggcttggctgttacagatgaagaaatggctcaaaaggctgttaactatatctttgaaacaccaggtggaaccatctatcatggtgcagattctcacttctcaaactattttgcaaaacatggtaaagactttaaaattgatgttgctttgaataactatggtgaaaatccggtaggtatccaagacaaaatgacatctatcgaccttcttcgtatggcagaaaatctgcgtaccaaagtcattatcccagttcactatgatatctggtctaacttcatggcttctactaatgagattctagaactttggaaaatgcgaaaagatcgcttgcaatacgatttccatccatttatctgggaagttggcggtaagtacacttatcctcaagatcaacacttagtagaataccatcatccacgtggttttgatgattgttttgaacaagactctaacattcaatttaaagctttgctataa

SEQ ID NO: 2086 - DNA, 408 bp, Streptococcus pneumoniae
atgccaaacgtcaaagaaattacaagagagtcatggattttagccactttcccagagtggggaacatggttgaacgaagaaatcgaagaagaagtcgtacctgaaggcaactttgccatgtggtggctaggcaactgtggtacttggattaagacaccagctggtgctaacgttgtcatggacctttggtcaaaccgtggaaaatcaaccaaaaaagtgaaagatatggttcgtgggcaccaaatggcaaatatggcaggtgttcgtaagttgcaaccaaacttgcgtgttcagccaatggttatcgatccatttgctatcaacgaactagactattacttagtttcacacttccacagtgatcatatcgacccatacacagttgcagcaattctcaacatttcctaa

SEQ ID NO: 2087 - DNA, 1674 bp, Streptococcus pneumoniae
atggtactggataaggcaagttgtgatttgcttcaatatttgatggatcaagaaacgtccaaaacgattatggcgatttcgaaagatttgaaagagtcaagaaggaaaatttattatcacattgacaaaatcaatgctgctctggttgacgaggcgcttcacatcattagtattccacgaattggtattcacttaacggaagagcagagagatgcttgttgtaaactattatcggaagtagattcgtacgattatatcatgagtgcgcatgaacgtatgatgataatgttactatggataggtatttctaaagaacgtattacgattgaaaaattgatagagttaacagaggtatctaggaatactgttctcaatgatttgaatagcattcgttatcaactaactttggaacaatatcaggtgaccttgcaagtgagcaagtcacagggataccaccttcatgcccaccctcttaataaaattcagtatcttcaatcgcttctatatcatatttttatggaagaaaatgccacttttgtatctattttagaagataagatgaaagagaggttagatgatgagtgtttgctttctgttgaaatgaaccaattttttaaggaacaggttcctttagttgaacaagatttagggaagaaaataaaccatcatgaaataacttttatgttgcaggttctaccttatttgctgttaagctgtcataatgttgaacagtatcaagaaagacatcaggatatagagaaagaattttctttgataagaaaaagaatagagtatcaggtgtctaagaaattaggagaacggttgtttcaaaagtttgaaatttctttgtcaggacttgaagtttctcttgtagctgttctcctcctctcctatcgtaaagatttggatattcatgcagaaagtgatgattttcgtcaattaaaacttgctttagaagaatttatctggtattttgaatcacaaatccgaatggagattgagaacaaggatgatttgttacgaaatttgatgatccactgtaaagccttgttatttagaaagacttacggtattttttctaaaaatcctctaacaaaacaaattcgatccaagtatggagaattatttttagtcactagaaaatctgcggaaattttagaaggagcatggtttattcggctaacagacgatgatattgcctatttgacgattcatattggaggatttttaaagtatacaccatcgtctcaaaaaaatatgaaaaaagtttatctcgtttgtgatgaaggtgttgcggtttcgagacttttgctgaaacaatgcaaactttattttccaaatgagcaaattgacactgtatttacaacagaacaatttaagagtgtggaagatattgcacaagttgatgtagtgattactactaatgatgatttggatagcagatttccgattttaagggttaatcctatccttgaagcagaagatattttgaaaatgctagactatcttaaacacaatatatttcgtaataagagcaaaagtttcagtgaaaatctttctagtcttatttcgtcttatattgtagacagcaagttggctagtaagttccaagaagaggttcaaacacttataaatcaagaaatagtagttcaagcttttttggaagatatttga

SEQ ID NO: 2088 - DNA, 705 bp, Streptococcus pneumoniae
atgaatcaagtaatcaatgctatgcgtaaacgagtctgtgatgccaatcaatcattgccaaaacatggacttgtcaaatttacctgggggaatgtatctgaagtcaatcgcgaactcggtgtcattgttatcaaaccatcaggcgtggattatgacgaattgacacctgaaaacatggtagtgactgatctagatggtaagatcctagaaggggatttaagaccatcttccgacctcccaactcatgtgcaattatataaggcttggtcagaaattggtagtgtggttcacacccattcgacagaagctgttggttgggctcaggcaggtcgtgatattcctttctacggaacaacccatgcagattatttctacggttcaatcccttgcgcccgtagtttgaccaaggacgaagtagaagtggcctatgaaaaagatactggcctggttatcgtagaagagtttgaacatcgcggacttaacccggttgaagtaccaggaattgttgtacgcaatcacggtccattcacctggggcaaaaatccagaggatgctgtttatcactctgtcgtactagaggaagtatcaaagatgaatcgctttacagaacaaatcaattcaagagttgaacctgctccccagtacatactagagaaacactaccaacgtaaacatggaccaaatgcttattatggtcaaaagtaa

SEQ ID NO: 2089 - DNA, 864 bp, Streptococcus pneumoniae
atggtacgtccaattggaatttatgaaaaggcaaccccaacacactttacttggctagaacgtttaaattttgccaaggagttaggctttgattttgtcgagatgtctattgacgaacgtgacgagcgtttagcaagacttgactggagtaaggaagaacgcttggaagttgtcaaagcaatctatgaaactggtgttcgtattccttctatctgtttttcaggccatcgtcgctacccattgggttcaaaagatccagttctagaggaaaaatctctagaactcatgaaaaaatgtatcgaattagctcaagacttgggagttcgtacgattcaattagctggttacgatgtttactatgaggaaaagtcaccccagacacgccaacgttttatcaaaaatttgagaaaagcctgtgactgggctgaagaagctcaggtggtacttgctattgaaattatggatgatcctttcatcagtagcatcgaaaaatatttggctatagaaaaagagattgactctcccttcctctttgtatatccagatattggtaatgtgtctgcatggcataatgatatctatagtgagttttatcttggtcatcatgccatcgcagctctccatctcaaggatacttatgcagtgacagaaagttcaaagggccagttccgagatgtacctttcgggcaaggttgtgtcaaatgggaagaagctttcgatattttaaaggaaaccaattataatggacctttcctaatcgaaatgtggtctgaaaattgtgaaacagtagaagaaacacgcgcagccattcaagaggcgcaagcttttctctatccactcattaagaaagcaggtttgatgtaa

SEQ ID NO: 2090 - DNA, 666 bp, Streptococcus pneumoniae
atgacaaaaagaatacctaatttacaagttgcattagaccattcagacttgcaaggagcgattaaagcagctgtttctgttggtcaggaagtagatattatcgaagctggaactgtttgcttgcttcaagttggaagtgaactggctgaagtcttgcgtagccttttcccagataagattattgtggcagacacaaaatgtgctgatgctggtggaacagttgctaaaaataatgcggttcgtggagcagactggatgacttgtatctgttgtgcaaccatccctactatggaagcagctctaaaggctatcaagactgaacgaggagaacgaggcgaaatccagatcgagctttatggcgattggacttttgaacaagctcagctttggctagatgcaggtatctcacaagctatttatcaccaatctcgtgatgctcttcttgctggtgaaacttggggtgaaaaagaccttaataaggttaaaaaactcattgacatgggcttccgtgtatctgtaacaggtggtctagatgtagatactctcaaactctttgaaggtgttgatatctttacctttatcgcaggtcgtggaattacagaggctgcggatccagcaggagcagcgcgtgccttcaaggatgaaatcaaacgaatttgggggtaa

SEQ ID NO: 2091 - DNA, 486 bp, Streptococcus pneumoniae
atgaatttaaaacaagctttaattgacaatgactcgatccgactaggtttagaggctaacaattggaaagaagcagtcaaggtagcagtagatcccttaattgaaagtggggcaattttgccagagtattacgatgctatcattgaatcgactgaagagtatgggccttactatatcttgatgccaggtatggctatgccccacgctagacctgaagctggtgtgcaaagtgatgccttttcattgattaccttacaaaatcctgttgtattttcagatgggaaagaggtatctgttttgttggcactagcagcaacaagttcaaaaattcacacaagtgtagccattccacaaattattgccctgtttgaattagaagattctattgcacgtttacaggcttgccagactaaagaagatgtcttggctatgattgaagaatctaaggatagcccttatctcgaaggattggatttggaaagttag

SEQ ID NO: 2092 - DNA, 282 bp, Streptococcus pneumoniae
atggttaaagtattagcagcgtgcggaaatggaatgggttcatcaatggttatcaagatgaaggttgaaaatgctctccgtaagcttaatcaaacagattttacagtcaattcatgcagtgtcggtgaagctaaaggtttagcagtaggatatgacatcgtaatcgcttctcttcatttgattcaagaattggaagggcgaactaatgggaagttaattgggcttgataacttgatggatgataaagaaatcaccgaaaaactcagtcaagcactacagtaa

SEQ ID NO: 2093 - DNA, 1527 bp, Streptococcus pneumoniae
ttggtctttttgtttgcgctttcgcattatataataaacttacaaaaacaattcaaaaggagaacaattatggaagtcgtttcaagtgttctaaattggttttctagcaatattttgcagaatcccgcatttttcgtaggtttattggtgttgataggatatgcacttttgaaaaaacctgcccatgacgttttttcagggtttgttaaagcaacagtagggtatatgttgcttaacgtgggtgctggtggtttggttacaacctttcgtccaatcttagcagctcttaactacaaattccaaattggtgcagcggttatcgacccttactttggacttgctgcagcaaacaacaaaattgtagcagagtttccagattttgttggaactgcaactacagctctattgattggttttggaataaatatcttgctcgtagctcttcgaaagattacgaaggtaagaaccctctttattactggtcacatcatggtacaacaagctgcaacagtatctcttatggttctattcttagtaccacaattgcgcaatgcttacggtacagcagcgattggtatcatctgtggactttactgggcagttagttcaaatatgactgttgaggcaactcaacgcttgactggtggtggcggatttgcgattggtcaccaacagcaatttgcaatctggtttgtagataaagtagcaggacgctttggtaagaaagaagaaagtttagacaatcttaaattacctaagttcctctcaatcttccacgatacagttgttgcatctgctaccttgatgctcgtattcttcggagccattcttttaatcttgggtccagacattatgtctaataaagaagtcatcacttcaggaactctattcaatcctgctaaacaagatttctttatgtacattatccaaacagcctttaccttctcagtttacttgttcgttttgatgcaaggtgtccgaatgttcgtatctgagttgacaaacgccttccaaggtatttcaaacaaattgttgccaggttcattcccagcggttgacgttgcagcttcttatggatttggttctccaaatgctgtcttgtcaggatttacctttggtttgattggtcaattgattacaattgttttgctcatcgtctttaaaaatccgattcttattattacaggatttgtaccagtgttctttgacaatgcagccattgcggtctacgctgataaacgcggcggatggaaagcggctgttatcctttcctttatatcaggtgtccttcaagttgctctaggagctctttgtgtggcccttctcgatttggcatcttatggtggctaccatggaaatatcgactttgaattcccatggcttggatttggatatatcttcaaataccttggtattgttggttatgtacttgtgtgtctcttcttgcttgttattcctcaacttcaatttgccaaagcaaaagataaagagaaatattacaacggtgaagttcaagaagaagcttag

SEQ ID NO: 2094 - DNA, 624 bp, Streptococcus pneumoniae
atgttgaataagataagagactatctagacttttctggtttgcagtaccgtagtcctgataaagcgggagcagagcgagagaagatgctggcgttccgccacaaaggacaagaggcccgaaaggcttttacagaactggccaaagcctttcaagcaagccatccagaatggcaactccaacagactagtcagtggatgaatcaggcccagcgtttgagaccacatttttgggtttatctacagagagacggacaagtgacagaacctatgatggccttacgtttgtatgggacatctactgactttggaatttctttggaagtcagtttcatcgaacgtaagaaggatgagcaaacactgggcaagcaggccaaagttttagacattccaaccgttaaagggatttattatctaacctactctaatggtcaaagtcaacggtgggaggcgaatgaagaaaagcgtcgtactttacgcgagaaggtgagaagtcaagaagttcgaaaagttttagtgaaggtagatgttcctatgacagaaaattcgtctgaagaagaaatcgtagaaggcttattgaagtcttattctaaaattcttccctattatctagctacgagaaaataa

SEQ ID NO: 2095 - DNA, 987 bp, Streptococcus pneumoniae
atggtagtatttacaggttcaactgttgaagaagcaatccagaaaggattgaaagaattagatattccaagaatgaaggctcatatcaaagtcatttctagggagaaaaaaggctttcttggtctatttggtaaaaaaccagcccaagtggatattgaagcgattagtgaaacgactgttgtcaaagcaaatcaacaggtagtaaaaggcgttccgaaaaaaatcaatgatttgaacgagcctgtgaagacggttagtgaagaaaccgttgaccttggtcatgtggttaatgctattaaaaaaatagaggaagaaggtcaaggtatttctgatgaagtcaaggctgaaatcttaaaacatgaaagacatgccagcactatcttagaagaaactggtcacattgagattttaaatgaacttcaaatcgaggaagcgatgagggaagaagcaggcgctgatgaccttgaaactgagcaagatcaaactgaaaatcaagacttgaaagagatgggcttgaaggtcgagcaaagttatgatattgcccaggtggctacggatgtgactgcctatgttcaagcgattgtggatgacatggatgttgaagctacactttcaaatgattataaccgtcgtagcatcaatctacaaattgacaccaacgaaccaggtcgtattatcggctaccatggtaaagtcttgaaggccttgcaactgttggctcaaaattatctttacaaccgctattccaaaaccttctacgttacaatcaatgtcaatgattatgtcgaacaccgtgcagaagtcttgcagacctatgcgcaaaaattggcgaatcgtgttttggaagaaggtcgcagtcataaaacagatccaatgtcaaatagcgaacgcaagattatccatcgtattatttcacgtatggatggcgtgactagttactctgaaggtgatgagccaaatcgctatgttgttgtagatacagaataa

SEQ ID NO: 2096 - DNA, 831 bp, Streptococcus pneumoniae
atgggagtgaaaaagaaactaaagttgactagtttgctaggactgtctctgttaatcatgacagcctgtgcgactaatggggtaactagcgatattacagccgaatcggctgatttttggagtaaattggtttacttctttgcggaaatcattcgctttttatcgtttgatattagtatcggagtggggattattctctttacggtcttgattcgtacagtcctcttgccagtctttcaggtgcaaatggtggcttctaggaaaatgcaggaagctcagccacgcattaaggcgcttcgagaacaatatccaggtcgagatatggaaagcagaaccaaactagagcaggaaatgcgtaaagtatttaaagaaatgggtgtcagacagtcagactctctttggccgattttgattcagatgccggttattttggccctgttccaagccctatcaagagttgactttttaaagacaggtcatttcttatggattaaccttggtagtgtggatacaacccttgttcttccgattttagcagcagtattcacctttttaagtacttggttgtccaacaaagctttgtctgagcgaaatggcgctacgactgcgatgatgtatgggattccagtcttgatttttatctttgcagtttatgcgccaggtggagtcgccctatactggacagtgtctaatgcttatcaagtcttgcaaacctatttcttgaataatccattcaagattatcgcagagcgcgaggccgtagtacaggcacaaaaagatttggaaaatagaaaaagaaaagccaagaaaaaggctcagaaaacgaaataa

SEQ ID NO: 2097 - DNA, 372 bp, Streptococcus pneumoniae
ttgaagaaaaactttcgtgtaaaaagagagaaagattttaaggcgattttcaaggaggggacaagttttgctaatcgcaaatttgtgatctaccaattagaaaaccagaaaaaccattttcgagtaggtctatcagttagcaaaaaactggggaatgccgtcactagaaatcaaattaagcgacggattcggcatattatccagaatgcaaaagggagtctggtagaagatgtcgactttgttgtcattgctcgaaaaggagtcgaagccttgggatacgcagagatggagaaaaatctactccacgtattaaaattatcaaagatttaccaggaaggaaatgggagtgaaaaagaaactaaagttgactag

SEQ ID NO: 2098 - DNA, 1191 bp, Streptococcus pneumoniae
atgacaaaaacaattgcaatcaatgcaggaagttcaagtttgaaatggcaattatacttaatgccagaagaaaaagtattggcgaaaggtttgattgaacgtatcggtttgaaagattcaatttcaactgtaaaatttgacggccgttctgaacaacaaattttggatattgaaaatcatacacaagccgttaaaattttattggatgacttgattcgtttcgatattatcaaggcttatgacgagattacaggtgttggacatcgtgttgttgctggtggagaatatttcaaagaatcaacagttgttgagggagatgttttagaaaaagttgaagagttgagtttgttggctcctctacacaacccggccaatgcagcaggtgttcgtgccttcaaggaattgttgccagacattaccagtgtagttgtttttgatacttccttccacacaagtatgccagagaaagcttatcgctaccctctaccaacaaaatattacacagaaaacaaggttcgtaaatacggtgctcatggtacaagtcaccagtttgtagcaggagaagctgcaaaactcttgggacgtccattagaagacttgaagttaattacctgtcatattggtaacggaggctcaattacagctgtgaaagccggcaaatctgtagacacttctatggggttcactcctcttggtggtattatgatgggaacgcgtacaggggatattgatccagctatcattccttatttaatgcaatatacagaggattttaacacaccagaagatatcagtcgtgttcttaaccgtgaatcaggtcttttgggagtttctgctaattctagcgatatgcgcgatatagaagcagctgtagcagaagggaatcacgaggctagcttggcttatgaaatgtatgttgaccgtatccaaaaacatatcggtcagtaccttgcagtgctaaatggagcagatgccattgttttcacagcaggtgtcggtgaaaatgcagagagtttccgtcgtgatgtaatctcagggatttcgtggtttggttgtgatgttgatgatgaaaagaatgtctttggcgttacaggagacatctcaacagaggcagctaaaatccgtgtcttggttattccaacagatgaagaattagtcattgcccgtgacgttgaacgcttgaaaaaataa

SEQ ID NO: 2099 - DNA, 954 bp, Streptococcus pneumoniae
atggattttgaaaaaattgaacaagcttatacctatttactagagaatgtccaagtcatccaaagtgatttggcgaccaacttttatgacgccttggtggagcaaaacagcatctatctggatggtgagactgagctagaacaggtcaaagacaacaatcagacccttaagcgtttagcactacgcaaagaagaatggctcaagacctaccagtttctcttgatgaaggctgggcaaacagaacccttgcaggccaatcaccagtttacaccggatgctattgctttacttttggtgtttattgtggaagagttgtttacagaggaggaaattactatcctcgaaatgggttctgggatgggaattctaggcgctactttcttgacctcgcttgataaaaaggtggattacttgggaatggaagtggatgatttgctgattgatctggcagctagcatggcagatgtaattggtttgcaggctggctttgtccaaggagatgccgttcgcccacaaatgctcaaagaaagcgatgtggtcatcagtgacttgcctgttggctattatcctgatgatgccgttgcgtcgcgccatcaagttgcttctagccaagaacatacttacgctcatcacttgctcatggaacaagggtttaagtaccttaagtcagatggatatgctatttttctagctccgagtgatttgttgaccagtcctcaaagtgatttgttgaaagtctggttgaaagaggaggcaagtctggttgctatgattagtctgcctgaaaatctctttgctaatgccaaacaatctaagactatttttatcttacagaagaaaaatgaaatagcagtagagccttttgtttatccacttgctagcttgcaagatgcaagtgttttaatgaaatttaaagaaaattttcaaaaatggactcaaggtactgaaatataa

SEQ ID NO: 2100 - DNA, 588 bp, Streptococcus pneumoniae
atgaaacatgattttaaccacaaagcagaaactttcgattcccctaaaaatatcttcctcgcaaacttggtatgtcaagcagtcgagaaacagattgatattttatcagacaaagtaattttagatttcggtggtggcacgggtctattagccttgcccctagccaagcaggctaagtcagtcactcttgtagacatttctgagaaaatgttggagcaagctcgtttgaaagtggagcagcaagcaatcaagaatatccagtttttggagcaagatttaccgaaaaatcccttggagaaagagtttgattgccttgctgttagtcgggttcttcatcatatgcctgatttggatgcggctctctcactgtttcatcaacatttgaaggaagatgggaaactcatcattgctgattttaccaagacagaagctaatcatcatggatttgatttagctgaactggaaaacaagctaattgagcatggtttttcatctgtgcatagtcagattctctatagcgctgaagacctgtttcaaggaaatcactcagaattctttttaatagtagcccaaaaatcactcgcctag

SEQ ID NO: 2101 - DNA, 414 bp, Streptococcus pneumoniae
gtgtggaaaaagaagaaagttaaggcaggtgttctcctctacgcagtcaccatagcagccatctttagtcttttgttgcaattttatttgaaccgacaaatcgcccactatcaagactatgctttaaataaagaaaaattggttgcttttgccatggctaaacgaaccaaagataaggttgagcaagaaagtggggaacagttttttaatctaggtcaggtaagctatcaaaacaagaaaactggcttagtgacgagggttcgtacggataagagtcaatatgagtttctgtttccttcagtcaaaatcaaagaagagaaaagagataaaaaggaagaggtagcgaccgattcaagcgaaaaagtggagaagaaaaaatcagaagagaagcctgaaaagaaagagaattcctag

SEQ ID NO: 2102 - DNA, 507 bp, Streptococcus pneumoniae
ttgagattcaggtattttctagtgaaaaaggattggaggtctaccatggttcagaacagttgttggcaatcaaagagccataaggtcaaggcttttaccttgttagaatccctgcttgccctcattgtcatcagtgggggattactcctttttcaagctatgagtcagctcctcatttcagaagttcgctaccagcaacaaagcgagcaaaaggagtggctcttgtttgtggaccaacttgaggcagaattagaccgttcgcagttcgaaaaagtagaaggcaatcgcctatacatgaagcaagatggcaaggacatcgccatcggtaagtcaaagtcagacgattttcgtaaaaccgatgctagtggacgggggtatcagcctatggtttatggcctcaaatcagctcagattacagaggacaatcaactggttcattttcgtttccagtttcaaaaaggcttagaaagggagttcatctatcgtgtggaaaaagaagaaagttaa

SEQ ID NO: 2103 - DNA, 303 bp, Streptococcus pneumoniae
atggaaaaattaaacgcattaaggaaacaaaaaattagggcagtgattttactggaagcagtagtcgctctagctatctttgccagcattgcgaccctccttttgggacaaattcaaaaaaataggcaagaggaagcaaaaatcttgcaaaaggaagaagtcttgagggtagctaagatggccttgcagacggggcaaaatcaggtaagcatcaacggagttgagattcaggtattttctagtgaaaaaggattggaggtctaccatggttcagaacagttgttggcaatcaaagagccataa

SEQ ID NO: 2104 - DNA, 405 bp, Streptococcus pneumoniae
atgattaaggcctttaccatgctggaaagtctcttggctttgagtcttgtgagtatccttgccttgggcttgtccggctctgttcagtccacttttgcggcagtagaggaacagattttctttatggagtttgaagaactctatcgggaaacccaaaaacgcagtgtagccagtcagcaaaagactagtctgaacttagatgggcagacgattagcaatggcagtcaaaagttgccagtccctaaaggaattcaggccccatcaggccaaagtattacatttgaccgtgctgggggcaattcgtccctggctaaggttgaatttcagaccagtaaaggagcgattcgctatcaattatatctaggaaatggaaaaattaaacgcattaaggaaacaaaaaattag

SEQ ID NO: 2105 - DNA, 327 bp, Streptococcus pneumoniae
atgaaaaaaatgatgacattcttgaaaaaagctaaggttaaagcttttacattggtggagatgttggtggtcttgctgattatcagcgtgcttttcttgctctttgtacctaatctgaccaagcaaaaagaggcagtcaatgacaaaggaaaagcagctgttgttaaggtggtggaaagccaggcagaactttatagcttggaaaagaatgaagatgctagcctaagcaagttacaagcagatgggcgaatcacggaagaacaggctaaagcttataaagaataccatgataaaaatggagtagcaaatcgtaaagtcaatgattaa

SEQ ID NO: 2106 - DNA, 1044 bp, Streptococcus pneumoniae
atgagcaaattgaccagcttcttaaagatggacatatcacaagtcttcaggctgagacggaaaaaattagctacagctaagcaaaaaaatatcatcaccctatttaacaatctcttttctagcggttttcatctggtggagactatctcctttttagataggagtgctttgttggacaagcagtgtgtgacccagatgcgtgtgggcttgtctcaggggaaatcattctcagaaatgatggaaagtttgggatgttcaagtgctattgtcactcagttatccctagctgaagttcatggcaatctccacctgagtttgggaaagatagaagaatatctggacaatctggctaaggtcaagaaaaaattgattgaagtagcgacctatcccttgattttgctgggttttcttctcttaattatgctggggctacggaattacctgctcccacaactggatagtagcaatattgccacccaaattatcggtaatctgccccaaatttttctaggcatggtagggcttgtttccgtgcttgcccttttagcactcactttttataaaagaagttctaagatgagtgtcttttctatcttagcacgccttccctttattggaatctttgtgcagacctacttgacagcctattatgcacgtgaatgggggaatatgatttcacagggaatggagttgacgcagatttttcaaatgatgcaggaacaaggttcccagctctttaaagaagtcggtcaagatctggctcaaaccctgaaaaatggccgtgaattttctcagacgataggaacctatcctttctttaggaaggaattgagtctcatcatagagtatggggaagttaagtccaagctgggtagtgagttggaaatctatgctgaaaaaacttgggaagccttttttacccgagtcaaccgcaccatgaatttggtgcagccactggtttttatctttgtggcactgattatcgttttactttatgcggcaatgctcatgcccatgtatcaaaatatggaggtaaatttttaa

SEQ ID NO: 2107 - DNA, 942 bp, Streptococcus pneumoniae
atggttcaagaaattgcacaagaaatcattcgttcagctcggaaaaaagggacgcaggatatctattttgtccctaagttagacgcctatgagcttcatatgagggtaggagacgagcgctgtaaaattggtagctatgattttgaaaagtttgcagccgttatcagtcactttaagtttgtggcgggtatgaatgtgggagaaaaaagacgtagtcaactgggttcctgtgattatgcctatgaccataagatagcgtctctacgtttatctactgtaggcgattatcgggggcatgagagtttggttatccgtttgttgcacgatgaggagcaggacctgcatttttggtttcaggatattgaagaattaggcaagcagtacaggcaacggggactctatctttttgctggtccggttgggagtggtaagacgaccttgatgcatgaattgtccaagtcactctttaaaggacagcaagttatgtccatcgaagatcctgtcgaaatcaagcaggacgacatgcttcagttgcagttgaacgaagcaatcggcctaacctatgaaaatctaatcaaactttccttgcgtcatcgaccagatctcttgattatcggagaaattcgtgacagcgagacggcgcgtgcagtggtcagagctagtttgacaggtgcgacagtcttttcaaccattcacgccaagagtatccgaggtgtttatgagcgtctgctggagttgggtgtgagtgaagaagaattggcagttgttctgcaaggagtctgctaccagagattaatcgggggaggaggaatcgttgactttgcaagcagagattatcaagaacaccaagcagccaagtggaatgagcaaattgaccagcttcttaaagatggacatatcacaagtcttcaggctgagacggaaaaaattagctacagctaa

SEQ ID NO: 2108 - DNA, 372 bp, Streptococcus pneumoniae
atgaatatgtatcgtgttatagaaatgtacggagattttgaaccgtggtggttcttagaaggttgggaagaagatattgtagcaagtagaaaatttgaccagtattatgatgctctcaaatactacaaaacttgctggtttagattggaacaagaatcgcctctttataaaagtagaagcgacttgatgaccattttttgggacccggaagaccaacgctggtgtgatgaatgtgatgagtatttacaacaataccattctttggctcttttgcaggatgagcaggttatcccagacgaaaaactacgctcaggctatgaaaaacaaaccagtcaggaaaggaatcgttcttgccgtatgaaattaaaatag

SEQ ID NO: 2109 - DNA, 1059 bp, Streptococcus pneumoniae
atgaaagcctatacttatgttaaaccaggacttgcttcttttgttgatgtagacaaaccagttattcgcaagccaacagacgctattgtgcgtattgtaaaaaccactatttgtggaacagacctccatattatcaaaggggatgttcctacttgccaaagtggtaccattcttggccacgaagggattgggattgttgaagaagttggggaaggagtttccaacttcaaaaaaggtgacaaggtcttgatttcttgcgtctgtgcctgtggtaaatgctactactgtaaaaaaggaatttatgctcactgtgaagacgaagggggctggattttcggtcacttgattgatggtatgcaggctgaatatctacgtgtccctcatgcagataatactctttaccatactccagaagacttgtcagatgaagctttggttatgctgtcagacattctgcctactggatatgaaattggtgtcttaaaagggaaagtagaacctggttgcagcgtagccattattggttcaggtccagttggattggctgctcttttaacagcccaattctattcaccagctaaattgattatggtagacctagacgataaccgcttggaaactgccctatcattcggtgcgactcataaggttaattcttcagaccctgaaaaagccattaaagaaatttatgatttgacagatggtcgtggtgtggatgtcgctatcgaagctgttggtattcctgcaacatttgatttctgtcaaaagattatcggtgtagacggaacggttgccaactgtggtgtgcatggtaaaccagttgaattcgatttagataaactttggattcgcaacatcaatgtaacaactggtttggtatctacaaatacgactccacaattgttgaaagcacttgaaagtcataagattgaaccggaaaaattggtaactcactatttcaaactcagtgaaattgaaaaagcctacgaagtcttcagtaaggcagcagaccaccatgccattaaggtcattatcgaaaacgatatctcagaagcctaa

SEQ ID NO: 2110 - DNA, 426 bp, Streptococcus pneumoniae
gtgaccgaaaatccagcccccttcgtcttcacagtgagcataaattccttttttacagtagtagcatttaccacaggcacagacgcaagaaatcaagaccttgtcaccttttttgaagttggaaactccttccccaacttcttcaacaatcccaatcccttcgtggccaagaatggtaccactttggcaagtaggaacatcccctttgataatatggaggtctgttccacaaatagtggtttttacaatacgcacaatagcgtctgttggcttgcgaataactggtttgtctacatcaacaaaagaagcaagtcctggtttaacataagtataggctttcataaagcactcctccgtttttttatttgtaatatttatagttcaattgtaagcctttttctttgtttcttcaagctttttttgtga

SEQ ID NO: 2111 - DNA, 1152 bp, Streptococcus pneumoniae
atgcctaactatattaaagcggatcagtttttctacccacacggagttcgtcgaggtggttacttggaacttgtggacggcaagtttgggaaacatgtagagcagattcctgaaggggctgaggtgattgactatacaggttatagcattgccccaggtcttgtggatactcatattcatggatatgcaggtgtagatgtgatggacaacaacattgaaggtacattgcatactatgagtgaaggacttcttagtaccggtgttaccagtttcttacccacaactttaacagccacttatgagcaattgcttgcagtcactgaaaatcttggaaaccattataaagaagcaacaggtgctaagattcgtgggatttattatgaaggtccatatttcacagaaacttttaagggggcacaaaatccaacttatatgagagacccgggtgttgaggagtttcattcttggcaaaaagcggcaaatggcttgcttaataaaattgcccttgcaccagaacgtgatggggtggaagactttgttcgtacagttacgggcgaaggtgtgacggttgctcttggacattcaaacgcgacttttgatgaagccaaaaaagcagtcgatgctggagcgagtgtttgggtgcatgcctacaatggaatgcgtgggttgactcaccgtgaattgggtatggttggagccatgtaccaattgccacatacctatgcagagttgatctgtgatggtcaccacgtagatccaaaggcttgcgaaattcttatcaaacaaaaaggaacagaaaacatcgctcttatcacagactgtatgacagctgggggattggaagacggagattatatgttgggagaattcccagttgtcgttgcaaatggaactgcacgcctcaaatcgacaggtaacttggcaggttctatcctcaaactcaaagatggtttgaagaatgtggtcgaatggggaattgcgaatccgcatgaagcagtcatgatggccagcttcaacccagctaaatccgttcacatcgatgacgtctgtggccaaatccgtgaaggctacgacgctgacttcatcgtattagataaagatttggaattggtagcaacctacctagatggcgtaaaacgttatcaagcataa

SEQ ID NO: 2112 - DNA, 1818 bp, Streptococcus pneumoniae
  unsure (435): n at each above location is unknown.
atgcgcattaaatggttttccttgattaggattataggtttacttttggtactcttgtatcacttctttcagacgatctttcctggaggatttttcggggtagatgtctttttcacattttcaggtttcctgattacagctctactcattgaagaattttctaaaaaccatgagattgatttgataggattttttagaagacgcttttatcggattgtgccacctgtggttttgatggtcttggtgaccatgccttttactttcttggttcgccaagactatgttgctggaattggtggccagattgcgagcgtcttaggctttatgaccaacttctatgaactcctaacaggtgggagttatgaatctcagttccatcctcatttgtttgttcataattggagtctggcagttgaggttcactactatattctntggggattggcagtttggttcttatccacacacgctaaatcaaatggtcagttgaaggggatggtctttctcttatctgctgttgccttcttgatcagtttcttctccatgtttattggtagttttctagtgacctcttattcctctgtttatttctccagtttaactcatgtctatccattctttttgggaagtatgttagcaactattgtaggcgttcgtcagacgacttccctcgtcaagcagttggataaaatctgggatttacgaaagactttggtagtttttggaggaggctttggtttcctagttcttttgactttctttgtcaaattcacttatctttttgcctatcttatcggcttcttacttgccagtcttgcagctcttgccatgattctggcggcgcgtgtcttacatgaaaagacacatcatatacaggagccgaagattatcagctttttagcggatactagctatgcggtttatcttttccattggcctttctatatcattttctcacagttgacatcaaatcttcttgctgtattactgactctgatttgttcttatggctttgccagtctgtcattttatgtattggaaccttggattgcaggcaagaacacacctattgtccaaacccttcgtcccctgccttatattcacgcaattcttgcagcaggtacaggaatcttgaccatcattgtctgcacggtgaccttgttggcaccacaagtgggagcgtttgagacagacttgactgtcaatggcttgaagcaagctgcaacaaatattggccagaccaaggtgatggcagaacgggcagatgcaaacagtttgggaattgctgatggcactatgttaattggtgactcagtggctttaagggcaaatacagcactacagacagctcttcctggagcacagattaacgcgcaggtcagcgtaacaaccaagaccgcaaatgaaatcatgctaaataatagccagaataaatttttacctaagacggtggtcattgcgactggggtaaataatcctgagaattacaaggatgactgggacagtatcgtgaaaaatcttcctaagggacaccatatgattttggtgactccttatgagggagataagacaaaagagacctatgccatcgttgagaaggctgctgcctatatgagagaattggcagagaagacaccttacattacgatagcagattggaatcaagttgcgaaagagcatccagaaatttgggcaggaacagaccaggttcatttcgggagtgagagtagcactatcgaagcaggagcaaaattgtatgcagatacgattgccacagctttgcagacagctcaagacaagccggttaaatcaaaataa

SEQ ID NO: 2113 - DNA, 1143 bp, Streptococcus pneumoniae
atgtcagattcaccaatcaaatatcgtttgattaagaaagaaaaacacacaggagctcgtctgggagaaatcatcactccccacggtacctttccgacacctatgtttatgccagttgggacacaagccactgtcaaaactcagtcacctgaagaattgaaggagatgggttcgggaattatcctatcaaacacctatcatctctggcttcgccctggagatgaactcattgcacgcgctggtggtctccacaagttcatgaattgggaccagcctatcttgacagatagtggtggttttcaggtttattctttagcagatagccgtaatatcacagaagaaggagtaacctttaaaaatcatctaaatggttctaagatgttcctatccccagaaaaagccatctctattcagaataatctgggttcagacatcatgatgtcctttgatgaatgtcctcagttttatcaaccttatgactacgttaagaaatcgatcgagcgtaccagccgttgggctgagcgtggtttgaaggctcaccgtcgtccacatgaccaaggtttgtttggaattgtgcaaggtgcaggatttgaagaccttcgccgccaatcagctcatgatcttgtcagcatggatttctcaggctactctatcggtggtttggcagtgggagaaacccatgaagagatgaatgcggtcttggactttacaactcaactgctgcctgaaaataaacctcgttatctgatgggtgtgggagcgccagatagcttgatcgatggggtcattcgtggggtggatatgtttgactgtgtcttaccgactcgaattgctcgtaacgggacttgtatgaccagtcaaggacgtttggttgtgaaaaatgcccagtttgctgaggactttacgccactggatcctgagtgtgattgctacacatgtaataactatacacgcgcttaccttcgtcacctgctcaaggctgatgaaacctttggtatccgcttgactagctaccacaatctttacttcttgcttaacctgatgaagcaagtgcgacaagccatcatggatgacaatctcttggaattccgtgagtattttgtggaaaaatatggctataataagtcaggacgtaatttctaa

SEQ ID NO: 2114 - DNA, 858 bp, Streptococcus pneumoniae
atgaactatccaaaaattgatttaaaaacaattcgtcaggagtcaaaacattttcaggctgacaccccccgtctctttctcctctatatccttcccagtatgctggtcatcttatctggttttcttaatcccttatctcggatccacgggactgttttagaacagccatttttcagcatacttggccaaatacttcaaacctacctctttcctctactagtctcctttatcgggactattcttttgaccagttccgtctatgcaacactgacactcatgaaagattctaaaacggagccatctgtaaaaaacagcctagctctctttgatgaggagcgcttttctcaaacctttttgaccctacttctcaaacgtttctatctctttttatggagtatccctaatttacttgggatttacctcctcttttatagtagctttttagccaaaaaattcgtcaccctacatcctgagtttccaaatctagatctctcatcagttgaaaccgagcgtttcctcatggtctttggactctactttcttgcaagtctcatcttgatcattgtaggaaatatcctctatattccacagtattatgcctattcacaggtggaatttcttctctgttatagtctagacctaggacaggtcccaccaagacgaatcctaaaaactagccgttcctttatgaagggctacaagttccagcactttgtcctagatttacagcttcttccttggtacttcctcaattggattacctttggcattgctagtttttcactcctaccttatatccaatgcactaaaattatgttttaccgagcagtattggcccgaaaacgtccaaaagcttga

SEQ ID NO: 2115 - DNA, 645 bp, Streptococcus pneumoniae
atgaaagtattagtgacaggttttgagccctttggaggggaaaagggcaatccagctttggaggccattaaaggtttaccagctgaaatccatggtgctgaggtccgttggctagaggtgccgacagtttttcacaaatctgctcaagtattggaagaagagatgaatcgttatcaacctgactttgtcctttgtattgggcaagctggtggaagaactagtttgacacctgaacgagtgaccattaatcaagacgatgcatgcatttctgataacgaagataatcaaccgattgaccgtcccattcgcccagatggtgcttcggcctactttagtagtttgccgattaaagcgatggttcaagctataaaaaaagagggcttaccggcctctgtttccaatacggcagggacttttgtctgcagccatttgatgtatcaggctctctatttggtagaaaagaaatctccatatgttaaggcaggttttatgcatattccttatatgatggaacaggtggtgaacagaccgactactccagctatgagtttagtggatattcggcgagggatagaagcagcaatcggcgctataatagaacatggagatcaggaactcaagttggtaggcggagaaactcattga

SEQ ID NO: 2116 - DNA, 270 bp, Streptococcus pneumoniae
tggcctccaaagctggattgcccttttcccctccaaagggctcaaaacctgtcactaatactttcatttctaactcctcaaaaccaattcaatgagacttttttcttaaaaacaagtataacatatttcccttattctggattaaaaaggattagcgagattagaatcgaccttcaagtgtatttaaagagtaaaatactaatcaaggccaaaatagctgatccaccttgtttcaaaataatttttttatccgctgttaaagagccgtaa

SEQ ID NO: 2117 - DNA, 360 bp, Streptococcus pneumoniae
atgtcaattattttaacaacgatcgttgctttggagcatttttacattttttatttggaaagtattgccacgcaatcagatgcgactagtcgtgtatttaatatggaaaaggaagaattggctcatccgtcagtaagttcattgttcaaaaatcaaggaatttataaggctctgctaggagtctttctcttgtatgtcatttatttctcacagaatttagaaattgtgactatttttgtcttatttgtgattggtgctgcgacttacggctctttaacagcggataaaaaaattattttgaaacaaggtggatcagctattttggccttgattagtattttactctttaaatacacttga

SEQ ID NO: 2118 - DNA, 426 bp, Streptococcus pneumoniae
atgctagagattcaagatttactgtatcaactccgcttgtctgagcaagcgagtacgcaattgtttgaaaaaaggcttgggattagtttgacacggtatcagattttactgtttttgctggagcattctccttgtaaccaaatggcggttcaggagcgtttgaaaattgatcaggctgctttgacacggcatttcaaaattttggaaacggaaggtttggtggagcgtcatcgtaatcctgaaaatcagcgggaagtgttggtagaggctgcgaagtatgccaaggagcagttagtggtgaatccccctctgcaacatatcagggttaaggaagagatagaaagtatcttaacagagtttgagagaacagaactcagccgtttattaaataaattggttttgggtattgaaaatatagaaatttaa

SEQ ID NO: 2119 - DNA, 207 bp, Streptococcus pneumoniae
gatctagctttcgtgatggaaagcgattctcgttcgttttttctttgtcatactcttcgaaaatctcttcaaaccacgtcagttttatctgaaacttcaaagctgtgctttgagcaacctgcgactagcttcctagtttgctttttgattttcattgagtatcaatttgaatggaaaatggaaagttatcatcttgtaatgagttaa

SEQ ID NO: 2120 - DNA, 1113 bp, Streptococcus pneumoniae
atgaagaaaagaatgttattagcgtcaacagtagccttgtcatttgccccagtattggcaactcaagcagaagaagttctttggactgcacgtagtgttgagcaaatccaaaacgatttgactaaaacggacaacaaaacaagttataccgtacagtatggtgatactttgagcaccattgcagaagccttgggtgtagatgtcacagtgcttgcgaatctgaacaaaatcactaatatggacttgattttcccagaaactgttttgacaacgactgtcaatgaagcagaagaagtaacagaagttgaaatccaaacacctcaagcagactctagtgaagaagtgacaactgcgacagcagatttgaccactaatcaagtgaccgttgatgatcaaactgttcaggttgcagacctttctcaaccaattgcagaagttacaaagacagtgattgcttctgaagaagtggcaccatctacgggcacttctgtcccagaggagcaaacgaccgaaacaactcgcccagttgaagaagcaactcctcaggaaacgactccagctgagaagcaggaaacacaagcaagccctcaagctgcatcagcagtggaagtaactacaacaagttcagaagcaaaagaagtagcatcatcaaatggagctacagcagcagtttctacttatcaaccagaagagacgaaaataatttcaacaacttacgaggctccagctgcgcccgattatgctggacttgcagtagcaaaatctgaaaatgcaggtcttcaaccacaaacagctgcctttaaagaagaaattgctaacttgtttggcattacatcctttagtggttatcgtccaggagacagtggagatcacggaaaaggtttggctatcgactttatggtaccagaacgttcagaattaggggataagattgcggaatatgctattcaaaatatggccagccgtggcattagttacatcatctggaaacaacgtttctatgctccattcgatagcaaatatgggccagctaacacttggaacccaatgccagaccgtggtagtgtgacagaaaatcactatgatcacgttcacgtttcaatgaatggataa

SEQ ID NO: 2121 - DNA, 621 bp, Streptococcus pneumoniae
atgcaaaaaacagcttttatttgggatttagacgggactttattggactcttacgaagcgattttatcagggattgaggagacttttgctcagttttctattccttatgataaggagaaggtgagagagtttatcttcaagtattcggtgcaagatttgcttgtgcgggtggcagaagatagaaatctggatgttgaggtgctaaatcaggtgcgtgcccagagtctggctgagaagaatgctcaggtagttttgatgccaggtgcgcgtgaggtgctagcttgggcagacgaatcaggaattcagcagtttatatatactcataaggggaacaacgcttttaccattctcaaggacttgggggtggaatcctattttacagagattttaaccagtcagagtggctttgtgcggaagccaagtccagaagcggctacctatctgctagataagtatcagttgaattctgataatacttattatataggggatcggactctggatgtggaatttgcccagaatagtgggattcaaagcatcaactttttagagtctacttatgaagggaatcacaggattcaagcgttagcagatatttcccgtatttttgagactaagtga

SEQ ID NO: 2122 - DNA, 1281 bp, Streptococcus pneumoniae
ttgtttaagaaaaataaagacattcttaatattgcattgccagctatgggtgaaaactttttgcagatgctaatgggaatggtggacagttatttggttgctcatttaggattgatagctatttcaggggtttcagtagctggtaatattatcaccatttatcaggcgattttcatcgctctgggagctgctatttccagtgttatttcaaaaagcatagggcagaaagaccagtcgaagttggcctatcatgtgactgaggcgttgaagattaccttactattaagtttccttttaggatttttgtccatcttcgctgggaaagagatgataggacttttggggacggagagggatgtagctgagagtggtggactgtatctatctttggtaggcggatcgattgttctcttaggtttaatgactagtctaggagccttgattcgtgcaacgcataatccacgtctgcctctctatgttagttttttatccaatgccttgaatattcttttttcaagtctagctatttttgttctggatatggggatagctggtgttgcttgggggacaattgtgtctcgtttggttggtcttgtgattttgtggtcacaattaaaactgccttatgggaagccaacttttggtttagataaggaactgttgaccttggctttaccagcagctggagagcgacttatgatgagggctggagatgtagtgatcattgccttggtcgtttcttttgggacggaggcagttgctgggaatgcaatcggagaagtcttgacccagtttaactatatgcctgcctttggcgtcgctacggcaacggtcatgctgttggcccgagcagttggagaggatgattggaaaagagttgctagtttgagtaaacaaaccttttggctttctctgttcctcatgttgcccctgtcctttagtatatatgtcttgggtgtaccattaactcatctctatacgactgattctctagcggtggaggctagtgttctagtgacactgttttcactacttgggacccctatgacgacaggaacagtcatctatacggcagtctggcagggattaggaaatgcacgcctccctttttatgcgacaagtataggaatgtggtgtatccgcattgggacaggatatctgatggggattgtgcttggttggggcttgcctggtatttgggcagggtctctcttggataatggttttcgctggttatttctacgctatcgttaccagcgctatatgagcttgaaaggatag

SEQ ID NO: 2123 - DNA, 1485 bp, Streptococcus pneumoniae
atgacattagtttatcaatcaacgcgtgatgccaacaatacagtaactgccagccaagcaattttgcaaggtttggcgacggacggcggtttgtttacaccggatacttatccaaaggtagatttgaactttgacaaattgaaagatgcttcttaccaggaagttgctaagctagttttgtcagcatttttagatgactttacagttgaggagttggactactgtatcaacaatgcctacgatagcaaatttgatactccagctattgcaccattagtgaaattagatgggcaatacaatttggaacttttccatggttcaacgattgcctttaaggatatggccttgtctattttgccatactttatgacgactgctgctaagaaacatggtttggagaacaagattgttatcttgacagcgacatctggtgacacggggaaagctgctatggcggggtttgcgaatgtgcctggtactgagattatcgtcttttatccaaaggatggtgtcagcaagattcaagagttacaaatgaccactcagactggcgacaatactcatgttattgctattgatggtaactttgacgatgcgcaaacaaatgtgaagcacatgtttaacgacgtggctcttcgtgaaaaattgactaccaacaagttgcaattttcatcagctaactctatgaacattggtcgtctggtgccacaaattgtttattatgtttatgcttacgctcaattggttaagactggtgaaattgtagctggtgaaaaggttaacttcacagtaccaacaggaaactttggaaatatcttggctgccttttatgccaaacaaattggtttgccagttggtaaattaatctgtgcttcaaatgacaacaatgttttgacagacttctttaaaacacgtgtctatgacaaaaaacgtgagtttaaggtaacaaccagcccatctatggatatcttggtatcttcaaacttggagcgcttgattttccatcttttgggaaataatgctgaaaagacaactgaacttatgaatgccttgaacacgcaaggacaatataagttgacagactttgatgcagagattttggacctctttgcagctgaatatgcgactgaggaagaaacggcagcagagatcaagcgtgtttgtgagttagattcttatatcgaggaccctcatacagctgttgcttcagcagtttataaaaaataccaatcggccactggagatgtaactaagacagtgattgcttcaacagctagtccatacaagttcccagtagttgcagtagaagctgtaactggaaaagcaggtttaacagactttgaagccttggctcaattacatgaaatctcaggcgttgcagtgccaccagcagttgatgggcttgaaatagctccaattcgtcacaagacaacagtggcagctgctgacatgcaagcagcggttgaggcttatttaggactttaa

SEQ ID NO: 2124 - DNA, 1278 bp, Streptococcus pneumoniae
atgtcttgttctatcgatttattaaaacatcggtatttgaaaaatattaaagaaaatcctgaattgtttgtcggaattgagttggagtatcctgttgcaagtttagaaggggatgctacagatgttgaagttatgaaggatctatttcattatttagtttctactttggatctcaccgtagcaaaggtagatgattttggcaatctgatccagttagtagatccgataagtcaggatgctattttatttgaagtttcctatacaacgattgagtttgcatttggtaaggctgaaacgattcaagaggtcgaaaatcgtttcaataattatatgaatgtaattcagagaaagttagctgaatcaaatcatgctattgttggctgtggtatccatcccaactgggataaaaatgagaattgtccagtggcttatccacgctatcagatgttgatggattatttgaatttgagtagaaatattattaaatcagatttacatcatttccctgaatatggtacttttatctgtgggagccaggttcagctggatatttcaaaaaccaactacttacgggtgattaatgcttttactcaaattgaagcggctaaggcttatttatttgcaaactctgaattttcgggtgcggattgggatacgaaaatttcaagggatattttctgggaagaatctatgcatggtatctatccagagaatgttggggtcaatgctagactccttaatgatgaaactgatttttttgactatctaaatcattctgcgatttttactgcggaacgtgatgggcagacctattatttttatcctattcaggctggggactatttggctacgtccgaaatccaagcatttgctctgaatggggatgaggttattatttacccccaagagaaggattttgaaactcatcgtagttaccagtaccaagatttaacgactcgaggaacagttgagtttcgtagtgtgtgtacacagccacttgataggacttttgcttctgcagcttttcacttgggattattggttaatttagacaagttagaagcttacttagaaacagcacctttctttaaagtatttggttatgattacaagtctttaaggagacaattttctaagaaaaatcttacagatgaggaagaaactacgattattgaattttccaaagacttactcctactagctgaggagggactagtggtgagaaataaggaagaaatgacctatttacagcctttgagagaagaattgagcctataa

SEQ ID NO: 2125 - DNA, 177 bp, Streptococcus pneumoniae
ataccggcggccggggtcgaaccggcacgtccttgcggacactggattttgagtccagcgcgtctgccaattccgccacgccggcaaatagtaactggggtagctggattcgaaccaacgcatgagggagtcaaagtcccttgccttaccgcttggctataccccaatataaaatag

SEQ ID NO: 2126 - DNA, 183 bp, Streptococcus pneumoniae
atgggcacgagtggactcgaaccaccgacctcacgcttatcaggcgtgcgctctaaccacctgagctacgcgcccaagtcaaaaacttggtacaaagaacaaagttcaaagcgggtgacgagaatcgaactcgcgacaacagcttggaaggctgtagttttaccactaaactacacccgctaa

SEQ ID NO: 2127 - DNA, 234 bp, Streptococcus pneumoniae; identical to SEQ ID NO: 274

SEQ ID NO: 2128 - DNA, 246 bp, Streptococcus pneumoniae; identical to SEQ ID NO: 273

SEQ ID NO: 2129 - DNA, 156 bp, Streptococcus pneumoniae
ttgactcaatttacaccttactgcttagacagactcttccaatcgtctgctttagttagcctacttggtcccttcatcactacatactctagtacaggaatatcaacctgttgtccatcggatacaccttttggtctcttcttaggtcccgaataa

SEQ ID NO: 2130 - DNA, 315 bp, Streptococcus pneumoniae
gtggaaccctttataggtatggtaagaacaccgtttcaacgggttaagaagggaacccggtgggaactgttggaacgcataaaattgagaattcccggaataagaagcgaaagcagggtgagaattctggtcccccgtaagcctaaggtttccaggggaaggtggtccgcccttggttattcgggacctaagaagagaccaaaaggtgtatccgatggacaacaggttgatattcctgtactagagtatgtagtgatgaagggaccaagtaggctaactaaagcagacgattggaagagtctgtctaagcagtaa

SEQ ID NO: 2131 - DNA, 438 bp, Streptococcus pneumoniae
atgagccccctcggatccttccagccccgtggtgaagacactaagataaaaaattattgcctgttagtcttaaccgaccggcggagcagacaccaaattataaggttaattccaaataaaactgctgaatctgtcaatcaggcgcttacgttactattaggggagcatcgtattctgtccattactgcagataatggttcggagttcaaacgattgtctgaggtatttcctgaggaacatatctactacgcacatgcttactcttcatgggagagaggttcaaatgaaaatcataatcgattaattcggagatggttacctaaaggaaccaagaaaacgactccgaaagaagtagcttttatcgaaaattggattaacaactaccctaaaaaatgcttggactacaagtcgccaagtgaatttcttttgggtggctaa

SEQ ID NO: 2132 - DNA, 1062 bp, Streptococcus pneumoniae
atgaataaacgcgtacaagcatttctagctaaaatgcaagaaaaagaactagatggtgtcatcatcaacaatcttaaaaacgtctattatttgactggtttttggggctcaaacggaacagtctttatcagccgtgaccgtcaggtcttagtgacagactctcgctatatcatcgcagctaagcaagaaaccagtggttttgagattgtggctgatcgtgatgaattggctgtcattgcaggaattgttaaggacatgggcttgactcgtatcggttttgaagatgagatttcagtgtcttattaccaccgtatgcaggcagcttttgcaggtttggacttgtttccgcaaactcagtttgtggaaggtcttcgtatgattaaggatgaggcagagattgcagcgattcgcaaggcttgttctatctcagaccaagctttccgcgatgcgcttgactttatcaaaccaggaaaaactgaaattgagattgccaacttccttgacttccgcatgcgtgagttgggagcatctggcttatcttttgatacgatcctagctagcggtatcaattcttctaaaccccatgcccatccaatgcacaaaccagtggagttgggagaagccattaccatggacttcggctgtctctatgaccactatgtcagtgatatgacccggactatctatctagggcatgttagcgatgagcaggcagagatttacaatacggttctaaaagctaaccaagccttgattgaccaagctaaggcaggcttaggtttccgtgactttgacaaaatccctcgtgatattatcattgaggcaggttatggcgactactttactcacggcattggccacggtattggtctggatatccatgaggaaccctactttagtcagacttctacagaaactattaagacaggtatggccttaaccgatgaaccaggtatctatatcgaaggcaaatatggcgttcgtatcgaggatgatatcctgattacagagacaggttgtgaattattgaccctagctccaaaagagttgatagtcatttag

SEQ ID NO: 2133 - DNA, 2832 bp, Streptococcus pneumoniae
atgcaagataaaattgtcattcatggggcgcgtgcccataatttaaaaaatattgatgtggagattccgcgagacaagttggttgtcgtgactggcttgtcaggttcagggaagtccagtctggcttttgatactctctatgcggagggacaacgtcgctatgtagagagtttgtccgcctacgctcgtcagttcttgggaaatatggaaaaaccagatgtagatgccattgatggtctcagcccagctatttccatcgaccagaaaacgactagtaaaaatcctcgctcgacggtgggaacgacgactgaaatcaatgactatctgcgtctcctctacgcacgtgtggggacgccttactgtatcaacggacatggagctatcaatgcttcttctgtggagcaaatcgttgataaggttttggagttacctgaacgccagcgcttgcagatcttggctcctgtcatccgcaagaaaaaaggccaacataagagtgttatcgagaaggttcagaaagacgggtatgttcgtgttcgtgtggatggggaagtctatgatgtgaccgaagtgccagagttgtctaagagcaagcaacacaatatcgatgtcgtggttgaccgtattgttatcaaggagggcattcgtagtcgtctctttgattccattgaggctgcccttcgtattgcagaaggttatgtcattatcgacaccatggacgattcggagttgctcttctctgagcattatgcctgtccagtttgtggttttactgtcccagagttagagcctcgtctcttctctttcaatgctccttttggctcttgtagtgagtgtgacggcttgggcatcaagctggaggtggatactgatttggtagtgccagatgccagcaaaaccttacgtgagggagcgctagcaccttggaatcctatctcatccaactactatccaaacatgttagagcaggccatgaaagtctttggagtggctatggataagccttttgaggacctgtcagaagaagataagaacttgattctctatgggtcagatggtaaggaattccatttccactatgagaatgaatttggtggcgtgcgcgatatcgacattccgtttgagggagttatcaataatatcaaacgtcgttaccatgaaaccaatagcgattacactcgcactcagatgcgtctctacatgaatgagctgacctgcggaacctgtcaaggctatcgtctcaatgaccaggccttgtctgtccgtgtgggcggccagcaagggccacatattggagaaatctcagacctgtctatcgctgaccacttggacttggtgagccagttaactttgtctgaaaatgaagccatcattgctcgtcccattctcaaggaaatcaaggatcgtttgaccttccttaataatgtgggtcttaactatctaaccctgtcacgttcagcaggaaccctttcaggtggggaaagtcagcgcattcgtttggcaacccagattggttccaacctatcaggcgtcctctatatcctagacgagccgtcaatcggtcttcaccagagggacaatgaccgcctgattgccagtctgaaaaagatgcgtgacttgggcaatactcttatcgtggtggaacacgacgaagataccatgcgtgaagctgattatctgattgacgttggtcctggtgccggtgtttttggtggtgagattgttgcagcaggtacacctaagcaagtggctcgcaacagcaagtctatcacaggtcagtacttgtcaggcaaacgtgtcatcccagtaccagaagagcgccgtgtcggaaatggtcgttttattgaagtgataggagcgcgtgagaacaacttgcaaaatgtcacggctcgctttccactaggaaaatttatcgcagtgacaggtgtgtcgggttcagggaaatcgactctaatcaacagcattctcaaaaaagccattgcccagaagctcaaccgtaattcagacaaacctggtaagtttaagactattacagggattgagcatgtcgaccgtttgattgatattgaccagagccctatcggacggacgccgaggtctaacccagctacctatacaggagtttttgacgatatacgtgacctttttgctcagacaaatgaagccaagattcgaggctacaagaaggggcgcttcagtttcaacgtcaagggaggtcgctgtgaagcttgctcaggtgacgggattatcaagattgagatgcacttcttgccagatgtttatgtggcttgtgaagtttgccacggaacccgctataacagtgaaaccctagaagttcactacaaggaaaagaatatttcgcaggtcttggatatgacggtcaacgatgcggtagaatttttccaacacattccgaaaattcaacgcaaactccagaccatcaaggatgtagggctaggctatgtgaccttgggacagccagctaccaccctttctgggggagaagcccaacgtatgaagttagctagcgaactccacaaacgctcgacaggaaaatctttctacattctggatgagccgacgacagggcttcatacagaggacattgctcgcctgctcaaggttttagctcgctttgtagacgatggcaatacagtcctcgtcatcgagcacaatctggatgttatcaagacggcagaccatatcattgacttgggacctgagggcggtgtcggtggtggaaccatcatcgtaacaggaactccagaagaagtagctgccaacgaagccagctatacaggacactatttgaaaggaaagttacatcatgaataa

SEQ ID NO: 2134 - DNA, 945 bp, Streptococcus pneumoniae
atgaaacaagtttttctctgtacaacaactgaatttaaagagatcgatacgcttgaaccgggtacttggatcaatctcgtcaatccgactcaaaatgaatcactcgaaatcgccaacaccttcgatattgatattgccgaccttcgagcaccgctcgatgcggaagaaatgtctcgtattaccattgaagacgagtataccctgattatcgtagacgtgccggtcacggaggaaagaaataaccgcacctactacgtaaccatcccgcttggtattatcatcactgaggaaaccattatcactacgtgtttggaaccactacctgtccttgatgtctttatcaaccgtcgattgcgtaatttctataccttcatgcgttcacgttttatctttcaaattctttatcgcaatgcagagctttacctaacagcccttcgttcaatcgaccgcaagagtgaacaaatcgaaagtcaactgcatcaatcaactcgtaatgaagaattgattgagctcatggaattggaaaaaactatcgtctatttcaaggcctccctcaaaacaaatgagcgcgtgattaagaaattgaccagttcaaccagcaatatcaagaaataccttgaggacgaagacctgcttgaagacaccctgattgaaacccaacaggccatcgagatggcagatatttatggaaacgtcttgcattctatgacagagacctttgcctctatcatttctaacaaccagaacaacatcatgaaaaccttggcccttgtgaccatcgtcatgtccatcccaaccatggtcttttctgcctacgggatgaactttaaggataatgaaatccccctaaacggagagccaaatgccttctggttaatcgtctttatcgcctttgctatgagtgtctcgctcactctctatctcatccataaaaaatggttctaa

SEQ ID NO: 2135 - DNA, 204 bp, Streptococcus pneumoniae
atgtctcaaattgatctacaaaaattaactaagaaaaaccaagagtttgtccacattgctacccaacaattcatcaaagatgggaaaacagacgctgaaatccagactatttttgaggaagtcattccccaaatccttgaggagcaatctaaaggtacaactgcccgttccctatacggcgcaccaactcattggggctcatag

SEQ ID NO: 2136 - DNA, 639 bp, Streptococcus pneumoniae
ttgtccacattgctacccaacaattcatcaaagatgggaaaacagacgctgaaatccagactatttttgaggaagtcattccccaaatccttgaggagcaatctaaaggtacaactgcccgttccctatacggcgcaccaactcattggggctcatagcttcactgtcaaagagcagtacgaaaaagagcatccaaaagaaaatgatgatccaaaactgatgattatggactcagctcttttcatcactagcctctttgcccttgtcagcgccctcacaaccttctttgcggcagatcaagctttcggctatggattgattactcttctattagttggactggttggtggatttgccttctacttgatgtactactttgtttaccaatactatggaccagatatggatcgcagtcaacgtccacctttctggaaatctgtactagttatcctagcttctatgttcctttggttgcttgtcttctttgcaacaagcttcctaccagctagccttaacccagtactggatccattgccactagctattattggagcagccctcctagcccttcgcttctatctcaagaaacgcttgaatatccgtagtgcaagtgcaggaccaacacgctatcaagaataa

SEQ ID NO: 2137 - DNA, 153 bp, Streptococcus pneumoniae
gtgggatttcagaagaatacttttaatactcttcgaaaatctcttcaaaccacgtcagttttatctgcaacctcaaagctgtgctttgagcaacctgcagctagcttcctagtttgctctttgattttcattgagtataactcaaaaaagtaa

SEQ ID NO: 2138 - DNA, 1032 bp, Streptococcus pneumoniae
atggtttctactattggtattgttagtttatctagtggcattatcggagaggattttgtcaaacacgaagtggacttgggtatccaacgtctcaaggttctgggactcaatcccatctttttgccccattcgttaaaaggattagactttatcaaggaccatcctgaagctcgtgcagaggatttgattcatgccttttctgatgatagcatcgacatgatcctatgtgccataggtggagacgatacctatcgcttgctaccttatctttttgaaaatgaccaactccaaaaggctatcaaacaaaaaatttttcttggcttctcggatacaaccatgaaccacctcatgttgcataaattaggaatcaagactttttatggtcaatcctttttagcagacatttgtgaattagacaaagaaatgctagcctatagccttcactactttaaagaattgattgagacgggaagaatttcagaaatccgccctagtgacgtttggtatgaggaacgaactgattttagtcccacggccctgggaacacctcgtgtcagtcatacaaatacaggttttgacttgttgcaaggaagtgctcagttcgaggggaaaatcctcggtggttgcctcgaatccctctacgatatctttgacaactctcgatacgcagatagcacggaactctgccaaaaatacaaacttttccctgacttgtcagactgggaagggaaaatcctcttgctcgaaacaagcgaagaagagcctaagccagaagacttcaaaaagatgttgctaactttaaaggacactggcatattcgcggtcatcaatggactcttggtcggaaaacctatggatgaaactttccatgacgactataaagaggcactattggatatcattgacaacaatatcccgattgtctataatctgaatgtcggccacgcaactccaagagcaattgtaccctttggggtccatgctcatgtagatgcacaggaacaagtcattcgctttgactataacaaataa

SEQ ID NO: 2139 - DNA, 678 bp, Streptococcus pneumoniae
atgatgtctaacaaaaataagggaattctgatttttgcgattctctatacagtcctctttgtgtttgatggcgttaaattgctggcttctttaatgccatctgtcattgcaaattatcttgtttatgtagttttagctttatatggctccttcttgttcaaggatagattgatccaacaatggaaggagattagaaagactaaaagaaaattcttctttggcgtcttaacaggatggctctttctcattctgatgactgttgtctttgaatttgtatcagagatgttgaagcagtttgtgagactagatggacaaggtctaaatcagtctaatattcaaagtacctttcaagaacaaccactactgatagctgtttttgcttgtgtcattggacctctggtagaagaattatttttccgtcaggtcttattgcattacttgcaggaacggttgccaggtttactaagcattattctggtaggacttgtttttgctctgactcatatgcacagtttggccctatcagagtggattggtgcagttggttacttaggtggaggccttgccttttctattatttatgtgaaagaaaaagagaatatctactatcccctacttgttcacatgttaagcaacagcctctccttaatcattttagctatcagtatagtaaaatga

SEQ ID NO: 2140 - DNA, 564 bp, Streptococcus pneumoniae
atgacaaaacgttgttcgtgggtcaagatgaccaacccgctctacatcgcctatcatgatgaggagtggggccagcccctccatgatgaccaagcattgtttgagttgttgtgtatggaaacctatcaggcaggcctgtcttgggaaacggtactcaacaaacgccaagctttccgagaagcatttcatagctatcaaattcactcagtcgcagagatgactgacactgaattggaagccatgctggagaatccagctatcattcgaaatagagccaagatttttgctacacgcgctaacgcccaagcttttctacagttacaggcagagtacggctcttttgatgcctatctttggtcttttgttgaggggaaaattgtcgttaacgatgttcctgattatcgccaagcgccagctaaaacacccttatctgagaaattagccaaagatctcaaaaaacgaggcttcaagttcacaggcccagtcgccgtattgtcttttctacaggctgcagggctagttgatgaccacgagaatgattgtgagtggaaaggtcttaaatga

SEQ ID NO: 2141 - DNA, 558 bp, Streptococcus pneumoniae
gtgaatttgatagctatgaaatgcttctcggaaagcttggcgtttgttgagtaccgtttcccaagacaggcctgcctgataggtttccatacacaacaactcaaacaatgcttggtcatcatggaggggctggccccactcctcatcatgataggcgatgtagagcgggttggtcatcttgacccacgaacaacgttttgtcattctctgctcctatttgaccaacattttaagggccgacttgatatagttctcagctgtatctgtcgttccttcaaagaatttcttgattttcttgagctctgttgccttgtagcccagagccaacatggcttccatagcttcttccaattcttggttttcagcacttgcttgcactgcgaccttggcaggaaggtcatctcctgcaactactaccttgccttccaagtccagcaccatctgctgggctgttttcttgccaattttagggaacttggtcaagtaggtgatgttcttggtttcaatggcttgaaccaagccagcattgtcatcagcagcgataatagcaagagctga

SEQ ID NO: 2142 - DNA, 594 bp, Streptococcus pneumoniae
atgtacgcatatttaaaaggaatcattaccaaaattactgccaaatacattgttcttgaaaccaatggtattggttatatcctgcatgtggccaatccttatgcctattcaggtcaggttaatcaggaggctcagatttatgtgcatcaggttgtgcgtgaggacgcccatttgctttatggatttcgctcagaggatgagaaaaagctctttcttagtctaatttcggtctctgggattggtcctgtatcagctcttgctattatcgctgctgatgacaatgctggcttggttcaagccattgaaaccaagaacatcacctacttgaccaagttccctaaaattggcaagaaaacagcccagcagatggtgctggacttggaaggcaaggtagtagttgcaggagatgaccttcctgccaaggtcgcagtgcaagcaagtgctgaaaaccaagaattggaagaagctatggaagccatgttggctctgggctacaaggcaacagagctcaagaaaatcaagaaattctttgaaggaacgacagatacagctgagaactatatcaagtcggcccttaaaatgttggtcaaatag

SEQ ID NO: 2143 - DNA, 210 bp, Streptococcus pneumoniae
atgacaagtaatcatttcagagcacgcaaaaagcacaaatatacttttatcttctttcatccagactatactgtcggctttggaatttcaccaaatcatgcctttcggctcgtgggctataccaccggtagggaattgcaccctgccctgaagatagttattcaattacagatgattatagtacttaattttgaatatgtcaacagataa

SEQ ID NO: 2144 - DNA, 1101 bp, Streptococcus pneumoniae
atgagcgattcaaaatatatgaaattagcaataaaactggcacaaaaaggggctggttacgtcaatcccaatcctatggttggcgcaattattgtaaaagataatcacattatcggacaaggttatcatgagttttttggtggcccacatgctgagagaaatgctcttaaaaactgtagaaaatcccctgtcggagcgacgctttatgtaacacttgaaccctgttgtcacttcgggaaaacacctccctgtatagatgctataatcgatagtggtattacaagagtagtcattggaagcctagactgtaatcctattgtatctggaaaaggagtaaagatacttgaggaaaataatcttcaagttactgttggaattttagaaaatgagtgtcttaacttaataaaaagttttagaaagtatattacccagcatgtaccctatgtttttatgaaatatgcaatgtcaatggatggaaaaatagccactaaaacaaatcaatccaaatggattactgaagaagaagcaagaaagcatgtgcatcagttacgacaccatgttagtgcaattatggtgggagtcaatactgttattcaagacgatcctttgctgacatgtagattggaggaagggaaaaatcctatccgtatcatatgcgatacacatttacgaactcctcttacctctaaaatcgtaaaaacagcaaatgatattaaaacttacattgccacttcctctgaagacaaaaataaaatgaagctatatcaaaatcatggctgtgaaatactttccataaagaaaaaaggcaatcatatagacttatcgagtttaatgcaacatctaggaaacatgcagattgatagcctagttctagaagggggcagtctaatgaattggagtgctttggaacaacaaattgttgatgagctgaaaatatatattgcaccaaaaatttttggaggcagtgccaagtttcctgtcggaggtgaaggcatttctttgccaaatgacgctattagattgaaaccttatgctttttctcaaataggaaatgactatctcatagaaagtgaagtgatttatccatgttcacaggaataa

SEQ ID NO: 2145 - DNA, 636 bp, Streptococcus pneumoniae
atgttcacaggaataattgaagaaatcggaaaagttgaaagaatacagaaagactctcgtaattgtaaactatcaattaaagcctcaaaaatattaacggatatccatttaggtgatagtatagcagtaaatggtatctgtcttacagttactcatttcaatcatcaatcctttacagttgatgtaatgaatgaaacatggagtcgaacagctcttactctattaaaacatggaagtgaggtgaatctagaaagagccttatctgtcaacggtcgacttgggggtcacgtcgttacaggacacattgatggtacaggaaaaatctcgtcaataaaaaaagatgataatgctgtatggtatcaaatcaacacacaaaaagaaattttagatttaatagttgaaaaaggatctattacaattgacggcattagtctgactgtcgctaaagtctccaaagtaaacttttcagtatctgttatccctcataccttggaacaaaccattcttaagagtaaacaagtcgggagtacagtaaatcttgaaaatgatatcttaggtaaatatgtgcaaaaactgatggataactctccaaaatcagaaatatctaaggaactattatatcaaaatggattttag

SEQ ID NO: 2146 - DNA, 1236 bp, Streptococcus pneumoniae
atggattttagcagaaaggataatcagtcaatggaatatcgaaaaatacaagaagcattagaagcattgcagaagggacgacttgttcttgttatagacgacaaggatagagaaaatgaaggagacttaatttgttctgcacaagcagctacaacagaaaatgttaattttatggctacttatgccaaaggattaatttgtatgcctatgagcgaaagtttagctaatcaattaatgctttcacctatggttgaaaacaatacagataatcataagactgcttttacagtttcaattgattataaagaaacgaccacaggtatttctgccgaggaaagaggactgaccgcacgtatgtgtgtagctgaagatataacaccctctgattttcgcaggccaggacacatgtttcctttaattgcaaaaaaaggtggtgtcctagaaagaaatggacacacagaagcaactgttgatttattaaaattagctggactaaaagagtgtggcctatgttgtgaaataatgaatcatgatggcaaaatgatgagaacagatgatttaattcagttctcgaagaaacacaacattccactaattaccatcaaagaattacaagaatatagaaaagtatatgatcagctgatagaacgagtttcaactgtcaatatgcctactagatacggtaatttcaaagcaattagctatatagataaactaaatggggaacatcatcttgctcttattatgggaaatatagaggatgaagccaatgtattatgtcgggtccactccgaatgtttaacaggagatgttttaggctctttacgttgcgattgtggacagcaattcgataaagctatgaaaatgattgttgagaatggttcgggtgtcttactttacttgcgacaggagggacgaggaattggacttatcaataaattaaaagcctatcatttacaagatcaaggcatggatacgcttgatgccaatcttgcattaggctttgaaggtgatttaagagaatatcatattggagcacaaatgcttaaagatctgggacttcagtcacttcatttactgacaaataatcctgacaaggttgaacagttagaaaaatatggaattaccatttccagtagaatatcaatcgaaatagaagccaatccttacgatagtttttatttagaaacaaagaaaaatcgaatggggcacattttaaatatggaggaaaaataa

SEQ ID NO: 2147 - DNA, 468 bp, Streptococcus pneumoniae
atgaacacttatgaaggtaatttagtagcaaacaatattaaaataggtattgttgtagcgagatttaatgaatttataacttcaaaattattatctggagcactagataatctcaaaagagagaatgtaaacgagaaagatatcgaggtagcctgggttccaggagcttttgaaataccactgattgcatcaaaaatggcaaaaagtaaaaaatatgatgcaattatctgcttgggagctgtcattagagggaatacaagtcattatgattatgtatgtagcgaggtatctaagggaatcgcccaaatcagtttaaatagcgaaattcctgttatgtttggtgtgctaacgacagatacaattgaacaagccatagaacgagctggtaccaaagcaggaaataagggttctgagtgtgcacaaggagctattgaaatggtcaacctaattcgtacattagacgcatag

SEQ ID NO: 2148 - DNA, 1950 bp, Streptococcus pneumoniae
atgtctcatattattgaattgccagagatgctggcaaaccaaatcgcagctggagaggtcattgaacgtcctgccagtgtggtcaaagagttggtagaaaatgccattgacgcgggctctagtcagattatcattgagattgaggaagctggtctcaagaaggttcaaatcacggataacggtcatggaattgcccacgatgaggtggagttggccctgcgtcgccatgcgaccagtaagataaaaaatcaagcagatctctttcggattcggacgcttggttttcgtggtgaagccttgccttctattgcgtctgttagtgtcttgactctgttaacggcggtggatggtgctagtcatggaaccaagttagtcgcgcgtgggggtgaagttgaggaagtcatcccagcgactagtcctgtgggaaccaaggtttgtgtggaggatctctttttcaacacgcctgcccgtctcaagtatatgaagagccagcaagcggagttgtctcatatcattgatattgtcaaccgtctgggcttggcccatcctgagatttcttttagcttgattagtgatggcaaggaaatgacgcggacagcagggactggtcaattgcgccaagcaatcgcagggatttacggtttggtcagtgccaagaagatgattgaaattgagaactctgacctagatttcgaaatttcaggttttgtgtccttgcctgagttgactcgggctaaccgcaattatatcagcctcttcatcaatggtcgttatatcaagaacttcctgctcaatcgtgctattttggatggtttcggaagcaagcttatggttggacgttttccactggctgtcattcacatccatatcgacccttatctagcggatgtcaatgtgcatccaactaagcaagaggtgcggatttccaaggaaaaagaactgatgactctggtttcagaagctattgcaaatagtctcaaggaacaaaccttgattccagatgccttggaaaatcttgccaaatcgaccgtgcgcaatcgtgagaaggtggagcaaactattctcccactcaaagaaaatacgctctactatgagaaaactgagccgtcaagacctagtcaaactgaagtagctgattatcaggtagaattgactgatgaagggcaggatttgaccctgtttgccaaggaaaccttggaccgattgaccaagccagcaaaactgcattttgcagagagaaagcctgctaactacgaccagctagaccatccagagttagatcttgctagcatcgataaggcttatgacaaactggagcgagaagaagcatccagcttcccagagttggagtttttcggacaaatgcacgggacttatctctttgcccaagggcgagatggactttacatcatagatcagcacgctgctcaggaacgggtcaagtacgaggagtaccgtgaaagcattggcaatgttgaccagagccagcagcaactcctagtgccctatatctttgaatttcctgcggatgatgccctgcgtctcaaggaaagaatgcctctcttagaggaagtgggcgtctttctagcagagtacggagaaaatcaatttattctacgtgaacatcctatttggatggcagaagaagagattgaatcaggcatctatgagatgtgcgacatgctccttttgaccaaggaagtttctatcaagaaataccgagcagagctggctatcatgatgtcttgcaagcgatctatcaaggccaatcatcgtattgatgatcattcagctagacaactcctctatcagctttctcaatgtgacaatccctataactgtcctcacggacgtcctgttttggtgcattttaccaagtcggatatggaaaagatgttccgacgtattcaggaaaatcacaccagtctccgtgagttggggaaatattaa

SEQ ID NO: 2149 - DNA, 252 bp, Streptococcus pneumoniae
ttggcgcaattgaccagtccctgctgtccgcgtcatttccttgccatcactaatcaagctaaaagaaatctcaggatgggccaagcccagacggttgacaatatcaatgatatgagacaactccgcttgctggctcttcatatacttgagacgggcaggcgtgttgaaaaagagatcctccacacaaaccttggttcccacaggactagtcgctgggatgacttcctcaacttcacccccacgcgcgactaa

SEQ ID NO: 2150 - DNA, 291 bp, Streptococcus pneumoniae
ttgattttttatcttactggtcgcatggcgacgcagggccaactccacctcatcgtgggcaattccatgaccgttatccgtgatttgaaccttcttgagaccagcttcctcaatctcaatgataatctgactagagcccgcgtcaatggcattttctaccaactctttgaccacactggcaggacgttcaatgacctctccagctgcgatttggtttgccagcatctctggcaattcaataatatgagacatctttcagcccctttctgtatctattttcctagaaattaa

SEQ ID NO: 2151 - DNA, 183 bp, Streptococcus pneumoniae
ttgttgactttgtcagttttatctacaacctcaaaacagtattttgaactgtctgcgcctagctttctagtttgctctttgatttttattgagtataccactattttactccctctggcaagggactttgtctatgtggagggattgggctcctatgtggtggagcttttctgttctttctga

SEQ ID NO: 2152 - DNA, 522 bp, Streptococcus pneumoniae
ttgaagagatttttgaagagtattaataaaggtgtacaagaagtgagattaattttgtatgaaaaacaaggagagaaatttatgaaagtagaactacagattagtgagacttacgaggaggaaaagctgattgtccaagcacctcagccgacagataaagtccagaaagtcatcgagttcgcagaaaatctggaccaaagagaaaaaatcaaagggaaaagcgatgatcaggtctatctagttgagattggcaagattcagcgcttctatatcgagaatcggaaggttctagcagaaaccgcgagtcagacctacagcattgatttgcgactctatcaggttcctaaactcttgccaagcaattttatccaaatttcccaatcagaaatcatcaatatcgattccatctctcacctcaagctcacgccaaacggtctggtagaaattttcttgaaaaacgaaagcttcacctactcttcacgccgttatctaaaaaccatcaaggagaaattagaactatga

SEQ ID NO: 2153 - DNA, 459 bp, Streptococcus pneumoniae
atgaaaaaacaagtatttcacgatgcagctaccggtgttcttatcggcctcatcctctctatcctcttttcactcatttatgcaccaaatacctacgcaccactaaatccctactctctcatcggccaagtgatggatcagcatcaggttcacggtgccctggtcttgctctactgcacacttatctgggcaaccatcggtatgctcttcaactttggcaaccgcttatttagccgtgactggagcatgcttcgtgccactctgactcatttcttccttatgctggctggctttgtcccactagcaactcttgctggttggttccctttccactggattttctacctccagctcattatcgagtttgcgattgtctatctcatcatctgggctattctctataaaagagaggctaaaaaagtagatcacatcaatcaactcttggagcatagaaaatag

SEQ ID NO: 2154 - DNA, 378 bp, Streptococcus pneumoniae; identical to SEQ ID NO: 512

SEQ ID NO: 2155 - DNA, 633 bp, Streptococcus pneumoniae; identical to SEQ ID NO: 513

SEQ ID NO: 2156 - DNA, 603 bp, Streptococcus pneumoniae
atgtcgcaagctatttccttaaatcaatcaacctgggcaagcaagctaaaagcaatgggacctggaatcctaatggcaactgccgctgttggaggttcccacattgtatcctcaactcaagctggcggttcttacggttggtctctacttctcttggtcatcttagccaatgtctttaaatatccatttttccgttttggtgctgaatacacagctgatactggaaagactttggttgaaggttatgccgaaaaaggaaaactctatctctggattttctttatcctcaatgtcttttcggctatggtcaacacggctggtgttgccattctgtgctcagctatcatcgccagtgccttcccaatgattggacttagcattactcagtggtccctcattctcgttgcaatcatttgggctatgctactctttggaggctacaaacttttagacggcatggtcaaatggattatgtctgccttaaccattgcgactgttcttgcagttatcattgcggcggtcaagcatccagaatacagttctgattttgtcgagaagacaccttggcaaatggcagctctgccttcatcgtctccctcctag

SEQ ID NO: 2157 - DNA, 192 bp, Streptococcus pneumoniae
gtgttaaagtcaaacagagcgtcttctgtgttaaagttgacggtctttctcttttcagctgaccaaagtgaattgatggctgaaatttcaataggagccggcatccatcctaggagggagacgatgaaggcagagctgccatttgccaaggtgtcttctcgacaaaatcagaactgtattctggatgcttga

SEQ ID NO: 2158 - DNA, 654 bp, Streptococcus pneumoniae
atgccggctcctattgaaatttcagccatcaattcactttggtcagctgaaaagagaaagaccgtcaactttaacacagaagacgctctgtttgactttaacactggttatattggaacagctatcctagccgtcttctttgtggcactgggagcactgattcagtatcctacagggcaggcggttgaagctgcttcagccaaatacatctctcaattcgtgggcatgtatgcctctgttcttggcgaatggtcccgttacttgattacctttattgccttcctctgtatctttggaacagttataactgttatcgatggctattctcgcgttaatcaggaatctctccgactgctaatcagtcaaaaagaggacaatcgtaaatctttgaacatctggatgaccatcactgctatcatcggtatcgtcattatcaagttcttcgctggtcaggtttcaaccatgctccgctttgccatgattggctctttcctgacaacacctttctttgctcttttgaattacgccttggtaacgcgtgaaaacaaaaatcttccttcttggctcaaacaccttgccattgcgggattgattttcctctttggcttcgccatcttctttatctacgcactcgcaatcggaaaagcagggtaa

SEQ ID NO: 2159 - DNA, 603 bp, Streptococcus pneumoniae
gtggcgacaacagaaagccttggcagaagaagaggaaacagaagagcttacctaagtattgacaaaaaagaactatcaagatacaatcttggtagttgttttttgattatagataaaatcatggaggtacatatgaagacaatttctttagtttatattagtttgagtggcaacactgaaagttttgtgacgcgcttgaaagactatctcttgtcccagtacaaagggattgaggttcaaaagattcatatcaaggatttggtcaaggaaggcaaaaatttctatgaaatggaccatccctatgtcgcttttttgccgacctatctcgaaggtgggaatggcgtggataacggagatgttgagattttgacgacaccggtgggagattttattgcctatggtaacaatgctagtaagtgttttggtgtggttgggtcaggaaatcgtaactttaataaccaatactgcctaacagccaagcaatacagtcaacgctttggcttccctgtattggctgactttgaaatgcgaggcatgctggaagatatcaaacatgtcgcagctattatcgcagatttgtatgagttggaaaaggagaattaa

SEQ ID NO: 2160 - DNA, 582 bp, Streptococcus pneumoniae
ttgtattcctttacaaaaggtgctataatattatcaggaggtcctatcatgaaaaagaaaccaatttatctatgggttttgctaatcttgtctgcccttatttcagttccgtctctgtttggaattgtgagtcccttgcctagtaaagaagcccttcgtgctgctcagaaacaagttgcaggggtcaatgctcagcaattagaagaccagcttaattatacctatagagtagcagaagcatctcattctatttttaatgttgctttgattgtgctatctactattttagtggtcgtagcgattgtcttccttgttcgtaaaaatttgcaatatgcaaactatacttacgttggctatgttttgttagctattattggttcgatttatggctatgttggtttacaagacgctgtgcagttggttcaagatgagagcatgcgtttgacagtgagtattggttcaaaagctgttagcattttctatatcgtcatcaatgttctcttcctagcccttgtcttctataagatgtggcgacaacagaaagccttggcagaagaagaggaaacagaagagcttacctaa

SEQ ID NO: 2161 - DNA, 1287 bp, Streptococcus pneumoniae
atgtataaagtattattagtagatgatgagtacatggtgacagaaggtctgaagcgtttgattccctttgataagtgggatatggaggttgtcgcaacagccagtcatgccgatgaagctctagaatatgttcaggaaaatcctgtcgatgtcatcatttccgatgtcaatatgccagacaaaacagggcttgatatgattcgggagatgaaagagatcttaccagatgctgcctatatcctgctctcaggttatcaggagtttgattatgtaaaaagagcaatgaaccttagtgtggtggactatttggtcaagcctgttgataaggtagagctgggaaatctgctggagaagattgcaggtcagctcggcgagagagggaagaaaagtcagactcttagtcaagaattagacgaggctggatttgttagttatttaggggataaggagaattggtggataggtctatccaaggaaaaacaaggttccttcaccattccctactatgtcttgggccaagactggcagattttcatttctggccaacctctagatggtttagtcgttacaccttttgaagctccttatcaagaacactttgaacgctggaagctgaatgctgagaaaaccctcttttacggttctgtaaatttgcagcagtctgagagtctctttgcctattacgaaccgatttatagggttatcattcagggaaatctcaatcaaatcgtagaagagttaaatctcttggagaaggtagttcttgaaaatacgccgcgtgttccgattactaaacagctttttattcagtttgtcatggatgttttccatttatttgaacatctcaaagctgatgacctgacagacatcgtcaaaaccattcatgctattcaatccttcgatgaattggtttcttatatcaaggaaactctgatcagctttttcggtcaataccgtatgaatgaaaatgtggtcagtgtgctggaagtcattggtcgtgattaccaaaaagagctttccctcaaggatatcagtaaggccctctttatcaatcctgtctatctagggcagttgattaagcgtgaaaccgattcgacctttgcagagttactaaataaacaacgtattaaggctgcccagcagctcttgctttcaactagtgacagcatcgaagatatttgttatgctgttggttacagtaaccttggatatttctataaagttttccgaaaattgtgcggaaaatcgccaaaagcctaccgaaaacaggtagaaactatactataa

SEQ ID NO: 2162 - DNA, 1704 bp, Streptococcus pneumoniae
gtgatatgttggaacctgtctatgaaatcatccatgaaaaattggcgacaaaatagaatgaagcagttttggctacatacgcttctaagaacctatagttcagtgatgatcattatcattgcgagttttgcaatcttactctcttacgctgactgggattcacgtgaaaaggaagcccagagagtagcccagcgtgtaactgctagaacagtgagtgaaattgaatattaccatagagagtcaacccagatagctcaggctttagttgaaaatcaagctcgtattgagggaatctataaatactttagccttagcatgccagactatttttactggcaattagagcggaaagcttcgccttatatatcagtctctctgtatgaaaatgttgatgacctctatgttcgaaatgattttgtaactggggtggccattgcttttcaagattacaaggaagtctatgtttctactaaagacaaacgtagtggagaaaaaatcagggctgaggatttcaaaccagcaggaaatagttttgccattccggtgtcagatccagtgtcagatcaagatttaggagtgatttacatctccttggatcctgctgttttataccatgccattgataatactagaggtcatactccgatggcagtaacagtgacctcaccttttgatacggagatttttcatattggtgagacagttgatagggagagtgaaaattggctagttggcttaacttctcatggatatcaggttcaggtggcagttcctaaaaactttgttttacaaggaacagtgactagctctgctttgattgtgggtttgagccttctctttattgtcattctttatctgactttgaggcagacttttgctaattaccaaaagcaggtagtggatttagtagaatccattcaagtcattgctcaaggcgaagaggggcgtcggattgacatttccgagaaagatcaggaattactcctaatcgcggagacgaccaatgatatgttggatcgattggaaaagaatatccatgatatttaccagttagagcttagtcaaaaagatgccaatatgcgagccttgcaggcgcaaatcaatcctcattttatgtataatacgctggagttcttgcgcatgtatgcagttatgcagagtcaagatgagttggcagatatcatttatgaattcagtagtctcttgcgtaacaatatttccgacgaaagagagaccctcctcaaacaggaattagaattttgccgtaaatacagctatctctgcatggttcgctatcccaagtccattgcctatggtttcaagatagatccagagttagagaatatgaagattcccaagtttaccttgcaaccgctggtagaaaactatttcgcgcatggtgttgaccacaggcggacagataatgtgattagcatcaaggctcttaaacaggatggttttgtggaaattttggtggtcgataatggtagaggaatgtcggctgaaaagttggcaaatatccgagaaaaattaagtcagagatattttgaacaccaagccagctacagtgatcaaaggcagtctatcgggattgtcaatgtacacgagcgttttgtgctctattttggagaccgctatgccattactatagagtctgcagagcaagccggtgttcagtatcgtattacaattcaagatgagtag

SEQ ID NO: 2163 - DNA, 615 bp, Streptococcus pneumoniae
atgggtagatttttagactttgtctttaatcgtttctttttagggatgattgcgacagccttcttttggctattaactttagcaggagggattatccttggtctagcgccggctagtgccaccttgatgagcttatatgcagaacatggttatagctttcgggaatacagtttgaaggaggcttggtctctttacaagcaaaattttgtctcaagcaacctgattttctatagctttttaggtgtgggtctagttttgacctatggtttgtatctattggtgcaattgcctcatcagaccattgttcatttgattgcgacccttttgaatgtcctagtagttgccctgatctttttggcttatacagtatctttaaaattacaagtttattttgccttgtcctatcgaaatagtctcaaattatccttgattggcatctttatgagtctagcagctgtggccaaggttctccttgggactgtgctacttgtagcaattggttactatatgcctgccctgctattttttgtaggaattgggatgtggcatttctttatcagtgatatgttggaacctgtctatgaaatcatccatgaaaaattggcgacaaaatag

SEQ ID NO: 2164 - DNA, 570 bp, Streptococcus pneumoniae
atgaaaaaatctatcttaactacactgctttttgcagttctttacttcctctgcatggggattggtgtccttttgggcaatctctttgaccaaactggaaacatgttttatgcgcctgcctttactgcccttgtcggcggtagcgtctatatgatcctagtcgcaaaagttccgcgctttggagccattaccactatcggccttgtcattgccttctttttcttgggaactaaacacggggctggttccttccttcctggaattatctgtggcctcctagcagatgaagtagctcatttaggaaaatacaaggacaaaacaaagaacttcctttctttcattattttcgcctttagtacaacaggaccaatcttgcttatgtggattgcgcccaaagcctatatggctactcttctggcaagaggaaaatcccaagaatatatcgaccgtatcatggtcactccaaaccctggaactgtccttctatttatcgcaagtattgtcatcggagccctagtgggtgccttgattggacaagccttgagtaaaaaatttgcccagaaaatctga

SEQ ID NO: 2165 - DNA, 693 bp, Streptococcus pneumoniae
atggaatcattgattcaaacctatttaccaaatgtctataagatgggttgggctggtcaggcaggctggggaacggctatctacttaactctttatatgacagttctttccttcattatcggaggcttcttggggctagtggcaggtctctttctcgtcttgacagcgccaggtggtgtcttggagaataaagtcgtattctggattttagacaaaattacctcaatttttcgtgcggttccctttatcatcctcttggcaatcttgtcaccactttctcacttgattgttaaaacaagtatcgggccaaatgcagcccttgtcccactttcttttgcagtctttgccttctttgcccgtcaggtgcaggttgtcttggctgaattggatggcggtgtcattgaggcggctcaagcgagcggagcgactttctgggacatcgtgggtgtttacctatcagaaggtcttccagatttgatccgtgtgacgactgtgaccttgatttcccttgttggggaaacagctatggccggtgcggttggagctggtggtatcggtaacgtagccatcgcttatggatttaaccgctacaatcacgatgtgaccatcttggcaaccatcattatcattttgattatctttgcaatccaattcttgggagatttcttgactaagaaattgagccataaataa

SEQ ID NO: 2166 - DNA, 1062 bp, Streptococcus pneumoniae
atgagtagagatattatcaagttagatcagatcgatgtgacttttcaccaaaagaagagaaccattacagcggttaaggatgtgaccattcacatccaagaaggggatatctacggaatcgttggatattctggagcagggaaatcaacccttgtacgggtgattaacctcttgcaaaaaccatctgcagggaaaattaccattgacgacgatgtgatttttgacggcaaggtgaccttgacggcagagcagttgcgtcgtaaacgtcaagatatcggaatgattttccagcattttaacctgatgagccaaaagacagcagaggagaatgtagcctttgcccttaaacactctgaactcagcaaggaagaaaagaaggctaaagtagctaagttgttggacttggttggtttggcagatcgtgctgaaaactacccttcacaactatctggagggcaaaaacagcgtgtggcaattgcgcgtgccttggccaatgatccaaaaatcttgatttcagacgagtcaacttctgcccttgatccgaagacaaccaagcatattttggccttgttgcaagattggaaccaaaaattaggcttgactgttgtcttgattacgcatgaaatgcagattgtcaaagacattgccaaccgtgttgcagttatgcaggatgggcatttgattgaagagggtagtgtgcttgaaatcttctcaaaccctaaacaacctttgactcaagactttatctcaacagctacaggtattgacgaagccatggtcaaaatcgagaagcaagaaatcgtggaacacttgtctgaaaacagtctcttggtgcaactcaagtacgctggagcttcaacagacgagccacttttgaatgaattgtacaagcattaccaagtaatggctaatattctctatgggaatatcgaaattctcgatggtactcctgttggagaattggtggtggttttgtcaggtgaaaaagcagcgttggcaggtgcccaagaagccattcgtcaagcaggtgtacaactaaaagtattgaagggagtacagtaa

SEQ ID NO: 2167 - DNA, 219 bp, Streptococcus pneumoniae
ttggcaatgtctttgacaatctgcatttcatgcgtaatcaagacaacagtcaagcctaatttttggttccaatcttgcaacaaggccaaaatatgcttggttgtcttcggatcaagggcagaagttgactcgtctgaaatcaagatttttggatcattggccaaggcacgcgcaattgccacacgctgtttttgccctccagatagttgtgaagggtag

SEQ ID NO: 2168 - DNA, 1374 bp, Streptococcus pneumoniae
atggtttttcctagcgaacaggaacagattgaaaaatttgaaaaggatcatgtagtccaacattattttgaggttttgcgtaccttgatttctaagaaatcagtctttgcccagcaggttggactcaaggaagtcgcaaattatctgggtgagattttcaagcgtgttggagctgaagtggagattgatgagagctatacagcgccctttgtcatggcacatttcaagagttcgcgtccagatgccaagaccttgattttctataaccactatgacactgtgccagcggatggggatcaggtctggacagaggatccttttacgctttcggtccgcaatggcttcatgtatgggcgtggggttgatgacgacaagggtcatatcacagctcgcttgagtgctttgagaaaatatatgcagcaccatgatgatttacctgtcaatatcagctttatcatggagggagcggaggaatcggcttcaacagacctagataagtatttggaaaagcatgcagacaaactccatggggcggatttgttggtctgggaacaagggaccaaaaatgccttggaacaactggaaatttctggtggcaataaggggattgtgacctttgatgccaaggtaaaaagcgctgatgtggatatccactcgagttatggtggcgttgtggaatcagctccttggtatctcctccaagccttacagtctcttcgtgctgcggatggccgtatcttggttgaaggcttgtacgaagaagtacatgagcccaatgaacgagaaatggccttgctagaaacttatggtcaacgaaacccagaggaagttagtcggatttatggattggagttgcctctcttacaggaggagcggatggcctttctaaaacgtttctttttcgagccagcgcttaatatcgaaggaatccagtctggttatcaaggtcagggtgttaagactattttgcctgcagaagccagtgccaagctagaggttcgtctggttccgggcctagaaccgcatgatgttctggaaaaaattcggaaacagctagacaaaaatggctttgataaggtagaattatactataccttgggagagatgagctatcgaagcgatatgagcgcaccagccattctcaatgtgatcgagttggccaagaaattctatccacagggcgtttcagtcttgccgacgacagcggggacaggacctatgcatacggtctttgatgccctagaggtaccaatggttgcattcggtctaggaaatgccaatagccgagaccacggtggagatgaaaatgtgcgaatcgctgattattacacccatatcgaattagtagaggagctgattagaagctatgagtag

SEQ ID NO: 2169 - DNA, 855 bp, Streptococcus pneumoniae
atgaaaatcaaaaaatggcttggtctagcagcccttgctacagtcgcaggtttggctcttgcagcttgcggaaactcagaaaagaaagcagacaatgcaacaactatcaaaatcgcaactgttaaccgtagcggttctgaagaaaaacgttgggacaaaatccaagaattggttaaaaaagacggaattaccttggaatttacagagttcacagactactcacaaccaaacaaagcaactgctgatggcgaagtagatttgaacgctttccaacactataacttcttgaacaactggaacaaagaaaacggaaaagaccttgtagcgattgcagatacttacatctctccaatccgcctttactcaggtttgaatggaagtgccaacaagtacactaaagtagaagacatcccagcaaacggagaaatcgctgtaccgaatgacgctacaaacgaaagccgtgcgctttatttgcttcaatcagctggcttgattaaattggatgtttctggaactgctcttgcaacagttgccaacatcaaagaaaatccaaagaacttgaaaatcactgaattggacgctagccaaacagctcgttcattgtcatcagttgacgctgccgttgtaaacaataccttcgttacagaagcaaaattggactacaagaaagcacttttcaaagaacaagctgataaaaactcaaaacaatggtacaacatcattgttgcaaaaaaagattgggaaacatcacctaaggctgatgctatcaagaaagtaatcgcagcttaccacacagatgacgtgaaaaaagttatcgaagaatcatcagatggtttggatcaaccagtttggtaa

SEQ ID NO: 2170 - DNA, 198 bp, Streptococcus pneumoniae
atggaactcttgaaaaattgtctaaacaattcttcggagacacttatctaccggcagaagctgatattaaataatttcttgaaatcatccattctgagtaaggtgggtgatttctcagtttttagggatatagttttaaactatatatctgattatctaataacaatttgtgaaatcaaacaaattgtgagatactag

SEQ ID NO: 2171 - DNA, 534 bp, Streptococcus pneumoniae
atggctgtcaacaatcttagctacactaaagaacgtgcggagaaatacctctatgccgcaccaattgcccaaaatcctaatgtccttgtcgtgaagaaagatgactctagtatcaagtctctcgatgatatcggtggaaaatcgacggaagtcgttcaagccactacatcagctaagcagttagaagcatacaatgctgaacacacggacaacccaactatccttaactatactaaggcagacttccaacaaatcatggtacgtttgagcgatggacaatttgactataagatttttgataaaatcggtgttgaaacagtgatcaagaaccaaggtttggataacttgaaagttatcgaacttccaagcgaccaacaaccgtacgtttacccacttcttgctcaaggtcaagatgagttgaaatcatttgtagacaaacgcatcaaagaactttataaagatggaactcttgaaaaattgtctaaacaattcttcggagacacttatctaccggcagaagctgatattaaataa

SEQ ID NO: 2172 - DNA, 186 bp, Streptococcus pneumoniae
  unsure (112): n at each above location is unknown.
ttgattggaggaaggttcccaaccttacctgtcactacacttgaaagaatcaaggcaaagataatggaaacaggcaaaaacttcaaaaaacgctcaacaatcgtaggcaggncccttatacttgaccaagatgaagggaatcatacggggaatccaggtctcaagaccagagaaaataaccgctaa

SEQ ID NO: 2173 - DNA, 675 bp, Streptococcus pneumoniae
  unsure (562): n at each above location is unknown.
gagggggcgcaggcagccatgccaacggctctgggctatgtcagtatcggcctggcctgtgggactatcggtgcgccctatgtgacacctgttgagatgggcttgatgagtctctttgtttatgctgggagtgcccagtttgccatgttggcactgattgtggttcaagctcctgtggcagctattgctatgacggtttttctaatcaacttgcgtctctttttgttgagtttacacgcatcgacttatttccgtcataccagtctttggtacaatatcggtatgtctagtatcttgacagatgagacctatggcgttttgatgggtgaattggcccatacagacaaggtaaatcctatgtggatgcacggaaacaatcttaacagctatgtggcttggtttgtggggacagtagtcggaacggctctgggtggcctgctaccaaatccagaaatctttggcttggattttgccctggttgggatgtttattggtatttttgcttcgcaatttcagatgatgcaaagacggattcctgttcgcaatctgctcattatcttancagttgttgcggtgtcctactttttacttttgacagtggtgtctcagtcactagctgttctgtttgcgatgctacttggttgtagcatgggggtggttttagatggtcagtaa

SEQ ID NO: 2174 - DNA, 411 bp, Streptococcus pneumoniae; identical to SEQ ID NO: 1407
  unsure (48),(49),(51): n at each above location is unknown.

SEQ ID NO: 2175 - DNA, 240 bp, Streptococcus pneumoniae
atgaaaatcaaagagcaaactaggaaactagccgcaggttgctcaaaacaccgttttgaggttgcagatagaactgatgaagtcagctcaaaacactgttttgaggttgtggatagaactgacgaagtcagctcaaaacaccgttttgaggttgtggatagaactgacgaagtcagtaaccatacctacggcaaggtgaagctgacgtggtttgaagagagtttcgaagagtataagtag

SEQ ID NO: 2176 - DNA, 225 bp, Streptococcus pneumoniae
tacgaaacaattgctaaaacatttatagaaattaattttactttcccaatcgatttgttctcatcttatttcaatctgctatataatagtccatgctgtggctggattcttttcagcctacttatactcttcgaaactctcttcaaaccacgtcagcttcaccttgccgtaggtatggttactgacttcgtcagttctatccacaacctcaaaacggtgttttga

SEQ ID NO: 2177 - DNA, 1230 bp, Streptococcus pneumoniae
gtgatgaaagtatttcttcaaaatagagattttaggcaattaactatcaaccagtggatttcaacgcttggggatacgattttttatctggcctttctgaattatgtggcagatgcgtcttttgcacctttggcgattttactcattacgatttcagaaaccctgccccaaattttacaaatctttctgggagttttggcagattttcaacatcatcgtgtcttgaaatacacagtcattagttttgcaaaatttttgctttactctatcgtttctttatcactttcagggcagtctttctccttgttgctagtagcatttatttgtctgcttaacctcttgtctgacacattgagttacttttcaggagccatgctcactccgattttcattagaattattgggcaagaccatctggcagaagctattggctttaaacagtcaactgttagtttagtgaaaacaatcagtaatatcctaggaggagtcttactaggcattctatccatccagtttatttccttactgaacgctcttacctttttaatcgcatttttaggtatcctcttcataaaaactgacctcttgaaagtagaaaaaacgattagctatcaagaaggactctctgtaaaatccttttgccagcatttgctccaatcatcaaaattgatatggaatatgaataaggtgctcttggttttgtttattatctctactagtcaagcagtgataaatgttacggttcctatttccactctatttttaaggaaccagccctttttgaatttacaaacaggtcaatctcttgccttgctatccacttttgaactgtcagccctgattgtcggaagccttgtaagtggctatctgcaacataccatttccataaaaacagctctctatgcctcacttgtcatccagttgcttcttctagtaggatttgccacagttcgttttgactggattctcatctttagtaccttggatgcctttttcgcaggtgttctctctcctagattgcaagaactcgtttttaaacaaatacctgaggagtcaatgggagcagttcaatcctctatcggtgccattacggttgttttacctagcttatttacaatagctttggtaaccattgctactagctttggaactctggcagttagctttgttttattgctatttcttctagttgcctttgttatgcttctgaatattcgtgaaagtatttag

SEQ ID NO: 2178 - DNA, 666 bp, Streptococcus pneumoniae
atgaaaaagataatctcacaccgctactttattatagtttttctactagttattgctgaccagaagttcagtgttttagttttacgcagtgaccttgttgctgggctatctgactttgcctattatctgtcggatatgatgttgaattttcttgtggttttatttgctcttattgctatgatttggtcggggaaatggcagaaaatcaatagtagaaagtttaaaggatcctatcttttctattccttcctagctctgcttgcttttgttgcttggaattttgtcaccttttttcttttcccacctactcgaaatgaaatttcttatcaacatgctgctcctacttttacaggagctacggcatttttgatgtattttttttatcctgtgattgcaggtcccatttttgaagacatgatttatcgtggattagtgatgactgctctggaaaaaggaaagaaatgggggctagatgtacttggttccgctgttttatttggggtctcgcacattagtaatcacggttgggtcttgacagactttgtcttctatatgggtggaggtcttatatttgcagtcttatttagaatgacaaagtcaatttattggcctattggactgcatatagtctacaatggcattggtcagcttttgatgttactgtaa

SEQ ID NO: 2179 - DNA, 198 bp, Streptococcus pneumoniae
atgttaaatttacaatttgcagaaacaatggaattgacagaagctgagttggagacagtttatggaggggaatttgggaataatgctgttatcccagccggtgcttggggaggtttaggaacgtcttggtcaatcactaatttctggaagaaatattttaaccatgattcttccactgttaatcgtcgccattattga

SEQ ID NO: 2180 - DNA, 888 bp, Streptococcus pneumoniae
atgcaaaagctaggaggtggtaggatgattgaaaaaatggaactgggggaattttacaaggaattacgtttggcgagaaagcttaagcagacagatgtggcttgtgagggtctaacagcttctcagttgtccaagtttgaactagggcagtctatgctgtctgcggataagttgattctagctatccaaggtataaatgtgacctttgatgagtttgggcacaagctcaacaactatcaagaatctccacatatgcgaatcggtcgaaaggttgtgaatcgctttgcccatcaggatatagctgctttagagcagctattggaggaagtcgatcaagaacagatggcgcagacctatcgtcgtttgaatgccatcgtgattaaagatgccatccattcactaaataaaagctacccactagcagaggaggatagcgagtttttgaccacctatctctatgatatcgagtcttggacctggtttgaactctatctcttttgcaataccatgcccttcttgagcaatcaagatctgatttttttatcaacctccttactcgaaaaatccaaagaatttaaagagttagtacacaatcgattgtatatgaagcaaggactcttaaatatcttatcagaactcatggagcgaaaacttttctcctacatcccaatcttcgaagccgagttggagaggatgttacgaccgtatgatgtttttgaaaaagtatcgtggcaatttttaaagaagatgagtgtctttcttcaaacaaagggaagcaatcaaaaagagattgaacgctttatccaatctctgcaggtattagaaaatccacaattaacatccctttttgaattgcgttttcagcaatataaagaacttatagattag

SEQ ID NO: 2181 - DNA, 207 bp, Streptococcus pneumoniae
gctttctcgccaaacgtaattccttgtaaaattcccccagttccattttttcaatcatcctaccacctcctagcttttgcatattatatcattatttgtgttcatttgtcaaaacattctgacactttggtgattgaaaaagccagccttaagctgactctaaaaggaccgagccttgtacaatacagaactcaatcctcgttctaa

SEQ ID NO: 2182 - DNA, 618 bp, Streptococcus pneumoniae
ttgagagaaggttgttctatatatgataatttatatccaagtcgcatagttgttggagatgagacagttgaaggaagaaaaattgcagagttgttcctttcgattagtactcatagtactgccaatattaaaaatgttatgttagtttctcctactgaagcagaagcaattaagcttttttctaacacattcttagctctccgtgttgctttttttaatgaactagattcttttgctgagaggagaagtttaaatgctgaagttgtaataaaaggtgtttgtttagatccaagaattggaaatttttataataatccttcttttggatttggaggatattgtcttcccaaagatactaaacaattaaaaaaagaatttatagaaataaatgccccagtgatagaagcgattgatatttcaaacacaaatagaaaacagttcatagttaaacaaatattggaacgaaagccaaagatagtaggaatatataaattggggatgaaatataattcagataattacaaagagtcagctattttaagtataattaatgaactattgattgtcggtataaaaattttagtatatgaaccaaatttaaacgttagttatagataa

SEQ ID NO: 2183 - DNA, 756 bp, Streptococcus pneumoniae
atggttatgagtaacaatactaagtatatctttttatctccacatttagatgacgcaattttttcctgtggtgattatatttcaaaattaacttcagaaggagaaattgtacttgttattactatattttctggttaccctttgagccaacagctacagccctctgctaagcaatttcataagttgtgtaaccttgggaaatatccgattgaagaaaggaagaaagaagacaggttagcttgtgaacgtctacagtgtgattttagacacttatcgtactatgaatgtctctataggaaagatagaaatggcaattttctataccgtcatatctatagtgaattaaaaaatgaggacacattaaagaatgatatcataaaagagctgttaatgcatttagacgacaaatgtgtcgtatattgtccgctttcacttggtgaccatattgatcatgtttttgtgaatagtattggaagggcgcttgaatttatgcgttataaagtaatatattatgaggacttcccatatgtaagtgatagtagtatggttagttatatgggaaaaactaaagaattaaaaatgtatcaagaggaacttgatgaaaaacattatattgatagaatatcatcaatattgtgctataaatctcagattttgataatctggaaatcagttgaaaaacttttaaacaatattaaagagttgtatttaaggaatggggcagcttattctattagattttggattaagaaataa

SEQ ID NO: 2184 - DNA, 222 bp, Streptococcus pneumoniae
aaatatttaattttagagataaagagcttatcttttttaagtaagattgtaaatgggctgatacaaaatattgaggagaatttagaggatgatattgaaaggatattgaaatatttatatatatgtttatttaacgaaatattcattattaagaataaggtgaatttttttgatgatgtggaatttaatcagacacttagtgaatttttagataaattgtag

SEQ ID NO: 2185 - DNA, 345 bp, Streptococcus pneumoniae
actgcaccccaaaagttagatttattctgtctaacttttggggtgcagttcattttgcatagttttggcattcatcctagatatccatataaaatgtctgagattgttgaaatgtctaaaaaaatatcagatctaaacgataaaaaagaatttcacaaaaagaactgtgagttgaggtttcaagatagtgttcttgataacataaatagtgtcccgggtacaactcatttatttagttgtttaaatattcaaacattagtaaaaattattttatatatttttcgatacaacagttgtatgaaaatatttaattttagagataaagagcttatcttttttaagtaa

SEQ ID NO: 2186 - DNA, 243 bp, Streptococcus pneumoniae
ttgttacccatgctccgcatccggaacttaaacaatattttactaagatatatcaatttccaaaggattttatttaagaatataggggagggaaacatgagattctattgtgaaacttatgaggtaattactgaagagaaaaaagtatcatttttttatgtagatgagaaacccttaaggtatctgttatttgactatatatttctactagttctagctaaaaaaaatatcccaatcttatga

SEQ ID NO: 2187 - DNA, 1617 bp, Streptococcus pneumoniae
gtgtatactattataaaatcaaatataaaaaaatttagtttattaacgatatttattgttgctggtcaattattgctaatttatgcagcaactattaatgctctggtgttgaatgaattaattgcgatgaatttagagcggtttttgaaattgtcaatctaccaaatgattgtctggtgtgggataatattccttgactgggtagtgaaaaattatcaggttgaagtgatccaagagtttaatctagagattcgaaatagagttgccacagacatctctaactctacctatcaagaatttcatagtaaatcatcaggaacatatctttcgtggctaaataatgatgttcagactttaaatgatcaggcttttaaacaactttttttagtaataaaaggaatttctggtactatatttgcagttgtgactcttaatcactatcattggtcattgactgtagccaccttgttttcattaatgattatgctacttgtaccaaaaatctttgcatcgaaaatgcgagaagttagtctaaatttaactaaccaaaatgaagcttttttaaaatctagtgagactatattgaatggatttgatgtgttagcgtccttgaatcttttatatgtattgcctaagaaaattaaagaagcaggaattttattaaagatggttatacaaagaaagacaactgtagaaacgttagcaggcgctattagcttctttctcaatattttttttcagatatctctcgtttttttaacaggctatcttgcaataaaaggaatagtgaaaattggtactattgaagcaataggagcactaacaggtgttatttttacagcgctaggtgaattaggaggtcaattatcctctattattggtacgaagcctatttttttaaaattgtattcaattaatccaattgagtcaaataaaatgaatgatatcgaaccaaatgaggtgaatagagattttccgttatatgaagcaaaaaatatttgctataagtatggagataaagaaatattaaaaaacttaaatttttgttttcaacgtaatgaaaagtatttaattttaggtgaaagtggaagcgggaaatctacattattaaaattattgaatggctttttgagagattatagtggagaattgcgattctgcggggatgatataaaaaaaacctcctatttaaatatggtttcgaatgttctatatgtagatcaaaaagcttatttgtttgaaggtacgattagagataatattttattggaagaaaattatactgatgaagaaatactacagtctttagagcaagttggtttgagtgtaaaagattttcctaataacattttagattattatgttggtgatgatgggagattactgtcaggagggcagaaacaaaaaattactttagctagagggctaattagaaataagaaaatagtattaattgacgagggaacttctgctatcgataggagaacttcgttagcgattgaacgtaagatattagatagagaggatttgactgtcattattgttacccatgctccgcatccggaacttaaacaatattttactaagatatatcaatttccaaaggattttatttaa

SEQ ID NO: 2188 - DNA, 954 bp, Streptococcus pneumoniae
atggataggaatatagatcaagaattagtaagtattataataccaacacataataggtatgaatctctgattagagctgtgaaaagttgtttacatcaaagttataaaaatatcgaagttataattattgatgataattatagtaatgtaaatttaagaaataaaattatccatcaatttggctataccaatcatagaattaagttaattttaagtaatgaagatttaggtgcaactaatgccagaaacataggtataaaaaattctagaggtaagtatatatcatttttagacgatgatgatgaatatatgccagatcgaattttaaagttgatggcttgttttaaaaagagtagaatgaagaatttagctttagtttatagttatggaataataatttatccaaatggtacacgagaagaggagaagaccgattttgttggaaatcccttgtttgttcaaatggttcacaatatagcaggtacgtcattttggttgtgtaaaaaagaggtgctagaattaattaatggttttgagaaaatagattcacatcaggacggtgttgttttattaaaactacttgctcaaggataccaaattgatatagtgcgagaattcttggtgaattactacgctcacagtaaagaaaacggtatcactggagtgacacaaaaaacaattaatgcagatgaagaatattataattactgtaggaaatattttaatttattgagtttcaacgagagaatattggttacaaagaaatattattctttaaacataaagcggttactattaataggagacaaatgcaaggctttaaaagtaatcaagaaggcaagagaagaaaaaatttttaacgaatttctttttttgaaatatatgttattatataattttggttttttctattgtatatatgacaactatgttcaattaaaatttagaaagtga

SEQ ID NO: 2189 - DNA, 525 bp, Streptococcus pneumoniae
ttggatccagaaaaaaggccggatagattccttgaatttgcagaaaaattatttttagtcagagaagatgtgatttttattatggctggaaatggtagtatgtgggctgctttgaaagaaaaaatttgccatttgaaatgtagagataatttcaggttacttggtgaaatctatccagctactatagtttaccaaatatcggatttattgtatattccttatgatacagaaggaatacctatgtgtgttttagagtcaatgtcacaaggaactccggttttagctagtaatgttggcgggttaagtgaaattattgaacatagggttgatggatttttatttgagaaggaagatgttgagggagtgtgtgcttgtgctaattttttactcaatgattctgagtatttgaaatatataggtgagaatagtaaatcaaaaataagaaaacatttttctgtgcaaaaaatgtttgtagaaaccatgagagtatatgatgaattattagagaagagtagtcatggatag

SEQ ID NO: 2190 - DNA, 564 bp, Streptococcus pneumoniae
atggttacaatgcaatatagttgtggaaaaataaatattaatatccctgatggatatggagacattaaggatatagtgttttcggctcatattatagttaggtataataatggacattgtggaggtatagatccgcatataattggactttgtaaaaagcagatcagaaggatgtctctatatcctattttgataatcgtatctagagattcaaaggttattgatgattataaaaatttagatattgcctatgttgattgtactcaatgttcaaataattttgaaactgccttacacgttaaaaatattttaaaattattaaaaatccgacttatacactgtcatggctactcaactaattattttttatatatgttaaaaaaacttgacaagaatggatttggaaaggttaagacagtgataacatgccatggatgggttgaatataacttaaaaaagaaattcttgacttattttgatttttggacatattctatgggagatgcttttatttgtgtatctgaaactatgaaaaaaagattggagagtataataaaaaaataa

SEQ ID NO: 2191 - DNA, 321 bp, Streptococcus pneumoniae
aaaattgatagagataaattaaaaatctatattgaaactcatcccgatgcttatttgactgaaatagctgctgaattcaactgtcctccaacaactattcattacgctctaaaggctatgggatatagtctaaaaaagagccgtacctactgcgaacaagacccagaaaaagtaaatcggttccttaaagaattgaatcacttaagctacctgactcctatttatatttatgagacaggggttgagacctatttttatctcgaatatgatcgagccttgagcaggcagttagtctctctgaaagaagatataattatttga

SEQ ID NO: 2192 - DNA, 264 bp, Streptococcus pneumoniae
atggctccgatgacctataaagatacgatgacgagtgactttttcgaagcttgcttccaaaaattcttactacctactttagatacaccatcccttatcattatggacaatgcaaggtttcacagaatgaacatgtgtaaggagcagggcatagactgttaccacttcctacctattcacctgagtataatcccattgagaaaatatgggcttacatcaaaaacatctcagaataatattgtcaaattacgatgcttttcttga

SEQ ID NO: 2193 - DNA, 1065 bp, Streptococcus pneumoniae
ttggaatgttttggctctataatttctgtagtgggtaatcccaccccaggaattatagggtcgtttcttgtagaaaaaaagccccatatgacctataatgaaaagcgtctaaccaactcattagaaagggttcatatggaacaacttaagaataccacagatttgctcggattggaagacaaaaatatcaaaatcttgtctgttctgaaataccaaacccatctagtcgttcagccaaagttggattcccccgctcctccttgtcctcattgtcaagggaagatgatcaaatacgacttccagaaagcctctaaaattccgcttctcgactgtcagggtttacccacggtactgcatctcaaaaagcgccgctttcagtgcaagaattgccttaaggtggtcgtttctcaaacatccattgtcaagaaaaattgccagatttccaacatggtgagacaaaaaatcgctcagctcctccttgaaaagcagtctatgactgagattgcccacagattggcggtctcaacttccaccgtcatccgaaaactgagggaatttaagtttgaaaccgattggaccaagttgccaaaagttatgagttgggatgagtatagcttcaaaaagagcaaaatgagcttcattgcccaagattttgagtccaaatccatcctcgcaattttagacgggcgaactcatgcggtgattcgaaaccatttccaacgctatcagagagaggttcgggagctggtcgaggtcatcaccatggacatgtacagcccttattatcggctcgctaagcaactctttccaaaggcgaagattgttcttgaccgcttccacattgtccaacatctgagccgagctatgaaccgagtacgaatccaaatcatgaaccaatttgaccgaaaatccttggagtatcgggcgctcaagcgcttttggaaccctcgctttttcgtttctaggctcgggctaaatcagtccactggactgatttactacaccaggatagcttcaagctctgtcagaaacgattctatcagcccacgtttcgaatgcacttaa

SEQ ID NO: 2194 - DNA, 387 bp, Streptococcus pneumoniae
atgcacttaacccatcgggaagtacgagataaactgctttcttactctgagggattacaggttcactacgaactctatcaactcctgctctttcattttcaagagaagaatgccgaccatttctttggattgattgagcaagaactgccaacggttcatccgctttttcaaacggtcttttggacttttttaagggatagagataagattatcaacgcacttaagctgccttattccaacgctaaacttgaagcgaccaataatttgattaaggttatcaagtgcaaagcctttggtttccggaactttaacaattttaaaaaacggattttgatgactttgaacatcaaaaaagagagtacgaatttcgtactctccagattgtaa

SEQ ID NO: 2195 - DNA, 213 bp, Streptococcus pneumoniae
tgggtaggcgaaaagttacaatctggagagtacgaaattcgtactctcttttttgatgttcaaagtcatcaaaatccgttttttaaaattgttaaagttccggaaaccaaaggctttgcacttgataaccttaatcaaattattggtcgcttcaagtttagcgttggaataaggcagcttaagtgcgttgataatcttatctctatcccttaa

SEQ ID NO: 2196 - DNA, 1011 bp, Streptococcus pneumoniae
atgaaggatagatatattttagcatttgagacatcctgtgatgagaccagtgtcgccgtcttgaaaaacgacgatgagctcttgtccaatgtcattgctagtcaaattgagagtcacaaacgttttggtggcgtagtgcccgaagtagccagtcgtcaccatgtcgaggtcattacagcctgtatcgaggaggcattggcagaagcagggattaccgaagaggacgtgacagctgttgcggttacctacggaccaggcttggtcggagccttgctagttggtttgtcagctgccaaggcctttgcttgggctcacggacttccactgattcctgttaatcacatggctgggcacctcatggcagctcagagtgtggagcctttggagtttcccttgctagccctcttggtcagcggcggacacacagagttggtctatgtttctgaggctggcgattacaagattgttggggagacacgagatgacgcggttggcgaggcctatgataaggtcggccgtgtcatgggcttgacctatcctgcaggtcgtgagattgacgagctggctcatcaggggcaggatatttatgatttcccccgtgccatgattaaggaagataatctggagttttcattctctggtttgaagtcagcctttatcaatcttcatcacaatgccgagcaaaagggagaaagcctgtctacagaagatttgtgtgcttccttccaagcagcagttatggacattctcatggcaaaaaccaagaaggctttggaggaatatcctgttaaaaccctagttgtggcaggtggtgtggcagccaataaaggtctcagagaacgcttagcagccgaaatcacagatgtcaaggttatcatcccccctctgcgactctgcggagacaatgcaggtatgattgcctatgccagcgtcagcgagtggaacaaagaaaacttcgcaggctgggacctcaatgccaaaccaagtcttgcctttgataccatggaataa

SEQ ID NO: 2197 - DNA, 438 bp, Streptococcus pneumoniae
atgatagaaatcaagcgaattcaacaacagcctgacctagctcaagccatctacgctgttatggcagctgtttacctagtcagtccttggactctggagcaaatccaagcagatctgtcccaagaccagacttggtatgcattggcttatgatggggcagaagtgattggatttctagctgtgcaggagaatctttttgaagcagaagtcctgcaaatcgctgtcaaaggagcttatcagggtcagggaattgcgtcagccttgtttgctcaattgccgacagataaggagattttcctcgaagtcagaaagtcaaatcaacgagcgcaagcattttacaagaaagaaaaaatggcggtcatcgctgatcgaaaggcctactaccatgacccagtcgaggacgccattatcatgaagagagaaatagatgaaggatag

SEQ ID NO: 2198 - DNA, 684 bp, Streptococcus pneumoniae
atgaaagtattagcttttgatacgtccagcaaggctctttctctggctattttagaggacaagcaggttcttgctgagacgacgattaatatcaagaaaaatcacagtattaccctcatgccagccattgattttttgatggagagtttggactggacgcccaaggatttggaccgaatcgtggtggcggaagggccaggtagctacacaggcttgcgaatcgcggtagccactgccaagaccttgactcatactctgaacattgagttagttggtatgtctagcctcttggctctggtgccatatcaacaagaaggcttgttcgttcctttgatggatgcgcgtcgcaacaatgtttatgcaggattttatgaaaatgctaaacctgtcatgccagaagcgcacctatcttttgaagaggtgctagaaaaagtcaagggtgctagtcaggtaacctttgtcggagaagttgccccctttgtggagcagattcaagaacacttgccaaggactaattataaagaaaccttgcctaatgcagccaatcttgctcttttagcttgggacaaggaagcagactccttgcatgattttgtgccgaactacctcaagcgtgtcgaagctgaggaaaattggctcaagaatcacaccgagtctggtgagtcctacattaaacgcctatga

SEQ ID NO: 2199 - DNA, 186 bp, Streptococcus pneumoniae
atgacaaattttgacattcttgacaatcaatttttatccttatctgaaaatgaattatcagatattgatggcggtctcgctcccttggttatctttggagtagcagtatcttggaaggctattgcaggtggaacagcacttataggttctggtttggcagctggttattttttaggaggagattaa

SEQ ID NO: 2200 - DNA, 231 bp, Streptococcus pneumoniae
ttggaaggctattgcaggtggaacagcacttataggttctggtttggcagctggttattttttaggaggagattaactatgatgaaagatttgaacaactatcgtgaaatttctaataaggaattgcaagaaatcaagggtggctttggtgtaggtgttggtatcgctttatttatggcaggttataccattggaaaagaccttcgtaaaaagtttggtaagtcatgctag

SEQ ID NO: 2201 - DNA, 234 bp, Streptococcus pneumoniae
atgatttacaaagttttttatcaagaaacaaaagaacgtagcccacgccgtgaaacaacacgcgcgctttacctagacatcgataccagctcagaacttgagggccgtatcactgctcgccaacttgtcgaagaaaatcgcccagagtacaatatcgaatatatcgaactcttgtctgacaaattgctcgattacgaaaaagaaactggcgccttcgaaattacggagttctaa

SEQ ID NO: 2202 - DNA, 1680 bp, Streptococcus pneumoniae
atggcctacactcttaaacctgaagaagttggtgtttttgccatcggtggtctaggagaaatcgggaaaaacacttacggaattgaataccaagacgagattatcatcgtcgatgctgggattaaattcccagaagatgacttgcttggtatcgactatgtcattcctgactactcttacatcgtagacaatatcgaccgcgtcaaggctgttttaatcacacacggacacgaggaccacattggtgggattccgttcctactcaagcaagcaaatgtccctatttatgctggaccgcttgccttggctttgatccgtgggaaactcgaagaacacggcctcttgcgcaacgccaaactttacgaaatcaaccacaacaccgagttgacctttaaaaatctcaaggcaactttctttagaacgactcactctattccagagcctttggggattgtcattcatactcctcaagggaaaatcgtctgtacgggtgactttaagttcgactttactccagttggagaacctgcggacttgcatcgtatggctgcgcttggtgaagaaggcgtgctctgtctcctgtctgactcgacaaatgcggaagtaccaacctttaccaactctgaaaaagtcgttggtcagtccattatgaagattatccaaggtattgaaggacgtatcatctttgcatcctttgcctcaaatatcttccgtctccagcaggcaacagaagctgctgttaagactggacgcaagattgcggtctttggtcgttctatggaaaaggccattgtcaacggaatcgatcttggctacatcaaagctcctaagggaacctttatcgagccaaatgaaatcaaagattatcctgcaggagaagttcttatcctctgtacaggtagtcagggtgagcctatggcagccctctctcgtatcgccaacggaacccaccgtcaagtacaattacaaccaggtgataccgttatcttctcttctagtcccatccctggaaacactactagcgtcaacaagctgattaacatcatttctgaagctggtgtcgaagttatccacggtaaagtgaacaatatccatacatctggacacggtggtcagcaagagcaaaaactcatgctctgcttgattaagccaaaatacttcatgcctgtccacggtgaataccgcatgcaaaaagtccacgctggactagcagtggatactggtgttgagaaggacaatatctttatcatgagcaatggcgatgtgcttgcccttactgctgactcagctcgtatcgcaggtcatttcaacgcccaagatatctatgtcgatggaaatcgtatcggtgaaattggcgcagctgtcctcaaagatcgtcgcgatctatctgaagacggtgtcgttctggcagtcgcaactgttgacttcaaatcgcagatgattctgtctggcccagatatcctcagccgaggctttgtctacatgagagagtctggagacttgattcgccaaagccagcgtatcctcttcaatgccattcgtatcgcactgaaaaataaggatgctagcgtgcaatctgtcaatggtgccattgtcaacgctattcgccccttcctctatgaaaataccgaacgtgaaccgatcatcatcccgatgatcctcacaccagatgaagaataa

SEQ ID NO: 2203 - DNA, 363 bp, Streptococcus pneumoniae
ttgagttttaatctcaaaagaaagcatagagaaaaacagctccgaagacggggctgttttgttgctttattcttcatctggtgtgaggatcatcgggatgatgatcggttcacgttcggtattttcatagaggaaggggcgaatagcgttgacaatggcaccattgacagattgcacgctagcatccttatttttcagtgcgatacgaatggcattgaagaggatacgctggctttggcgaatcaagtctccagactctctcatgtagacaaagcctcggctgaggatatctgggccagacagaatcatctgcgatttgaagtcaacagttgcgactgccagaacgacaccgtcttcagatag

SEQ ID NO: 2204 - DNA, 1914 bp, Streptococcus pneumoniae
atgatttatcattttactgaagaatacgatattattgtaattggtgcgggacacgctggggttgaggcttccttggccgctagccgtatgggctgtaaggtcctgcttgcgaccatcaatattgaaatgctggctttcatgccttgtaatccctctatcggtggttctgccaaggggattgtcgtacgtgaagtcgatgccctcggtggcgagatggccaagactattgacaagacttacatccagatgaagatgctcaacacagggaaggggccagctgtccgtgctcttcgtgcgcaggctgacaaggaactttactctaaggagatgcgcaagacagttgaaaatcaagaaaatctgacccttcgtcaaaccatgattgatgagattttggtggaagatggcaaggctgtcggtgtgcgtacagccacccatcaagaatatgctgctaaggctgttattgtgacgacagggactgctctccgtggggaaattatcatcggagacctcaagtactcatcaggtcctaaccacagcttggcttctattaacctagctgacaatctcaaggaactgggtctcgaaatcggtcgtttcaagacaggaacccctccacgtgtcaaggcttcttctatcaattacgatgtgacagaaattcagccaggagacgaagtgcctaatcatttctcatacacttcacgtgatgaggattatgtcaaggaccaagtaccatgctggttgacctataccaatggtaccagtcatgagattatccaaaacaacctccaccgtgcgcctatgtttacaggtgtggtcaagggagtgggacctcgttactgtccatcgattgaggacaagattgtgcgctttgcggacaaggaacgtcaccaactcttccttgagccagaaggacgcaatacagaggaagtctatgttcaaggactttcaaccagtctgcctgaggatgtccaacgtgacttggttcattccatcaaaggtctggaaaatgcagagatgatgcgaacaggttatgctattgagtatgatatggtcttgcctcatcagttgcgtgcgactttggaaaccaagaaaatctcaggtctcttcactgctggtcagacaaatggaacgtcaggttacgaagaggcagcaggccaagggattatcgcgggtatcaatgcggctctgaaaatccaaggcaagcctgaattgattctaaaacgaagtgacggttacattggggtcatgatcgacgacttggtgaccaagggaaccattgaaccttaccgtctcttgaccagtcgtgctgaatatcgtctcattcttcgccatgacaatgctgatatgcgcttgactgagatgggccgtgagattggccttgtggacgatgaacgctgggctcgttttgaaatcaagaaaaatcaatttgataatgagatgaagcgtctagacagtatcaaactcaagccagtcaaggaaaccaatgctaaggttgaggaaatgggcttcaagccgttgacagatgcggtgacagccaaggaattccttcgccgtccagaagtttcttaccaagatgtggtggccttcatcggaccagctgcagaggaattagatgacaagattatcgaattgattgaaacagaaatcaagtacgaaggttacatctcaaaagccatggatcaggttgctaagatgaagcgcatggaagaaaaacgtattccagccaatatcgactgggatgacattgattctatcgcaaccgaagcccgtcagaagttcaaactcatcaatccagaaaccatcggccaagccagccgtatttcgggagtaaacccagcagatatttctattttgatggtgtatctggaaggtaaaaatcgtagtatttctaaaactcttcaaaaatcaaaatga

SEQ ID NO: 2205 - DNA, 474 bp, Streptococcus pneumoniae
ttgatgggtggctgtacgcacaccgacagccttgccatcttccaccaaaatctcatcaatcatggtttgacgaagggtcagattttcttgattttcaactgtcttgcgcatctccttagagtaaagttccttgtcagcctgcgcacgaagagcacggacagctggccccttccctgtgttgagcatcttcatctggatgtaagtcttgtcaatagtcttggccatctcgccaccgagggcatcgacttcacgtacgacaatccccttggcagaaccaccgatagagggattacaaggcatgaaagccagcatttcaatattgatggtcgcaagcaggaccttacagcccatacggctagcggccaaggaagcctcaaccccagcgtgtcccgcaccaattacaataatatcgtattcttcagtaaaatgataaatcatgtttctctcctattcctcaagatgaatgtgtcttag

SEQ ID NO: 2206 - DNA, 483 bp, Streptococcus pneumoniae
ttgtgtcgtttaagggaaaggacaagaatgactcaacaagactttcggacaaaagtagacaatacggtttttggtgttcgggcgacagctttgattcttcaaaatcgcaagcttctagtcaccaaagacaagggcaagtattacattatcggcggtgcgattcaagttaacgaaaaaacggaagacgcggtagtccgtgaagtgaaggaagaactgggtgttaaatctcaagctgggcagctagcttttgtggttgaaaatcgttttgaagtggacggcgtttcctatcacaatatcgagtttcattatctggtggatttgcttgaagatgccccgttgaccatgcaggaagatgagaaaaggcagccctgtgagtggattgacttggataagctccagaatatccagctagttccagcctttttaaaaacagccctaccagattgggaaggccaactaagacacattcatcttgaggaatag

SEQ ID NO: 2207 - DNA, 1176 bp, Streptococcus pneumoniae
gtgaagcacacacgaccttcaatcgtgaataaacgaatagatgggagacttaccatgagtgataactctaaaacacgtgttgtcgtggggatgagtggtggtgttgattcgtcggtgacggctcttttgctcaaggagcagggctacgatgtgatcggtatcttcatgaagaactgggatgacacagatgaaaacggcgtctgtacggcgaccgaagattacaaggatgtggttgcggtggcagaccagattggcattccctactactctgtcaattttgaaaaagagtactgggaccgcgtttttgagtatttcctagcggaataccgtgcagggcgcacgccaaatccggacgttatgtgcaacaaggaaatcaagttcaaggcctttttggactatgccatgaccttgggggcagactatgtagcgactgggcactatgctcgagtggcgcgtgatgaggatggcactgttcacatgcttcgtggcgtggacaatggcaaggaccagacctatttcctcagccaactttcgcaagaacaacttcaaaaaaccatgttcccactaggacatttggaaaagcctgaagttcgaaaactagcagaagaagcaggcctttcgactgctaagaagaaagactcgacagggatttgctttatcggagaaaagaactttaaaaacttcctcagcaactacctgccagctcagcctggtcgcatgatgactgtggatggtcgcgatatgggcgagcatgcaggtcttatgtactatacaatcggtcagcgtggcggactcggtatcggtgggcaacacggcggtgacaatgccccttggttcgttgtcggaaaagatctaagcaagaatattctctatgtaggacaaggattctaccatgattcgctcatgtcaactagcctagaagccagtcaagtccactttactcgtgaaatgccagaagagtttacgctagaatgtacggctaaattccgttaccgtcagcctgactctaaggtgaccgtccatgtcaaaggagacaaggcagaggtcatctttgcggaaccacaacgcgcgattacaccaggacaggcagttgtcttttacgatggcgaagagtgtctaggtggtggtttgattgacaatgcttaccgcgatggacaagtttgtcagtacatttag

SEQ ID NO: 2208 - DNA, 180 bp, Streptococcus pneumoniae
ttgagcaaaagagccgtcaccgacgaatcaacaccaccactcatccccacgacaacacgtgttttagagttatcactcatggtaagtctcccatctattcgtttattcacgattgaaggtcgtgtgtgcttcacgattgaaggtcgcttaagcagtattcattataacacgcttggttag

SEQ ID NO: 2209 - DNA, 198 bp, Streptococcus pneumoniae
atagatttatgttcgtattctttaggtacctatcttatgatttcaggaaatgtcattaaaaaacgactccttttctctaacttgaaaaatagattagagaaaatgggttgttttatttattatagttatttgaatgaagataagaataaggtatactcacatcattcacataatctgtatattgactataagttttaa

SEQ ID NO: 2210 - DNA, 1653 bp, Streptococcus pneumoniae
ggagaaagcgaaagaagtaaaaaaagcttcggaagagaacaagctgcaaatctgaaatatcaacaagagttggttaaatatattaaatatacacgtgaaaataattcaacaaaaagaactgaagctgagaaagtaatgactgcagctaagaaagagcatgagaaaaaacaaacagaacttgctaaagttctcgcaaaggtaattcctagcgcggaagaattagaaaatactagacaaaaagcagagaaagctaaagaaaaagaaccagagcttactaaaaaactagaagaagctaaagcaaaatcagaagaagctgagaaaaaagctactgaagccaaacaaaaagtggatgcagaacatgctgaagaagtcgttcctcaagctaaaatcgctgagttggaaaatgaagttcagaaactagaaaaagatctcaaagagattgatgaatctgactcagaagattatgttaaagaaggtctccgtgctcctcttcaatctgaattggatgccaaacaagctaaactatcaaaacttgaagagttgagtgataagattgatgagttagacgctgaaattgcaaaacttgaaaaaaatgtagaagatttcaaaaactcaaacggtgagcaagctgaacaataccgtgctgcagctgaagaagacttagctgctaaacaagctgaattagaaaaaactgaagctgaccttaagaaagcagttaatgagccagaaaaaccagctccagctccagaaactccagccccagaagcaccagctgaacaaccaaaaccagcgccggctcctcaaccagctcccgcaccaaaaccagagaagccagctgaacaaccaaaagcagaaaaaccagctgatcaacaagctgaagaagactatgatcgtagatcagaagaagaatataaccgcttgacccaacagcaaccgccaaaagcagaaaaaccagctcctgcaccacaaccagagcaaccagctcctgcaccaaaaacaggctggaaacaagaaaacggtatgtggtacttctacaatactgatggttcaatggcgacaggatggctccaaaacaacggttcatggtactacctcaacagcaatggtgctatggcaacaggttggctccaaaacaatggatcatggtattacctaaatgctaacggtgctatggcaacaggttggctccaaaacaatggttcatggtactacctcaacagcaatggcgctatggcgacaggatggctccaatacaatggctcatggtactatctaaacgctagcggcgctatggcaacaggttgggctaaagtcaacggttcatggtactacctcaacgctaacggttcaatggcaacaggatggctccaatacaacggttcatggtactacctcaacgctaacggtgctatggcaacaggttgggctaaagtcaacggatcatggtactacctcaacgctaacggttcaatggcaacaggttgggtgaaagatggagatacctggtactatcttgaagcatcaggtgctatgaaagcaagccaatggttcaaagtatcagataaatggtactatgtcaatggcttaggtgcccttgcagtcaacacaactgtagatggctatgaagtcaatgccaatggtgaatgggtttaa

SEQ ID NO: 2211 - DNA, 237 bp, Streptococcus pneumoniae
aaaaaactgaagctgaccttaagaaagcagttaatgagccagaaaaaccagctccagctccagaaactccagccccagaagcaccagctgaacaaccaaaaccagcgccggctcctcaaccagctcccgcaccaaaaccagagaagccagctgaacaaccaaaagcagaaaaaccagctgatcaacaagctgaagaagactatgatcgtagatcagaagaagaatataaccgcttga

SEQ ID NO: 2212 - DNA, 192 bp, Streptococcus pneumoniae
ttgttgatcagctggtttttctgcttttggttgttcagctggcttctctggttttggtgcgggagctggttgaggagccggcgctggttttggttgttcagctggtgcttctggggctggagtttctggagctggagctggtttttctggctcattaactgctttcttaaggtcagcttcagttttttctaa

SEQ ID NO: 2213 - DNA, 309 bp, Streptococcus pneumoniae
ggagccggcgctggttttggttgttcagctggtgcttctggggctggagtttctggagctggagctggtttttctggctcattaactgctttcttaaggtcagcttcagttttttctaattcagcttgtttagcagctaagtcttcttcagctgcagcacggtattgttcagcttgctcaccgtttgagtttttgaaatcttctacatttttttcaagttttgcaatttcagcgtctaactcatcaatcttatcactcaactcttcaagttttgatagtttagcttgtttggcatccaattcagattga

SEQ ID NO: 2214 - DNA, 318 bp, Streptococcus pneumoniae
ggaacgacttcttcagcatgttctgcatccactttttgtttggcttcagtagcttttttctcagcttcttctgattttgctttagcttcttctagttttttagtaagctctggttctttttctttagctttctctgctttttgtctagtattttctaattcttccgcgctaggaattacctttgcgagaactttagcaagttctgtttgttttttctcatgctctttcttagctgcagtcattactttctcagcttcagttctttttgttgaattattttcacgtgtatatttaatatatttaaccaactcttgttga

SEQ ID NO: 2215 - DNA, 309 bp, Streptococcus pneumoniae
atgaataagaaaaaaatgattttaacaagtctagccagcgtcgctatcttaggggctggttttgttacgtctcagcctactgttgtaagagcagaagaatctcccgtagccagtcagtctaaagctgagaaagactatgatgcagcagtgaaaaatgctacagctgcaaaaaaagcagcagaagacgctcaaagagctttagatgaagcaaaagctgcgcagaaaaaatatgacgaggatcaaaagaaaactgaggagaaagcgaaagaagtaaaaaaagcttcggaagagaacaagctgcaaatctga

SEQ ID NO: 2216 - DNA, 279 bp, Streptococcus pneumoniae
atgtacaatgatgtaatcgaaaggatatctttatatgagtttatcggtgatattttctattctaaaataataagttgttgcatcgtagctagcgatttatctaaaaatactatgaaattggacgtcatattttttgaggataaaaataaaagatccgcagttttaggtttacgaagagacaaaagcggagtatttaaaccagttactctacattttacaagcgctaagaaatatgctaaagttcgtaaaacagatgtgaaagaaatgaaatggctataa

SEQ ID NO: 2217 - DNA, 300 bp, Streptococcus pneumoniae
ttgggcaatagtgagaactgccccgtgcttttttattttgagaaaatatggagtttgtcgttgaaattacttgattgtattttggactatcaagaaagattcaatggaaaaacatgtcaagtatcaacgaattataagtatttagagattttcaaagtgaatttttgtttgactgatttacatcatttatttgacttatacaaaatcacacgagattatgctagtcaaacaaaacctgctattcaagctggtgtttttattttagaagattttagaaatatcctatgtacaatgatgtaa

SEQ ID NO: 2218 - DNA, 213 bp, Streptococcus pneumoniae
atggagaatcgtcacatgaaacatttttttgcaggaattggtgagataaaacttgttggctacttattgtatatatgtgtaggactagcccctctttttcatatatatgtcataggttcggaactgagttttgtgaaaatagtgttatctattttgggagttatatttgtaagtatgttaactattgctcgaatttatcggacttttctataa

SEQ ID NO: 2219 - DNA, 759 bp, Streptococcus pneumoniae
ttgggatggattcatatctgcgacagtaagatgagtaatgtagataagattcgaaaaatacatattatcgtatgttggatgtatatatttttatcattcagggcgattataaatgacacggagtattttttgcttatttttttagcttttatctactcaatagtatcactacctctatattctgtgaaaaataaaatagtatctatctgtctagccataaattcgattctgttaatgagtttccccattttaatcaataagtttttcccagaaagttttttgacttataccgtattaataagtgtttttatcctagagttagcaatctttcatttaattggggaagattttgctactaaattgactaacgaatataagaaaattagtcagtttagaagcaaggtgtctcaatctccttggataaaatatttagagatttctagttttatattaactatatttccatctattctttatggtacagttgataatcatgtactgactcttatctttttgataaaaatttgtgcagataccacgataaaatttttattcatcagattatttgacacaagtactttaatgaagaggagaatattttttcttttcgcattggatgttatagtttacttatttttaggatatcttttagtgattcaaaaagcaggctatttgttttcggttttacttcttttttctaatttttcagttccatttatcaaagaaaaggaatacgaattatttaaaaatagcaagtaa

SEQ ID NO: 2220 - DNA, 387 bp, Streptococcus pneumoniae
atgaaacaatttcaactaaggaggagaaaacaaatggaacttgtattaccaaataattatgttgtgattgatgaagaagaaatgatgtatcttgatgggggagcttatttaagcaagcgtgcttgtcaaggaatttgcgtagctttagctatgagttcaggaacttttatagcattagctggagctgcagttttaaccaaaaaactaataaactatattaaggttggaagctttggaggctggcttattggtgcagcagcaggtgtattggctggggcggcaggaagaatagcttactgtattggatatggtactcttaatagagattgtgatattagcgggaacccttatccttgggatggattcatatctgcgacagtaagatga

SEQ ID NO: 2221 - DNA, 903 bp, Streptococcus pneumoniae
atgatacgtaaactaattgttttcttactaatgctccctctttttgtcttgtggctagagttgcatgtcctagtgaataacttactattgaatctagaatctccccttgattttgtgattagtatgagtcttgctttctgtagtttgattttatcaaaaatagttttagacatactatacgcattgaaagatttgtacaagaaagaagctcttattacgatttttccttttatttttataggcaggaagaaagtaaatgtgaggttctcgccctatttttcattccatcgtaaaagtttgtcgcctgatgatttaagatctaggattatatggagttttattcttgaaattgctattatcctagtatttattttaaaaattccttttgcaatcatcatgcttactacaatatttttctggactataatggatatcaatcatctcgtttttaataagacggaatttctttttaatcaaaataaatgggaaaaagaagattcgtttgaaagcgatttgacgaaaacgttaaaggataaaatacaaaaatcagagctaagttattctgacttaatgtcccttcttctctatgatgcgatgaaccaatccacctttttaacggatagtgaactttttgaggatattttgaaaaaaatcgaagattctcataacacccttctgtgtacaggttttgtcgagttactgctgtatgaaatgtctattagtaacaataacaactggtccaacaaggttgataaaattagaatacacctcatcagaataaatcaattagattttttctattatacaagttggttaaggcaaaattttgatttctgtatgaatagagagtatcataaaatgaaatctcggaaattattactgagtaataaaaagatagtttaa

SEQ ID NO: 2222 - DNA, 183 bp, Streptococcus pneumoniae
atgggtattaaaatggaaaaaatttttgttattattttttttgtatgtctatttatatcatccataacttttttagcctatgattttgttagcgaagaaataaaaaaattgattatttggatcaatgtcgtttttttgattttaatcatagcaatgatgatttatccaaaattaagaaaatga

SEQ ID NO: 2223 - DNA, 375 bp, Streptococcus pneumoniae
atggaactcgtattaccaaataattatgttgttcttgagcaagaagagatgatgtatcttgatgggggattttctattccgagatggcctgttgcaacagccattaatatagcttttaatggtgttttaggtggaggagcaatcagtctagttagaaattatattcgtaattatggtttgcggcgagttacaagcgcaattgctggagcagctgcaagatatgttggggtacgagttgcaaatagagtggcaggatttgcactgtctgctattaatggatttgcagcttggatgtcaattggcgatgctattacaacaatctgggccaacaatgatgtaaataggagagacccaaatttaaacgccttgtggtaa

SEQ ID NO: 2224 - DNA, 186 bp, Streptococcus pneumoniae
ataagatatcctttctctaccttatttgtttttataggttacctaaggtttaaaatcaattattgtttgaaacttaacagttctaaaccactagcaataaatgattgcgaactcactaatactatttcaaaatttattttttttgacttagtaacgcaattccaattagcaatacacctaatataa

SEQ ID NO: 2225 - DNA, 681 bp, Streptococcus pneumoniae
atgggatttagtccaggaatagcagtgttttataaggagagtcaaacaactaagaatctgtttaaattttactacttcttgtactttacaacactaatttcatactattttttctttacttttgtgtatgacaaaccgttgcttttgcctcttattccattttctattatcatagcattagtacaaaaactttatagaattgagaatcaacaattatttctgttaaaatcaaaggtactaacaatactggaatctaagaagaattgtgagtttaatcttcaggattatcatgaaatttggaaattgcaatcaaaatctgagttgccatgcgtggctttatcttatatcagtttgatcaagccatatctttcagagagcgtgcgtgaacaaattgatttattagaagttaagcgatttaaaaaaataaatcatccaatatcactttatggtatgttggatgttataaaattaaatctatatttacggcattataatgaaaaaaataaatatgaatcaatgttaaagaaaattttagaggtaagaccagactttgttttaatcgagcagaatattgatgatagtttaaatagctcgcaaccattatctttatctttagccatttcagaaatccaacttttgcttgaagtgtatatggggatcaaacatgtttcaaccaagtga

SEQ ID NO: 2226 - DNA, 228 bp, Streptococcus pneumoniae
atgtttttacatcattttacagagatttacgacacttttgccccttttttgccccttttgagcaaacaaaaaaaccgcaagcctgagcctgcggtgaaagaacaatttagaaagtttcctttctatttatttaactgtaatcaagccatctggctctactgtgaactctggcttgtctgccatgctaccgtctggtttgaggtagtaccagcctgttccgtccgctga

SEQ ID NO: 2227 - DNA, 957 bp, Streptococcus pneumoniae
atggatatcgatagaaacagactacgtacaggcttgccacaggttggggtgcagccttatcgacaagtacatgctcactcaacaggtaaccgcaactcaaccgtacagaatgaagcggattatcactggcggaaagacccagaattaggttttttctcgcacgttgtcggaaacggtcgcatcatgcaggtaggacctgtgaacaacggaagttgggatgttgggggcggttggaatgctgagacctatgcagcggttgaactgattgaaagccattcaactaaggaagagtttatggctgactatcgcctctatatcgaattgctacgcaatctagcggacgaagcaggcttgccgaagactcttgatacagacgacttggcaggtatcaagacgcatgaatactgtaccaataaccaaccaaacaaccactcagaccacgttgacccttatccatatcttgcaagttggggcattagccgtgaacagtttaagcaagacatcgaaaacggcttgagcgctgcaacaggctggcagaaaaatggcactggctactggtacgtacactcagacggcttttatccaaaagataagtttgagaaaatcaacggtacctggtattatttcgatggctcaggctatatgctttcagaccgctggaagaagcacacagacggtaattggtactggttcgacaactcaggcgaaatggccacaggctggaagaaaatcgctgagaagtggtactattttgatgtagaaggtgccatgaagacaggctgggtcaagtacaaggacacctggtactacttagacgctaaagaaggcgccatggtatcaaatgcctttatccagtcagcggacggaacaggctggtactacctcaaaccagacggtagcatggcagacaagccagagttcacagtagagccagatggcttgattacagttaaataa

SEQ ID NO: 2228 - DNA, 333 bp, Streptococcus pneumoniae
atgcagcaaattactgaaatcatcattgcttttgcgacaagctttttaacagtagcagtaggcggtattgtaaaagcagtaaaagattatcttttgcgtaaaggcggagagaaagcggtgatcatcgctgaaattctagctaaaaatgcagtaaatgccgtggagcaggtagctgctgaaactggctacaagggagatgaaaaactggcacaggctcgcgctaaagtccgtgctgagcttacaaaatacaatattagcatgactgacaaagacttagacaccttcgtagagtcagcagtgaagcagatgaatgacgcatggaaaggacgatag

SEQ ID NO: 2229 - DNA, 417 bp, Streptococcus pneumoniae
atgcaaattgaatttttcaattttctaagaagtgtcgtacagactgaagatggtttggttttgtacgctctagcactgattgtctcaatggaaatcattgattttgtgacagggacgattgcggcgattatcaatcctgacatcgagtacaagagcaaaatcggcattaacgggctccttcgtaagatttcaggggttctcttactgatgatcctcattccggcgtccgttttgttgcctgaaaagacaggttttgtattcttgcactcaatctatctcgggtacatcgcatttacttttcaatctctcattgaaaattatcgcaaattaaaaggaaatgttactctttttcagccgattgtaaaagtatttcagcgattacttgaaaaagatgatgacacgaaaaaaggagaataa

SEQ ID NO: 2230 - DNA, 351 bp, Streptococcus pneumoniae
atggcagaaacaaatcaaaacacagataacttactagaccttacaaaaatcacagaaccatttgagcttgcgagcgctttgcgctacatgaaagaaaatggagagttcattcgttgcaagaatgtaagcgatgacttctatatgtatcgtgacgttcaaaaacgtcctgtgatcgtaaatggccgtcgccaattcaaggatgttgaaaccgtttgggcgttcaaccagtggggtggtacaatcgcaacaatcaacgtagccgttctgttgaatcatgaattctatatcatgaaatttgatgcagagggcaatcctgactggacggttccaacggtagaacctaaagaatag

SEQ ID NO: 2231 - DNA, 204 bp, Streptococcus pneumoniae
atgaacacagaacagcttaaccaagccttacaaatgacaattagtgaaatgtcaacaacttcaacaaattcgatgattacaagtaatatcttgagtattcagttgaatgagcaaagggaagagaatcaaagacttcaagcacgagtggatgagctggaagctctgcttgatgaacaaactaaaccagcagacaaaggagaatag

SEQ ID NO: 2232 - DNA, 6360 bp, Streptococcus pneumoniae
atggacgctttaactagacgacaatttgacagagccatgtttgccaaggaaaggacgctggctattcgtgttggtgaatatgcttcacgggatatcaaagaggctagttttgagtatggctacatcaagggcgatacttataagcctggtggaacctgcgctggtagcggtaaaattacctttaccagtatcattaccacgttcaataagctggataccctgcaccctgagattggtctactggttggggatacctaccagtgggtcaagatgggggaatacttcatcaacgatattgagattgaccgaaaccgcaacacaaccacacttgaacttatggacggtatgtttaagctcaatcgtgagtacgtgacggatttgcatttcccagctgaagtacgagaggttattcaggaaatctgcctgaaaacaggcattgagttagcgaatgactatttcggaatcagcgctatgcgttaccatatcgagcaagttcctgaaggtaagaaactttcgttcagggatatgctgagcgctatgactcagatgattgggatgtcttgcttcttcaaccgagaaggaaagatggaaatccgtgatttgaccgagtccaacatcacgattaacgctgacagttacttcttgcatggattgaccaagagtgaaatcgagtatcagatagctggtatcacttgtaagacggataagaagtctctgacggtcggtatgacaacaggtcggtctttggaacttgataatgtcttcataacccagagcgctttaaatgacttgtattacaaactgaaaaacctaacttactatccgtataatctcaactaccaaggacatttgttacttgaggttgggcagtgggtaaccattcagaccaacaagaaagagacttttaaagttcctgtcttaagtcagagctttatctttaaaggtggtctgagaggtcgtatcagtgcagatagtaaggctggaaacgatacccagtattcttacgagggtacgattaccaagcagattaagcaacaagatggctttgaagcgaaaatccaagcgcagattgaagcagcagataaagattttgaccaaaaggtcgacaaaatcaaaaaagactttaacgatcaagtagaactggccaaagccagagctgaagaagtcaagagagaactgtctgacactatcaatcagcgctttaatagctttgacaacgggccattgaaagaagctaagcgcaaggctgaggaagctttgcgaaatgctggcgcaagtagttctcttgctcaggaatccaagcggattgggctggattctgttgctagacttgaagcgtttaagtcgcagactacgagcgcacaaacggctctgtcgggtgacttggatgttctaaaacgaactatcgcaaacgatattcgaccgaagcaagcacaggctgaagctgagattgccaagcaagttgaagcacttagccggactaaaaatgaactggatggcgcaagtaccctgcttgcacaggaagctaagcggattgagctggattctgttgctagacttgaagcgtttaagtcgcagactacgagcgcacaaacggctctgtcaggtgacttggatgttctaaaacgaactatcgcaaacgatattcgaccgaagcaagcacaggctgaagctgagattgccaagcaagttgaagcacttagccggactaaaaatgaactggctggcgtgaagtcagcgcaagcgacgtatgaggagacgacgactcgtagactgtcagaactgaccaacttggccaatggtaaagccagcaagtcagaactcacgcaaacagctgaggagctggctagtcggattgcgagtgtgcaggcaggtagttcacggaattacttcagaaattcacgttcaagaacgttcacaacaggaggtcaagcggtatacgactatcgaacattcatagttcctgatttctggaagaacagtgacaggttcaagcgtgattatgttcgcatatcttttgatgtgactttccctgtcgccctagtaaatgacatgcctgctatggtgcattttagtgctcatccatggtatgcctacagaaacttaatttttaaaggtggaactgtcgaacgccaacattttgagtttacgattgacttgtctagttcttctgagacctatcagactaataatgtgttcattcgttttggcactaattatggatttcctgctggtctgcaggtcgtcattgagaacgctatgttatcggttggtaattattttccagcctatcaaccagcgtacgaagaccaagacgaacgtgtctcagcggtcgaatccaactttaaacagcgtgctgattcacttgacgctggtgtaagccgtctgactgaaggccttagaaccaaagtggatatcagctcactcaatgtgactgctgaaaatatccggcaatctgtgaagagtcttgagacagacacgcagaacaaactaaatcagaagttgagtcaggctgaatttgaggtgcgagctggctctatccgtcaggaaatcctgaacgcaaccaaagataaagccagcaagtcagaactcacgcagacagctgaggagctagctagtaagatagcgagtgtgcacttagggcgcagaaatctgctgaaaggcacaaaagagcttgcgagatacaagccggttagtgaatataatggttttaaagttatcagaacagtcgcaggagcaactagatatcaggatagctatgtggaaagaaccgttataccaacggctgggacagagtatatagctatcttttatgcacgagccagtgaaaatgactatcctgtgcgctgtcatttttacaatcctaacacggttgtatcatcagaaaacagcagcggatataagtcaaggtcgtcagatggcttgtctattatccgtctctcgacagactggcagttgtgctgggttaaatggacccaaaccgcaacagatcaagccaagacggtcatcattggccgccatggccctcaagtaggcggtaaagagggggtatgggttgaaatctgcgcccctgccatttttgagggaaatcttgcaggtgactggtcaccagcatacgaagaccaagacgaacgtgtctcagtagtcgaatccaactttaagcagcgtgctgattcacttgacgctggtgtaagccgtctgactgaaggccttagaaccaaagccgatatcagctcactcaatgtgactgctgaaaatatccggcaatctgtgaagagtcttgagacagacacgcagaacaaactaaatcagaagttgagtcaggctgaatttgaggtgcgagctggctctatccgtcaggaaatcctgaacgcaaccaaggataaagcagataagactcttgtcgtgactgaagctgggaaattgcgagaagaattttcaaaaatgaaggtgggaggccggaatctatggataaaatccaagacggttggagctgtaattgaaaaattacctgaaaaccacgtcacaggtcaaaaagaatgctataggctagagaacaactctactttaacgttcaaccttgaaccagatttcagctcaaggttgtaccaaaaagttacttttagcgcttggatcaagtacgaaaatgtagtccaaggtcgaaatttttggaatgtatttaattgcttcaaacattatctttttagaaaaaatagtgagaccggagtacagagtggtccagattatgctacgcttggtatgtataaaggttcggcagattggaaatatattacattcacttatgactactctgaaaaaacaaattttgatcaattgaagacatcattgcgattcaatcttgaaggtgctacaagcggtacagcttgggtaacaggaatcaaggttgaaatcggtagtgtggcgacggactggaatcctgcgcctgaggacgctgatggtctcatcactgaggctaaggctacctttgagcggacagctcagggcttgcgaaccgacttatcagctattcaggaatatgtaaataaagacggtcagcgacaggaagccctacagcgctatactcgtgaggagagcgcgagacaagcgacagcagtccgtgagctggtcaatcgtgatttcgttggtaaggctacttatcaagaagatgttaagggtatcaatcagaggattgaagctgttaaaactagtgcgaataaagacatcgctagtcaaatcgctagctatcgtcaatctgtagatggtaagttcacggatatttcaagtcagataactacttataagcaagatgtgggcggtcaaatcagtggtctatcaaatagacttacaagcagtgagcaaggaaccactactcagatttcaaatctttcaaatcggataaacagtaataaacaaggcacagataatcagatttcaaatttaaagactcaggtcgctacaaacaaggataatgctgaacgacaaatgggtagaatatctgatcaggtttctgcaaacaaagcgaatgctgatagtcaatttgcgaatgtgaccaatcaactagcgcgaaaagtagagactactgacttccagcgtgttaaggaaaccagtaaactttacgagcggattttgggcaatactgaaaatggaattgcggataaggttgctcgcatggctctgactaatcaactgtttcaggttgaggttgggaaatatagtgtaagcggccctaacctcattaagaatagtgattttaaaaatgctacgaatgaatggggctcaactcaaaatttaggaagattggttaagcatagcttttatcacaacgggcagaaagaccttatgcgtttaagtaatgcaactaaaaacgaaaactttttgtatagtcaccgttttaatcttgaacgaaatactgactatgtactgaattttagaggatttaacaacagtgctctcgcaagctatgatgtttatattttgggacgaagagcaggcgagagcgatggattcacaatcgttaagaaagttgttagcagcaagaaactatctacctctagatgcgaagatgtctcagtaacttttaattccggagaaatggataatgcttacattcgttttgataacaatggctcatcatcaggaacagctgatttgtatattacagaagttgacttgtacaaaggttataaacctagaacatggcaaccacatccagaagatgcagtcgcagatgcgaataagaagcttgaagcaacgcaaacaaaaatgactcaactagctggctcatgggtagttgaaaacatcaactcggctggagatatcatctctggaatcaatcttggcgccaatggacataaccgcttagttgggaaattgacccacatcactggagagaccctgattgacagagcagtcatcaagtctgccatggttgataagctcaaaacggccaattttgaagctggttcggtcacgactacgatattagaagctgaagcggtaactgctgagaagttgaaagttgacaatgcgcttattaaaaaattaactgcaactgatgcttttattgaccaactgatatctaaacgtatcttctctactaaggttgagtccgtcatttctagctcaaccttcctagaagcctatcaaggccgaatcggtggattcacacttggtcaatttgaccagggtggcggtcgctggatttcaggtgtcaatcagttctctgttggtatggggaatggtgccgggtatggagtccggacagccttctgggcgaactggggaaataattggaactatgccggacctaaagcatggaacgtcaatactgatgggaaaatgtactgtaggaatgaagtcggtttttatgatcaagtggatttttcgaattcatcgagagcaaacttctatgggaatactactttttctcgttctcctgtgttttcaaatggtatcgaacttggaagtaaagatgtgcttggtgatggttggaatcccaaaggcggaaggaatgcggttgtttggtggaatcaggtcggtagcggtagcttgaagtattggatggaacaaaaatcagatagacgcttaaaagagaacatcacagatacagctgtgaaagccttggacaaaatcaacagattaagaatggttgcatttgatttcatcgaaaataagaaacatgaggagattggtctaatagctcaagaggctgaaaccatcgttccaaaaattgtctcacgagatcctgagaatccagatggctatctgcatatcgactataccgctttagttccttacttaatcaaggctattcaagaattaaatcaaaaaatagaaaaaatggagaaaacaatagcatga

SEQ ID NO: 2233 - DNA, 237 bp, Streptococcus pneumoniae
ttgatcaaaatttgttttttcagagtagtcataagtgaatgtaatatatttccaatctgccgaacctttatacataccaagcgtagcataatctggaccactctgtactccggtctcactattttttctaaaaagataatgtttgaagcaattaaatacattccaaaaatttcgaccttggactacattttcgtacttgatccaagcgctaaaagtaactttttggtacaaccttga

SEQ ID NO: 2234 - DNA, 351 bp, Streptococcus pneumoniae
atggcacaattgacaatcaatggggtggctgtgaagcctcccaaatcttttcaagtcggtattcaagatatcgatggagagacagggcgtaatgccaatggcgacatggtgcgtgaccgtatcacgaccaaacgcaaactagactgtgaatggggtatgatgactcagggagaaataagtcagcttttacatgctgtatcatctaaattttttgaggtatcttatccagaccccatggatggccaagtcacaaagactttctatgtcggtgataggacagctcctagctatacctttactgagaagcttaaaccttggtctggcgctaaatttaatctggtagagaggtaa

SEQ ID NO: 2235 - DNA, 3654 bp, Streptococcus pneumoniae
atggcaactcttgatgaattgaaagtcatgattgacgctgagatagcgcctttcaggaagaagatgaaagaagtcgagaatcaggtcaaaggaacatctgaccaagtgaaaaatgctactgccaaagttcgtgaacagtcgagctcaatcggtagtgcgtttggcaagctggctaagttcgctggttttgcaatccttggtaagaaattacttgatgttgggatgtattcaacgcagacggctcttgaagtatcagcgtctatgaaccaaatcaagcgacagatgggcgagagttcgcaatctttcttaaaatgggttaacgataatgccaacgctatgaatatgggtgtgggtgaggctaccaactacggtgcagtctactcaaacttattttctggatttatcaaagataccaacaagctaagcgcctataccgctaagatgttgcagacatcggcagttgttgctgaaggttcagggcgcacgattacagacgttatggagcggattcgctcaggtttactagggaacaccgaagcgattgaggacctaggaatcaacgtcaacgtggctatgattgagtccactgaagcctttaagaagttcgcaaacggacagagctggcaacagttggattaccaaacccagcaacaaatccgccttatggctattctggaacaggctacagccaagtatggggataccttgtctaattctgtaaatggtcgtatcagcctatttaagtcgctgatgaaggacgcagcattgaaccttggtaactctatgttaccgattatcaatgccattatgcctgtcttgaactcttttgctatggtcttaaagaacgttactgctaaactcgctgagtttatcgctttgatgttcaacaagaaagcaacagtgaaagatggtgttggtggagcagttggagacatgggtaacgccatgaaggatgctgcaggcggagcaggagaccttgctgacgcagtagacgacgctggagattcagcaggaggacttgctgacaatcttggagactccgccaaaaacgctaagaaggccgctaaagagttgctaggtcttttgggatttgatgagattaacatcttgcaaaaaccaaaagatgacgacgcaggcgggtctggaggcggtggcaaaggtggtaaaggaaagggaggcggtggcggacctttcaaagacatcttgccagaagtcgagttgaccgacatggacaacaaattcaagagcatttttgatggtcttggagataagctcaaagggttgtttgacctcttcaagaaaggttttgatgcagcatttagaccagaaggtatagaacgcattaagactgccttagaccaaatagctaagacaatgggagaaatcgccactgacccaagggttgtgaatgcctttaaccgaatggctgagaaaattgcttatgctttagggcaagtgacaggctcaataacaactatcgggctaggtatcggtgttttccttgccgaaagtattgcaaatggccttggaaggcaaaaagaacgcattaccagggcgctagtcgctttgtttgataatattggtaacatttccgaggcagtaggaaacatcgctcaggacttttctagtactttctacgacgtcattacctcaactggtgcggttcgtatcggtagcgctattgtgtcaactctgttgagtttgacatctaccattgttgaagttggtagtaaattagcaggaagtttgtttaaaggttttgaaaaagtcgttgtgacaagcgctcctaaaatttcatcagtcttccaaagtttattagatactgttgcgcctgtatttgagagcattgaaaggtctgttaacaaatttggcgatggcttaagtcgtgtttatgatgaacatgtagcccctgctattaactctattgctaatgcttttaacggactgattgatatcatacaaatcctctgggagaattcttggcaaccttttgctgagtttttatcaggagtattcggtgttagtattgaaggaatttcagatttattaggaggtggccttttagccactttgggactattggcggatgctattaagttagtggcagatggtttcaccgttttttctgactggtgtaaagaaaacaaagaacctatcttggctttgataacaacttggcaaacgattaatttcttatcatgggctgaacaagccgggggacttgcaggagcattcagcttgttaggtagtaaggtctctttgattgttggagggattaagaatctaggtcttgctattaaagcattgacatttgataagttggtcagttttggtgaaacaatctatttgaacaccttatatgcaaaagattttgtggtcaattcaggtaaaacaattgcacagctaggaaaaactgctttagaacttggtaaatcagctctagcatggactgctcatgcagcgaaaatgggattagcaaccgcggcggaatttgcacattctgttgcagcaggagtcgctacagctgcaacatgggcttttaatgcagcgttagcagttttgacaagtccaataacatggattattgcagcaatcgcagctttgattgctatcggtgtcttgctctaccaaaactgggacactgttgttgagtttgctaaaactgcatggcaaggactatgtgattttattagtggtatttgtcgagctattggcgaatttttcagtggtctatggacaaaactacaagaaatctttgagccgataggtcaatggtttggcgagaagttccagcaagcatgggatgccattgtcaacatcttctctggtatcggagagtggttctctggtgtattccaaggtgcatgggacgctatcgttaatatcttcactccaatcggctcatggtttggacaacgttgggcagatgtgactagtgctttggctaatatcggggcatggtttactgacatattccaaaaagcatggactggtctaacaaacatctttagcaaactaggtttatggtttggcgagagatgggcagatgttacaagtgttcttgcgaatgtatcttcttggtttgggaatatgtttactagtgcttataatgcagtcaagaacgcgtttagttcaattggtggcttcttcagcggtgtatggtcaacggttcaaagcatatttgtcaatgctggacaaaaggttggtagcgctgtaggtggagcgtttaagagtgcggtcaatgcggttcttggaacgattgaaaatgtagtcaatgacttcatcggaatgattaatggagttttaggcgttgtcagaaacttacctggtctaggatgggttggtagtgtaagcacagttagcctccctcgtcttgcccgtggtggtatcgtcgatagtccaacaatcgccatgattggtgaagctggtaaagaggcggtcgtaccacttgaaaatacaggatttatccaaacacttggacgagtagtcagcagtgcggtagtaaatgccatggctggtattagtccacaaggtggtttttctagcgacggcgacatcgttattcaaatcgcaggccatgagttcggacgggtagctatccaagaaatcaacaaggaacatgaacgagcaggtcaaaccttgctcaagatttag

SEQ ID NO: 2236 - DNA, 561 bp, Streptococcus pneumoniae
ttgaaaggtccgccaccgcctccctttcctttaccacctttgccaccgcctccagacccgcctgcgtcgtcatcttttggtttttgcaagatgttaatctcatcaaatcccaaaagacctagcaactctttagcggccttcttagcgtttttggcggagtctccaagattgtcagcaagtcctcctgctgaatctccagcgtcgtctactgcgtcagcaaggtctcctgctccgcctgcagcatccttcatggcgttacccatgtctccaactgctccaccaacaccatctttcactgttgctttcttgttgaacatcaaagcgataaactcagcgagtttagcagtaacgttctttaagaccatagcaaaagagttcaagacaggcataatggcattgataatcggtaacatagagttaccaaggttcaatgctgcgtccttcatcagcgacttaaataggctgatacgaccatttacagaattagacaaggtatccccatacttggctgtagcctgttccagaatagccataaggcggatttgttgctgggtttggtaa

SEQ ID NO: 2237 - DNA, 210 bp, Streptococcus pneumoniae
atgatatccaaccacgtgtctttattgttatccaaagatgccaaggcctttgagttctgggaatatgcgcctgagttgtttgtagaagaacaacaagcagtagaacaggaacgacagaaacaagcacttttgttgcataaggaacggatgcgtgaatttgcagagagacataatcgaaaaaggaaggaggaagtaaatggcaactcttga

SEQ ID NO: 2238 - DNA, 219 bp, Streptococcus pneumoniae
agtatcgggttttactccacgaggaagcaaggacaagaaaacttccaagaagaaaatgacagtagacaagtaatcttaacggtaactcagattattgagaggctttatcctatgtttttggacatcgagggcaagcctcttgatttttgggatttgacggtacttgaaatcagagaaatgattgaaagctataaccgtgtcaaaatccaagagcggtaa

SEQ ID NO: 2239 - DNA, 381 bp, Streptococcus pneumoniae
atggcgttaaaatacacaacttggaaagttactgacgaaaaagagttgaagctacgtttgacatctcatcaaactgcaactgtggaagaaaaaatcggcatgaacttgctgaagattttcatgcctgaagctggcgaagagttcactttaccgcctttgaaagttatgttgttgttagttcacggagccttgcagcagtatgaacatgggtattctcttgaggatgtctatgatttatacgatgaatacgtggacaatggcggagaccaaacaaccttcatgacagaggtgttgatgccactctttgaagtatcgggttttactccacgaggaagcaaggacaagaaaacttccaagaagaaaatgacagtagacaagtaa

SEQ ID NO: 2240 - DNA, 414 bp, Streptococcus pneumoniae
atgttagcaaatggaattacgctttcttatggcgaaacaaaagatagctatactaaacttgttggattgaaagaagtaccagagtttggtattgaactcgaaaaagtagaaaatactactcttgaagatacggtgaagaagtacgagtttggtattggggacataggagaacttgagtacaagttctcttataataattcaagcgcaactgctccttatcgtgtattgcgtaaggcagcagacgacaagaagaaactctactttgaacaagcttatccagacggtactaaggtcatttttgaaggccaagtatctgttaagcttggcggtggcggtgtcaatgccgttatcgatttcacacttaagattgccttgcagtctaatcttacatttactgatggtattggaggttaa

SEQ ID NO: 2241 - DNA, 369 bp, Streptococcus pneumoniae
atgattaatatcaagcctgttatttataaagaattgcaaaaggttgcagataatgtgaccgatacttatcctagcgattgggagactttcccagtcgttatttttttggaagaacaaaacaagccgggtgattggtttgatgaccaggaacaaaaatcctctatccgctacaaggtggatatctttgatgatactagcactagtgagttagctgttaaaatcaatcagatttttgagtctttaggtttgcgaagaactgactgccaagacgtgccagacccgtctcatttgagacataaggtcatgcgttttgaaggtatcgtcgacttacactcagagcttgtttttcaatttagaatggagaattaa

SEQ ID NO: 2242 - DNA, 516 bp, Streptococcus pneumoniae
gtgtcagggctactaggggcagataggcttatagctaaatgtagacgattggctagtaaaaaaactggcgaggatatcgtcttacgtgcggtgcacaatgctactataaaggttgtccaagcagatgcaagaagactcgcaccagcgagagatggagagcttataactagtatcaaaactagggcaaaaatggacggagataaggctataggcgaagtttacaccaaccttaaatacgctccttatgttgagtttggaacgggaccaataggacaagctagccattctggtatttctccagaggtcagcgtgacttacaagtctagtccgtggtatgtacatgaagaccaaatcaatgtaggaccgtaccactttcaaaaaatcggggagttctacaagatgtatggtcaacctgcccagccttatctttatccagctttgagagacaatcaagagcgtgtgtctaagaatatttcgaattatgtccgtagaaagataagagaacaaataaaatga

SEQ ID NO: 2243 - DNA, 183 bp, Streptococcus pneumoniae
ttgatactagttataagctctccatctctcgctggtgcgagtcttcttgcatctgcttggacaacctttatagtagcattgtgcaccgcacgtaagacgatatcctcgccagtttttttactagccaatcgtctacatttagctataagcctatctgcccctagtagccctgacacgctctaa

SEQ ID NO: 2244 - DNA, 339 bp, Streptococcus pneumoniae
atgtttttgaagcagagtagactgaaaccttatccaatgcgacggtttgaaaagactgtcactgaggaaggtgtcgcgaaagaagggtatgccaaggaagctgagacagtccgccttgaattgtggccagctagtagcaagctacaatctgaattgtatggcgagcgtgtcaatgatattttgaacgcaaatgccaacaagtcagctactatcaaagtaaaagatggtgtgtgtatcgatagtcagacggaagtgactcatagggttatttctaaaaaggtctacacacatcatcaagttttggagttagagcgtgtcagggctactaggggcagatag

SEQ ID NO: 2245 - DNA, 312 bp, Streptococcus pneumoniae
atgtctatagagttgctgaagaaattaacaggcgaagaagatactcagcttctcatgttgctccaaacgagggctacaaatcttatcttgtcagagactaatcgcacatctttgacacctgctttaagtcttttaatacctgaggttgctatcgaactccacaaccgctcaggagcggaaggagagcattctagaaccgagggtggtatagcagtagtctacggagaaaacggcctgtctacggatcttctacagcgaatacgcatgcacaggctagcaagggtggcaggtcatgtttttgaagcagagtag

SEQ ID NO: 2246 - DNA, 189 bp, Streptococcus pneumoniae
gtgaaatttaaaatcaaacaagatttctatgattgggaatcaaatgtgaaacgactggcaggagaggaacttgagattactgaggagcgctatgctgagctggctgacaatattgccagcaacggtgtcactatctcagacgttcttgagaaaatcctccctgaacctgagttcttagaagaggattga

SEQ ID NO: 2247 - DNA, 183 bp, Streptococcus pneumoniae
atgagtttattgctacgacgtcattatattcaagaagagcaggttaaccagtattctgatttagagaataaaactctagaagagttgaaggatctagcgaaagaagcaggtgtagcaggcgcttataagttgacaaaagccgaaattgtagaagttttggaggaactaaaaagtgaaatttaa

SEQ ID NO: 2248 - DNA, 846 bp, Streptococcus pneumoniae
atgacagcaggacaaactaaattagccactatggttaatccagaagtaatggcggatatggtagccgctaaattacctaaattgattaaatttacaccgctagcgtatgtagagacaaagcttgaaggtcaaccaggtagcactttaacagtgccagcatgggagtatgcaggagacgctactgaaattgaagaaggccaagcaattacgccagaccaattgactactaaaaagactactatgaccatcaaaaaagcaggtaaaggttatgaaattaccgatgagtctcttttgtcaggtcttggtgacccactaggtcaagcgacttaccagcttggtttagctattgccaacaagatcgataatgatttggtagcggtagctaaaactgcaacacaacatattacagaaactccaacaactcttgaggcaatcgataaagctctagatatctttgaggacgaagaagatgcacagtatgttgctatcatcaaccctaaagatgctactaagctaaaaactgcagtagcaaaagaatggattaaaggttcagagcttggagcaaatatggttgtttctggaaccttcggtgaagttgatggtgtgcaaatcgtgcgctctaaaaaagttgatgaaggtaaaggcttccttgttaaagtgtcaccaagtcaaactcagacagacgacgctaacaaatatggagcttttgttatcttgcttaaacgtgatgtggctatcgaaacagaccgcgatatcttgaagaagactaccgtaatcacaggtgatgaacactacggcgtttacctttacgaccctacacgagttgtaaaattcggtggcgcgtaa

SEQ ID NO: 2249 - DNA, 585 bp, Streptococcus pneumoniae
atgtcagaagaaatcaatgcaactgtatctactgaatcaactgagactgtcgacactcaaggaaatgttgattcagtgcaggaagaaaagcacgaacgaactttcactcgtgctgaaatcggtaagatgctatctgccgaacgctctaaatgggaagctgagcaagaagccaaggaaaacgaagctaagaaacttgccaagatgaacgctgacgagaaacaaaaatatcagttggatcagcgtgagcaagaactagctgaccgtgagaaggctattgctcgcaaggaattgaccgcagaagctaaagcaatgctaagtgaacgtgacttacctgttgagttagtaaatgtagttgatttgacaagcgcagagacggtatcgcagtctgtcgctgtattgcagaaatcatgggagcaagccgtgcaaaaaggcgttcaagaaaaactaaaaggcggagctccaatgaaacaagcgccagtcgatagtgacggtatcacaaaagaagaatttgctcgtatgggttatcagagtcgaaatgagctctatcaaaagaacccagagctttataagaaattgaaaggataa

SEQ ID NO: 2250 - DNA, 258 bp, Streptococcus pneumoniae
ttgcgatactatccttatagaagcctaaaagaaaggaacagaaaaatggaagaatggaaagaaagatttaaaaaagaatactacgaattgaaagaacgattccagaagttagatatgatgattgggaaatacgaaaaagggcaactagagtttgaatctaaatgtccgattgattcgttaaaaggtcagcgttcaaccatgtggaattatttaagaattctagaacaacgtgcaaaaattgaagaaattaaactataa

SEQ ID NO: 2251 - DNA, 228 bp, Streptococcus pneumoniae
atggcgatattagatgatttacaagcgttatatgataatggatgggacgcttcttttaattataatggtcaagtatgtggcattttccctaattctatttatgatgttgttgttattattgcggacgacgaatatagagcatcttcttttgacgatttgatttctttacagattgaagggaaaactttaccggaaatcatgaacgaagttgaagtacaatatggctaa

SEQ ID NO: 2252 - DNA, 1404 bp, Streptococcus pneumoniae
atgaagaatcaggagtattgggcgaagaggaaagccaatctgatttaccagcagatggacaaggccgaaaagcaggcagaccagttcgataaggtctatcaggaagctaagacttacttggataaggaaatcaataagattttcgataaattccaacgtgattatggtctaagtcaggtagaagctagacaagtcttgaagaacatgaaagacaagaaaaatctgaatgaacttcgtaaagtacttgaagcgagaccgaatgacccgaacatccaaagattactagctgacttagacagcccagcttattctttccgcatgaagcgcctagagcgtttgagcgacgatttagatcgtatgcgtgaatctatctatcattcggagaagacaggctcagatgccttttatagcgacctgatgaaggatagttactacaaggctacctttgacctacaacagcagacaggactagcatatggcttttctgggcttcctgagaacgagattaaacatctacagtcttttagttgggtaggagatggaagtacgtactcaacagacatctggaagaatacaggaaaacttacttccagcataaaagatgaactcctcattagcctcatgacaggcagagatacacgagaaactgcacaagcaattgctgagaggttcaatgtaggtcagaacgatgcaaggcgtttggttcgaacagaatccgccttttttcataaccagatggagctactcagctatgaagaagcagacatagaaaagtatatctttgtggccgtcttagacaagcgtacatcacgcatttgtcaggagcatgacaatcaggtctatgatagggataaggctgtccctggtgtcaattgtccgcctatgcacccttggtgtaggtctactactgtcggatacgatgaggacgcagactacagcaagttgaagcgcagagcaaggaatccagagacaggtaaagttgagtacgtgcctgccgatatgacttataaagagtggtatagcaagtatgtggatggtaatagagagtctataaaacgtaaagcgtttgataaaactattaaagatggtataatagtaagtgtatcagggactacaattggacacactccgcctggcaaaataggtttgcctaatagtgtagttcagcataatgctacaaacggagatgtccttggtagaacttactatgatgctagaggttttaaaacgaaagatgttcattttacaaaccataaacaaccggcacgtcatccttatggaaaaatcggagaacatgctcatgattttgtatttgatgatgaaggtaagttcgttagtaggagtactagggaattaacagacgatgaaagaaaggagaatcaagatatattatggcgatattag

SEQ ID NO: 2253 - DNA, 1470 bp, Streptococcus pneumoniae
atgtaccaatatttaacctatccacgggatggatatgatgagggttctttgaagaaagacctgatttacaaattgataacgatacataacactgaaagctcacgcttgaagaatttaaaaagctactacatgggtgatcatgctattttaaatcacaagagacgcaacgtgaacgcacccaattacaagacggtagctaatcatgccaaggatatcgcagacacggctacgggctattttatgggcaatcctatcaagtataacaatactgctgacggtgatattgatgaactacttacagcctttgatggtgctgagattgaccaagtggatgcgcagaacgcactaaatatggctatctacggccgtgcttacgagtacatctatgctaaagagggtatgactgagttggattcaactagtattgatccggagaatactttcatggtctacgatgatagtattgagcggaagcctttgtttgcggtctattactatgaagtaaaagacgatacgaaagacactaccaagcaccaggctgaggtctttaccgaaaatctgcactatcacatggtgctgagaagtacagattcaggaacaactcagagcgaggaggcaacacctcacaaccttggtcaaatcccaattatcgagtatcgcaataatcactttgcgattggcgactacgagcaacaaattagcttgatagacgcttataattccttgatggggaatcgtgtcaatgataaggaacaggctgtagagtctatccttgtcttgtatggcacgcagttagcagacactccagaagacgctaaggtagcaatgaagattctttctgaagaaggtcttttggaattgccgggcgatagtgcaagggctgagttcttgaagaatacgctggacgaaagtgctactgaaatcttgcgtacagctcttaaagaggacatctacacatttagccatgtgcctaatttgactgatgagaatttcgcagggaatacatcaggcgtagccatggaatttaagctgatgggccttgagatgattactaagaccaaggaagcgaactataagcgaggattgcgtcagcgtattgcgatttttgctcattacttaggcatgaagcagattgctttagagtctcattcaatcgttccacaattcagtcgtggtttgcctaagaacttattagaaatctctcagattgtgaacaatttggaaggcaaagtgaccaatagacagcttatttctctcttgccgtttgtggaagaccctgacgctgagctggaagccttggaagaagagaaaaagaagaacatggaagacatgccgatgttcaacaaagacaacacgaaacccgaagacgaggtagaggatgaagaatcaggagtattgggcgaagaggaaagccaatctgatttaccagcagatggacaaggccgaaaagcaggcagaccagttcgataa

SEQ ID NO: 2254 - DNA, 1299 bp, Streptococcus pneumoniae
atgagtcagacatatcagattaaacaaaacgatattgtcgttgacttacctaagacagtaggagctggatacggacagttctggcgctcaagaagtctttatcgtgtagtcaaagggtcccgtggttcgaagaagtccaagacaaccgctttgaattatgttatccgtcttttgaagtatccctgggccaacttgcttgttattcgtagatactcgaataccaacaagcaatcaacttatacggattttaaatgggcgtgtaatgtgttgggtgtgactcatttgtttaaatttaacgagtctttgcctgaaataaccataaaagcgactggtcaaaaaatcctattccgtggtttggatgatgaactcaaaattacatctattacagtcgatatcggtagtctgtgttgggcatggttcgaggaagcatatcaaattgagactgaagacaagttcagcacggttgttgagtctatccgtggtagcttagatgtacctgatttctttaaacaaatcacagtcacatttaacccgtggaatgagaggcattggctcaagcgtgtattcttcgatgaagagacgagacgggctgacacattcgctactacaaccacttataaatgcaatgagtggcttgatgaagtcgatatcaaacgctatgaggatttgtatcatacgaaccccagacgtgctagaatcgtttgtgatggcgaatggggagttgctgaaggtttaatctacgaaaacgtgactgtcaaggatttcaataaagatgaattactacaagattcagctaataaattatgtatcggtcttgactttggttttactcatgatccaactgctttgtgttgttcgttgataaatgacacgacgaaagagatttatgtctttgatgaggcgtataaagtcggattgataaccaaagaagttgcgaagatgataaaagacaaaggttatcatcgctcacaaatcattgctgatagcgcagagtcacggctgattgaagagctcaggtcagaacatggcatatctagaataaaagagagtcggaaaggtaaggatagtattatggcaggcgtatccaaattgcaaggatacgctatttatgtgcatccagattgtaaaaacatcatggatgaattttatagttactgctaccagcgagataaagaaggcaactggttgaataaaccagaggataaaaacaaccacttgatggacgctttgcgttacagccttcaatgtatcgaaggtggaaaagcaaccgtccgcagacgttctgattatggtctatag

SEQ ID NO: 2255 - DNA, 480 bp, Streptococcus pneumoniae
gtggctttttttgattattcgaagggtggtgatggaaaattgagtggattgagaataaaacaaaagagatttgcagatgagtacatcatctcaggtaatgcgacggaagcctataagaaagcaggttatcgtgtttctagtgatagagtggcaggcgttgaaggacataagttactaaagaatcctaagattaaaagctatatagatgaacgactgaaacagcttgattctgaaaagattgcggatcagcaagaggtcttaggttatctaacttcagtcatgcgaggagagacgcaagaacagaccttgataagcattggagaactagggcagacgattacggatatagatgtaggagctaaagatagaatcaaggcggctgaacttcttggtaaacggcataggctttggacggataaggtagaggcggatgtttctggaacggtggtgtttgcaaatgagtcagacatatcagattaa

SEQ ID NO: 2256 - DNA, 405 bp, Streptococcus pneumoniae
gtgaacaaggctaaagagctcttgaaagagttgcaggatctggacatggacatccaaagccgtatagacgaaattaacgagcttgaggcaggtttgctctcaagccctaaatggtccgaggttaaagtccaaggtggacagactagaaaagttgatgatgtctatactcagttggtagtgatgaaagaggctatagagcaggatactaaagaggtcattaacagaaaacttgaattaggtagaatgatcaataggcttaaaaatccaaagtacagggcagtattaagaatgacttacatcaacaaaggcaccgctgatagcgtttgttatgatttgaatatgagtcgtacaacctactacaggttaaaaaatgaggcggtcttagctttggaagaagttatctaa

SEQ ID NO: 2257 - DNA, 372 bp, Streptococcus pneumoniae
atgagaccttgtaaatatccatattcaggaagaagaaaaaaacaagaaacgccgtcgccaatattttctgcacgaccaatttttgacgaagttccaattgtagaagaagttaaggttgagttcggagttgaagctagtatggggcgcatatatccagaaacgttaatacatttagatatttctggatacggaaatagagtgcattcagtacatcgcttccccggtattttactgagtgttggtgagtcaatccaactaaagatgcttttctataaaagacttagaaattttactacagatcgtttcttgacgtttagagaatctgattggaagttctttatccgggacctggtcaacgaatttaagcattaa

SEQ ID NO: 2258 - DNA, 438 bp, Streptococcus pneumoniae
atgataccgaaatttagagtgtgggtaaaaataggaaaacgtatggttttttcagatgacattcttgctattgactacgaaaacaaagaaatagtgacacaacaagtttattttgagaatggtttaccagacgatagagatatctattgttatgattttgacgaaatcgaactcatgcaatcaacaggactcaaagacaagaacggcaaggaaatctttgaaggcgatattgtacgaactactagatttttgggtagagctgacgaaattggcggtttctatgagtatgacaaggaatttatagggattgttaagcagcttgagggttcttgggtaattgatacgggcagtgacgcagtatgtttatggactgaaattgaagaaaatgaaatcatcggcaacatctatgaaaataaggagtttggaggacgcaaatga

SEQ ID NO: 2259 - DNA, 459 bp, Streptococcus pneumoniae
atggatgatattttacaagctttagcaaaaatgctaaatatgactgttgatgaagtaagttctttgcttacaacatttaaagggaatgcaccacagatttatgaaatgttcgttaaagaaaagatgttttatgatctcttcagtctttttcaaatcatgtcaattgtaatatttagtatttctgcagtagttttagcagttttaactctcatatattttacatacgatggtggttttgtttattcctatgatatacgtacaggaaaaaccgaggaagaaattaaattagaacgcattgaacggaaaagaaaggacttaaaaataccactaaaaattagttgcatttcatcaagcgcaagtttgataacattagttattgcaattgttttaaaagcaactcttgcacctaattatatattcatcgtgaatgagattttaccaaaattaacgaagagatag

SEQ ID NO: 2260 - DNA, 261 bp, Streptococcus pneumoniae
ttgaaacgattcatagctatctggattctgctatctgctggattgaatatctggcagagtatctacattaaaaagttagaagaaaagcgccctattgtcgtctataaagctgataacgcaggcgctgagatattcggtaaagtcgtcgagaaaggacggcatggcaagctatacacgcttaccattcgtgactacggggtgttcgtggttacgaaggacgtgtatgagaaagtgaaagtaggggatgaggtgttactctaa

SEQ ID NO: 2261 - DNA, 696 bp, Streptococcus pneumoniae
atgaataagcaggaactgattaaacgtatcgaggatttgccttatacagaggggcctatcgcagatacaatcgaaattaatagaaattggatattgaaatcaattgaacagctagccgaatccgaaataggtcacgcagatgaagctccacgctacgtaaagaacatactagcacgattgcgagaattgccattgcatgatagagagttttggttaaaggctatcatgagcgaatttgaacaggattttagccatgcaaaatggcgagagggctacgagcaaggtaaaattgagggtatggttgaacgtgaaaaagtcatagttccgcagtgtgtggcggaatatatagaatttaaaaagaaaaacaattttcatgtttacggtgcaatgagagtaattgaagatcattatgataagaaagttcctgattggttttacgaaaataacatcgaaaaattctgtcttgcttggcttgacggctacgaggttgaaaaagagaagcggtattttgttaagattaaagggaatattaaagaaaatatgttggtttatggagaacttttgaaaaggtatttctttacaaaaagctttagtttagacgatgttatatattcccacacccgtaaagaactagaaaatgcaaaaatcggctgggtgtttgattgtgaagggtttgagattgaggaggtggagtga

SEQ ID NO: 2262 - DNA, 1350 bp, Streptococcus pneumoniae
gtgattgtgattggtaatgtagtaagtattgactcacaacctaagatgataacgactgccaagggagacatcaaggccaacagtccaagtaatgtgttgatgtctttcaaagctgatgatcagttgagtatttacctaaagcacaacgatttttcccaagagcatgaactccttaaagatatcaagatcggcaacactctttttaaaaaaggtgagctcccttctaactttgattcagtcgtaaaagtttactttgaaagtgtgttaggtgttgctttctctagccaggcgatgctggacggcatggaaacttttttctcagaacgttcttacaatccagtcattgagtatatggaaaaggctgctgaaaaatgggatggtcgtaaacgaattgaccgaatgcttcaggtttacctgggggctgaagatatccctttagtttctaaaatcgctcaaatgtggctagttggtgcagttgctaaagtttatgatccatacgttaagtttgactatgttctggatctagtcggtggacaaggagttgggaaaacatccctccttcaaaaattgggtggcgaatggtatacggatgccgtaacagatttctctaataaagataattacgacattatgttaaagagtctaatcgtcaacgacgacgaaatggtggccagtaatcggatgagctttgcagaaactaaggcctttatttctaaaactagcctacgttatcgtaaaccatacatgaaacgcacagaagagtttgccaaaaacttcattttagctagaactactaaccaaacagaatacctcaaggacaaaaccggtgaacgtcgttttctaccagttatggcagatagtaaacggcaaaaaaaacatccaatggaaatcgagccagagacaattgaacaaatctggggcgaagccgttacaatctatcgtgctggtgctgatttgatgtttgatgaaaatacagaggatgaactgaatatctaccgtgaacagttcatgtatcgtgatgaagttgaattacaagtgcttgaatatcttgatatgcccgtccctgaaaattggcaaaactggtctattcagcaacaacatcaatacacaagtaaatatttcgataatagtagcgactttgatcctggaagcaaaaaactagataaggtctcaactcgtgaaatgatgtacaacttatttatgagaaattcgaatgacaggaagctgtcaacgaagattaacatgatcatggataatcatcctgattggaaaaaaagtgttttccgggcaggaggtaaaagtacaaaagggttcgtaagagtgaaagattcggaaaaaactaatcggtag

SEQ ID NO: 2263 - DNA, 822 bp, Streptococcus pneumoniae
atgccgtcgatgaaagaatacgcattacagtaccaaaagttagggttctcagtcattccaatcaatcctaaaaacaagatgcctttaatcgaatttgctgataaaccagccatgactccatctgagattgaaaacttttgggacggctaccctaatgcaaacattgccctaaagactaccaacttctttgtcattgatattgacaaacacggcaaatcgaacggttttgaatcgctaaaaaaatggaaacatctaaatttaatcgaaccgacactgcaagctaagacggctagtggcggtaaacatctattctacttcaaacgagaagatgagccgatcactcagatgattggattcttgcctggtgttgatattaaggctcacgaaaataattatgtgttagtcgcaccctctgccacagataaagggcagtatgagtgggatctggaaaagtctaaggaaggtggcacgatggtcactccttcaaaatatttaatccagtctataaaaaaacagtatggcgaaactcacggttataagtatgatggtaaggacggtcttagggatttagttagacgttcacatactagagaccgaacacagactacagatctctttgaaaccatcgcccttggttttggtgatgaaggtggacgaaatgacaaactagcaaaattcgtaggtggtctcttatatcgtgcggtcgacgatggtgtagttgttcaacttgcaagattagcaaatgcaaatagtccaacccctttgcctgaaaaggaaatgatgcgtactattgaaagtatgattaaaaaagataggaggtga

SEQ ID NO: 2264 - DNA, 234 bp, Streptococcus pneumoniae
atggctggtttatcagcaaattcgattaaaggcatcttgtttttaggattgattggaatgactgagaaccctaacttttggtactgtaatgcgtattctttcatcgacggcatggttttttctcctctttgtaaatataaacaagttcctgggccgtatagtttgactgatattcatcttcagtcatttttaaataaaataacaacgattgataagcctcttcaaatgtattga

SEQ ID NO: 2265 - DNA, 198 bp, Streptococcus pneumoniae
cctccctttctaaaaaatagcaagttttgggtcattgatgaaactgatgaaagattaggaccattcaatacatttgaagaggcttatcaatcgttgttattttatttaaaaatgactgaagatgaatatcagtcaaactatacggcccaggaacttgtttatatttacaaagaggagaaaaaaccatgccgtcgatga

SEQ ID NO: 2266 - DNA, 507 bp, Streptococcus pneumoniae
atgagcttactagatatcgcaaaatcaatcaaaaaagagggctttgacccacgcaaagacagcgccaacggtcctgcaccaatcccagctggtacttatccagtagtcctgaagaaagcaaccttcaacgtatcggacaaaggctgggaaagccttggttatcaatttgaaatccgtggcggtgattacagtggacgctctgaatttgcaacatttggcacactgactgaatggaacggtaagaaccttgactgggcagttgaacgcactatgaaattctttatcaaagccttggtccttgctggcgacagtatgcaaggaaatgaagaagacggtaaagccttggaagaggctctacaacgtaaggcagttggctcttactacaaccttgttatctctgtgactaaggggaaagatggccgtgagttccgaaactatgaccttgaagaagaagaagcacaaccgctgactgaagctgatatcgatgaagatgacctccctttctaa

SEQ ID NO: 2267 - DNA, 828 bp, Streptococcus pneumoniae
atggcatttacacttccagcaaataaaccacaagttcctaaagataccccacgaaattttttcatctacggcgaaaccatgagcggaaagtcttatcttgcaaatgaattcccaaatccaatcgttttgaacacagacgggaatgcagaagctaacactgttccaagcattcagctgatcaatgaaaaagatgacaagggacgaattaccaattcagtaattaagcagcttggagatatcttgcttgctctccagacacagaagcactcttatgaaacagtcgttattgatgtaattgacgatgttattgaaatgattaagattgcagtttgtgatgaattaaccccagttggtaaacctcgcttgaaatccttgtcggaaattccatacggcaaaggatacgacttctttaaccaagctatcacagaattagtcattgacctcaaagcattgccaatgaatgttatttacatcagccgtcaggtatctgaatatgatgacaatggcaatgccaccaaagacaagccaagcttgaaagataagtatgtcaatcttatcaatggaaactctgatttgatgatccacactgaaaaactcggcaacaactacaaccgtgaggttgaccgcaagcgtaagacctattatgcggaccaggttgatgacaaggccatcttgaaaatcttggcaactatccgtggggctgttgagcctgcaaagggcaagctagcccctaaaaaagaagcagctaagacaactaaaccagctaagaccgaaaaaacaaaagaggcacctaagaaagaagttgactctgatgatgaactattttaa

SEQ ID NO: 2268 - DNA, 318 bp, Streptococcus pneumoniae
atgaataaaacaactgaaatgatcgtatttcgtagccgtaaaactggagaatttcttaattcttacaaggacagaagttctttagcatttgcagctgacttttgcagcttggaatattgtttgaagcttcctcgtaaaaaatacgaagacaacaaaaagacttacaaggctcttgctgcagcttttgactgtgaaattgtcgcagttgaagcggaatacaaattgacctatccgaatggatcagaagttgaacctatcaagcgtgaccgttcatcaattgaggacatgattaaggatattattggaggggttctctaa

SEQ ID NO: 2269 - DNA, 1194 bp, Streptococcus pneumoniae
gtgagtatcacaataacgctaagaaagtggcaagctgaagcgattaaaagaagtgaacatttatctaatggaatctttttagaggctcttgggggcagaggcaaaactatctgtgcacttgctattgcaaaacataaaaaagctaaaaaaatcatcatcacaaacaatcgactagctattctgaatggttggatagatgcagtcaagtttatgaattttgataaaggtgttgagattatcattcagacagatagatatcttcaaaatcaagtcaaaaaggggcataaattagattgtgatgtgctgatagtagacgaatggcagaatatgtcttctgacaaacaagtggccttatatcgcaaaataaagcgaaaatacacgataggtctttcagcgacaccaattcggaaaaaaggacaaaatttctatccgcttgaaaaaacggtatttggttgggcaaccccaaataataaatttgactggcaaaagactcatggaaaaatggtctatgatccatttagctattcaaaagagaagtgggaagattttcaaaattatgaaagttatatctcgagcttgcctaatttcttccgctgggaagagattgaaggaattgagaatgcagttgagaataacggttttgagattaagttttaccaaaagagagtcgcctctggcaatccagaaaaacttgcagaatttagaaaactaaatcttgtaacagtggacggcaaaactgcaatggccaagcaatcgtttggaagaaagacctttgaacgctaccttaatcaaacaggcgtagcagtcgattttccaaaattaaagccagtaaatgcggatacgccattgatgttacaacttgacggtttaatcgaacgagcaccacacgatatgttgattgtcagtaaatctaagcagattgtcaacgtcattagcgagcgccatcctgaaattggaatctggacgggcgatattcaagaaggactttataagaaattcgtggttgctactagtcaagtgttaggtgtcggagtagacggcttgcaacacaaataccaaactattgtcgtattggatccagtagaagaaggttctggagaatatgatgattatcgacaattgctctggcgcataacaggaagtcgtcagcagcatgatgtaaatgtaattgaattttattataaagaaagttaa

SEQ ID NO: 2270 - DNA, 489 bp, Streptococcus pneumoniae
ttgatgaaaattttagctattgatccaagtagtaataaaattgaaaccagcacaacaggagttgtcttgttggataatgcaagattagttgatagctgggttgtctcttatggtatgagaggtttcgctgattggtttcacgaaatcggaacaaatcttgaattcgatgtagttattgttgaagaatttaaggcgagggataacgacaagtcgaaagataatagcgtggcagaaaccatcgcctatatccaactttgctatccaggtgccattcttcaattcaatgcaggttacaagtcggatattccaaacgatcttttgaaaatcttagacctttggaaatttgaaaaaagtcatcatcaagatattcgagcagcagcaagacttggattattttgggcaatgagaaatgatattgaagaagtggttcatgatatcggaaaggtggtgagtgagtatcacaataacgctaagaaagtggcaagctga

SEQ ID NO: 2271 - DNA, 360 bp, Streptococcus pneumoniae
atggaattgatgaataaaacacgagtaacagattcactagcagttgtgattggaccagaatcgattgaagtacttgttactgaaggttttctatttgatgttgcgattcgttttgtaaaagtagacgaaacaaatcttgatcaaggaaatgaaaagccagtattcactccggaatacaagctggtcacagttgctaaatacaaggaaaaacctatctttgaatcggaggaagatattcgaaaatttgagaagcaagcaaaagaagttaaatcgctatttgcctttgcaaaggtaaataaacaaaattggtttaacactgccctttatccaggagtgctgactgagaaagttggtgtttga

SEQ ID NO: 2272 - DNA, 483 bp, Streptococcus pneumoniae
atggctagtttatacgaactaacaggtcagttcctgacaatttaccaattggatatcgatgacgaaacaaaagcagacacgcttgaggccatcgattggcaagaacaatttgaacagaaagcagaaggatatgcccatgttatcaagaatctagaagccgacgtggcaatgtacaaggctgaggaagagagcttcaaagccaagaaacaggtggcacagaaaaagctggattatgtcaaggataacattatggcagctatgaatgtcacggggcaaaccgaagttaagagtggtgccctgattataaaaattgctaagaatccagaatcagtcaaggtcaacgaagacgaccttccgaaaaaatattttacaaaaaaagtgacgcttgcgccggacaaaaaaacactcaaagagttgcttaaatctggcaagaaagtcaaaggtgcggagcttgtccggacagaaaagttggtgattaagtaa

SEQ ID NO: 2273 - DNA, 774 bp, Streptococcus pneumoniae
gtgaagtcaatgccccgatcgctttgctggaaggatgagtacacggagtacatgcatgaaatatgccctggtcgtttaactcctgaagtaaccaggttgctgaatgaaaaatttggtacgaattataacaagagtcaaatcggtggcgtacgcaaacgtctagggttagcagttggaaaagtctatcaaggtcgattgctgacaaaggagcaacatgattatcttgtattgatccaaaaaaataagatttctcgtaatgtcgcaaatgaaatgaaccaaaaatttggcttatcgctaactgagaaacagattaagagttatcggagaaataataatctacatagtggtttgacaggaagattcgagaaaggtcagactcctcacaataaggggaagaagtaccccaatatgccaaaaaacggcgggcagttcaaaaaaggtaatcgacctccgaattatgtacctgtcggtactatcaactacacaacaaacggttatccaaaagaaaagattggagaacctaatcaatgggttttgaaacaccgcaaggtttgggaggaccatcacgggctgataccaaaagggtactcaatcgtttttctggacggtgataaaacaaactatgatatttcaaatctggcatgtttatctaagaacgaaattgctagaatgaatcaaaatcatttattcacgtccaacgctgatttgactaaatcaggtattggactaacaaaacttacaaataaaatcagagaggtagaaaaaaatggctag

SEQ ID NO: 2274 - DNA, 231 bp, Streptococcus pneumoniae
atggtacgaaataaaataggtgatttaactaacacgctcttcgctcaattagagactctggatgatagggatcttacagcagatgaattaaaagtagaattacagcgctcgaaacaaatggtcgcaatctcaggtcaaatcttacaagcaggtcaattggcgctagatgctgaaaaattcaaagacaaggtaggtgaagtcaatgccccgatcgctttgctggaaggatga

SEQ ID NO: 2275 - DNA, 342 bp, Streptococcus pneumoniae
atgactcaagctgaacgaattagggaatattatagagagcaccctgctgcctcatatgatgaagtggctgaggtcgttggtacaacaaatagtaatgtgagagcgaacctggccaaagacatcaaggcaggcagatgcgttcgcttggaagataagtcatacgattactcgccttactataaccatacacaggcactcactgagttggttgactggaagaatgacaacagacgtgagtgggtggatatgctgacaagagcagcagagaaagaaacggatagcaacgttatgcgtttgttaatcaaagaagcaaataaattgatgaaagaggtgactaagtag

SEQ ID NO: 2276 - DNA, 189 bp, Streptococcus pneumoniae
atggaatatatttacctggtaacaatcgtaggaattggactatggtcgctagtaaataaactagatgaccacgctgaaatgaaacaaaaagagcgccagctgatggcaaacaatgtcgcacggatgaatctgagaaattcagataagcaatttacttatgatgtagaaccgcctgaagggttgaaataa

SEQ ID NO: 2277 - DNA, 261 bp, Streptococcus pneumoniae
ttggaaaaaagaaatggaaacaagcaagaaaatgaggtcagcaggatgaacctactatcaagaatcaaaaactatttttcggaagaggtcaaagaaactaatctcgactggaaagaggtcgctttagacctcaatcaatcactaattgaaacacaggaaaaacttcaagaagcgaatcaagaaatcgcagacttgaagaaaatcgtagcaatctataaagaaaaggagaaagaaaaacgatggaatatatttacctggtaa

SEQ ID NO: 2278 - DNA, 273 bp, Streptococcus pneumoniae
atggaagcagttgaaattgtaagaattaaagatgtgattattgaaaaagtctctgctaatgatgaagagttaaaacgtatctttggatgttcaaaacgacaagcaggagagcgaagaagagaaatgcaaaaactccctagtcagcaaaaacatcttttggatagtggacaacttgtaacgattaaaggtttctatgaatacttgcaatatcgtggaactaaagcttggaaaaaagaaatggaaacaagcaagaaaatgaggtcagcaggatga

SEQ ID NO: 2279 - DNA, 240 bp, Streptococcus pneumoniae
atgactgaaattcacgcatgtctttgcggaaattgggtgaacctatcagccgacgacgattgtgtaatgggaccaaatatggctagtccttacatttggtgggaagaaaatgcagaactctactcaccaatttctaaacctgaagcaaactcgatgtaccatcaggattatatctacattcactatcgtggcgctgactatcgtatccatccaatgttcattcaaatcgtttctagataa

SEQ ID NO: 2280 - DNA, 192 bp, Streptococcus pneumoniae
atgaaatcctttaaagattttcgagaatctttaacagctgaagatatgcaagctatctctgctaaagctaatgaagctactaaacagattgaccatacagacggattgcaactggggaaggtcagtggtttgacttctgtaataactactattgagttacttgagaagtatcatgaatggcttcatagctaa

SEQ ID NO: 2281 - DNA, 204 bp, Streptococcus pneumoniae
atgagaccaagacgatatccgtatagtgggaaaaaagagtccacctttgtaaaggcagaccctgagttagttgaaaaacttttaagaaacactagttttcttgagcgtttacaaaaaaagcctatcaattttcagatagactcagaagaatttaagcgtcttagctatgaagccattcatgatacttctcaagtaactcaatag

SEQ ID NO: 2282 - DNA, 201 bp, Streptococcus pneumoniae
atggaaagcgttcttgaaagcttgaaacaagaaaaagaccacctcgaaaaaatcattaaggtagttacctctggtggtaaatttctgagattgccgtatcaaaaaaagtcacgctcgattagtgagaatctgaaattgatttctcaaaatcttgataaattgagcgagcaagttcaacaaaccacgaatcagcattcatga

SEQ ID NO: 2283 - DNA, 216 bp, Streptococcus pneumoniae
gtgcagtggactttagaagctatgagaatcaacaaaggacttactcaagcagagttggcagaaaaatttgaagtttcaagtcaaacaattgctagattagaaaaagatagctctgatatcggttatcagctattgaaaaaatacatgttttttttcaatgtgaaattcgatgatatttttttagggaaaaaatacgaaaatttcgtaaataactag

SEQ ID NO: 2284 - DNA, 204 bp, Streptococcus pneumoniae; identical to SEQ ID NO: 2281

SEQ ID NO: 2285 - DNA, 690 bp, Streptococcus pneumoniae
atgatatttcgagtgaaagtaaattcttctgtttctaggcctgtaaccgttgaagacatttgcccaaattgtaaaaaaccaaccaatccagatcttgtgaactcttcttatttttctcttggagaaaataaaacaagcttagtattaacatgtagatgcttaggttgtaagcacttttggacagaggagtttatagctacaagatttttaatcaatgactataccgaaaaatacgaaattgaacatatcaaagtaatccctaatcttccgagcgatatacctatatctgacgatgtagagatagtttctccaattggtaagcaaatctatgtccaagcactgaaagctgaacacgaacaactagaccacattgcaggtattggataccgtaaggcgcttgagttctttgttaaagatttctccattgttacaaatcctgatgatgaagataaaatcattaaaatgtcattaaaacaagttattgaaaaatatatcaaggatgaagaccttaaaacatttgcgcttgcatctgcttatatcggtaacgacgaaggtcattactatagaaataatcctgataaaggttttacagacctaaagaactacctacacggagttattcactacatggaaatgaaactcaatttccttgatgctcaagagcttgtgaatcgttcaaagaaatcttag

SEQ ID NO: 2286 - DNA, 792 bp, Streptococcus pneumoniae
atggacgaaaaaaaacgaatgcaaattattgctgaaaatattacacactttagaaagcaacgtggcatcacccaaaaagagttggctaaagaagttggaattacagcaagtactatgacagactatatgaagttaagaagcgctccttcttttggtgttatccaaaaactggctgattatttcggtgttaaaaaatcagatatagatactacttttaaagaagaatccaccaactcactgccagacgctccagattcgctcacacagcagataatggataaggtagtgcaattaaccccacccaatcaaaaaatcgtgctacggacctctgaggagcttctggagagccaaaacgaagaagaaacgaagataaacgaagtatcggaagttatcagcttgtaccaagttgaggttgtatctgagacggcagcagcttctggatttaactatggatttgggtacgacgatacagacagagagactatagaggttgacgagcgaccaccacgccacgatattgcgaccaaggtcagtggagactccatgcaacccgactaccaagacggagacattctctatttagtagacaaaggactgactacctacaacggagatttagcaattatcgcatatggagaccgttcttacttcaagaagatatataccgaaaacggacgcttacgcctagtgtcactcaatgacaagtacgaagacatcatcctagacttcccaccagccgaagacacacacatcaagatttatgcagtagtcggggtgtatagaggggaataa

SEQ ID NO: 2287 - DNA, 951 bp, Streptococcus pneumoniae
ttgaagccatttaaaacaatcgaggaacaaatcgcaacactaaaaatcagagggttatccattacagatgaatctaaagcagctaagtacctgctaagtaacaattactacaatattatcaatggatacagtaagttttttcaacaccctggtactgacacttatattgacggcgtcacatttgacgaagtttcaagtctctatacatttgacaaagatgtaaaacgagccattttgcaagctattcttgaagctgaacaccatatcaagtcaatcactgctcacagattcgccgaagcttaccccagtcaaaaatacgcttatttaaacaccaattcttatgcagataataaaatattagacgtgggatttattgtatcaaaactatccaaaatcataaacacaaacaagcgatacagaggaaattcaattcaccactacgcacatactcattcagatgtcccaatctgggtactaactgattatctagagtttggagatttacgcacgattattgaaaacctgcctaattcactccaaaatgaaatcgcacgggatttagtaagttttataagcacaaacatacctgactttaacgatgttttcccaccagaaaccttgatatcttttctaaaaaatattaacgaggtacgaaacaaatgcgctcacaataatcgcttattaaacttcagatgccgttctaatagtacgttttgggaaacgattcataacaaagagatcttgatgggagatgacagtagaaaaactgtatattcaacaattattagccttcaatgctttattagtaaagcagcattcaacattttgtggaatactcttagaaaaaaagttatcaaactagagaaaaagctgccttctatagacatcaatgtaatcaaccagtctttaggttttcctaatgattggcaccgtaatgaaccaaaagtataa

SEQ ID NO: 2288 - DNA, 174 bp, Streptococcus pneumoniae
ttgtttcgtacctcgttaatattttttagaaaagatatcaaggtttctggtgggaaaacatcgttaaagtcaggtatgtttgtgcttataaaacttactaaatcccgtgcgatttcattttggagtgaattaggcaggttttcaataatcgtgcgtaaatctccaaactctaga

SEQ ID NO: 2289 - DNA, 1128 bp, Streptococcus pneumoniae
atgtggatggaagaattgccaaatggcaaatttaaatattttgagcgatataaagatccatatactgagaaattaaaaaaagtttcagtaaccatggagaagaaaactccccaggcaagaaatcaagctgctatcttgttacaagagaagataaataaaaaactcagcacaaaacaagtagaaagcattacatttgaagaaatctataaccttttctataaatcatgggcgcaaacagtaaaggaatcaacaaaacataattgtaaatcagttgataagaagatgaaggaagtcataccatccgataccatacttgctaatcttgacaggcgttttcttcaagaggctattgaaaaaattattgaaagcaacggatatattacagctaaaaaagtacggcataggctcagaggtatctttaattacgctgttcaatactcttacattgaaaacaacgaggtcgattatactacgattcctcaaaaaccaaagactttagaagaactggaaaaaaagcgtaacaactttctcaccatgcaagaaataaaagcacttgtcgatgtccttaatcgtcgagaatatcaccaaaagtacgctgatatggttcttgtgctgacattaactggtatgagatatggtgagttaactgccttacaactgaagaatatagacttcgaaaacaacaaaattgagatcacaggtaattttgattcagtaaacaaaatcaagacgctaccaaagactacaaattcaatacggacaatcaaagtatcagagagtgtcatagaagctattcaaagacaaatagtacgacttagcgaacgtttccagccattgtcaagcgatgattatattttctgttttgaaaaatggaatcaacctacaacaatagcttgcttcatacagatattaaaaaaatatggaaaacaggccaaaatagaaaaaaacttatctagccatatttttaggcattctcatatttcgtttttagcagagtctggcctcccaataaaatcaataatggatcgagttgggcactcaaatgcaaaaatgactttggaaatctattctcatactactgaggatatggaggataaactggtcaataaattagatactattttttaa

SEQ ID NO: 2290 - DNA, 186 bp, Streptococcus pneumoniae
cacaattttaataattttactgcttataagcacgatattttgtgtcagcccagtatttataaaattggacatcttaggaactccctctcatgccatcttaacctttgtattggcgataccgttattctatattttgtctcaatgcttacatactttgctattactagtttcctcaatcttttgtaa

SEQ ID NO: 2291 - DNA, 1059 bp, Streptococcus pneumoniae
atgaaagatgatcagaaatatttattagcgggactttattcgcttctagttgcaatattttattttccattgattgagtccaaggggatttttgtaagtatattgatggcggttttacttttatatttaatatacttcattgcaacagtcattcatattgtgataattaagtttataagaaaaaaatcttttaagtatttggttctatatccatttacttacgatgggagctggagatttcaacctataaacttactctactttccagaaatggtgagagatgtcattccgattaatttagttcaagaatattgccaaggacaaccttacggactgttaaaaaagatgctgaaaagaattcgattgtcacgagagatatctttactcctggctaccattatcgtctatttttttacgcatagaattctacctctttcagtatttacgttcatattttcttacatattgctatttgtacaatcttatttgggtagcaataccgcttggattggaaatagaagattaataatagatgatgaatttgaaaaaatcttgctttcaaaaagttatataaaagaaatatcatctgcacgatactcagaatacttgacatgtgaatacaaaaaccttacaccaatcatattgatagctatttttgaaaatttgcttgactcctacttgcttcagaatcagagtgaggttgacttagatattttttataaagttttacctttgctttataaagaaaaatatactatgggattcaattactttgtaagtttaaattatttactatataaggttggatttttgggaatcatttacgataatgaagcattaagagatttgtcaaaacaatatttaaacaaaaatatttcggaattacaagatggttctttcgagggcggtatacaagatgctgttgcctctaaacaaatagtagttataaatgaatttatagcttgtttaaattccagatgcgtgccatcccaatatgatagatttttttataaagatagaccttatattttttccagaaagagtcctattaaggggtga

SEQ ID NO: 2292 - DNA, 192 bp, Streptococcus pneumoniae
agtatattaaatataaaagtaaaaccgccatcaatatacttacaaaaatccccttggactcaatcaatggaaaataaaatattgcaactagaagcgaataaagtcccgctaataaatatttctgatcatctttcattcaaaacaccatattatttactaagaatacatcaatacaatagagcaactctgtaa

SEQ ID NO: 2293 - DNA, 213 bp, Streptococcus pneumoniae
atgatgattgttttaatttcagttattgttgcattcctgtatcataaaattacagagtatgtcaacaacaggaaaattgatattgttatttttctatcattgctgatttctcattttatttggaattactattttttaccaattgaaatattgatagcaatcagtggagcaaatttactattaagttttttaaaaaaattacagactaaataa

SEQ ID NO: 2294 - DNA, 243 bp, Streptococcus pneumoniae
ctctatttccaaaatttaatttttgggggacttagtaatgaaattacaattaacaacacacctaaaataaataaaaatatctcccaaactttattctcagttttaataaagctaccatatctatctcatttcttatttttaaataattcatactctttttctctgataaagggaactgaaaaattagaaaaaattatcagaattgaaaacagatatacgtctttttgtatcactaaaacataa

SEQ ID NO: 2295 - DNA, 447 bp, Streptococcus pneumoniae
atgatgtatcttgatggggggggttatttaagcaagagtgcttgtcaaggaatttgcgcagctttagctatgagtccaggaacttttatagcattgactggagctgcagttttaacaaaaaaactaataaactatattaaggttggaggccttggaggttggcttattggtgcagcagcaggtgtattggctcttatctttttgataaaaatttgtgtagatactacgataaaggttctattaaacagaatctttaaggcaagtaaggtaatgaaaaggaggatattttctctttttgtactagatttgatggtctatatatttttaggttatgttttagtgatacaaaaagacgtatatctgttttcaattctgataattttttctaatttttcagttccctttatcagagaaaaagagtatgaattatttaaaaataagaaatga

SEQ ID NO: 2296 - DNA, 180 bp, Streptococcus pneumoniae
accatcaaatctagtacaaaaagagaaaatatcctccttttcattaccttacttgccttaaagattctgtttaatagaacctttatcgtagtatctacacaaatttttatcaaaaagataagagccaatacacctgctgctgcaccaataagccaacctccaaggcctccaaccttaata

SEQ ID NO: 2297 - DNA, 351 bp, Streptococcus pneumoniae
ttgagtatttctatgttaaaaaaatatccttgtacgatgcaacatgaccagtcagattgtgctgcggcagttgtttcaacagttcttttatcttacaaaaaggaactatcaatcatgaagattcgggaaattattggtacagacatgtatggaacgactgtcagtggtattgtttcaggtctgaataagttgaattttacagtaaaagctgttcgagtagcactggaagatttgactccaaaattaacatttcctgcgattcttcaagttaagaatgatttaggtcaaaatcattttgtggtattacatagtataaaggagaaaataaagggaactcgtattaccaaataa

SEQ ID NO: 2298 - DNA, 864 bp, Streptococcus pneumoniae
atgcgttatgatttcggaaaggtctataaagaaatacgtgagtcaaaggggctgacccaagaagaggtctgtgggggtgttctctcaagaaccagcttatcaaaaatcgaaagtggcaagacaaccccaaaatatgaaaatatggaatttcttctccgtcaaatcaatatgagttttgaagagtttgaatatatctgtcaactttatcaaccaagtcaacgcacagagattatgcaaacctatctcaatatgcgttccattatcgggaccagcgatcttgtcaatttatttcaaaaatgccaagactacctcaagacccaccacgatctccctatagaagaaatcagagatatgcttgaagttgttatttatctccgtcaacacggggcaggggaactatcaaaacacgcagaacaggttgtcaaaaaactttggaaaaaaattgaaaaacaagatacatggtatgagagtgatctaaaaatcctcaataccattcttttcagttttcccattgaatacctccatctcatcactggaaaaatattgcaacgcctagaagtctataaaaactatcaacatttatatgacttgcgaatgacaattctattaaacctttccacactctatctatacaatcaagataaaaacatgtgtaagcaaatctgctacactttactagaggacgccaagaataagaaaagctacgataggctggctatctgctatgtccgtattgggatttgtacagacgattctaaacttatccaaaaagggttctcccttctggagctaaccgaggaaacttctatgctgtctcatctcaaaaaagaagtagagatctattaccaagcgaaggaaagataa

SEQ ID NO: 2299 - DNA, 375 bp, Streptococcus pneumoniae
gtgtttactactatgtgtccatgtcaccatgaatcgccgaacgatttaacgagaaagtatgacttttacgtttatcccaactcaattatgacatttttttcaaaagtcaatatatctcactttttcaacgacaagaaagaggctaccaatcgaccaacctcttattctgaacccatcactccatcactttttagcttcattcgctttcttagcgactgcaatctggtattcgacttggtcattccccttaccggtacaaccatgagcaattgtagtcgctcctatctgatgcgctatttcaaccaattttttagaaatcagagggcggctcaaggcagataccaagggatacttttgttcataataggcatgtga

SEQ ID NO: 2300 - DNA, 228 bp, Streptococcus pneumoniae
atggttatatttttgcttaaaatgaaacatttttttgcaggaattggtgaaataaactttgtaagttatttattgtatatatgtgtaggaatagcccctttttttcacgtatatataataggttctgaaatgaattttgtgaaaatagtgttatctattttgggaattatatttgtttgtattttaactattgctcgaatttataggacttttttctataaagaatag

SEQ ID NO: 2301 - DNA, 381 bp, Streptococcus pneumoniae
atggaacttgtattaccaaataattatgttgtgattgatgaagaagagatgatgtaccttgatgggggtggtgttggttgtaactggtggaatagtagaggtagttttgcaacagttctggatgtaggtttggccatctatagtggtggtgcaacaatttattctgcttatgcgataaaaaaagctatctcagctaatagaggggctattacgagaacattacgtagtttaataattaaacatgtaggtagtgcagctggccatttagtcaatactgcactaaacgttgcactaactgttactggattttcactaggtggagcaatcgcatatggggctgattgggctgacggtagcttagatggttatatttttgcttaa

SEQ ID NO: 2302 - DNA, 225 bp, Streptococcus pneumoniae
tctttccatggggctggtcgatataatgtaagggagcttgagttgttagtggaggataaaatgttaagagtaatagtagttattcaatctttagtaataatactgcttgctgttgctttattattatctcggaaaaactttgattcgttaaatgttgttcttataatgatgatcgtatcacaattgttgttattagtatatttgataaaatcagggaatcagtga

SEQ ID NO: 2303 - DNA, 210 bp, Streptococcus pneumoniae
ctactattactcttaacattttatcctccactaacaactcaagctcccttacattatatcgaccagccccatggaaagattatagctagactaatcaatgatataatacatactagaatacaaaatatttttttattcatactttttctcctatctttattttctacctacatagtacctcttattaagctcatttcaaaattacgttaa

SEQ ID NO: 2304 - DNA, 204 bp, Streptococcus pneumoniae
gctcatttcaaaattacgttaacttttttcacgaaaaggagaaaattatgcgttatgattatggatagcgctttcaaatttttaaactctatcccatccttttatctatattatgagcgaaaatataataactgtcaagtaactaaagtgaattttataaaaaaattacaagccaaatttgtaaagtttacactaagccgctag

SEQ ID NO: 2305 - DNA, 864 bp, Streptococcus pneumoniae; identical to SEQ ID NO: 2298

SEQ ID NO: 2306 - DNA, 519 bp, Streptococcus pneumoniae; identical to SEQ ID NO: 295

SEQ ID NO: 2307 - DNA, 366 bp, Streptococcus pneumoniae
gtgaaacagtctgggagactgtttcagcctgagcctagaaatttgaaagcgaagctgtttagccaagtcatagtaagggctaaacatatccatagtaatgattttgacgcgacatcggacggctctatcatatttaagaaagtgatctcggatgacagcttgtgttctaccttcaagaacagtgatgatatcgagcttttcaaaatcttgcgcaataaagctcatctccatctcccgattgaaacagtcactccccggactgtttcaacgtcccaagacataatcttaggcagatttctaaaattacactcaaagtggaagtcattgagctttcgaatgacagttgaagttgagatggaaagctga

SEQ ID NO: 2308 - DNA, 288 bp, Streptococcus pneumoniae
atgagctttattgcgcaagattttgaaaagctcgatatcatcactgttcttgaaggtagaacacaagctgtcatccgagatcactttcttaaatatgatagagccgtccgatgtcgcgtcaaaatcattactatggatatgtttagcccttactatgacttggctaaacagcttcgctttcaaatttctaggctcaggctgaaacagtctcccagactgtttcactcccgaatgctaaaatcgttcttgatcgctttcacattgtgcaacatcttagccgtgctatga

SEQ ID NO: 2309 - DNA, 768 bp, Streptococcus pneumoniae; identical to SEQ ID NO: 2039

SEQ ID NO: 2310 - DNA, 471 bp, Streptococcus pneumoniae
ttgaggatgcctttaaagcgtccattgaaaaatagaaagaaggaaaagaacatgagtaaagaaaaagtaattttggcctattctggcggtttagacacatcagttgctattacctggctgaagaaagactatgatgttgttgcagtttgtatggatgtgggtgaagggaaagacttagatttcatccatgataaggctcttaaggttggggcagtcgaatcttatgtcattgatgttaaggacgaatttgctacagattatgtgctagtggctcatcagtcacatgcctattatgaacaaaagtatcccttggtatctgccttgagccgccctctgatttctaaaaaattggttgaaatagcgcatcagataggagcgactacaattgctcatggttgtaccggtaaggggaatgaccaagtcgaataccagattgcagtcgctaagaaagcgaatgaagctaaaaagtga

SEQ ID NO: 2311 - DNA, 798 bp, Streptococcus pneumoniae
atgaagaaggtgttgatgacgatgtttggtttagtgatgctccccctactatttgcttgtagtaacaatcaatcggctggaattgaagccatcaagtccaaaggaaaattggttgtagccctcaatccagattttgctccatttgaatatcaaaaagtggttgatgggaaaaatcagattgtgggttcagatatcgaattagccaaggctatcgcaacagaactaggtgtcgaattggaactatctcctatgagttttgacaatgtactggctagcgttcaatcaggaaaagctgaccttgccatatcaggtgtttctaagacagatgaacggagcaaggtgtttgatttttcaactccctactatactgcaaaaaataaactcattgtcaaaaaatctgatttagccacttatcagtctgtcaacgatttggcgcagaaaaaggtcggagcgcagaaaggttcgattcaagagacgatggcgaaagatttgctacaaaattcttccctcgtatctctgcctaaaaatgggaatttaatcacagatttaaaatcagggcaagtggatgccgttatttttgaagaacccgttgccaagggatttgtggaaaataatcctgatttagcaatcgcagacctcaattttgaaaaagagcaagatgattcctatgcggtagccatgaaaaaagatagcaaggaattgaaagaggcagtcgataaaaccattcaaaagttgaaggagtctggggaattagacaaactcattgaggatgcctttaaagcgtccattgaaaaatag

SEQ ID NO: 2312 - DNA, 642 bp, Streptococcus pneumoniae
atgattgagttgaaaaatattaccaaaaccattgggggaaaagtgattttggataacttatctctcaggattgatcagggggatttggtagctattgttggtaagagtggtagtgggaagtcgaccttgttaaatttattgggtttgatagatggtgattatagcggacggtatgagatttttggtcagacaaatctagcggttaattctgctaagtcgcaaacaataatccgtgaacatatctcttatctgtttcaaaattttgccctgattgatgatgaaacggtcgagtacaatctcatgctggcgctgaaatatgtgaaattgcctaagaaagacaagctcaaaaaggtggaagagattttagagagagtaggtttgtcagctactttgcatcaaagggtctccgagttgtctgggggcgaacaacaacgaattgcagttgctagagccatcttaaaacccagccagctgattttagccgatgaacctacaggttcgctggatcctgaaaatagagatttggtcttgaagtttctcttagagatgaatcgagaagggaaaacagtcattattgtgacccacgatgcttatgtagcccaacaatgtcatcgtgtcattgaattgggcgagggaaaatga

SEQ ID NO: 2313 - DNA, 177 bp, Streptococcus pneumoniae
atgactgttttcccttctcgattcatctctaagagaaacttcaagaccaaatctctattttcaggatccagcgaacctgtaggttcatcggctaaaatcagctggctgggttttaagatggctctagcaactgcaattcgttgttgttcgcccccagacaactcggagaccctttga

SEQ ID NO: 2314 - DNA, 1317 bp, Streptococcus pneumoniae
ttgattataaacccaaaagatttgtttcctatactgtggttgtctcattttttgctgttgcagctttatctctttatcagttggttgacttacctcttaatccaaaaaatgacaatcagctctctgctgaaaggtttttcatctttcaaatttggtcttatcttcaattatgtgatgaaaatagggacaactattttactgacggccttactgattggggtgggcagaagtttagaacaagaaaacaaagaacttgcttatcagcaacagtgggtaagtcaaggtaattacctgaccttagaaaccttcaaactcaatgataatctgtggcaagaagagctagcagggtcagggaaatctacagattatttctatcgattttatcaggatttggtagaaaaaacgcaggcgggctatgtgcagagtagcagtcttcctgtaaaaaattttgtccaatcagaacagattcagcaatatcagttaacagatacggtggatgtttactatgccaatcgcaattttctaaagagcaagggattcaagctaccagataccggtattaaaaaagttattttgatgccagcaagtacgaaaggtgaagaagataaaaatcagctcttggggaagttaattgcctttcattcgatgaagtatgaagagcagcaaaaacgaacgatagaggagatggatgtcgagattgcctattatgaaggagattggtcatttttcccatatagtgataagcgaaaggaaaatctctccaatccaattattagcttggtcaatgattctgatatgatgtgggatgagaaagcctccctgtcaacaactggcttaaataatccgattaaaattgaaaatacggttcaacatcaaaaagagattacagagttagttgagaaattgtcagatggaaattatttaaaattttcatctattcaagccattcaacaagagaaagtggattcttatcgagatgctgttcggaattttaacctactctttgctttgtttggtctccttagcatgatgatttcctacttcttactagtaacaactttcttattgaagcgcagggatatcattaccaagaagtttatggggtggaaactggtcgatcgctaccgtcctctcctcgttctgctcttgctgggctatagtttccctcttctagtcttgattttctttgcccatgcgttcttaccacttctactgtttgcaggttttacatgtctggatatactatttgtgctaggcttagcttctaggatggagaaaagaagtctagtagagttattgaaagggggcatcttatga

SEQ ID NO: 2315 - DNA, 1113 bp, Streptococcus pneumoniae
ttggagagggaaaactgtagtggaggcacttttatgaaaaaaatcagtaatttctgtatgttactcctgcttctgtgtaccactttttttgtttttaatgtaaactatacacgagaagtggttcggattcaagaaatgggaaagactgtagattctttggatttgtatttgaaagatattaacgaacctgcagcgtctgttcttcgattttttgaggatgtatcaaaggagtataaagtctccatcatcaaaacagacagtggtgatgaggtggtcaagtctggtgtttttgataaagataccttcccctaccaagagtttgggatttcttctcttgattttaccacagatggtgaaggagtctatagtaataaagaaatttccaataaacttggtacgattccgacctttctaaaagccaaacctattcagcttatgacttttcaaacctatatcaaggatacatctcgtagtttaaatggtcgctatacgataacttctacacaagagatggacaaggataggattgtacagaaatggagcgattttttcaagatagaccaggctaccttgctagagccgacctacaaaagtgcagtggaagtcataaatcgagatttgcttttatctgccattgtttttgtcttggctattttgcttcttgtgttagtgacagtgtatcaaccgatgatggagatgaaaagagttggggtacaaaaattacttggttttcaagatagggctgttttagctgatgttgtaaaaggcaacctttacctcctcctaggtggggctcttgtgatcaatctaggcgtgtttttcttgcttgattataaacccaaaagatttgtttcctatactgtggttgtctcattttttgctgttgcagctttatctctttatcagttggttgacttacctcttaatccaaaaaatgacaatcagctctctgctgaaaggtttttcatctttcaaatttggtcttatcttcaattatgtgatgaaaatagggacaactattttactgacggccttactgattggggtgggcagaagtttagaacaagaaaacaaagaacttgcttatcagcaacagtgggtaagtcaaggtaa

SEQ ID NO: 2316 - DNA, 216 bp, Streptococcus pneumoniae
ttgaatattctgattacttacattctactcgatatcatacagcaactgttagacatgggggtagaacctctaaggattatgcaaaacctgaggcatgggctagagcttccctcaccaagattccgccaacaggaatggaatatttctatggatttgagtaaaattcttccctctcctatttggagagggaaaactgtagtggaggcacttttatga

SEQ ID NO: 2317 - DNA, 252 bp, Streptococcus pneumoniae
atggaatgtggtatacttgaaaacacaaatgctttaacagtatgggttgagggtggtcaatggaactatggagtaggttggacaggaacttttgaatattctgattacttacattctactcgatatcatacagcaactgttagacatgggggtagaacctctaaggattatgcaaaacctgaggcatgggctagagcttccctcaccaagattccgccaacaggaatggaatatttctatggatttgagtaa

SEQ ID NO: 2318 - DNA, 864 bp, Streptococcus pneumoniae; identical to SEQ ID NO: 2298

SEQ ID NO: 2319 - DNA, 588 bp, Streptococcus pneumoniae
atgaaatcaataactaaaaagattaaagcaactcttgcaggagttgctgccttgtttgcagtatttgctccatcatttgtatctgctcaagaatcatcaacttacactgttaaagaaggtgatacactttcagaaatcgctgaaactcacaacacaacagttgaaaaattggcagaaaacaaccacattgataacattcatttgatttatgttgatcaagagttggttatcgatggccctgtagcgcctgttgcaacaccagcgccagctacttatgcggcaccagccgctcaagatgaaactgtttcagctccagtggcagaaactccagtagtaagtgaaacagttgtttcaactgtaagcggatctgaagcagaagccaaagaatggatcgctcaaaaagaatcaggtggtagctatacagctacaaatggacgttatatcggacgttaccaattaacagattcatacctgaacggtgactactcagctgaaaaccaagaacgtgtagcagatgcctacgttgcaggacgttacggttcatggacagctgctaaaaacttctggcttaacaatggctggtattaa

SEQ ID NO: 2320 - DNA, 291 bp, Streptococcus pneumoniae
gcagatacaaatgatggagcaaatactgcaaacaaggcagcaactcctgcaagagttgctttaatctttttagttattgatttcatattcgaaaattctccttctttctatagttctatcataccctttaaatattaccgtttcttgacacttttatgtagaaatattacaaaattattttttatttccctaaataaggtgttttttgtcataaaagatactatttttatgctatttgaggtattagaaaggttttcatccacaattaaagccaagcccctcattctttga

SEQ ID NO: 2321 - DNA, 672 bp, Streptococcus pneumoniae
atgaaatcacttcgttttcaatctgtctttgatatcatcggaccagttatgattggcccatctagtagccataccgctggtgctgttcgtattgggaagattgtctcttccatttttgatgatactccgacagaagttgaattccaactttttaactcatttgccaagacctatcgtggtcacggaacagacctagcccttgttgcaggtattttaggaatggatacagatgatcctgaaattccaaatagtctggaaattgcccacaagcgtggtatcaagattgtctggaccattcagaaagacagcaatgcccctcaccctaacaccactaaaattactgttaaaaatgcccacaagaccatcagcgtgactggtatttctatcggtggaggaaatattcaggtaaccgaactcaatggttttgccgtctctctcaatatgaatacaccgactatcatcatcgttcatcaagatattccaggtatgattgcccttgttacagaggcgctttcccgctatggtatcaatatcgcccagatgaatgtcactcgtgaaaaagctggtgaaaaagccattatgattatcgaagttgacagtcgcaactgtgatgaggctatcgaagaaattcgaaaaatccctcatctccacaatgtcaatttctttaaatag

SEQ ID NO: 2322 - DNA, 873 bp, Streptococcus pneumoniae
atgttttattctatcaaagaattggtcgagcaagcagatctggactttcaaggaaatgtcgcagaactcatgattacaacagagtttgaattgaccggtcgcgaacgtgaagaagtcttccttctcatggaacgcaatctggaagttatgaaagcctctgtccaacttggcctcaatgaaaataaatctcgtagtggcctgacaggtggagatgctgccaaattggatcactacatcaaaaacgaaaaaactttatcagattacacgattctctctgctgcccgaaatgctatcgcagtcaatgaacacaatgccaaaatgggcttggtctgtgccactccaaccgctggaagtgctggctgtctcccttccgttctcactgctgctattgaaaaattagacctcagccacgagcaacaattggatttcctctttgctgctggtgcctttggactagtcatcgcaaacaatgcctccatctcaggtgctgagggtgggtgtcaagctgaagttggttcagcctctgctatgagtgctgccgccttgactctggctgcaggtggaacaccttatcaggccagtcaagctattgcctttgtcattaaaaatatgctaggcctcatctgtgaccctgttgcaggtttggtcgaagttccctgtgtcaaacgtaatgccatgggagctagctttgctttcatcgcagcagacatggccttggcaggtatcgaatctaaaatccctgtggatgaagtgatcgatgccatgtaccaagtaggagcaagcatgccaactgcctttcgtgaaacagctgaaggtggactcgctaccacccctactggtcgtcgcctccaaaaagaaattttcggagaataa

SEQ ID NO: 2323 - DNA, 534 bp, Streptococcus pneumoniae
ttgagcttcatagatgccttttgccttatagtaagaacgatatatctgcacggcttcagaaatttggtctttggacaggcaggtcgcaaaactactttcgagaggtggtcccataaaaccacgaatagttttggcatcagggctaggcacccccagctctttaaaggtataggtaaaggcattgtgaatcccgatagaactatcaacgagggttccatccaaatcgaaaaaaatcgctgtgatagaggtcatggtttctcctatttgataagcttattctccgaaaatttctttttggaggcgacgaccagtaggggtggtagcgagtccaccttcagctgtttcacgaaaggcagttggcatgcttgctcctacttggtacatggcatcgatcacttcatccacagggattttagattcgatacctgccaaggccatgtctgctgcgatgaaagcaaagctagctcccatggcattacgtttgacacagggaacttcgaccaaacctgcaacagggtcacagatgaggcctag

SEQ ID NO: 2324 - DNA, 633 bp, Streptococcus pneumoniae
atgacctctatcacagcgatttttttcgatttggatggaaccctcgttgatagttctatcgggattcacaatgcctttacctatacctttaaagagctgggggtgcctagccctgatgccaaaactattcgtggttttatgggaccacctctcgaaagtagttttgcgacctgcctgtccaaagaccaaatttctgaagccgtgcagatatatcgttcttactataaggcaaaaggcatctatgaagctcaactctttcctcagattatagacttgcttgaggagttatcgagcagttatccactctacatcaccacgacaaaggatacatctactgctcaagacatggcaaaaaacttggaaatccatcatttctttgatggcatttatggttctagccctgaagcaccccataaggcagatgtcattcaccaagccttgcagacacatcaactagcaccagaacaagccatcatcatcggagataccaagtttgatatgctgggagctcgagaaacaggtattcagaaattggccatcacttggggatttggagagcaagcagatctactaaactatcaacctgattatatcgctcacaaacccttagaggttttggcgtattttcaatag

SEQ ID NO: 2325 - DNA, 216 bp, Streptococcus pneumoniae
caaactaggaaactagctgcgggctgctctaaacactgttttaaggttgtagatggaactgacgaagtcagctcaaaacactgttttgaggttgtggatagaactgacgaagtcagtaaccatacctacggcaaggcgacgttgacgtggtttgaagagattttcgaagagtataagtctctacataataaaacgcatattaccaaggttgtgtaa

SEQ ID NO: 2326 - DNA, 1851 bp, Streptococcus pneumoniae
atgaataaaaaactaacagattatgtgattgatctggtggaaattttaaataaacaacaaaagcaggttttctggggaatatttgatattttcagtatggtggtttccatcattgtatcttatattttattttatgggctgattaatccagcacctgttgactacattatctatacgagtttggccttcttgttctatcaattgatgattggtttttgggggttgaacgcgagcattagtcgttacagcaagattacggatttcatgaaaatcttttttggtgtgactgctagcagtgtcttgtcatatagtatctgttatgccttcttgccactcttctccatccgtttcatcattctctttatcttgttgagtaccttcttgattttattgccacggattacttggcagttaatctactccagacgcaaaaaaggtagtggtgatggagaacaccgtcggaccttcttgattggtgccggtgatggtggggctctctttatggatagttaccaacatccaaccagtgaattagaactggtcggtattttggataaggattctaagaaaaagggtcaaaaacttggtggtattcctgttttgggctcttatgacaatctgcctgaattagccaaacgccatcaaatcgagcgtgtcatcgttgcgattccgtcgctggatccgtcagaatatgagcgtatcttgcagatgtgtaataagctgggtgtcaaatgttacaagatgcctaaggttgaaactgttgttcagggccttcaccaagcaggtactggcttccaaaaaattgatattacggaccttttgggtcgtcaggaaatccgtcttgacgaatcgcgtctgggtgcagaactgacaggtaagaccatcttagtcacaggagctggaggttcaatcggttctgaaatctgtcgtcaagttagtcgcttcaatcctgaacgcattgtcttgctcggtcatggggaaaactcaatctaccttgtttatcatgaattgattcgtaagttccaagggattgattatgtacctgtgattgcggacattcaagactatgatcgtttgttgcaagtctttgagcagtacaaacctgctattgtttatcatgcggcagcccacaagcatgttcctatgatggagcgcaatccaaaagaagccttcaaaaacaatatccgtggaacttacaatgttgctagagccgttgatgaagctaaagtgtctaagatggttatgatttcgacagataaggcagtcaatccaccaaatgttatgggagcaaccaagcgcgtggcggagttgattgtcactggctttaaccaacgtagccaatcaacctactgtgcagttcgttttgggaatgttcttggtagccgtggtagtgtcattccagtctttgaacgtcagattgctgaaggtgggcctgtaacggtgacagacttccgcatgacccgttactttatgaccattccagaagctagtcgtctggttatccatgctggtgcttatgccaaagatggggaagtctttatccttgatatgggcaaaccagtcaagatttatgacttggccaagaagatggtgcttctaagtggccacactgaaagtgaaattccaatcgttgaagttggaatccgcccaggtgaaaaactctacgaagaactcttggtatcaaccgaactcgttgataatcaagttatggataagattttcgttggtaaggttaatgtcatgcctttagaatccatcaatcaaaagattggagagttccgcactctcagtggagatgagttgaagcaagctattatcgcctttgctaatcaaacaacccacattgaataa

SEQ ID NO: 2327 - DNA, 252 bp, Streptococcus pneumoniae
caccatcttcttggccaagtcataaatcttgactggtttgcccatatcaaggataaagacttccccatctttggcataagcaccagcatggataaccagacgactagcttctggaatggtcataaagtaacgggtcatgcggaagtctgtcaccgttacaggcccaccttcagcaatctgacgttcaaagactggaatgacactaccacggctaccaagaacattcccaaaacgaactgcacagtaggttga

SEQ ID NO: 2328 - DNA, 1176 bp, Streptococcus pneumoniae
ggctttttcactataatgtcaagtaaggtttctggctttcaagataaaaatgggaaagtcttgaaaattatgatagaatggtggaaggaaaaattcaggagagtagtagtgactcaaaatgttgaaagtcttctcgtatccattgtaatcagtgcatgcaatgaagaaaaatatctgcctggtctaattgaagacttaaaaaatcaaacctatcctaaagagaatattgaaattctatttataaatgctatgtccacagatgggaccacagctatcattcagcaatttataaaggaagatacagagtttaactcaattagattgtataacaatcctaagaaaaatcaagctagtggttttaacctgggagttaaacattctgtaggggaccttattttaaaaattgatgctcattcaaaagttactgagagttttgtaatgaacaatgtggctattattcaacaaggtgaatttgtctgtggggggcctagaccgacgattgtcgaaggaaaaggaaaatgggcagagaccttgcatcttgttgaggaaaatatgtttggaagtagtattgccaattatcgaaatagttccgaggatagatatgtttcttctatttttcatgggatgtataaacgagaggttttccagaaggttggtttagtaaatgagcaacttggccgaactgaagataatgatattcattatagaattcgagaacatggttataaaatccgctatagcccaagtattctatcttatcagtatattcgaccaacattcaagaaaatgctgcatcaaaagtattcaaatggtttgtggattggcttgacaagtcatgttcagtttaagtgtttatcattatttcactatgttccttgtttatttgttttgagtcttgtgtttagtctagcattgttaccgatcacattcgtattcataactttactattaggtgcctattttctacttttgtcattactcactttgctgactttattaaaacataaaaatggatttctaattgtgatgccctttcttttattttccattcactttgcttatggccttgggacgattgtaggtttaattagaggatttaaatggaagaaggagtacaagagaacaataatttatttggataaaataagccaaataaatcaaaatatgctacaataa

SEQ ID NO: 2329 - DNA, 306 bp, Streptococcus pneumoniae
ttgggggtttctttcgaactcccttttctggtttaccccttttttttgggaaatatttcgcaagttctggaggtaaaagttagttcgcttggtggttttgaccagcttgcctctccttatgtttaccctcttttcaccattttctacccaactggctcagaaaatcggcttggagcatctcttcacttacagcctcttcttcttgaccatcggctcacttattcgactaatcaatctgcccctgctctatctaggaaccttgatggttggggcaagtgtcgcagtcatcaatgtcctgcttcctag

SEQ ID NO: 2330 - DNA, 747 bp, Streptococcus pneumoniae
ttggtggttttgaccagcttgcctctccttatgtttaccctcttttcaccattttctacccaactggctcagaaaatcggcttggagcatctcttcacttacagcctcttcttcttgaccatcggctcacttattcgactaatcaatctgcccctgctctatctaggaaccttgatggttggggcaagtgtcgcagtcatcaatgtcctgcttcctagtcttatccaagccaatcaaccaaagaaaattggttttctgaccaccttatatgtaacgtctatggggattgcaacggctctggcttcctatctagctgtgcccattacacaagccagttcttggaaaggacttatccttctcctcacgttactctgtctagcaacttttttggtctggctcccaaatcaccgctataatcatagactagctccacaaaccaaacaaaaaagtcaaataaaggtcatgcgtaataaacaggtgtgggcaactattatcttagcaggttttcaatcgttgatgttttacaccgtcatgacgtggttacctcccatgtctatccatgcaggtttatccagtgtcgaagttggctcgatgacttcaattttatctaatgataagcattccttttacaatgaccatcccaagcctggcaaccagtttatcgactcgcaaccgtcagctcatgctcactctggtttcactagctggtgtggtcggcatttgcatgctctttttcccaatcaataa

SEQ ID NO: 2331 - DNA, 429 bp, Streptococcus pneumoniae
atgataagcattccttttacaatgaccatcccaagcctggcaaccagtttatcgactcgcaaccgtcagctcatgctcactctggtttcactagctggtgtggtcggcatttgcatgctctttttcccaatcaataatttcatttactggcttgccatccatctcctcatgggaaccgcaaccagtgccctcttcccttatctcatggtcaacttttcactcaagacaagcgcccctgaaaagacagcccaattgtccggcctatctcaaacaggaggctatatcctagcagcctttgggccaaccctctttggttacagttttgacctgttccactcttgggtaccagctgtagctgccctcttgctcatcgatatcctgatgactgtggccctctttacagtggacagagcggataagatcctttaa

SEQ ID NO: 2332 - DNA, 327 bp, Streptococcus pneumoniae
atgtactttccaacatcctctgccttgattgaatttctcatcttggctgtactggagcagggtgattcttatggttatgagattagccaaaccattaagctgatcgctaatatcaaagaatccacactctatcccattctcaaaaaattggaaggcaatagctttctgacaacctattctagagagttccaaggtcgcatgcgcaaatactactccttgacaaacggtggtatagagcagctcttgaccctaaaagatgaatggacactctatacagacaccatcaatggcatcatagaagggagtatccgccatgacaagaactga

SEQ ID NO: 2333 - DNA, 594 bp, Streptococcus pneumoniae
atgacaagaactgaatacctgactcagctagaactctatctcaagaaactacctgaagctgaccgtatcgaagccatggactatttcagagagctctttgacgatgctggagtcgaaggagaagaagaactcatcgctagtttgggaactcccaaagaagtggcccacgaagttctatccaatcttctcgataaaaaaatcaatgaagcacccgctcaaaaaaataaccgacaaattttacatatcgccttgttagccctccttgcagcacctatcggcattcctctgggaatcgccatcctcgtgaccctgttcgcaatccttgtagccgctttgactgtcattctggctttctttgcagtttccatactgggtatcatcggcggattcctatttttagttgaaagtttcactgtcctcgcccaagccaaatcagcctttatcttgatttttggttctggtttactggctatcggtgcttcttcgctagttttactaggcatttcctatgtagctcgcttcttcggtctactcattgttcgtctggtacaatttgttcttaaaaaaggaaagagaggtaatcagcatgcgtaa

SEQ ID NO: 2334 - DNA, 912 bp, Streptococcus pneumoniae
atgcgtaaatggacaaaaggatttctcatctttggtgtggtgactaccgttatcggctttatcctgctttttgtaggtatccaatctgacgggattaagagcctactttccatgtccaaagaacctgtctatgatagccgtacggaaaagctaacctttggcaaggaagtcgaaaacctagaaattactctccaccaacacgcgctcaccatcacagactctttcgatgatcaaatccacatttcttaccatccatctctttctgctcaccatgatcttatcaccaatcaaaacgatagaactctgagtctcactgataagaaactgtctgaaactccgtttctctcttctggaattggtgggattcttcatatcgcaagtagctactctagtcgttttgaagaagttattctccagctaccaaaagggagaactctaaaagggatcaacatctcagccaatcgcggacaaaccaccatcataaatgctagccttgaaaatgcgaccctcaatacaaacagctatatcctccgaattgaaggaagtcgtatcaaaaacagtaaactcacaacacccaatatcgttaatatctttgatacagttcttacagatagtcagctagagtcaacagagaatcacttccacgctgaaaatatccaagtccatggtaaggttgaactgactgccaaagattatctcagaatcatcctagaccagaaagaaagccaacgaattaactgggacatctcaagcaactatggttctatcttccaattcacaagagaaaagcctgaatcaagaggtacggaattaagcaacccttacaaaactgaaaaaaccgatgtcaaggatcaactcattgcgagatctgatgataatattgatctaatatccacaccaagcagacgttga

SEQ ID NO: 2335 - DNA, 369 bp, Streptococcus pneumoniae
ttgctgaggaagagcttcttggctctcttcagctatagtgactttttctgtttctttagaaaggtctggctcttcttcagtagaattagatgccttcttttcttctatttctgttctcgcttcaccgacttcaggagtttcaattttctcttcttgctggctttccaattcgacttcagcttgagagacttcctcctctacttgagtattttttccaattggtgtatcgagatcggctatcgtttcttcagccttgtctgcaacctcttgagcttgctcttcaggcttgttcttgcttgttgtttttacaaaatcattactttcaaaccattcttgtttcatggtagaacctcctttttagttagataa

SEQ ID NO: 2336 - DNA, 1065 bp, Streptococcus pneumoniae
atgaaacaagaatggtttgaaagtaatgattttgtaaaaacaacaagcaagaacaagcctgaagagcaagctcaagaggttgcagacaaggctgaagaaacgatagccgatctcgatacaccaattggaaaaaatactcaagtagaggaggaagtctctcaagctgaagtcgaattggaaagccagcaagaagagaaaattgaaactcctgaagtcggtgaagcgagaacagaaatagaagaaaagaaggcatctaattctactgaagaagagccagacctttctaaagaaacagaaaaagtcactatagctgaagagagccaagaagctcttcctcagcaaaaagcaaccacgaaagagccacttcttatcagtaaatctttagaaagtccttatatccccgaccaagctccaaaatctagggataaatggaaagagcaagtgcttgatttttggtcttggctagtggaagcgatcaaatctcctacaagtaagttggaaacaagtatcacacacagttacacagcctttctcttgctcattctgttttctgcatcttcctttttctttagtatctatcacatcaaacatgcttactatggacatatagcaagcattaacagtcgcttccctgagcagctagctcctttaactcttttttctatcatctctatcctagtagcgacaacactcttcttcttttcattcctcttgggtagtttcgttgtgagacgatttatccaccaggaaaagtactggacgctagacaaggttctccaacaatatagtcaactcttggcaattccaatcttcctcactgctattgctagtttctttgctttctttgatagcctacgatttacagccctcttgtgtgtgattagcattggaatcattctgcttgccagtctccatatcattacaagaccaagtcaagcaagtgaaaccgactccttctatcaattattcttgtctgtccttgtgaacggagttattatcctcctcttctttgtagctgaagtggcactgattggagattatcttcgtatcttggcctttctttaa

SEQ ID NO: 2337 - DNA, 954 bp, Streptococcus pneumoniae
ttgaagagattttcgaagagtataaagtttgtttttgtatctttcagaaaaataaggtatactgtatgtaaacgatttcaaaggagtccagttatggcgaaaacattttttattccaaataaacagagcattttaggagaacaagagattttgaatgccaagtcgatcttggccttgctagacggtttggagtcacatagctatgatgtagtctatctccgtcagcctcttaatcgtctcgaatatatcgagtgtgcgatagtggggcaatcacaatttctctttaaggtcagttatgctgatggtcaaaaggcttaccgtgtcgatcttcctgacctactaacaaagacagactggcagattatcaagtcatttttagatgctttgcttgcttatacagggactgatattgaagggctagatggttttgattttgaagcttatttccaagcaagtattcaagcctatctagcagacgctgtagctcgttttacgatttgccaaggaatttttaatcctattttctttagtcgtgagaacttgaaaagctttttagaggcagatggcttggctcagtttgaagcgcgtgtgcgtgcggttcaagagacagatgcctattttgcaagagtttccttctatcaggatggagaaggaaaagtgcatggcgtttaccatttagctcaaggagtcaagacagttttaccgagagaaccgtttgttcctgcagcctatattgagcaattggtggataaggaagtccagtgggagattgacttggttcaaatcacaggagacggctctaaaccagaagactatgaatccatagctcgcttggactatgcaaaattcttagaggtattacccccatctttttaccaccagctagacgccaatcaaatagaaatacaacccatcctaggacaagattttaaaacattagcacaagaaaagtaa

SEQ ID NO: 2338 - DNA, 987 bp, Streptococcus pneumoniae
atggcaaaagatattcgtgtcttactttactacctttatactccaattgaaaatgcagagcaatttgctgcagaccacttggctttctgtaaatcaatcggccttaaaggccgtatcctagtcgctgacgagggaattaacggaacagtttcaggtgactatgaaacaactcaaaaatacatggactacgttcacagccttccaggaatggaagatctctggttcaagattgacgaagaaagtgaacaagccttcaagaagatgtttgttcgctacaagaaagaaattgtccaccttggtttggaagacaacgactttgacaatgacatcaacccacttgaaacaacaggtgcttacttgtctccaaaagagttcaaagaagcgcttcttgataaagataccgttgtccttgacacacgtaacgattatgagtacgacctaggacatttccgtggggctattcgcccagatattcgcaacttccgtgagttaccacaatgggtccgtgacaacaaagaaaaattcatggacaagcgtgtcgtggtttactgtacaggtggtgttcgctgtgagaaattctcaggctggatggttcgtgaaggttacaaagatgttggccaattgcacggaggaatcgcaacttacggtaaagacccagaagttcaaggtgagctttgggatggaaaaatgtacgtatttgacgagcgtatcgccgttgatgtcaaccatgtcaacccaaccatcgtagggaaagactggtttgatggaacaccatgtgaacgttatgtcaactgtggaaatcccttctgtaaccgtcgtatcttgacatcagaagaaaatgaagacaagtaccttcgtggatgctcacacgagtgccgtgttcacccacgtaaccgctatgtttcaaaaaatgaattgacacaagctgaagtgattgagcgcctagccgctatcggtgaaagcttggatcaagcagctactgtataa

SEQ ID NO: 2339 - DNA, 207 bp, Streptococcus pneumoniae
atgttttctcttgtccttattttaaccattcaggaaatttcgagaaccctctacaatttccagtcaaataaattgcattcgttttctcaagcaggtatactagtatggataaataaaaaatttagaaaatttaagaatagaaaagagaacaaatcttatggcaaaagatattcgtgtcttactttactacctttatactccaattga

SEQ ID NO: 2340 - DNA, 1545 bp, Streptococcus pneumoniae
ttgattttcattgagtataagatcattacattgtttataagtttaaaaataaaaaaaggagtttttatcatgaaaaactggaaaaaatatgcttttgcatctgctagtgtagtcgctctggctgcaggtcttgctgcttgtggaaatttgacaggtaacagcaaaaaagctgctgattcaggtgacaaacctgttatcaaaatgtaccaaatcggtgacaaaccagacaacttggatgaattgttagcaaatgccaacaaaatcattgaagaaaaagttggtgccaaattggatatccaataccttggctggggtgactatggtaagaaaatgtcagttatcacatcatctggtgaaaactatgatattgcctttgcagataactatattgtaaatgctcaaaaaggtgcttacgctgacttgacagaattgtacaaaaaagaaggtaaagacctttacaaagcacttgacccagcttacatcaagggtaatactgtaaatggtaagatttacgctgttccagttgcagccaacgttgcatcatctcaaaactttgccttcaacggaactctccttgctaaatatggtatcgatatttcaggtgttacttcttacgaaactcttgagccagtcttgaaacaaattaaagaaaaagctccagacgtagtaccatttgctattggtaaagttttcatcccatctgataactttgactacccagtagcaaacggtcttccattcgttatcgaccttgaaggcgatactactaaagttgtaaaccgttacgaagtgcctcgtttcaaagaacacttgaagactcttcacaaattctatgaagctggctacattccaaaagacgtcgcaacaagcgatacttcctttgaccttcaacaagatacttggttcgttcgtgaagaaacagtaggaccagctgactacggtaacagcttgctttcacgtgttgccaacaaagatatccaaatcaaaccaattactaacttcatcaagaaaaaccaaacaacacaagttgctaactttgtcatctcaaacaactctaagaacaaagaaaaatcaatggaaatcttgaacctcttgaatacgaatccagaactcttgaacggtcttgtttacggtccagaaggcaagaactgggaaaaaattgaaggtaaagaaaaccgtgttcgcgttcttgatggctacaaaggaaacactcacatgggtggatggaacactggtaacaactggatcctttacatcaacgaaaacgttacagaccaacaaatcgaaaattctaagaaagaattggcagaagctaaagaatctccagcgcttggatttatcttcaatactgacaatgtgaaatctgaaatctcagctattgctaacacaatgcaacaatttgatacagctatcaacactggtactgtagacccagataaagctattccagaattgatggaaaaattgaaatctgaaggtgcctacgaaaaagtattgaacgaaatgcaaaaacaatacgatgaattcttgaaaaacaaaaaataa

SEQ ID NO: 2341 - DNA, 402 bp, Streptococcus pneumoniae
ttggcaccaactttttcttcaatgattttgttggcatttgctaacaattcatccaagttgtctggtttgtcaccgatttggtacattttgataacaggtttgtcacctgaatcagcagcttttttgctgttacctgtcaaatttccacaagcagcaagacctgcagccagagcgactacactagcagatgcaaaagcatattttttccagtttttcatgataaaaactcctttttttatttttaaacttataaacaatgtaatgatcttatactcaatgaaaatcaaagagcaaactagaaaactagccgcaggctgctcaaagcactgctttgaggttgtagataagactgacgaagtcagttacatatatctacggcaaggcgacgttgacacggtttga

SEQ ID NO: 2342 - DNA, 924 bp, Streptococcus pneumoniae
atggcaaaaaagaaaattaaaaaagaaaaaattgataatgtcggcattcactccttcagtaagaaagcagatatcttcttcagtatcatttcgggtttgattgccctctcttgtatcctaccttttgtattcgttatcattatttcagtgacagacgagaaaagcctcctccaatacggctatagcttcttcccatcccaatttggcttagacggttttgagtttttggcacagtttaaggataaaatcctacaagccctcttcatctctgtctttgtaaccgtagttgggacattgacaaatgtctttatcacaacaacctatgcctacgctatttcacggacaacctttaagtatcgcagattctttaccatcttcgttctgctcagtatgttgttcaacgctggtttggtaccaggttatatcatggtgactcgtgtgcttcagcttggggatactgtttgggccttgattgttccaatgcttctctcaccatttaacatcatcttgatgcgttccttcttcaagaagaccattccagaagccattctagaatcggctcgtatcgatggtgccagtgaagcccggattttcttccaaatctgtttgccattgtcactaccaggtatcgcaaccatcacgctcttaacagctcttggtttctggaatgactggttcaacgcccttctttacatcaagagtgacaacttgtatccattgcaatatttgctcatgcaaatccaacaaaatatggactacattgccaaagcggtcggcttgactggtcaactgggagttgctctaccgaaagaaacaggtcgtatggccatggttgtggttgcaacccttccaatcgcgattttgtatccatttttccaacgctactttgtaaaaggtttgactatcggtggtgtgaaagaatag

SEQ ID NO: 2343 - DNA, 960 bp, Streptococcus pneumoniae
atggatatcaaaataaaaagggaggaaattatgaaaaagttttcaaaaacattgagagacaactggatctttctcttgatggttttgccaggggcactctggttgattctattcttttacattccagtatttgggaacgtggttgccttcaaagactaccacatgaccagtaatggtttcatagatagtatcataaatagtaaatgggtcggactcgataatttcagattcttatttagttcaagagacgcctttattatcacacgaaatactgtcctctacaatcttggctttatctttctaggtttagttgtatctgtagggattgccattatcctcagcgagctccgttctaagagaatggtgaagatttttcaaacttctatgttgttcccttacttcttgtcttgggttatcatcagtttctttacagatgccttcctaaatattgataaaggggtgttcaatcatctattggaaagtcttggtctcaaagaagtcaatttctacgctgacctgggcatctggccctatctcctacttttcctaggtatttggaaaggttttggatatagcagtgtcatgtactatgcgacgatcatgggaattgatccaacctactacgaagcagcgacagtggacggagctagcaagtggcaacgtattcgcaacgtaaccattcctcagttgactccgcttgtaactgtattgaccatccttgcagtcggaaatatcttccgcgcagacttcggtctcttctatcaaatcccacacaatgctggtcagctttacaatgtaaccaacgttttggacgtatatgtttttaatggtttgactcagacagcagatatcggtatggctgcagcagccggtctttaccaatccgttgttggtttgattctggttatcctatcaaacttgcttgcaagacgagtcgatccaaactcagctttgttctag

SEQ ID NO: 2344 - DNA, 210 bp, Streptococcus pneumoniae
tgtaatcgttatcaaaagtctaaaaaagaatttttagatggatatcaaaataaaaagggaggaaattatgaaaaagttttcaaaaacattgagagacaactggatctttctcttgatggttttgccaggggcactctggttgattctattcttttacattccagtatttgggaacgtggttgccttcaaagactaccacatgaccagtaa

SEQ ID NO: 2345 - DNA, 360 bp, Streptococcus pneumoniae
ttgagatcattgacaggtgtatcgaatcttaccacagattcagcacgtctggttttggcagaggctaagaaagcttttgcagatgatagtttgacagagcaaggtttacgtgatatcttgcaaacagtcaaagatgccattgcttccctagagtccattaaggaaagccagtcagcaactaaggatggaggacaaacagcgggcaaagaaacagcagataaggatgtccttgaaaactctcaagaagaacttcaaaaagcagttttgttcttggcagatgaaaaaggctctgagcatactgaagcagagttgattgataatcttaaagaggttattgctaagttgaaagcaaacgcctaa

SEQ ID NO: 2346 - DNA, 348 bp, Streptococcus pneumoniae; identical to SEQ ID NO: 2066

SEQ ID NO: 2347 - DNA, 531 bp, Streptococcus pneumoniae
  unsure (90): n at each above location is unknown.
atgtcacgttatacaggaccatcttggaaacaagctcgtcgccttggcctttcacttacaggtacaggtaaagaattggcacgtcgtaantacgtaccaggacaacacggaccaaacaaccgttctaaattgtcagaatacggtttgcaattggctgaaaaacaaaaacttcgtttcacttacggtgtaggtgaaaaacaattccgtaacttgttcgtacaagctacaaaaatcaaaggcggaatcctaggtttcaactttatgcttcttttggaacgtcgtttggataacgttgtttaccgtcttggtctcgcgactactcgtcgtcaagctcgtcaattcgtaaaccacggtcacatccttgttgacgggaaacgcgttgatatcccatcataccgcgtaactccaggtcaagtgatctcagttcgtgaaaaatcattgaaagttccagcaatccttgaagcagtagaagctactcttgacgtccagcattcgtatcattcgacgctgaaaaattggaaggttcattga

SEQ ID NO: 2348 - DNA, 1077 bp, Streptococcus pneumoniae
gatagagaaaccgagaggacaaacatgaaactaaaaagttatattttggttggatatattatttcaaccctcttaaccattttggttgttttttgggctgttcaaaaaatgctgattgcgaaaggcgagatttactttttgcttgggatgaccatcgttgccagccttgtcggtgctgggattagtctctttctcctattgccagtctttacgtcgttgggcaaactcaaggagcatgccaagcgggtagcggccaaggattttccttcaaatttggaggttcaaggtcctgtagaatttcagcaattagggcaaacttttaatgagatgtcccatgatttgcaggtaagctttgattccttggaagaaagcgaacgagaaaagggcttgatgattgcccagttgtcgcatgatattaagacccctatcacttcgatccaagcgacggtagaagggattttggatgggattatcaaggagtcggagcaagctcattatctagcaaccattggacgccagacggagaggctcaataaactggttgaggagttgaattttttgaccctaaacacagctagaaatcaggtggaaactaccagtaaagacagtatttttctggacaagctcttaattgagtgcatgagtgaatttcagtttttgattgagcaggagagaagagatgtccacttgcaggtaatcccagagtctgcccggattgagggagattatgctaagctttctcgtatcttggtgaatctggtcgataacgcttttaaatattctgctccaggaaccaagctggaagtggtgactaagctggagaagggccagctttcaatcagtgtgaccgatgaagggcagggcattgccccagaggatttggaaaatattttcaaacgcctttatcgtgtcgaaacttcgcgtaacatgaagacaggtggtcatggattaggacttgcgattgcgcgtgaattggcccatcaattgggtggggaaatcacagtcagcagccagtacggtctaggaagtacctttaccctcgttctcaatctctctggtagtgaaaataaagcctaa

SEQ ID NO: 2349 - DNA, 699 bp, Streptococcus pneumoniae
atgggaaagacaattttactcgttgacgacgaggtagaaatcacagatattcatcagagatacttaattcaggcaggttatcaggtcttggtagcccatgatggactggaagcgctagagctgttcaagaaaaaaccgattgatttgattatcacagatgtcatgatgcctcggatggatggttatgatttaatcagtgaggttcaatacttatcaccagagcagcctttcctatttattactgctaagaccagtgaacaggacaagatttacggcctgagcttgggagcagatgattttattgctaagccttttagcccacgtgagctagttttgcgtgtccacaatattttgcgccgccttcatcgtgggggcgaaacagagctgatttcccttggcaatctaaaaatgaatcatagtagtcatgaagttcaaataggagaagaaatgctggatttaactgttaaatcatttgaattgctgtggattttagctagcaatccagagcgagttttctccaagacagacctctatgaaaagatctggaaagaagactacgtggatgacaccaataccttgaatgtgcatatccatgctcttcgacaggagctggcaaaatatagtagtgaccaaacgcccactattaagacagtttgggggttgggatataagatagagaaaccgagaggacaaacatga

SEQ ID NO: 2350 - DNA, 372 bp, Streptococcus pneumoniae
ttggacaacatcgtagcaactaaaaaagtcactattaagataaatgttaaagaaacatcagacacagcaaatggttcattatcaccttctaactctggttctggcgtgactccgatgaatcacaatcatgctacaggtactacagatagcatgcctgctgacaccatgacaagttctaccaacacgatggcaggtgaaaacatggctgcttctgctaacaagatgtctgatacgatgatgtcagaggataaagctatgctaccaaatactggtgagactcaaacatcaatggcaagtattggtttccttgggcttgcgcttgcaggtttactcggtggtctaggtttgaaaaacaaaaaagaagaaaactaa

SEQ ID NO: 2351 - DNA, 2673 bp, Streptococcus pneumoniae
atgaaattcaatccaaatcaaagatatactcgttggtctattcgccgtctcagtgtcggtgttgcctcagttgttgtggctagtggcttctttgtcctagttggtcagccaagttctgtacgtgccgatgtggtcaatccgaccccaggtcaagtcttacctgaagagacatcgggaacgaaagagggtgacttatcagaaaaaccaggagacaccgttctcactcaagcgaaacctgagggcgttactggaaatacgaattcacttccgacacctacagaaagaactgaagtgagcgaggaaacaaactcttctagtctggatacactttttgaaaaagatgaagaagctcaaaaaaatccagagctaacagatgtcttaaaagaaactgtagatacagctgatgtggatgggacacaagcaagtccagcagaaactactcctgaacaagtaaaaggtggagtgaaagaaaatacaaaagacagcatcgatgttcctgctgcttatcttgaaaaagctgaagggaaaggtcctttcactgccggtgtaaaccaagtaattccttatgaactattcgctggtgatggtatgttaactcgtctattactaaaagcttcggataatgctccttggtctgacaatggtactgctaaaaatcctgctttacctcctcttgaaggattaacaaaagggaaatacttctatgaggtagacttaaatggcaatactgttggtaaacaaggtcaagctttaattgatcaacttcgcgctaatggtactcaaacttataaagctactgttaaagtatacggaaataaagacggtaaagctgacttgactaatctagttgctactaaaaatgtagacatcaacatcaatggattagttgctaaagaaactgtcgaaaaagccgttgcagacaacgttaaagacagtatcgatgttccagcagcctacctagaaaaagccaagggtgaaggtccattcacagcaggtgtcaaccatgtgattccatacgaactcttcgcaggtgatggcatgttgactcgtctcttgctcaaggcatctgacaaggcaccatggtcagataacggcgacgctaaaaacccagccctatctccactaggtgaaaacgtgaagaccaaaggtcaatacttctatcaagtagccttggacggaaatgtagctggcaaagaaaaacaagcgctcattgaccagttccgagcaaacggtactcaaacttacagcgctacagtcaatgtctatggtaacaaagacggtaaaccagacttggacaacatcgtagcaactaaaaaagtcactattaacataaacggtttaatttctaaagaaacagttcaaaaagccgttgcagacaacgttaaggacagtatcgatgttccagcagcctacttagaaaaagccaagggtgaaggtccattcacagcaggtgtcaaccatgtgattccatacgaactcttcgcaggtgatggtatgttgactcgtctcttgctcaaggcatctgacaaggcaccatggtcagataacggtgacgctaaaaacccagctctatctccactaggtgaaaacgtgaagaccaaaggtcaatacttctatcaagtagccttggacggaaatgtagctggcaaagaaaaacaagcgctcattgaccagttccgagcaaacggtactcaaacttacagcgctacagtcaatgtctatggtaacaaagacggtaaaccagatttggacaacatcgtagcaactaaaaaagtcactattaacataaacggtttaatttctaaagaaacagttcaaaaagccgttgcagacaacgttaaggacagtatcgatgttccagcagcctacctagaaaaggccaagggtgaaggtccattcacagcaggtgtcaaccatgtgattccatacgaactcttcgcaggtgatggtatgttgactcgtctcttgctcaaggcatctgacaaggcaccatggtcagataacggcgacgctaaaaacccagccctatctccactaggtgaaaacgtgaagaccaaaggtcaatacttctatcaagtagccttggacggaaatgtagctggcaaagaaaaacaagcgctcattgaccagttccgagcaaacggtactcaaacttacagcgctacagtcaatgtctatggtaacaaagacggtaaaccagacttggacaacatcgtagcaactaaaaaagtcactattaacataaacggtttaatttctaaagaaacagttcaaaaagccgttgcagacaacgttaaagacagtattgatgttccagcagcctacctagaaaaagccaagggtgaaggtccattcacagcaggtgtcaaccatgtgattccatacgaactcttcgcaggtgatggcatgttgactcgtctcttgctcaaggcatctgacaaggcaccatggtcagataacggcgacgctaaaaacccagccctatctccactaggtgaaaacgtgaagaccaaaggtcaatacttctatcaattagccttggacggaaatgtagctggcaaagaaaaacaagcgctcattgaccagttccgagcaaatggtactcaaacttacagcgctacagtcaatgtctatggtaacaaagacgtaaaccagacttggacaacatcgtag

SEQ ID NO: 2352 - DNA, 570 bp, Streptococcus pneumoniae
ttgatagacgacattggacagtttgcgatctggcaagacagaatgtttggtcaaacggctcaacatggtcttacgaatagcctgaaagacttctggatttttctgctgaatataggtccacaattggcgtttttttgccagatgctccgttgttccagatcggttgagcagggtactggaaatcaccgtcgtgatttcaatatgattcagcagatattctcgcattttgggatgactcacttgggacaaatcaagttggtctaccaagagtcgattgaccttgagttgctggtcaatgcacttaatcatcacttgctcattgacagactggtcctcacgcccaatcaaataacgatagaaatcgacaggcagatagtacatggtcttgacctgctgaaggggcgtaaagacaaagagattatcgacataaaaagtatgttcaggcagttagaactggctagcacgcaacaaatctgtccgataaatcagcgagtgcatcatggtatactggcctttggagaaatttccgacctggtcccagccaaaaatctgccgaacaggcaagactga

SEQ ID NO: 2353 - DNA, 411 bp, Streptococcus pneumoniae
atgtactatctgcctgtcgatttctatcgttatttgattgggcgtgaggaccagtctgtcaatgagcaagtgatgattaagtgcattgaccagcaactcaaggtcaatcgactcttggtagaccaacttgatttgtcccaagtgagtcatcccaaaatgcgagaatatctgctgaatcatattgaaatcacgacggtgatttccagtaccctgctcaaccgatctggaacaacggagcatctggcaaaaaaacgccaattgtggacctatattcagcagaaaaatccagaagtctttcaggctattcgtaagaccatgttgagccgtttgaccaaacattctgtcttgccagatcgcaaactgtccaatgtcgtctatcaaatcaccaaatctgtttatggatttaattaa

SEQ ID NO: 2354 - DNA, 537 bp, Streptococcus pneumoniae
atgaagttattgtctatcgccattcccagctataatgcagcagcctatcttcattactgtgtggagtcgctagtgattggtggtgagcaagttgggattttgattatcaatgacgggtctcaggatcagactcaggaaatcgctgagtgtttagctagcaagtatcctaatatcgttagagccatctatcaggaaaataaatgccatggcggtgcggtcaatcgtggcttggcagaggcttctgggcgctattttaaagtagttgacagtgatgactgggtggatcctcgtgcctacttgaaaattcttgaaaccttgcaggaacttgagagcaaaggtcaagaggtggatgtctttgtgaccaattttgtctatgaaaaggaagggcagtctcgtaagaagagtatgagttacgattcagtcttgcctgttcggcagatttttggctgggaccaggtcggaaatttctccaaaggccagtataccatgatgcactcgctgatttatcggacagatttgttgcgtgctagccagttc

SEQ ID NO: 2355 - DNA, 666 bp, Streptococcus pneumoniae
atgtcagatcgtacgattggaattttgggcttgggaatttttgggagcagtgtcctagctgccctagccaagcaggatatgaatattatcgctattgatgaccacgcagagcgcatcaatcagtttgagccagttttggcgcgtggagtgattggtgacatcacagatgaagaattattgagatcagcagggattgatacctgcgataccgttgtagtcgcgacaggtgaaaatctggagtcgagtgtgcttgcggttatgcactgtaagagtttgggggtaccgactgttattgctaaggtcaaaagtcagaccgctaagaaagtgctagaaaagattggagctgactcggttatctcgccagagtacgaaatggggcagtctctagcacagaccattcttttccataatagtgttgatgtctttcagttggataaaaatgtgtctatcgtggagatgaaaattcctcagtcttgggcaggtcaaagtctgagtaaattagacctccgtggcaagtacaatctgaatattttgggtttccgagagcaggaaaattccccattggatgttgaatttggaccagatgacctcttgaaagcagatacctatattttggcagtcatcaacaaccagtatttggataccctagtagcattgaattcgtaa

SEQ ID NO: 2356 - DNA, 1380 bp, Streptococcus pneumoniae
atgttattcaaattatctaaggaaaaaatagagctaggcttatctcgtttatcgccagcccgtcgtatttttttgagttttgccttggtcattttactaggctctcttcttttgagcttgccctttgtccaagttgaaagctcacgagcgacttattttgatcatcttttcactgctgtctctgcagtctgtgtgacaggtctctcaacccttccagtagctcacacctataatatatggggccaaataatctgtttgctcttgattcagatcggtggtctagggctcatgacctttattggggttttctatatccagagcaagcaaaagcttagtcttcgtagccgtgcaactattcaggatagttttagttatggagaaactcgatctttgagaaagtttgtctattctatttttctcacgacctttttggttgagagcttgggagctattttgcttagttttcgccttattcctcaacttggctggggacgtggtctttttagttccatttttctagcgatctcagccttctgtaatgccggttttgataatttagggagcaccagtttatttgcttttcagaccgatttactggtcaatctggtgattgcaggcttgattattacaggcggccttggttttatggtctggtttgatttggctggtcatgtaggaagaaagaaaaaaggacgtctgcactttcatacgaagcttgtactattgttgactataggtttgttgttatttggaacggcaactactctctttcttgagtggaacaatgctggaacgattggcaatctccctgttgccgataaggttttagttagcttttttcaaacagtgacgatgcgaacagctggcttttctacgatagattatactcaggctcatcctgtgactcttttgatttatatcttacagatgtttctaggtggggcacctggaggaacagctgggggactcaagattacgacattttttgtcctcttggtctttgcacgaagtgagcttctaggcttgcctcatgccaatgttgcgagacgaacgattgcgccgcgaacggttcaaaaatcctttagtgtctttattatctttttgatgagcttcttgataggattgattctgctagggataacagccaaaggcaatcctccctttatccacctcatatttgaaaccatttcagctcttagtacagttggtgtaacggcaaatctgactcctgaccttgggaaattggctctcagtgttatcatgccacttatgtttatgggacgaattggtcccttgaccttgtttgttagcttggcagattaccatccagaaaagaaagatatgattcactatatgaaagcagatattagtattggttaa

SEQ ID NO: 2357 - DNA, 186 bp, Streptococcus pneumoniae
atgttactgacttcgtcagttctatctgcaacctcaaaacagtgttttgagctgacttcgtcagttctatccacaacctcaaaacagtgttttgagcaacctgtgactagctttctaagcgatgccttggttctcattgcctataatcaaaaagagaaattttctcctgaaaagcatatagagtag

SEQ ID NO: 2358 - DNA, 765 bp, Streptococcus pneumoniae
atgattcagaaacatgcgattcctattttagagtttgatgacaatcctcaggcggttatcatgcccaatcacgaggggctggacttgcagttgccaaagaagtgtgtttatgcatttttaggtgaggagattgaccgctatgcaagggaagtaggggcggattgtgtcggcgaattcgtttctgctaccaagacctatccagtctatgtcatcaactacaagggtgaggaggtctgtctggctcaggctcctgttggctccgctccagcagcccagtttatggattggttgattggctatggtgtggagcagattatctctactgggacctgtggtgtcctagctgatatagaggaaaatgcctttctagtccctgttcgcgctttgcgagatgagggagccagttaccactatgtggcaccttgtcgttatatggaaatgcagccagaggctattgctgctattgaggaagttttggaagacagagggattccttatgaagaagtcatgacctggacgacagacggtttttaccgagaaacggctgaaaaggtggcttatcgtaaggaagaaggctgtgctgttgtggagatggagtgttctgctcttgcggcagtagctcaattgcgtggggttctctggggtgaattgttgttcacagcagattctctagcggacttggaccagtacgacagtcgtgactggggctcggaagcttttaataaggcgctagaactgagtttagcaagtgttcaccacctttag

SEQ ID NO: 2359 - DNA, 189 bp, Streptococcus pneumoniae
caaagtgtcaaggaggaaactgatgaactggacaaaaaacaagcctacatcgtcagctgccacagtggtttgcgcagctatatcgcagagcctatcctcaagcaagcaggatttaccgcccaaaaccttgacggcgcttattcactatacaaaatggttaacccagaaggagtagaatatggaaactag

SEQ ID NO: 2360 - DNA, 297 bp, Streptococcus pneumoniae
atggaaactagtatcagcatggctgacttttatggaaaataccaaaatgaaaatctagaacttatcgatgtccgtgaagcacatgaattccaagcaggacatgcaccaggtgccaaaaatcttccattaagtaccttagagcaaggctacaaagaactcaaacctgaccatgaatactatgtcatttgtcaaggaggagtccgctctgcatctacctgccagtttctcagctcccaaggcctcaccgttaccaacgtagaaggtggtatgaatgcttggcccggtcaagtagaataa

SEQ ID NO: 2361 - DNA, 363 bp, Streptococcus pneumoniae
atgaaaatcaaagtgcaaactaggaagttagccgcaggctgctcaaaacactgttttaaggttgtggatggaactgacgaagtcagctcaaaacactgttttgaggttgtggatagaactgacgaagtcagtaaccatatctacggcaaggtgaagctgacgtggtttgaagagattttcgaagagtataagtctctacataataaaacgcatattaccaaggttcttatgaactgcaccccaaaagttagacagaaaaaatctaacttttgggggtcagtacattcaacacctgatactatgcgtttttttaattttaaagattttttacaacttcttttgactcacattaaactattctaa

SEQ ID NO: 2362 - DNA, 294 bp, Streptococcus pneumoniae
agatataatgaagaaaaatcgagcaaggaaaaagaactgacaaattcaaagtatattacttgtttgaaacgttcagagggccagttgtgtgggattcaaaagatgattgaaggagatcgtgactgtgctgatattgtgacgcaactgacagcagtgaaatctagtgtagagcgcgtgattgagatgataattaccgaaaatcttactgaatgtatcaatcagcccctagatgattctgaagctcaaaaggaacgcctagaaaaggctatccgatacttgattaaacggaaataa

SEQ ID NO: 2363 - DNA, 243 bp, Streptococcus pneumoniae
ttgggggaaagagtagagccggttatcctggcagaaggtacaagaatggggcatattcatctttccgtcaaggatagtcgaaagtccagccagttttatcaaaaggtgttagggctagagaataaattcagtgtgcctggcgctagttggattgcggctggagattaccatcatcatttagcagttaacgaatggggaggaaaaggtctggcttcgcgtaagcaaggcttaccaggtttagcc

SEQ ID NO: 2364 - DNA, 396 bp, Streptococcus pneumoniae
atgacctatgaatacaagagtcacatttatttggcagagacagctttaaatgtaaaggatttggccagtcaaacagccttttatcagcaagttattggtttagaaatcttatctcaaactgagacagagtccattctaggccttggtggaaaagtcttggtacagctgattcaagcacaagagagcggagaagtgagggaatattatggtctttaccatttggccattctcttgcccacacgcaaggctttagctgatgtcttgaaacacctgacagatttacaaattcctcttgtcggcggtgcagaccatggttacagtgaagctatttacttggaagatttggagggaaatggcattgaactctatcgagataagccattttccacatggtga

SEQ ID NO: 2365 - DNA, 1038 bp, Streptococcus pneumoniae
atgaaagcatacacagagcgtgtatttggaaatgttgagggtgaggatgtcttggcctatcgatttgagacagacggtggctaccaacttgaggttatgacttatggtgcgactatcttgcgctatgtcgcacctgacaaggctggaaattttgccaatgttatcttgggatttgatgactttgatagttatgtaggcaatagtcccaagcatggagcaagtgtaggtcctgtagcgggtcgtattgcaggtgcgacctttgagctcaatggtaagacctatgaccttgaggttaataatgctagcaactgtaatcacagtggttcaactggttgggattccagcttgtttgaagttgaagaagtaagcgatcatggcttgactctctacacagagcgtacagatgggacaggagggttccctggaaatctcaagatttggatcagttatcacttggaagaaactggtgcctatgaaatcagctacaaggtaacgaccgatcaggatacgctggtcaatccaaccaaccacagctatttcaacttgtctggtgatttcacgcagacgattgaccgtcatgtcttccaactaaacacagagggcatttactcaatcgctcctgacggtgttcctgccaaaactccagaagccaaccgtgatgtggtcaaacacgtctacaatggtaccttgttgaaggatatctttgcagaagaagatgagcaaatccagctggcatcaggtttggatcatccatttgcccttcctgcaggccatgacaatgctggattcctttatgaccaaaattcaggtcgcttcctgcttttcaagacagaagctccttgctttgtggtctacacagcaaactttgtggatgaaagtgtcatcataggaggtcagccaatgctacagcacaatgggattgctcttgaagcgcaagctttaccagatgccattcacagtgaccttaaaggccaagtcattcttaaagctggtcaaaccttcaccagtaagacacgttatgaacttgttgtgaaataa

SEQ ID NO: 2366 - DNA, 459 bp, Streptococcus pneumoniae
gtgattacagttgctagcattattaacctcaaggtcataggtcttaccattgagctcaaaggtcgcacctgcaatacgacccgctacaggacctacacttgctccatgcttgggactattgcctacataactatcaaagtcatcaaatcccaagataacattggcaaaatttccagccttgtcaggtgcgacatagcgcaagatagtcgcaccataagtcataacctcaagttggtagccaccgtctgtctcaaatcgataggccaagacatcctcaccctcaacatttccaaatacacgctctgtgtatgctttcattctgttctccttttactatttctctcaagcaaacaaaccatagaaagcgtactgacaatctatggtttatctgataatttacaaatcctcttgtcaagaattcataaacactgtcttacttttgatattcgtgaattatga

SEQ ID NO: 2367 - DNA, 1167 bp, Streptococcus pneumoniae
atgctacattatacaaaagaagacttgctcgaattgggtgcagaaatcactacgcgtgaaatctaccaacaacctgatgtatggagagaagcttttgaattttatcaagcaaaacgtgaagaaattgcagccttcctacaagaaatcgctgataaacatgactatattaaggttatcttgacaggtgctgggacttctgcttatgtgggagacaccttgctaccttactttaaggaagtctatgacgaacgcaaatggaatttcaatgctattgcgacaacagatatcgttgccaatccagcaacctatttgaaaaaagatgtggcaactgtccttgtgtcttttgctcgtagtgggaactcgcctgaaagtgtggcgactgttgatttggccaaatccttggtggatgagctttatcaagtgacgattacttgtgcagcagatggtaaattggctcttcaagctcacggtgatgaccgtaatctcttgctcttgcaaccagctgtctctaatgatgctggatttgccatgacttctagctttacgtctatgatgttgacaactctcttggtctttgatcctacagaatttgctgttaagtctgaacgttttgaagttgtatctagtcttgcccgtaaagttttagacaaggcagaagatgtcaaagagctcgttgatttagactttaaccgtgtcatctatctaggcgctggtcctttctttggacttgctcatgaagctcagctcaagattttggaattaactgctggtcaagttgcgaccatgtatgaaagcccagttggcttccgtcacggtccaaaatctcttatcaacgaaaatacagttgttttggtctttggtacaaggacagactacactcgtaagtacgacttggacttggttcgtgaagttgctggtgaccagattgctcgtcgtgttgtgcttttgagtgatcaagcttttggtcttgaaaatgtcaaagaagtggcccttggttgtggcggtgtcttgaatgatatttaccgtgtcttcccttacatcgtttatgcccaactctttgccctattgacttcactcaaggtagaaaataaaccagatacaccgtctcctacaggtacagtaaaccgtgtagtacaaggtgtcataattcacgaatatcaaaagtaa

SEQ ID NO: 2368 - DNA, 249 bp, Streptococcus pneumoniae
cttcgtcagtcttatccggcaacctcaaagcagtgctttgagcagcctgcggctagtttcctacagattttagttggaactcgattcaattcatgtgacaacgtgaaaatcgttagagcattttatatagaatatacatgggaatggagcttactcccattcccatatttaatagaaaaagaggaactcaatgctacattatacaaaagaagacttgctcgaattgggtgcagaaatcactacgcgtga

SEQ ID NO: 2369 - DNA, 405 bp, Streptococcus pneumoniae
atgactaaatcattaattttggtgagccatggtcgcttctgtgaggagcttagaggtagcacagaaatgattatgggcctacaagacaacatttacacagtagctcttcttccagaagatggcccagaagaatttactgctaaatttgaagctgttattgaaggattggatgatttcctagtttttgcggatcttctcggtgggacaccttgtaatgtggtgagtcgcttgatcatggaaggtcgtgatattgacctttacgcagggatgaatcttccaatggtgattgaatttatcaatgcgagccttacaggcgcagatgcggactacaagagccgtgctgcagaaagcattgtgaaagttaatgacctgttagcgggcttcgatgatgacgaagatgaataa

SEQ ID NO: 2370 - DNA, 831 bp, Streptococcus pneumoniae
gtggggaaatcgaagatgacgaattctaattacaaacttacaaaagaagattttaatcaaatcaacaaacgtagcttgtttactttccaattaggttggaactacgaacgtatgcaagcttctggttacctttacatgatcttgcctcagttgcgtaaaatgtatggtgatggaactcctgaattgaaagaaatgatgaaagttcatactcaattcttcaatacttcaccattcttccataccattatcgctggttttgaccttgccatggaagaaaaagatggtgtaggttcaaaagacgccgttaacggtatcaagacaggtttgatgggaccattcgctcctcttggggatacaatctttggttcacttgtacctgctatcatggggtcagtcgcagcaactatggctatcgctggccaaccttgggggatcttcctttggattgcagttgcagtagcgtatgacatcttccgttggaaacagttggaatttgcttacaaagaaggggttaaccttatcaacaacatgcaaagtaccttgacagctttgattgacgctgcatccgtacttggtgtcttcatgatgggtgctcttgtagcaacagtgattaactttgaaatttcttacaagttgccaatcggtgaaaagatgattgatttccaagacatcttgaaccaaatcttcccacgtttgcttccagcaatctttactgcctttatcttctggttgcttggtaagaaaggtatgaactctactaaagctatcggtattattatcgtacttgctttggctctttctgcccttggtcactttgcacttggaatgtaa

SEQ ID NO: 2371 - DNA, 906 bp, Streptococcus pneumoniae
atgatacaatggtggcaaattttacttctcactttgtactcagcttatcaaatctgtgatgagttgacgatcgtttcatctgcaggttcccctgtatttgctggtttcattactggtttaatcatgggagatgtgactactggtttacttatcggtggtaacttgcaactgttcgttcttggggttggtaccttcggtggtgcttctcgtatcgacgcaacttctggtgcggttcttgcgacagccttctctgtttcacaaggaattgatgcaccgcttgcaattactacaatcgctgtaccagtagcagctctcttgacttacttcgacgttcttggtcgtatgactactaccttctttgctcaccgtgtggatgctgcaatcgaacgctttgactataaaggtattgaacgcaactacttgcttggtgcgattccgtgggctctatctcgtgcccttccagtcttctttgcccttgcttttggtggtgcctttgtacaatcagtagtagacttcgttgaagcctacaaatgggttgcagatggcttgacactcgcaggacgtatgcttccaggtcttggatttgcaatcttgcttcgttaccttccagttaaacgtaaccttcactaccttgctatgggatttggtttgacagctatgttgactgttctttactcatatgtaacaggtcttggtggcgctgttgctggtatcgtaggtactcttcctgctgaagttgctgaaaaaattggtttcgtgaacaacttcaaaggtttgtctatgattggtatttctatcgtaggtattttccttgcagtgcttcacttcaaaaatagccaaaaagtagctgtagcagcaccttctacaccatcagaaagtggggaaatcgaagatgacgaattctaa

SEQ ID NO: 2372 - DNA, 477 bp, Streptococcus pneumoniae
atgacaattgtaggatgccgtattgatggacgtttgatccacggacaagtagccaatctttgggctggaaaactaaatgtttcacgcattatggttgtagacgacgaagttgtcaacaacgatattgaaaagagtggtttgaaacttgcgacaccaccaggtgtgaaattgagtattttgccagttgagaaagctgcagccaatattcttgctggcaaatacgatagccaacgtctctttatcgtggctcgtaaaccagaccgcttccttggtttggtagaagcaggtgtaccacttgaaactcttaatgttgggaatatgtctcaaacaccagaaactcgttctattacacgttctatcaacgtagtagacaaggatgtggaagacttccacaaactggcagaaaaaggtgttaaacttactgctcagatggttccaaatgatccaatttcagactttttgagcttattaaaatag

SEQ ID NO: 2373 - DNA, 1527 bp, Streptococcus pneumoniae
ttgtgcgtccgtctccatttatctgtgcggaatgggaattcggtgggcttaccagcttggctcttgaccaagaacatgcgaattcgctcatccgacccaacatatatcgaggcagttggtcgctactatgatcagttattgccaagactggttcctcgtttgttggacaatggtggcaatattctcatgatgcaggttgaaaatgagtatggttcttacggagaagataaggcttacctgagagcgattcgacagctaatggaagagtgtggcgtaacctgtcccctctttacatcagatggtccatggcgagctactctgaaagctggaaccttaattgaggaggacctctttgtaacaggaaactttggttctaaggcaccttacaacttttcgcagaggcaggaattctttgatgaacatggtaagaaatggccactcatgtgtatggagttctgggatggttggtttaatcgctggaaagaaccgattatcacacgggatcctaaggaattggcagatgcagttcgagaggttttggaacaaggctctatcaatctttacatgttccacggtggtacaaactttggtttcatgaatggttgctcagctcgaggaactttggacctgccacaagttacgtcttatgattacgatgcccttctggatgaaaaaagaaatccaactgctaaatatcttgcagtcaagaagatgatggcaacacatttttcagagtatccgcagttggaaccactctacaaagagagtatggagttggatgctattccactagttgaaaaagtttctttgtttgaaaccttagatagcttgtcaagtcctgtagaaagtctctatcctcaaaagatggaggagctgggacaaagttatggctacctactttatcgaacagaaacaaactgggatgcagaagaagaaagacttcgtatcattgatggtcgagatagggcccagctgtatgtcgatggtcagtgggttaaaactcaatatcagacagagattggggaagatattttttatcaaggtaaaaagaaagggctatctaggttagatatcttgatagaaaatatggggcgtgtcaactatgggcataagttcttagcggatacgcaacgtaagggaattcggacaggggtctgtaaggatctgcatttcttactaaactggaaacactatccactcccactagacaatcctgagaaaattgatttttcaaaaggatggactcaaggacaaccagccttttacgcttatgactttacagtcgaagagccaaaagatacttacctagacttgtctgagtttggtaagggggttgcctttgtcaatgggcagaatctaggacgtttttggaacgttggcccaactctctcactttatatccctcatagctatctcaaggaaggtgccaaccgcatcattatctttgaaacagaaggtcaatataaagaagagattcatttaactcgtaaacctacactaaaacatataaagggggaaaacttatga

SEQ ID NO: 2374 - DNA, 393 bp, Streptococcus pneumoniae
atgacacgatttgagatacgagatgatttctatctcgatggaaaatcatttaagattttatctggtgccattcattattttagggttcctccagaggattggtatcattcgctctataacttgaaggctcttggttttaatacggtagagacttatgttgcttggaatttacacgagcctcgtgaaggtgagtttcattttgaaggtgatctggatttagagaaatttctccaaatagcgcaggatttgggtctctacgcaattgtgcgtccgtctccatttatctgtgcggaatgggaattcggtgggcttaccagcttggctcttgaccaagaacatgcgaattcgctcatccgacccaacatatatcgaggcagttggtcgctactatga

SEQ ID NO: 2375 - DNA, 717 bp, Streptococcus pneumoniae
atggcaattcccaaatatcaatacataaaagacgaattaaaaaataaaatcatctctgggcagtttagcagtggagataaattttacactgaagcagaactcatttcaatgtacgatgtcagctctatcacagttgttcgcgccttaaacgaccttgccaaagatggctatattgtccgccaacaaggaaaaggaaccttcgtttcacgtgcacgcaaacacaagcttgtagagttttcagatattgaactcttcaatgctaaagatgataaggtaactgttctttcaattgaacgcggaaacaagcttgtttacttggaaaaattgggtctacgcggcgatcaattctactacaagattgaacgtatccgcgaatcaaacggtgtcgtttatatctaccatacatcctacatcccagaacaatatatcaacgcaaattatccaaaccttgaatactatagttctatctataatcgtttcaagttagactaccacattcacatgaatgatgaacactttgaagaaatcaacgaaatagtctttccaactccagaacatgcggcttcagtcctcggagtcgatgaacatttccctactgtcctacaaactaaaatcaccaaactcgaatcaactggccaagttttagaatacagtgaaacttacaaacgatctgattactacaagattaaattcatctcatgtgaccatgatcactaa

SEQ ID NO: 2376 - DNA, 3912 bp, Streptococcus pneumoniae
atgaaacatgaaaaacaacagcgtttttctattcgtaaatacgctgtaggagcagcttctgttctaattggatttgccttccaagcacagactgttgcagccgatggagttactactactacagaaaaccaaccgaccatccatacagtttctgattcccctcaatcatccgaaaatcggactgaggaaacacctaaagcagagcttcaaccagaaactccagctactgataaggtagctagtcttccaaaaacagaagaaaaaccacaagaggaagttagttcaactcctagtgataaagcagaggtggtaactccaacttctgctgaaaaagaaactgctaataaaaaggcagaagaagctagccctaaaaaggaagaagcgaaagaggttgattctaaagagtcaaatacagacaagactgacaaggataaaccagctaaaaaagatgaagcgaaagcagaggctgacaaaccggaaacagaggcaggaaaggaacgtgctgcaactgtaaatgaaaaactagcgaaaaagaaaattgtttctattgatgctggacgtaaatatttctcaccagaacagctcaaggaaatcatcgataaagcgaaacattatggctacactgatttacacctattagtcggaaatgatggactccgtttcatgttggacgatatgagcatcacagctaacggcaagacctatgccagtgacgatgtcaaacgcgccattgaaaaaggtacaaatgattattacaacgatccaaacggcaatcacttaacagaaagtcaaatgacagatctgattaactatgccaaagataaaggtatcggtctcattccgacagtaaatagtcctggtcacatggatgcgattctcaatgccatgaaagaattgggaatccaaaaccctaactttagctattttgggaaggaatcagcccgtactgtcaatcttgacaacgaacaagctgtcgcttttacaaaagcccttatcgacaagtatgctgcttatttcgcgaaaaagactgaaatcttcaacatcggacttgatgaatatgccaatgatgcgacagatgctaaaggttggagtgtgcttcaagctgataaatactatccaaacgaaggctaccctgtaaaaggctatgaaaaatttattgcctacgccaatgacctcgctcgtattgtaaaatcgcacggtctcaaaccaatggcctttaacgacggtatctactacaatagcgacacaagctttggtagttttgacaaagacatcatcgtttctatgtggactggtggttggggaggctacgatgtcgcttcttctaaactactagctgaaaaaggtcaccaaatccttaataccaatgatgcttggtactacgttcttggacgaaacgctgatggccaaggctggtacaatctcgatcaggggctcaatggtattaaaaacacaccaatcacttctgtaccaaaaacagaaggagctgatatcccaatcatcggtggtatggtagctgcttgggctgacactccatctgcacgttattcaccatcacgcctcttcaaactcatgcgtcattttgcaaatgccaacgctgaatacttcgcagctgattatgaatctgcagagcaagcacttaacgaggtaccaaaagacctgaaccgttatactgcagaaagcgtcgcggccgtaaaagaagctgaaaaagctattcgctctctcgatagcaaccttagccgtgcccaacaagatacgattgatcaagccattgctaaacttcaagaaactgtcaacaacttgaccctcacgcctgaagctcaaaaagaagaagaagctaaacgtgaggttgaaaaacttgccaaaaacaaggtaatctcaatcgatgctggacgcaaatactttactctgaaccagctcaaacgcatcgtagacaaggccagtgaactcggatattctgatgtccatctccttctaggaaatgacggacttcgctttctactcgatgatatgaccattactgccaacggaaaaacctatgctagtgatgacgttaaaaaagctattatcgaaggaactaaagcttactacgacgatccaaacggtactacactaacacaggcagaagtgacagagctaattgaatacgctaaatctaaggacatcggtctcatcccagctattaacagtccaggtcacatggatgctatgctggttgccatggaaaaattaggtattaaaaatcctcaagcccactttgataaagtttcaaaaacaactatggacttgaaaaacgaagaagcgatgaactttgtaaaagccctcatcggtaaatacatggacttctttgcaggtaaaacaaagattttcaactttggtactgacgaatacgccaacgatgcgactagtgcccaaggctggtactacctcaagtggtatcaactctatggcaaatttgccgaatatgccaacaccctcgcagctatggccaaagaaagagggcttcaaccaatggccttcaacgatggcttctactatgaagacaaggacgatattcagtttgacaaagatgtcttgatttcttactggtctaaaggctggtggggatataacctcgcatcacctcaatacctagcaagcaaaggctataaattcttgaataccaacggtgactggtactacattcttggtcaaaaaccagaagatggtggtggtttcctcaagaaagctattgagaatactggaaaaacaccattcaatcaactagcttctaccaaatatcctgaagtagatcttccaacagtcggaagtatgctttcaatctgggcagatagaccaagcgctgagtacaaggaagaggaaatctttgaactcatgactgcctttgcagaccacaacaaagactacttccgtgctaattataatgctctccgcgaagaattagctaaaattcctacaaacttagaaggatatagtaaagaaagtcttgaggcccttgacgcagctaaaacagctctaaattacaacctcaaccgtaataaacaagctgagcttgacacacttgtagccaacctaaaagccgctcttcaaggcctcaaaccagctgcaactcattcaggaagcctggatgaaaatgaagtggctgccaatgttgaaaccagaccagaactcatcacaagaactgaagaaattccatttgaagttatcaagaaagaaaatcctaacctcccagctggtcaggaaaatattatcacagcaggagtcaaaggtgaacgaactcattacatctctgtactcactgaaaatggaaaaacaacagaaacagtccttgatagccaggtaaccaaagaagttataaaccaagtggttgaagttggcgctcctgtaactcacaagggtgatgaaagtggtcttgcaccaactactgaggtaaaacctagactggatatccaagaagaagaaattccatttaccacagtgactcgtgaaaatccactcttactcaaaggaaaaacacaagtcattactaagggcgtcaatggacatcgtagcaacttctactctgtgagcacttctgccgatggtaaggaagtgaaaacacttgtaaatagtgtcgtagcacaggaagccgttactcaaatagtcgaagtcggaactatggtaacacatgtaggcgatgaaaacggacaagccgctattgctgaagaaaaaccaaaactagaaatcccaagccaaccagctccatcaactgctcctgctgaggaaagcaaagctcttcctcaagatccagctcctgtggtaatagagaaaaaacttcctgaaacaggaactcacgattctgcaggactagtagtcgcaggactcatggccacactagcagcctatggactcactaaaagaaaagaagactaa

SEQ ID NO: 2377 - DNA, 390 bp, Streptococcus pneumoniae
atgatttccttgagctgttctggtgagaaatatttacgtccagcatcaatagaaacaattttctttttcgctagtttttcatttacagttgcagcacgttcctttcctgcctctgtttccggtttgtcagcctctgctttcgcttcatcttttttagctggtttatccttgtcagtcttgtctgtatttgactctttagaatcaacctctttcgcttcttcctttttagggctagcttcttctgcctttttattagcagtttctttttcagcagaagttggagttaccacctctgctttatcactaggagttgaactaacttcctcttgtggtttttcttctgtttttggaagactagctaccttatcagtagctggagtttctggttga

SEQ ID NO: 2378 - DNA, 1299 bp, Streptococcus pneumoniae
atgatcaaccgttactctcgccctgagatggcgaatatttggagtgaagaaaataaataccgtgcttggcttgaggtggaaatcctctctgacgaggcatgggctgagttgggggaaatccctaaggaagatgtggctttgattcgcaagaaggcggactttgacatcgaccgtattttggaaattgagcaggagacgcgccacgatgtggtggctttcacgcgtgcggtttctgagactcttggtgaagagcgcaagtgggttcactatgggttaacttctaccgacgtggtggatactgcttatggttacctctacaagcaggccaacgacatcatccgtcgtgaccttgaaaacttcactaatatcatcgctgacaaggccaaggagcacaagttcaccatcatgatggggcgtactcatggtgtgcacgctgagccgacaacctttggtcttaaattggcaacttggtacagcgaaatgaaacgcaatatcgagcgtttcgagcatgcagctgctggtgtagaagctggtaagatttctggtgcggttgggaactttgccaatatcccaccatttgtagaggagtatgtctgcgataaacttggcatccgtgcccaagaaatctctacacaagtccttcctcgtgaccttcacgctgagtactttgcggttcttgccagcattgcgacttcaatcgaacgtatggcgactgagattcgtggtctacaaaaatctgagcaacgcgaagtagaagagttctttgctaaagggcaaaaaggatcttcagcaatgcctcacaaacgcaacccaatcggttctgaaaatatgactggtctggcgcgtgtcattcgtggtcacatgattacggcttatgaaaacgtcgctctctggcacgaacgcgatatttcccactcatcagctgagcgtatcatcacaccagatacgaccattttgattgactacatgctcaaccgttttggaaatatcgtcaagaacttgacagtcttcccagaaaatatgatccgaaacatgaactcgacttttggtcttatctttagccaacgggctatgttgacattgattgaaaaaggcatgacccgtgagcaagcctatgacttggtgcaaccaaaaacagcctactcttgggacaaccaagtagactttaaaccacttcttgaggcagattcagaagtaacatcacgtctcactcaagaagaaatcgatgaaatcttcaacccagtttattacaccaaacgagtggatgatatctttgaacgtcttggactaggtgattaa

SEQ ID NO: 2379 - DNA, 228 bp, Streptococcus pneumoniae
atgatacaaattatcgttaatacatttattgaaaaggataggactggagcagttgttgaagtgttgtatgccagtgctgaccaagataaggtacaagctaaatatgaagaactagctgcacaataccccgaaaattatttagctatctatgatgtaccgctggatacggatttgaatacactagatcattacccgtctgtgtttattgaaaaagaggagtttgagtag

SEQ ID NO: 2380 - DNA, 1152 bp, Streptococcus pneumoniae
ttgcggatgcacttgccaactttgctgaagaacaaggaaaaatcgcagaggagtcgtcaaatgagctcatctaaaacaatcggaattatcggtggcggtcaactgggtcagatgatggccatttctgctatctacatgggccacaaggttatcgcgctggatcctgcggcggattgcccggcctctcgcgtggcggaaatcattgtggcaccttataacgatgtggacgccctccgtcagttggcagaccgttgcgatgtcctcacttatgagtttgaaaatgtcgacgctgacggtttggatgccgttatcaaggatggacaactccctcaaggaacagatctgctccgcatttcgcaaaatcgtatttttgaaaaggactttttgtcaaacaaggctcaagtcactgtggcaccctacaaggtcgtgacttctagcctagacttggcagatatcgacttgtcgaaaaactatgtcctcaagactgcgactggtggctacgatggtcatggacaaaaggttattcgttcagaagcagacttggaagcagcctatgcgctagcagactcagcagactgcgtcttggaagaatttgtcaactttgaccttgagatttctgtcatcgtgtcaggaaatggcaaggaggtgacgtttttcccagttcaggaaaatatccaccgcaacaatatcctgtctaagaccatcgtaccagcccgcatttctgaaagtctagtagacaaggctaaagctatggcagtgcgaatcgcagaacaactcaacttgtctggaactctctgtgtggaaatgtttgcgactgatgatgacgttattgtcaatgaaatcgccccacgaccacataactctgggcactattctattgaagcctgtgatttctctcagtttgacacccatattctcggtgttctcggagcaccattaccagtcatcaaactccatgcgccagccgttatgcttaatgtcctcggtcagcatgtcgaggctgctgagcaatatgtgacagaaaattcaagcgcccacctccacatgtatggtaaaatagaagcgaagcacaaccgcaagatgggacatgtgaccttgtttagtgatgtaccggatagtgtggatgagcttggggaagggattgatttttag

SEQ ID NO: 2381 - DNA, 465 bp, Streptococcus pneumoniae
atgggctcaaaatccgactgggcaaccatgcaaaaaacagcagaagtcctagaccgcttcggtgtagcctacgaaaagaaagttgtttccgcacaccgtacaccagacctcatgttcaaacatgcagaagaagcccgtagtcgtggcatcaagatcatcatcgcaggtgctggtggcgcagcgcatttgccaggcatggtagctgccaaaacaacccttccagtcattggtgtgccagtcaagtctcgtgctcttagtggagtggattcactctattctatcgttcagatgccgggtggggtgcctgttgcgaccatggctatcggtgaagctggagcgactaacgcagctctctttgccctccgtctcctctctgtagaagataagtccattgcggatgcacttgccaactttgctgaagaacaaggaaaaatcgcagaggagtcgtcaaatgagctcatctaa

SEQ ID NO: 2382 - DNA, 1263 bp, Streptococcus pneumoniae
atgaaactgcttgttgtcggttctggtggtcgtgagcatgcgattgctaaaaagttacttgaatcaaaagacgtggaaaaagtctttgtagctcctgggaatgatgggatgactctggatggtttggaattggtaaatatctctatttccgaacattctaaattgattgacttcgcaaagaccaatgatgttgcttggacctttatcggtccagatgatgcccttgctgctggcatcgtggatgattttaaccaagctggacttaaggcctttggtccgactagggctgcagcggagctggagtggtccaaggatttcgccaaggaaatcatggtcaaatacggcgttccgacagcaatatatggcacattttcagatttcgaggaagccaaggcctatatcgaaaagcatggtgcgcctatcgtagtcaaggcggatggcttggcacttgggaagggtgtcgtcgttgctgagacggttgagcaagcggtcgaagccgctcatgagatgcttttggacaataaatttggtgactcaggtgcgcgcgtggttattgaggaattccttgaaggagaggaattttcactctttgcctttgtcaatggtgataagttctacatcatgccaacggctcaggaccacaaacgtgcctatgatggcgacaaagggcctaacacgggtggtatgggtgcctatgcgccagttccacacttaccacagagtgtagttgatacagcggttgacaccattgtcaagccagttctagaaggggtgattaaagaaggtcgtccttatctgggagttctttacgcagggcttatcctgacagctgatggaccgaaggtcatcgagttcaacgctcggttcggagatccagaaactcagcttatcttgcctcgcttaacctctgactttgctcaaaatatcacagatatcctggatagcaaggagccaaatatcacgtggacggacaagggtgtgactctgggtgtggttgtcgcatccaagggctacccgctagattattcaaagggtgttgagttgccagtcaaaaccgatggcgacatcattacctactatgcaggggctaagtttgcggaaaatagcagagcactgctctcaaacggcggacgagtttatatgctcgttaccacagcagataccgtcaaagaagcccaagccagcatctaccaagaactatcccaacaaaaaatagaaggactcttctaccgaacagatatcggaagcaaggcaattaagtaa

SEQ ID NO: 2383 - DNA, 681 bp, Streptococcus pneumoniae
ttggcttcctcgaaatctgaaaatgtgccatatattgctgtcggaacgccgtatttgaccatgatttccttggcgaaatccttggaccactccagctccgctgcagccctagtcggaccaaaggccttaagtccagcttggttaaaatcatccacgatgccagcagcaagggcatcatctggaccgataaaggtccaagcaacatcattggtctttgcgaagtcaatcaatttagaatgttcggaaatagagatatttaccaattccaaaccatccagagtcatcccatcattcccaggagctacaaagactttttccacgtcttttgattcaagtaactttttagcaatcgcatgctcacgaccaccagaaccgacaacaagcagtttcattcctcaacctcttttgcgaattatttaccaacattatatcaaaaaagttcgttttaatcttgtttcagttagcattttaagccaaaaaaggaaagaaactgttttcttcccttttatcttcttaatgtctaaaatgtctcacacctgtaaagaccatagtcaagccgtatttatccgctgcttcgatggattcttggtcacggacagagccaccgggctggatgatggccttaattcctgctttggcgatttcttccacgttatccgcaaatgggaagaaggcatctga

SEQ ID NO: 2384 - DNA, 1569 bp, Streptococcus pneumoniae
atgattaaaaaggagaatataatgactaaacgcgtcttaatcagcgtctcagacaaagcgggcattgttgaatttgcccaagaactcaaaaaacttggttgggagattatctcaacaggtggaactaaggttgcccttgataatgctggggtggataccattgctatcgatgatgtgactggtttcccagaaatgatggacggtcgtgtgaagaccctccacccaaatatccacggagggcttctcgctcgtcgtgacttggatagccacttggaagcggctaaggacaacaagattgagctcattgaccttgtggtggtcaacctttacccatttaaggaaactatccttaaaccagatgtgacttatgctgatgcagttgaaaatatcgatattggtgggccgtctatgcttcgttcagcagcgaaaaatcatgccagtgttacagttgtggtagatcctgctgactacgctgtggttttggacgaattggcagcaaacggcgaaacctcttatgaaactcgccaacgtttagcagccaaagtatttcgtcacacagcggcttatgacgccttgattgcagaatacttcacagctcaagtgggtgaaagcaagcctgaaaaactcactttgacttatgacctcaagcaaccaatgcgttacggtgagaatcctcaacaagacgcggacttttaccagaaagctttgcctacagattactctattgcttcagccaaacagctcaacgggaaagaattgtcatttaataatatccgtgatgcagatgctgctatccgtatcatccgtgacttcaaagatagtccaaccgttgtggctctcaaacacatgaatccatgtggaattggtcaagctgatgacatcgagactgcttgggactacgcttatgagtctgacccagtatctatctttggtgggattgtcgtcctcaaccgtgaggtggatgctgcgacagctgagaagatgcacggcgttttcctcgaaatcatcattgcaccaagctatacggatgaagcgctagccattttgatcaataaaaagaaaaacttgcgtatccttgccttgccatttaatgctcaagaggctagcgaagtggaagcagaatacacaggtgtagtcggtggacttctcgtgcaaaatcaagacgtggtcaaggaaagcccagctgactggcaagtggtgaccaaacgtcagccaactgagacagaagcgactgctcttgagttcgcttggaaggctatcaagtacgtcaaatcaaatggtattatcgtgaccaacgaccacatgacacttggtgttggtccaggtcaaaccaaccgtgtggcttctgttcgccttgccattgaccaagccaaagatcgtctggacggggcggtccttgcttcagatgccttcttcccatttgcggataacgtggaagaaatcgccaaagcaggaattaaggccatcatccagcccggtggctctgtccgtgaccaagaatccatcgaagcagcggataaatacggcttgactatggtctttacaggtgtgagacattttagacattaa

SEQ ID NO: 2385 - DNA, 510 bp, Streptococcus pneumoniae
atgttagaatctaaaaaaacaactcgatatgtattttatgtctatctgatgttattaacttggggaatcttatttaagtttgaaacaaatcctgaatttatagcatttttcttagctccaaggtatatcaattggattccattttcagaaccactaatagtcgatggaaaaattgtttttgctgaaatgttatttaatctgattttctttattccattaggtgtttgtttccctttgataaaaactaatttatctagtttaagaatagtcgggacaggtttcttgattagtttattgtttgagtgcttacagtatattttagcaataggtataacagatataacggatttgactttaaatacgctaggtgtctgtgtaggcttactgatttatcaaatttttataagagtgttcaaatcacagactagaaaatggatcaatatcttaggtatgcttagccttggttttgcttatcttgttttactgttactgcatttaattggtgtttaa

SEQ ID NO: 2386 - DNA, 348 bp, Streptococcus pneumoniae
atcagtaagcctacacagacacctagcgtatttaaagtcaaatccgttatatctgttatacctattgctaaaatatactgtaagcactcaaacaataaactaatcaagaaacctgtcccgactattcttaaactagataaattagtttttatcaaagggaaacaaacacctaatggaataaagaaaatcagattaaataacatttcagcaaaaacaatttttccatcgactattagtggttctgaaaatggaatccaattgatataccttggagctaagaaaaatgctataaattcaggatttgtttcaaacttaaataagattccccaagttaataacatcagatag

SEQ ID NO: 2387 - DNA, 546 bp, Streptococcus pneumoniae
atgaaaaaaatagcggtttttgcctctggtaatggctcaaattttcaggtgattgccgaagaatttccagtggagtttgtcttttcagaccatcgtgatgcctatgtgcttgagcgtgcaaagcagctcggcgttctgtcctatgcttttgaactcaaggagtttgagagcaagacagactacgaagcagcccttgtcgaactcttggaagaacaccagattgacttggtttgcctagcaggctacataaaaatcgttggaccaaccttattgtcggcttatgaaggtcggattgtcaacattcatccagcctacttgccagaatttccaggagctcatgggattgaggatgcttggaatgctggcgtgggtcagtctggtgtgaccattcactgggtggattcgggtgtggatacaggccaggtcatcaaacaggttcgtgtgccacgactagctgatgataccattgacagatttgaagctcgcatccatgaagcagagtacaggttgtatccggaagtagtgaaggctctatttacagattga

SEQ ID NO: 2388 - DNA, 1023 bp, Streptococcus pneumoniae
atgacaaataaaaatgcatatgcccagtcgggtgtggatgttgaagcgggttatgaagttgttgaacggattaaaaagcacgtggcccgtacggagcgtgcaggtgtcatgggagctcttggtggctttggtggtatgtttgacctttccaagactggggttaaagaacccgtcttgatttcagggactgacggtgtcggaaccaagctcatgttggctatcaagtacgacaagcacgataccatcgggcaggactgtgtggccatgtgtgtcaacgacatcattgctgcaggtgcggaacccctctattttctcgactacgtagcgacagggaagaatgaaccagctaagctagaacaagtggttgctggtgtggcagaaggttgtgtgcaggctggtgctgccctcatcggtggggaaacggctgaaatgccgggcatgtacggcgaagacgactatgacttggctggttttgcggtcggtgtggctgaaaaatctcaaatcattgacggttcaaaggtggtagagggagatgttcttctcggacttgcttcaagtgggattcactcaaatggttactctttggttcgtcgtgtctttgcggattacacaggtgaggaagtcctaccagaattggaaggcaagaaacttaaggaagttctacttgagccgactcgtatctatgtcaaggctgtcttgccgctcatcaaagaagagttggtcaacggcattgcccacatcacaggtggtggctttatcgaaaatgtccctcgtatgtttgcagatgacctagctgctgaaattgatgaaagcaaagttccagtgcttccaattttcaaagcccttgaaaaatatggtcagattaaacacgaagaaatgtttgaaatcttcaatatgggtgtgggacttatgttggcggtcagccctgaaaatgtagagcgtgtaaaagaattgttggatgaagcagtctatgaaattggtcgcatcgtcaagaaagaaaacgaaagtgtcattatcaaatga

SEQ ID NO: 2389 - DNA, 1443 bp, Streptococcus pneumoniae
atgacatacgaagtaaaatctcttaatgaagaatgtggtgttttcggtatttggggacatccagatgctgctaagttgacctattttggactccacagtcttcaacaccgtggtcaggagggggcaggaatcctctccaacgatcaaggacaactgaagcgccatcgtgacatggggcttttatcagaagttttcagaaatccagctaatttggataaattgacaggagctggtgcgattgggcatgtgcgttatgcgactgctggcgaagcttctgtagataacatccagcccttcctcttccgttttcacgatatgcagtttggcttggctcataatggaaatctgaccaatgcagcctctctcaagaaagaattggaacaaagaggagcaattttcagcgcgacttcggactctgaaatcttggctcacctcattcgtcgcagtcataatcctagcctgatgggcaaaatcaaggaagcgctcagccttgtcaaaggtggttttgcctatatcttgctgtttgagaacaagttgattgcggctcttgaccctaatggctttcgtccgctttctatcgggaaaatggccaacggagcggtggttgtttcctctgaaacctgtgcttttgaggtcattggtgccgagtggattcgtgatttgaagccaggtgagattgtgatcattgatgacgagggcattcagtatgacagctatacagatgatacccagttggcgatttgttctatggagtatatctactttgcccgccctgattctaatatccacggtgtcaatgtccatacggcacgtaagagaatgggagcgcaattggcgcgagaatttaagcatgaggcagatattgtagttggtgtgcccaattcttccctaagcgcggctatgggatttgcggaagaatcaggcttaccaaatgaaatgggtctgatcaaaaaccaatacacccagcgaacttttatccaaccgactcaagaattgcgggagcaaggagtgcggatgaaactgtctgctgtttcgggtgttgtcaaaggcaaacgtgtggtcatggtggatgattccattgtacgtggaacaacctctcgtcgtatcgttcagctcttgaaagaagcgggtgcgactgaggttcacgttgccattggaagtcctgcactagcgtatccatgtttctacgggattgatatccagacccgtcaggagctgattgcagccaatcatacggtcgaagaaactcgccaaatcattggtgcggacagtctgacttatctttcaattgatagcttgattgagtcgattggtatcgaaacagatgcgccgaacggtggtctctgtgtcgcttactttgacggtgactacccaacgcctctctatgactacgaagaagactatcgtagaagtttggaagaaaagaccagtttttacaagtag

SEQ ID NO: 2390 - DNA, 3729 bp, Streptococcus pneumoniae
ttgatggataaacgtatttttgttgaaaaaaaggctgattttcaggtcaagtcagagagtttggttagagagctccagcacaacttgggactgtcaagcttgaaaagtattcgtattgtgcaagtatatgatgtatttgacttggctgaggacttgtttgcacctgcagagaagcacattttctctgagcagggaaccgaccatgttttagatgaagtatctgtgcaggcggatcttgctaactatgctttctttgccattgaaagtctgccagggcagtttgaccagcgtgcagcttcgtcacaggaagccttgcttttgttgggaagttcgagtgacgtgacagtcaacacagcccaactttacttggtgaataaagatattgatgcgactgagttggaagctgtcaaaaactacctgctcaatccagttgattctcgtttcaaggatatcacgacagggattgccaagcaggagttttcagagtcagacaagaccattccaaaattgactttctttgaaagctatacagcagaagactttgctcgctacaaggccgagcaagggatggccatggaagtggatgatttgctctttatccaagactactttaagtcaatcgggcgcgtgccaactgagactgaactcaaggttttggacacttactggtctgaccactgccgtcatacgacttttgagacagagttgaaacacatcgacttttcagcttctaaatttcaaaagcaattgcagtcaacctatgacaagtatattgccatgcgcgaggagttaggtcggtctgaaaaaccacaaaccttgatggatatggcgactattttcggtcgttatgagcgtgctaacggacgattggatgatatggaagtctctgacgaaatcaatgcctgctcagttgaaattgaagtggatgttgatggtgtcaaggaaccttggctcctcatgtttaaaaatgaaacccacaaccatccaacagaaattgagccatttggtggagcggctacctgtatcggtggagctattcgtgatccgttgtcaggccgttcctatgtttaccaagccatgcgtatttcaggtgctggtgatattacagcaccgatttcggaaactcgtgctgggaaattgccacaacaagtcatttctaaaacagcagctcatggttattcttcatatggtaaccagattgggcttgccacaacctacgttcgtgaatacttccacccaggctttgtagctaaacgtatggaacttggtgccgttgttggtgcggctcccaagggcaatgttgtccgtgaaaaacctgaagcaggtgatgtgatcatccttctcggaggcaaaacaggtcgtgatggtgtcggtggtgcgacgggctcttctaaggttcaaacagttgagtctgtagagactgctggtgctgaggttcaaaaaggaaatgccatcgaagaacgcaagattcagcgcctcttccgtaatggcaatgtcactcgtctgatcaagaagtccaatgactttggggcaggcggcgtctgtgtggctatcggtgaattggcagacggtcttgaaatcgacctcaacaaggtgcctcttaaataccagggcttgaatggtacagaaattgccatctctgaatcacaagaacggatggcggtcgtggttcgtcctgaagatgtggatgccttcgttgccgaatgtaacaaagaaaatattgatgctgttgtggtggcgacagtaactgaaaaaccaaatcttgtcatgcactggaatggtgagacaatcgttgacttggagcgtcgtttccttgacaccaatggtgtgcgcgtggttgtcgatgccaaagttgtggacaaggatgtcaaactcccagaagagcgtcaaacatctgctgaaacactggaatcagatacccttacggttctatctgacctcaaccatgcaagtcaaaaaggattacagactgtctttgactgctctgttggacgctcaacggttaatcacccacttggtggtcgttaccaactcacaccaactgaggcatctgtgcagaaattgccagttcaacacggtgtgactcatactgcgtcggtcattgctcaaggtttcaacccatatgtagctgaatggtctccataccacggtgctgcttacgcggttatcgaagcaactgctcgtttggtggctgctggtgccaactggtctaaggctcgtttctcttaccaagaatatttcgagcggatggacaagcaagcagagcgttttggtcagccagtagccgcccttctaggctctattgaagctcagattcaacttggcttgccatctatcggtggtaaggactccatgtctggtacctttgaagaattgactgttccgccaaccttggttgcctttggggtgacgacggcagatagccgtaaggtgctctctccagaatttaaagctgttggggaaaatatctactacatcccaggtcaagccctctctgcagagattgattttgacttgattaagaaaaattttgctcagtttgaagcaagccaagctgaccataaagtgacatctgcatcagctgtcaaatacggtggtgtagttgaaagtttggctcttgctacctttggaaactatattggtgcagaggtgaccttgcctgaacttaaaacagctttgacagctcaattaggcggctttgtcttcacatctcctgaagaaattgctggagtagagaagattggacaaacgaaagcagactttacactgactgtcaacggtgtgaagctagatggacacaagcttgacagtgcatttcaagggacattggaagaagtttacccaacagaatttacccaagcgaaagaactagaagaagtaccagctgtggcatcagatgttgtgattaaagccaaagaaaaggttgaaaaacctgtggtttacatcccagtctttccaggaaccaactcagaatatgattcagctaaggccttcgaaaaagaaggtgcagaggtcaatttggtgccattcgtgaccttgaatgaagaagctattgtcaagtcagttgaaactatggttgacaatatcgacaagactaatattctcttctttgccggtggattctcggctgcggatgaaccagatggttcagctaagtttatcgtcaatatcctgcttaatgaaaaagtgcgtgtggctattgatagctttatcgcccgtggtggcttgattatcggtatttgtaatggattccaagccttagtcaaatcgggtctcctaccatacggaaactttgaagatgctaacagtactagtccaaccctcttctacaatgatgccaaccaacacgtggccaagatggtggaaactcgcattgccaataccaactcaccatggttggctggtgtgcaagtgggcgatatccacgctattcctgtttcgcacggtgaagggaagtttgtcgtgacggctgaggaatttgcagagctccgtgacaatggacaaattttcagccaatacgttgactttaacggtaaaccaagtatggattctaagtacaatccgaatggttctgtccatgccatcgaaggaattaccagcaagaatggtcaaatcatcggtaagatgggccactcagaacgttatgaggatggtcttttccaaaatatcccaggcaataaagaccaacacctgttcgcatcagcggttaaacatttcactggaaaataa

SEQ ID NO: 2391 - DNA, 135 bp, Streptococcus pneumoniae
ttgtgggtttcatttttaaacatgaggagccaaggttccttgacaccatcaacatccacttcaatttcaactgagcaggcattgatttcgtcagagacttccatatcatccaatcgtccgttagcacgctcataa

SEQ ID NO: 2392 - DNA, 612 bp, Streptococcus pneumoniae
ttgattattcaaaaattgaaggaatcgaaaatatcggaccagagtttctcaaccagtcctttgacccaggtaataaattctccatcccttacttctggggcgactcactttgtggagaaactttcagacacggaacaactcaataaaaaggttaagattattcctttggaagtcgtgctccgcaactatactgctggttccttttcaaaacgttttggtgtggatgagggaatcgccttggagactccgattgtcgaattttactacaaaaatgatgatttggatgatccatttatcaatgatgagcatgtgaaattcctacagattgcgggtgaccagcagattgcctacttgaaggaagaaacgcgtcgtatcaatgaactattgaaagtctggtttactgagattgggcttaaattgattgactttaagctagagttcggttttgacaaggatggcaagattatcttggcagacgaattttcaccagataactgccgcttgtgggacgctgatggcaaccacatggataaggatgttttccgtagaggattgggagaactaaccgacgtttatgagattgtttgggaaaagttgcaggaattgaaataa

SEQ ID NO: 2393 - DNA, 309 bp, Streptococcus pneumoniae
  unsure (8),(10),(11),(12),(13),(14): n at each above location is unknown.
ttctgtgntnnnnnccggctcactcgggtgaagaagggcgatgtttttgactccaacgaagccatgtccactaagataaagcagggtggaacgacctacgatattgccattccaagtgaatacatgattaacaagatgaaggacgaagacctcttggttccgcttgattattcaaaaattgaaggaatcgaaaatatcggaccagagtttctcaaccagtcctttgacccaggtaataaattctccatcccttacttctggggcgactcactttgtggagaaactttcagacacggaacaactcaataa

SEQ ID NO: 2394 - DNA, 1293 bp, Streptococcus pneumoniae; identical to SEQ ID NO: 1215

SEQ ID NO: 2395 - DNA, 258 bp, Streptococcus pneumoniae
ttgttccatatgaatctttctaatgatggttttgtcgcttttcattataggtcatatgggactttttttctacacaaaaataggctccataatatctatagtggatttacccactacaaatattatagagccttttttctacacaaaaataggctccataatatctataggggatttacccactacaaatattatagagcccaaaatcctttgtttactaaacaagggatttttcttttgtctctgctccttttttga

SEQ ID NO: 2396 - DNA, 498 bp, Streptococcus pneumoniae
atgttaaaatcagaaaaacaatcacgttatcaaatgttaaatgaagaattgtccttcctattggaaggcgaaaccaatgttttggctaatctttccaacgccagtgctctcataaaatcacgttttcctaataccgtatttgcaggcttttatttgttcgatggaaaggaattggttttaggccccttccaaggaggtgtttcctgcatccgtattgcactaggcaagggtgtttgtggtgaggcagctcactttcaggaaactgttattgttggagatgtgacgacctatctcaactatatttcttgtgatagtctagctaaaagtgaaattgtggtgccgatgatgaagaatggtcagttacttggagttctggatctggattcttcagagattgaggattacgatgctatggatcgagattatttggaacaatttgtcgctattttgcttgaaaagacagcatgggactttacgatgtttgaggaaaaatcttaa

SEQ ID NO: 2397 - DNA, 1656 bp, Streptococcus pneumoniae
atgtatcaagcactttatcgaaaatatagaagtcaaaacttctcccagttagttggtcaagaagttgtggctaagactcttaaacaagcggtggagcaagagaaaataagtcacgcttatcttttttctggtcctcgtggaacgggaaaaaccagtgttgctaaaatctttgccaaggctatgaactgtcccaatcaagtgggtggcgaaccttgcaataactgctatatttgtcaagcagtgacggacggtagtttagaagatgtcattgaaatggatgcagcttctaataatggggtagatgaaattcgcgaaattcgtgataaatctacctatgcgcctagccttgctcgttataaggtttatatcatagatgaggttcacatgctgtctacaggggcttttaatgccctcctaaagacgctggaagaaccaacacagaatgtagtctttattttggccactactgaattgcacaagattcctgctactattctatcccgtgtgcaacgttttgagtttaaatcaattaagacacaggatattaaggaacatattcactatatcttagaaaaagaaaatatcagttctgaaccagaggctgtggaaatcattgccagacgggcggaaggtggaatgcgggacgccttgtctattttggatcaagccctgagtttgacacagggaaatgagctgacgactgctatctctgaagaaattactggcaccattagcctatcagccttggatgattatgtggcggccttgtctcaacaggatgttcccaaagctttgtcttgcttgaatcttctttttgacaatggtaagagcatgactcgttttgtgaccgatcttttgcactatttaagagacttgttaattgttcaaacagggggagaaaatactcatcatagttcagtctttgtagaaaatttggcacttcctcaaaaaaatctgtttgaaatgattcgcttagcaacagtgaatttagcagatattaagtctagtttgcagcccaagatttatgctgaaatgatgaccgtccgtttggcggaaatcaagcccgaaccagctctatcaggagcggttgaaaatgaaattgctacgctgagacaggaagttgcccgtctcaaacaagagctttctaatgcaggtgcggttcctaaacaagttgcaccagctcctagtcgaccagctacgggcaaaacagtctatcgtgtcgatcgcaataaagtgcaatctatcttacaagaggccgtcgaaaatcctgatttagcacgtcaaaatctaattcgtttgcagaatgcctggggagaggtaattgaaagtctaggtgggccggacaaggctctgctagttggttctcaaccggttgctgccaatgaacaccatgctattcttgcttttgagtctaacttcaatgctggtcaaactatgaaacgagacaatctcaataccatgtttggtaatatcctcagtcaggcggcaggtttttcacctgagattttagctatttccatggaggaatggaaagaagttcgcgcagccttttcagccaaagccaaatcttctcaaactgaaaaagaagtagaagaaagcctgattccagaaggatttgaatttttggctgataaagtgaaggtagaggaagactaa

SEQ ID NO: 2398 - DNA, 195 bp, Streptococcus pneumoniae
atgaataaacaacaatttattattatggcgctatttacagctgctgagacctattttttcaatgaagcctggatgactggccgctatattatggcagccttttgggcaattttactctttagaaatttccgagtcagttatgtgatgggcaaaatcgttgatgtcatcgatcagcattttaataggaaagactag

SEQ ID NO: 2399 - DNA, 771 bp, Streptococcus pneumoniae
atgtcagtattagagatcacagatcttcatgttgagattgaaggaaaagaaattttaaaaggggttaacctgaccctgaaaacaggagaaattgccgctatcatgggaccaaatggtacaggtaaatcgactctttctgccgctatcatgggaaatccaaactatgaagtaactaaaggtgaagttttgtttgatggcgtaaacatccttgagttggaagtggatgagcgtgcgcgtatgggacttttccttgctatgcaatacccatcagaaatccctggaattaccaatgctgagtttcttcgtgccgctatgaatgcgggtaaagaagatgatgagaagatttcagttcgtgagtttattactaagctagatgaaaaaatggaattgctcaacatgaaagaagaaatggcagagcgttacctcaacgaaggcttctctggtggtgagaaaaaacgcaatgaaattcttcaacttttgatgttggagccaacatttgctcttttggatgagattgactcaggtcttgatattgacgctcttaaagttgtgtctaaaggtgtcaatgccatgcgtggtgaaggttttggtgctatgatcattactcactaccaacgtcttttgaactatatcacacctgatgtggtacacgtgatgatggaaggtcgtgttgtcctttctggtggtccagaattggctgcgcgtttggaacgtgaaggatacgcaaaactagctgaagaacttggctacgactacaaggaagaattgtaa

SEQ ID NO: 2400 - DNA, 1260 bp, Streptococcus pneumoniae
atgactagagaaaatattaaacttttttcagaaatgcacgctgaaccaagctggttggctgatctccgtcaaaaagcttttgacaagattgagactttggaattaccagttattgagcgtgtcaaattccaccgttggaatctgggtgatggaacgattacagaaaatgagccatcagcaaatgttccagatttcacagctttagatcatcacttgaagttggtgcaagtaggaactcaaactgttttcgaacaaactccagttgagttagctgaacagggtgttgtcttcacagactttcactcagctttagaagaaattccagagctgatcgaagaattcttcatgtcatctgttaagtatgatgatgacaagttggcggcttaccacacagcttactttaacagtggtgctgtactctatattccagataacgtagaaatcacagagccaattgaaggaattttctaccaagatagcgatagcaatgtgccgtttaacaagcatattatgattatcgctggtaaaaattctaagattagttatctggagcgtttagagtcacgcggtgaaggaagtgacaaagtaactgccaatatcacagtggaagtgattgcacgttctggtgcgcaagtcaagtttgctgctatcgaccgtctaggtgaaaacgtcactgcctacattagccgtcgtggtaaattaggcaacgatgcaagtattgactgggctatcggtgtcatgaacgaaggaaatgtcgttgctgattttgatagtgacttgattggtaatggtagccatgctgacctcaaggttgtagctctttcaagtggtcgtcaggtacaagggattgatactcgtgtaactaactatggctgcaactctatcggaaatatcctacaacatggggttatccttgaaaaagcaactttgactttcaatggtatcggccacatcatcaagggtgctaagggagcagatgcgcaacaagagagccgtgttctcatgctttcagaccaagcgcgttcagatgctaacccaattcttttgattgatgaaaatgatgtcactgcaggacacgcagcgtctatcggacaagttgatccagaagacatgtattacctcatgagtcgtggattggataaggcaactgcagagcgtttggttgttcgtggtttccttggatctgttatcgtggagattccagtcaaggaagttcgtgatgaaatgattgcaactatcgaagagaaattgtcaaaacgc

SEQ ID NO: 2401 - DNA, 1227 bp, Streptococcus pneumoniae
atgttagatgtagaagcgattcgcaaggattttccaattttagatcagattgtcaatgatgaacctctggtctatctggacaatgctgcgacgacacaaaaaccactagtagttctgaaagctattaacagttactatgagcaggacaatgccaatgttcaccgtggtgtccataccttagcggaacgagcgacagcttcttatgaagctgctcgtgaaaccattcgtaagtttattaatgcaggctctacaaaggaagttctctttaccagaggaacgacaaccagccttaactgggtggcacgctttgctgaggaaattctcgctgagggagaccgggtcttgatttcagtaatggaacaccattctaatatcattccatggcaggaagcttgtcgaaagactggagcagagcttgtctatgtctatcttaaagacggtgccttggatatggaggatttgcgagctaaattgactgataaggttaaatttgtttccctagctcatgcctccaatgttcttggtgtggtcaatccgatcaaggaaatcactcaattagcccaccaagttggggcaattatggtagtggatggtgctcaatctacacctcatatgaagattgatgtccaggacttggatctggactttttcgccttttcgggtcacaagatggctggtccgactggtatcggtgtcctttacggcaaagaaaagtatcttgagcaaatgtctccagtagaatttggcggcgagatgattgattttgtctacgagcaatttgctagttggaaggaattgccttggaaatttgaggctggaacgccaaatatggcaggagctattggacttgcgactgcagttgattatctggaaaagattggtatggatgccgttgaagctcatgaacaggaattgattgcgtacgtctatccaaaactgcaggcaattgagggattgaccatttacggttctcaggatttggctcaacgttcgggtgttattgcctttaacctaggtgatctccatcctcacgatcttgcgacggctctggattatgaaggagtggctgttcgtgctggtcaccattgtgcgcaacccttgcttcagtatttggaagtcccagcaacagctcgtgcaagtttttatatctacaataccaaggcagattgcgacaaactagtcgatgccctacaaaagacaaaggagtttttcaatggcactttctaa

SEQ ID NO: 2402 - DNA, 471 bp, Streptococcus pneumoniae
atgccctacaaaagacaaaggagtttttcaatggcactttctaaactagatagcctttatatggcagtggtagcagaccattcgaaaaatccacatcaccaagggaagttagaagatgctgagcaaaccagtctcaacaatccgacttgtggggatgtcatcaacctctctgtcaagtttgatgcagaggaccgtttggaagatattgcttttctaaattcaggatgcacgatttcaactgcttctgctagtatgatgacagatgccgttttaggaaaaaccaaacaagaaattttagaactggcgactattttttctgaaatggttcaagggcaaaaagatgagcgtcaaggccaacttggagacgcggcattcttgtcaggtgttgccaaattccctcaaagaatcaagtgtgcaaccctagcttggaatgcccttaagaaaacaattgaaaatcaagaaaaacagtaa

SEQ ID NO: 2403 - DNA, 1410 bp, Streptococcus pneumoniae
atggctgaagaaagagtagaaccaaaaccaattgaccttggtgaatataaatttggtttccatgacgatgtagagcctgtcttatcgacaggaaaaggactcaacgaaggtgttattcgtgaattatctgctgctaagggtgagcctgagtggatgttggagttccgtttgaagtcttatgaaaccttcaaaaaaatgcccatgcaaacttggggagcagacttgtcagagattgactttgatgacttaatctactaccaaaaaccatctgacaaaccagcccgttcttgggatgatgtacctgaaaagattaaagaaacctttgaacgtatcgggattccagaagctgaacgtgcttatttagcaggggcttctgcccagtacgagtcagaagtggtttaccacaacatgaaggaagagttccaaaaattaggtattatctttacagatacagattccgcactcaaggaatacccagacttatttaaacaatactttgcgaagttggtaccgccgacagataacaagttggcagccctcaactcagcagtatggtcgggtggaacttttatctacgtgccaaaaggtgtcaaggtagatattccacttcaaacttatttccgtatcaataacgaaaatataggtcagttcgaacgtaccttgattatcgttgatgagggagcaagcgtccactacgtagaaggatgtacagcaccaacatattcaagcaatagcttacacgctgccattgtagaaatttttgctttggacggagcttatatgcgttatacaactatccaaaactggtctgataacgtctataacttggtaacaaagcgtgctaaggctcaaaaggatgccactgttgagtggattgatggaaacttgggtgccaaaacgactatgaaatatccatctgtttaccttgatggagaaggagcgcgtggtaccatgctctctatcgcctttgctaatgcagggcaacaccaagacacgggtgctaagatgattcacaatgctccacataccagctcgtctattgtgtctaaatccatcgctaaaggtggaggaaaggttgactaccgtggacaagtcacctttaacaagaactctaagaaatctgtttcccacattgaatgtgataccattatcatggatgacttgtcagcatcagatactattccatttaatgaaattcacaactcgcaagtggctttggaacacgaagccaaagtatctaagatttcagaagagcaattgtattatctcatgagccgtggattgtcagaatctgaggcaactgaaatgattgtcatgggatttgtagaaccctttacaaaagaacttccaatggaatacgcagttgagctgaaccgcttgattagctatgaaatggagggatcagttgga

SEQ ID NO: 2404 - DNA, 195 bp, Streptococcus pneumoniae
gtaaatctaatactcaaaatcaaagaacaaactaggaagctagccgcaggttgctcaaaacactgttttgaggttgtagatgaaactgacgaagtcagtaaccatacatacggtaaggcgatgctgacgtggcttgaagagattttcgaagagtataaaatcaaattttatccaactgatccctccatttcatag

SEQ ID NO: 2405 - DNA, 186 bp, Streptococcus pneumoniae
aatttgattttatactcttcgaaaatctcttcaagccacgtcagcatcgccttaccgtatgtatggttactgacttcgtcagtttcatctacaacctcaaaacagtgttttgagcaacctgcggctagcttcctagtttgttctttgattttgagtattagatttactcaaaatcaaggattttga

SEQ ID NO: 2406 - DNA, 1242 bp, Streptococcus pneumoniae
atgaaaaaaatatttttaactttgttaactgtctctcttttagggggtgcttctactgctgttgctcaagattttaccattgccgctaaacatgcgattgctgttgaggcaaatactggtaaaattctctatgagaaggatgcaacgcaacctgtcgaaattgcttccataacaaaattgattactgtttatctggtctatgaagctttggaaaacggaagtattaccctctccactcctgtagatatttctgattatccttatcaattgacgacaaattctgaagccagtaatattcctatggaggcccgtaattatactgtcgaagagttgcttgaagcaactctggtatctagtgccaacagcgccgctattgccctagctgagaaaattgctggctcagaaaaagatttcgtcgatatgatgcgggcaaaactcttggaatggggaattcaggatgccactgttgtcaatacgacaggtcttaacaatgaaactctaggggataacatttacccaggttctaaaaaagatgaggaaaataagcttagtgcttatgatgtcgctatcgttgctcgcaacctcatcaaaaaatacccacaagtcttagaaatcaccaaaaaaccttcttctacttttgctgggatgacaatcacttcaaccaactacatgttagaaggtatgcctgcttaccgtggtggttttgatgggctaaaaacaggaacaacagataaggctggagagtcttttgttggtactactgtcgaaaaaggcatgagagtcatcacagttgttttaaatgcagatcatcaagacaataatccttacgctcgatttacagctacatcttccctaatggattatatttcttctacatttacacttcgcaaaatcgttcaacaaggcgatgcctatcaagatagcaaagcccctgtacaagatggaaaagaagatacagtaactgcagtggctccagaggatatctatctaatcgaacagattgggaatcaatcttcccaatctgttcaattcacacctgattccaaagcaatcccagcaccacttgaagctggaacagtggttggccatttgacttataaagacaaggacttgattggtcaaggttacatcaccacagagcgccctagtttcgaaatggtagcagacaagaaaattgaaaaagccttcttcttaaaagtttggtggaatcagtttgtccgctttgttaacgagaaattataa

SEQ ID NO: 2407 - DNA, 1110 bp, Streptococcus pneumoniae
atgtttcgtagaaataaattatttttttgcaccacagaaattttactcttaaccatcatcttttacctatggagacagatggggtctttgattaacccttttgttagcgtgcttaatacaattatgattccatttttattagggggctttctttattatttgacaaaccctattgttactttcttaaataaagtctgtaaactcaatcgtttgcttggtattttaattaccttgtgtactttggtctggggaatggtcataggtgttgtctatctcttacctattttgattaatcagttatctagtttgattatatctagtcaaactatttatagtcgagtacaagacttaatcatagacttatctaattatcctgcgctccagaatttggatgtagaagctacaattcagcagttaaacttatcctatgttgatattcttcaaaatatcctaaatagcgtatcaaatagtgtggggagcgtcttgtcagctcttatcagtactgttttgattttgattatgactccagtttttttggtttatttcttattagatggacataaattcttgcccatgcttgaaagaacgattctaaagagggatcgcttgcatattgcaggcttattaaagaatttaaatgcgacgattgctcgctatattagtggagtttcgattgacgcaatcattataggttgtttagcttatattggctatagtattattggtttaaaatatgctttagtttttgccattttttctggtgtagccaatttaattccttatgtggggccaagtattggtttgattcctatgatcatcgcaaatatattcactgatccccatagactgctgattgcagtgatttatatgcttgttgttcagcaggtagatggcaatatcttatatcctcgaatcgtaggaagtgttatgaaggttcatccaatcacgattttagttttacttttgttgtcaagcaatatctatggtgtagttggaatgattgtcgcagtgccaacctattctatcttgaaagaaatttctaagttcttatcccgtttgtatgaaaatcataaaataatgaaagaacgagaaagagaattagctaagtaa

SEQ ID NO: 2408 - DNA, 219 bp, Streptococcus pneumoniae
acacgagcaatccaaatcgggtcacgcctgctggtttttaggcagctagagcgtaagaagtgttattttttgcagttatatttaactgagcgtttacgtcgccacacgagtcgcaaaatatgcctcataatgcctgtcgaatccgtaacgaccccaaaagacaataaaactattataccttatctaactcaaaaatgcaaaaagaaatcacatacctaa

SEQ ID NO: 2409 - DNA, 201 bp, Streptococcus pneumoniae
tttaactcctctaaaattagttgtttacgttctgtttttaacactgaatcacctcctgttatcgtttacactattcattctatcatactttctttcgaagtcaagcattttttatcattttctttcaaaatctatcattttttcttatttctagaatttttattgcaagataagagcctttatggtagactatttgagtaa

SEQ ID NO: 2410 - DNA, 741 bp, Streptococcus pneumoniae
gtgttaaaaacagaacgtaaacaactaattttagaggagttaaatcagcatcatgtagtttctctagaaaaattagttagtttgctagaaacgtcagaatcaacggttcgaagagacttggatgagttggaagcggaaaacaagcttcgtcgtgtgcatggtggagcagaactcccccactccttacaggaagaagaaaccattcaagaaaaatctgtcaaaaaccttcaagaaaagaaattgctggctcagaaagcagcctctctcattaaagaaaaagatgtcatctttatcgatgctggaacaacaactgcttttttgattcatgaattggtcaataagaatgttacagttgtgaccaactccattcaccatgccgctcagttggttgaaaagcagattccaactgtcatggttggaggaaacgtcaagacggcgacagatgctagtatcgggggcgttgctcttaaccagattaaccaattgcactttgaccgtgcctttatcggaatgaatggtgttgacgatggctattatacgactcctgatatggaggagggagctgtgaaaagagctattttggagaatgccaagcagacctacgtcttggtggattcgtcaaaaattggacaaacttgctttgccaaggtagccccactcaaacgcgctatcgttatcactagtcaagggcatgagctcttgcaggttattaaggagaaaacggaggtaatagaagtatga

SEQ ID NO: 2411 - DNA, 912 bp, Streptococcus pneumoniae
  unsure (49): n at each above location is unknown.
atgatttatacagtcacactcaatccatccattgactatatcgttcgtntggaccaagtcaaagttggtagtgtaaatcgtatggacagtgatgataagtttgctggtgagaaaggaatcaatgtcagccgtgtcttgaaacgtttgaatatatcaaatacagcgacgggatttatcggtggctttactggtaaatttatcacagatactttagcagaggaagaaatcgagacacgttttgtccaggtggcagaagatactcgtatcaatgttaaaatcaaagcagaccaagaaacagaaatcaacggaacgggtccaactgttgaaccggttaagctagaagaattgaaagctattttatctagtctgacagcagaagatacagttgtctttgcaggttcaagtgctaaaaatctaggcaatgttatctataaggatttgatttccttgacgcgccagactggtgcgcaagtggtctgtgactttgaaggacagaccttaattgatagtttggactaccagcctcttcttgtaaaaccaaataatcatgaacttggagcgatttttggggttaaactcgaaagtttagatgaaattgagaaatacgctcgtgagttactggctaagggtgctcaaaatgttattatctctatggctggtgatggtgcccttcttgtcacatctgagggagcttacttcgctaaaccaatcaaaggaacagtcaaaaattcagttggagctggtgattctatggttgctggattcacaggtgaatttgtcaaatcaaaagacgcagtagaagccttcaaatggggagtggcttgcggaacggcaactaccttctcagatgacttggcaacggcggaatttattaaagaaacatatggaaaagttgaggtagaaaaacgatga

SEQ ID NO: 2412 - DNA, 228 bp, Streptococcus pneumoniae
ttgaattttcatcgtttttctacctcaacttttccatatgtttctttaataaattccgccgttgccaagtcatctgagaaggtagttgccgttccgcaagccactccccatttgaaggcttctactgcgtcttttgatttgacaaattcacctgtgaatccagcaaccatagaatcaccagctccaactgaatttttgactgttcctttgattggtttagcgaagtaa

SEQ ID NO: 2413 - DNA, 1953 bp, Streptococcus pneumoniae
atgaaaattcaagatttattgagaaaagatgtcatgttgctggatttgcaggcaactgaaaagactgctgtcattgaagagatgattaaaagcctaacaggccacggttatgtgacagattttgaaacctttaaagaaggcattttggcgcgtgaagctttaacttctactggtttgggtgatggaatcgctatgcctcacagcaaaaacgctgctgtcaaagaagcgacagttctctttgctaagtcaaacaagggtgttgactatgagagtttggatgggcaggcaactgacctcttcttcatgattgcagctccagaaggtgccaatgatactcacttggcagcattgacagaattgtctcaatacttgatgaaagacggttttgcagacaaacttcgtcaagcaacatctgcagaccaagttatcgaactttttgaccaagcttcagaaaaaactgaggaacttgttcaagcacctgctaatgactctggtgactttatcgtagctgttacagcttgtacaacaggtattgcccacacttacatggcccaagaagcccttcaaaaagtacctgctgaaatgggggttggtatcaaggtcgaaaccaacggtgctagcggtgttggaaatcaactaactgcagaagatatccgtaaggctaaagctattatcattgcagcaaacaaggccgttgaaatggatcgtttcgatggcaaacctttgatcaatcgtccagttgctgacggtatccgtaagacagaagaattgatcaacttggctatttcaggagatgcggaagtctaccgtgccgctaatggtgccaaagtcgcaacagcctctaacgaaaaacaaagccttggtggtgccttctacaaacacttgatgagtggtgtatctcaaatgttaccattcgttatcggtggtggtatcatgattgcccttgccttcttgattgacggtgctttgagtgttccaaatgaaaaccttggcaatcttggttcttaccatgagttagcttctatgttcatgaaaattggtggagctgcctttggtttgatgcttccagtctttgcgggttatgttgcctactctattgctgaaaaaccaggtttggtagcaggtttcgtggctggtgctattgccaaagaaggttttgcctttggtaatattccttatgccgcaggtggtgaagcaacttcaactcttgcaggtgtctcatctggtttcctaggtgcccttgttggtggatttatcgcaggtgccttggttcttgccatcaagaaatacgttaaagttcctcgttcactcgaaggtgctaaatcaatccttctattgccacttcttggaacaatcttgacaggatttgttatgctagctgtgaatatcccaatggcagcaatcaacactgctatgaatgacttcctaggcggtcttggaggaggttcagctgtcttacttggtatcgtccttggtggaatgatggctgttgacatgggtggaccagttaataaagcagcttatgtctttggtacaggtacgcttgcagcaactgtttcttcaggtggttctgtagccatggcagcagttatggctggaggaatggtgccaccacttgcaatctttgtcgcaactcttcttttcaaagataaatttactaaggaagaacgtaactctggtttgacaaacatcatcatgggcttgtcatttatcactgagggagcgattccatttggtgccgctgacccagctcgtgcgattccaagcttcatccttggttcagcagtagcaggtggactcgttggtcttactggtatcaaactcatggcgccacacggaggaatcttcgttatcgcccttacttcaaatgctctcctttacctcgtttctgtcttggtaggagcaatcgtaagtggtgtggtttatggttacctacgcaaaccacaagcataa

SEQ ID NO: 2414 - DNA, 2214 bp, Streptococcus pneumoniae
atggcaaacaagaatacaagtacaacaagacggagaccgtctaaagcagaactggaaagaaaagaagcgattcaacgaatgttgatttcgttaggaattgcgattttattgattttcgcagccttcaaattaggggctgcaggtataaccctttataatttaattcgcttgctagtgggtagcctagcttatctggcgatattcggcctattaatctatctcttctttttcaagtggatacgaaaacaggaaggactcttatctggctttttcaccatatttgctggcttactcttgatttttgaggcctacttggtttggaaatatggtttggacaagtccgttctaaaagggaccatggctcaggttgtgacagatctgactggttttcgaacgactagctttgctggagggggcttgatcggggtcgctctttatattccaacagcctttctcttttcaaatatcggaacttactttattggttctatcttgattttagtgggttctctcctagtcagcccttggtctgtttacgatattgctgaatttttcagtagaggctttgccaaatggtgggaagggcacgagcgtcgaaaagaggaacgctttgtcaaacaagaagaaaaagctcgccaaaaggctgagaaagaggctagattagaacaagaagagactgaaaaagccttactcgatttgcctcctgctgatatggaaacgggtgaaattctgacagaggaagctgttcaaaatcttccacctattccagaagaaaagtgggtggaaccagaaatcatcctgcctcaagctgaacttaaattccctgaacaggaagatgactcagatgaccaagatgttcaggtcgatttttcagccaaagaagcccttgaatacaaacttccaagcttacaactctttgcaccagataaaccaaaagatcagtctaaagagaagaaaattgtcagagaaaatatcaaaatcttagaagcaacctttgctagctttggtattaaggtaacagttgaacgggccgaaattgggccatcagtgaccaagtatgaagtcaagccggctgttggtgtaagggtcaaccgcatttccaatctatcagatgacctcgctctagccttggctgccaaagatgtccggattgaagcaccaatccctgggaaatccctaatcggaattgaagtgcccaactccgatattgcaactgtatctttccgagaactatgggaacaatcgcaaacgaaagcagaaaatttcttggaaattcctttagggaaggctgttaatggaaccgcaagagcttttgacctttctaaaatgccccacttgctagttgcaggttcaacgggttcagggaagtcagtagcagttaacggcattattgctagcattctcatgaaggcgagaccagatcaagttaaatttatgatggtcgatcccaagatggttgagttatctgtttacaatgatattccccacctcttgattccagtcgtgaccaatccacgcaaagccagcaaggctctgcaaaaggttgtggatgaaatggaaaaccgttatgaactctttgccaaggtgggagttcggaatattgcaggttttaatgccaaggtagaagagttcaattcccagtctgagtacaagcaaattccgctaccattcattgtcgtgattgtggatgagttggctgacctcatgatggtggccagcaaggaagtggaagatgctatcatccgtcttgggcagaaggcgcgtgctgcaggtatccacatgattcttgcaactcagcgtccatctgttgatgtcatctctggtttgattaaggccaatgttccatctcgtgtagcatttgcggtttcatcaggaacagactcccgtacgattttggatgaaaatggagcagaaaaacttcttggtcgaggagacatgctctttaaaccgattaatgaaaatcatccagttcgtctccaaggctcctttatctcggatgacgatgttgagcgcattgtgagcttcatcaagactcaggcagatgcagactacgatgagagttttgatccaggtgaggtttctgaaaatgaaggagaattttcggatggagatgctggtggtgatccgctttttgaagaagctaagtctttggttatcgaaatacagaaagcagttggaatccatgattcagcgtcgtttgtcagttggatttaa

SEQ ID NO: 2415 - DNA, 252 bp, Streptococcus pneumoniae
cagaggaagctgttcaaaatcttccacctattccagaagaaaagtgggtggaaccagaaatcatcctgcctcaagctgaacttaaattccctgaacaggaagatgactcagatgaccaagatgttcaggtcgatttttcagccaaagaagcccttgaatacaaacttccaagcttacaactctttgcaccagataaaccaaaagatcagtctaaagagaagaaaattgtcagagaaaatatcaaaatcttag

SEQ ID NO: 2416 - DNA, 285 bp, Streptococcus pneumoniae
gcttcatcaagactcaggcagatgcagactacgatgagagttttgatccaggtgaggtttctgaaaatgaaggagaattttcggatggagatgctggtggtgatccgctttttgaagaagctaagtctttggttatcgaaatacagaaagcagttggaatccatgattcagcgtcgtttgtcagttggatttaaccgtgcgacccgtctcatggaagagcttgagatggcaggtgtcattggtccagctgaaggtaccaagccaagaaaagtattgcagcaataa

SEQ ID NO: 2417 - DNA, 216 bp, Streptococcus pneumoniae
aggtaccaagccaagaaaagtattgcagcaataaaaaatagcttctttccaaggttggaaggagctattttactggctattgattacttttatactcttcgcaaatctcttcaaaccacgtcagctttgccttgccgtatatatgtgactgacttcgtcatgtcttatctacaacctcaaaacagtgttttgagcagcctacggctagcttcctag

SEQ ID NO: 2418 - DNA, 660 bp, Streptococcus pneumoniae
atggatttcctaaaatttttgaagccacctgcatataggtttcaagggcttctggatagggcctggtcgtcgccgaattatcaaagtaaatcatgtttctcacgctttctaaaatcactagttctattgtatcatgaaacggagcctgcgacaagaaagggcaatttctctttttttaagatttttttaaagaaacagagtataataaatcataatcaaaggagagaatgtatgtctaactatcgtagaacttcaaaaccgaaaacagaacatatcaaaaaaggctttactgtttttcaaaaaaccattactactatcggtagtatccttggtttgattacagcgggtatcacgatcatgaacgccttggataataataataaaaatactaaaaaagaacctacgacaagccagacgacaacctttgtcaaagaaattcaaaaagaatcccctcaggaaaatactactccaaataaggaaaataacacttctcaagaaaaaacacaacaagaagaaacgccaaaatctagcgtcaaggaagagaaaaaagaagatcagaaaacagcaactcaggactctactacacctgctacaagtaaacctgccactgaaaatgaaaaacagcccaatactccaacttcagaaaataatactcaatga

SEQ ID NO: 2419 - DNA, 1203 bp, Streptococcus pneumoniae
ttgtcgcaggctccgtttcatgatacaatagaactagtgattttagaaagcgtgagaaacatgatttactttgataattcggcgacgaccaggccctatccagaagcccttgaaacctatatgcaggtggcttcaaaaattttaggaaatccatctagtctccatcgtttgggagaccaggcaacacgaattttagatgcttcccgtcaacagattgcagatttaatcggtaagaaaagtgatgaaatcttctttacatctggtgggacagaaggggataactggatcatcaagggagtagcatttgaaaaagcccagtttggcaagcacatcatcgtatcagccattgaacatccagcagttaaggaatcagccctctggttgaaagctcaaggttttgaagtggattttgctccagttgataacaaaggatttgtggatgttgaggcgctagaagatttgataagacctgatacgaccctcgtttccatcatggcagttaacaatgaaattggctctgttcagcccattgaggctatttcaaaactattggcagacaagccaactatttccttccacgttgatgcggttcaggcgcttgccaagattccgactgaaaagtatctgacagaacgagtggatttcgcgactttctctggtcacaagttccacggaatccgtggtgttggttttatctatatcaagtctggcaagaagattacgcctcttttaacaggtggtggtcaggaacgtgattaccgttcgacaactgaaaatgtggcaggaattgcagcgaccgctaaggctctccgtttatctatggaaaagctagatatctttaggagcaagactgggcagatgaaggcagtgattcgtcaagcacttctggactatccggatatatttgtcttttcagatgaggaagacttcgcccctcatattctgacttttggaatcaagggtgttcgtggtgaggtcattgttcacgcctttgaagactatgatattttcatctcaacgacctcggcttgttcgtccaaggctgggaaaccagccggaaccctgattgctatgggagtggacaaggataaggctcagtcagctgtgcgtcttagtctagaccttgaaaatgatatgagtcaggtcgagcagttcttgaccaagctaaaattaatttacaatcaaactagaaaagtaagatag

SEQ ID NO: 2420 - DNA, 1215 bp, Streptococcus pneumoniae
atgcagtattcagaaattatgattcgctacggtgagctgtcaaccaagggcaaaaatcgtatgcgtttcatcaataaacttcgcaataatatttcagacgttttgtctatctatccccaagttaaggtaacagcagatcgcgaccgtgcccacgcttacctcaatggagcagattacacagcagtagcagaatcgctcaaacaagtatttggaattcaaaacttttcccctgtttataaggttgaaaaatctgtagaagttctgaagtctgctgtccaagagattatgcaggacatctacaaggaaggcatgacctttaaaatctctagcaagcgtagcgaccacacctttgaattggacagtcgtgaactcaaccaaacgcttggaagggctgtattcgaagccattccaaacgtacaagctcaaatgaaaagtcctgacatcaatcttcaggtggagatacgtgaagaagcagcctatctttcttatgaaaccgttcgaggggcaggtggattaccagtgggaacttctggtaagggcatgctcatgttgtcagggggaatcgattcccctgtagctggctatctagcgcttaaacgaggggtagatatagaggcagttcactttgccagcccaccttacacgagtcctggtgctcttaaaaaagcccaagatttgacccgtaaattaaccaaatttgggggaaatatccagtttatcgaagttccttttacagagattcaagaggaaatcaaagccaaagcgccagaagcctaccttatgaccttgacgcgtcgttttatgatgcgtattactgaccgtattcgtgaggtacgaaatggtttagttatcatcaatggggaaagtctaggtcaagtagccagccaaacccttgaaagtatgaaggctatcaatgctgttaccaacactcccatcattcgtcctgtggttaccatggacaagttggaaatcattgacatcgcccaggaaatcgatacctttgacatttcaatccaaccgtttgaagactgttgtaccatttttgcaccagatcgtccaaaaacaaatcctaaaattaagaatgcggagcagtacgaagcgcgtatggatgttgaaggcttggttgagcgagcagtggctggaatcatgattactgaaatcacacctcaagccgaaaaagatgaagttgatgacttgattgacaatctgctctaa

SEQ ID NO: 2421 - DNA, 630 bp, Streptococcus pneumoniae
ttgaatatagagagttttctgacaatgaatcaatcctacttttatctaaaaatgaaagaacacaaactcaaggttcattatacaggtaaggagcgccgtgtacgtattcttcttcctaaagattatgagaaagatacagaccgttcctatcctgttgtatactttcatgacgggcaaaatgtttttaatagcaaagagtctttcattggacattcatggaagattatcccagctatcaaacgaaatccggatatcagtcgcatgattgtcgttgctattgacaatgatggtatggggcggatgaatgagtatgcggcttggaagttccaagaatctcctatcccagggcagcagtttggtggtaagggtgtggagtatgctgagtttgtcatggaggtggtcaagccttttatcgatgagacctatcgtacaaaagcagactgccagcatacggctatgattggttcctcactaggaggcaatatacccagtttatcggtttggaataccaagaccaaattggttgcttgggcgttttttcatctgcaaactggctccaccaagaagcctttaaccgctatatcgagtgccagaaactatcgcctgaccagcgcatcttcatctatgtag

SEQ ID NO: 2422 - DNA, 348 bp, Streptococcus pneumoniae
ttggaataccaagaccaaattggttgcttgggcgttttttcatctgcaaactggctccaccaagaagcctttaaccgctatatcgagtgccagaaactatcgcctgaccagcgcatcttcatctatgtaggaacagaagaagcagatgatacagacaagaccttgatggatggcaatatcaaacaagcctatatcgactcgtcgctttgctattaccatgatttgatagcagggggagtacatctggataatcttgtgctaaaagttcagtctggtgccatccatagtgaaatcccttggtcagaaaatctaccagattgtctgagattttttgcagaaaaatggtaa

SEQ ID NO: 2423 - DNA, 336 bp, Streptococcus pneumoniae
atgcatattgaacatcttagccactggagtggtcatcttaaccgtgaaatgtaccttaaccgttatggacatggtgggattccagttgtggtctttgcttcatcaggtggtagtcacaacgaatactatgattttggcatgattgatgcctgtgcttcctttatcgaggaaggccgtgtccagttctttaccctatctagtgtggatagtgagagctggttggctacttggaaaaatgctcatgaccaagcggaaatgcaccgtgcctacgaacgttatgtgattgaggaggccattcttttatcaagcacaagacaggttggtttgatggcatga

SEQ ID NO: 2424 - DNA, 432 bp, Streptococcus pneumoniae
ttgtttacgccaccattcccagtcatgggcgacatcatgtccccattcagcaaatcaggctggaatttgtttctggtcaaaggcttctttgagcttgtaaaaggatggcaaaccatcttgttcccaggctccaagccccgtacacagcacaatctctgcctgacggtaacggtcaataaaccagccgtcgttttagttccaaatataatctactggcgagttttggtaaatagcatcatcgttgtagtaatcaccgacaaagaaacgtgcgtcgtaaacaccactgagagcaatcactttggtaaagacatctggatgctggaggaagaaattgagtgcatgataggctcccatagagcaacctgtcgtcatcatgccatcaaaccaacctgtcttgtgcttgataaaagaatggcctcctcaatcacataa

SEQ ID NO: 2425 - DNA, 183 bp, Streptococcus pneumoniae
atgatgacgacaggttgctctatgggagcctatcatgcactcaatttcttcctccagcatccagatgtctttaccaaagtgattgctctcagtggtgtttacgacgcacgtttctttgtcggtgattactacaacgatgatgctatttaccaaaactcgccagtagattatatttggaactaa

SEQ ID NO: 2426 - DNA, 1167 bp, Streptococcus pneumoniae
atgaattaccttgttatttctccctactatccacaaaactttcaacagtttaccatcgaactagctaataaaggcatcacagccttgggaattggtcaagagtcttacgagcaattggatgagcccttgcgcaatagcttgaccgagtattttcgtgttgataatcttgagaacatagatgaagtcaaacgtgcagttgcttttctcttttataaacatggtccaattgaccgcatcgagtctcacaatgaatactggcttgagctagacgcaacactcagagaacaattcaatgtttttggtgccaaaccagaggatctcaaaaagacgaaatataagtctgaaatgaagaaacttttcaaaaaagcaggtgttcctgtggtacctggagctgttatcaagacggaagcagatgttgatcaagcagtgaaagaaatcggtcttccaatgattgccaaacctgataatggagtgagagcagccgcaacctttaaacttgagacagaagacgatatcaatcacttcaagcaagaatgggaccattcaaccctttatttctttgaaaaatttgtcacttccagcgaaatctgtacctttgacgggctcgtggacaaggatggaaagattgtcttctcaacaacctttgactacgcctatacaccgcttgacctcatgatttataagatggacaattcttattatgtgctcaaggatatggatcctaaactgcgcaagtatggggaagcaattgtcaaagaatttggtatgaaagaacggtttttccatattgagttcttccgtgagggggacgattatattaccatcgagtacaataaccgccctgcaggtggttttaccattgatgtttataactttgctcattccttggacctttatcgtggctatgcagctattgtcgcaggagaggagttcccggcgtcagactttgaaactcagtattgtttggctacttctcgccgtgcaaatgctcactatgtttattcagaagaggatttgcttgccaaatatagccagcagttcaaggttaaaaaagtcatgccagctgccttcgcggaacttcaaggagattacctgtatatgctgaccactccgagtcgacaagaaatggagcagatgattgcagatttcggacaacgtcaagaataa

SEQ ID NO: 2427 - DNA, 1494 bp, Streptococcus pneumoniae
atgattacaggcgaattaaaaaataaaatcgatcagctgtgggaaattctttggacagaaggaaacgcaaatcctttaacaaatattgaacagttgacttatctcttatttatgaaagatttggatagtgtcgagcttggacgtgaaagtgatgctgaatttctagggattccttatgagggagtttttccaaaagataaacctgaataccgttggtcaacttttaaaaatataggagatgctcaggaagtttatcgtttaatgactcaggagatttttccgtttattaaaaatctcaagggggatacagatgatacagccttttcacgatatatgcgagaagctatttttcaaataaataaacctgctacgcttcaaaaggcaatttctatcttagatgtttttccaactaggggattagatgtagattttgataatgacaaacaaagtattactgatatcggagatatctatgaatatctgttatcaaaattgtcgaccgcaggtaaaaatggacagttccgtacacctcgtcacatcatcgatatgatggttgagttgatgcaaccgactatcaaagatatcatctcagatcccgctatgggttctgctggcttcttagtatctgctagccgttacttaaagcgtaagaaagatgaatgggaaaccaatacagataatatcaatcattttcataatcagatgtttcatggaaatgatacggatacgactatgttgagacttggggcgatgaacatgatgctacatggagtagaaaatccacaaatcagttaccttgactcgctgtctcaagataatgaagaagctgataaatatactttggttttagcaaatcctccttttaagggctcacttgactacaattcaacctctaatgaccttcttgcaaccgtaaaaaccaaaaaaacagaattactctttctttctcttttcttgcgaactttaaaaccaggtggacgagcagcagttatcgtacctgatggtgtcctttttggttcgtctaaagctcataaaggaattcgtcaggaaattgtagagaatcataagcttgatgctgtaatctcaatgcctagtggtgtgttcaagccttatgctggagtttcaactgccattctcatctttacaaaaactggtaatggtggtactgacaaagtctggttttacgatatgaaagcggatggtttaagtttggatgataagcgacaaccgattagagacaatgatattccagatattatcgaacgctttcatcatcttgaaaaagaagcagaacgtcagagaacggatcaatctttctttgttccagttgctgagataaaggaaaatgattatgatttgtctatcaataaatataaagagattgagtatgaaaaagttgagtatgaaccaacagaagtcatattaaagaaaatcaatgatttagaaaaagaaattcaagctggcttggctgaattggaaaaattactcaagtag

SEQ ID NO: 2428 - DNA, 1122 bp, Streptococcus pneumoniae
atgaaaaaagtgaagttgggggaagtcttatctctaaaaaaaggcaagaaagccactgtacttgctgaacaaacaactctaagccaacgttatattcaaatagatgatttaagaaataataataatttaaaattcactgaaagtttaaatatgactgaagcacttccagatgatattctaatagcatgggatggtgctaatgcaggaacagttggttatggattatcgggagctgttggtagtacaattacggtcttaaaaaagaatgagcgatacaaagaaaaaattatatcagattacttgggagtctttttggaaagtaaatcgcagtatttacgagatcattcaacaggtgcaactattcctcatttaaacaagaatatattacttgatttacaattagaattgctaggtatcgaagaacaagagaacattatctgtattcttaatacgattaaaaggcttattactaaaagaaaatttcagttagatgaactaaacttgctcgtcaaatcccgatttaacgagatgtttggggaaaataaaatatttgaaagcattgataacttatttgatattatagatggtgataggggcaaaaattatcctaaatcagatgagttgtttagtgaggagtactgtttatttttaaatacaaagaatgttactaaaaacggattttcattcgatacaaagcaatttatcactaaaacaaaggataaattacttcgaaaaggcaaacttgagcgttatgatatagtcttgacaacaagaggtactgttggaaatgtagcgtactacgatgaattaataaaatataaacatttacgtataaattcaggtatggtaatattacgtcccaagacaccaaatctaaatcagaaatttattatccatgttttaaggaataataattatagtcgagtgatatcaggaagtgctcagcctcagttaccaattacaaaattaaaaaaaatacttctccccctcccccctctagccctccaaaatgagttcgcagactttgtagttcaggtcgacaaatcacaattggcaatccaaaaatctctggaagaacttgaaactttgaagaaatctctgatgcaggagtattttggctga

SEQ ID NO: 2429 - DNA, 237 bp, Streptococcus pneumoniae
atggtagtaaaaacaagaaaacaaggaaattcaatcaccattacgattccaagtgaatttaatattccaagtggtgttaaatacgaagcgaaattgttacaaagtggtgagattatctttactcctgaagaattggggcagcaggtttcttatgtatctgatgatgcctttgacttaaatttagataaaatatttgacgaatacgacgatgttttcaaagctttggtggaaaaatga

SEQ ID NO: 2430 - DNA, 414 bp, Streptococcus pneumoniae
atgacaatctatctgacagaaaagcaaattgaaaaaataaatgctttagcaattcaacggtattctccaaatgagaaaattcaaacagttagttcttctgccttaaatatgattgtgaacttaccagaacaatttgtctttgggaagtctctttatccaacaatttttgataaagcaacgatactatttgtccaattgataaagaagcatgtttttgctaatgctaataaaagaactgctttcttcgttttggtcaaatttttacaattaaacggctatcgtttttctgtaacggtagaagaagcagtaaaaatgtgtgtaaccatcgcagtagaagctttaactgatgaaaaaatgacaagctattccaaatgggtttctgaacattctgttagagaaaaggtcaaaaagtaa

SEQ ID NO: 2431 - DNA, 828 bp, Streptococcus pneumoniae
ttgcaactatttattaccgccaagcaggtagagggctgtagctcaaaaacaattcgttattaccagaggacgattgaaaacttgtttaatgctattaaagagtctgtgacacaactcacaacagatgatttaaggagttatttagcaaattaccagtctgaaaaggattgtagtaaggcaaatttagacaatattaggcgtatattgtcttctttttttgcttggcttgagcaagaggaatatatcattaaaaatcccattcgacggataaagaaaattaagactgagcaaaatgtgaaggaaacttatactgatgaacatttggaaattatgcgtgataactgtgaaaatttgagagatttggcaataatagacctactagcatcgacaggtatgcgtgtaggggagcttgtacagttgaatcgttcagatattgattttgaaaacagagagtgtgttgtctttggtaaaggaaagaaggagagaccagtatattttgatgctcggacgaaaattcatttaagaaattatcttaacgacagaaaagatagtcaccctgctctttttgtaacgctagttggaaaagcccagagacttggaattgctggtgtagagattcgcttaagaaagttaggagacaaactcggcatacaaaaggttcacccacataagttcagaagaactttagcgactaaggcaattgataaaggtatgcctatcgaacaagtccaaaaactgctaggtcatagcaagattgacacaaccctggcctatgccatggtcaatcaaaataatgtcaagcattcacaccaaaaattcatctcttaa

SEQ ID NO: 2432 - DNA, 1107 bp, Streptococcus pneumoniae
atgaagaaagtgaaattagggcaagtggctacttttatcaatggctatgcttttaaacctcaagattggtcatctgaagggaaagagattatcagaatacagaatctgactaaaacttcaaaagggataaattattattcgggtacgattgataaaaaatacattgttgaagctggtgatattcttatttcgtggtcgggtacattaggggtttttcagtggtgtggaagatccgcagtgttaaatcagcacatttttaaagtggtttttgataagatagatatagataaatcgtattttaaatatgttgttgaaaaaggtttacaagatgctgtaaaacatactcatggttccacaatgaaacatttaactaaaaaatattttgataatattatagttccatatacaaatttgggagagcaacaaagaattgcaagtgagctggatttgttaagcaagctgattttaaggagacaagaacaacttgaagagcttaatctacttgtaaaatcccgatttaacgagatgtttggggaaaataaaatatttgaaagcattgataacttatttgatattatagatggtgataggggcaaaaattatcctaaatcagatgagttgtttagtgaggagtactgtttatttttaaatacaaagaatgttactaaaaacggattttcattcgatacaaagcaatttatcactaaaacaaaggataaattacttcgaaaaggcaaacttgagcgttatgatatagtcttgacaacaagaggtactgttggaaatgtagcgtactacgatgaattaataaaatataaacatttacgtataaattcaggtatggtaatattacgtcccaagacaccaaatctaaatcagaaatttattatccatgttttaagaaataataattatagtcgagtgatatcaggaagtgctcagcctcagttaccaattacaaaattaaaaaaaatacttctccccctccccccactagccctccaaaatgagttcgcagactttgtagttcaggtcgacaaatcacaatttgcttgtgagatagctataaaagtgtggagaaatagcttgaaatttagtataatatag

SEQ ID NO: 2433 - DNA, 3351 bp, Streptococcus pneumoniae
atgggaaattttagctttcttttaaaaaatgacgaatatgaatctttttcaaaaccttgcattgaagctgagaatatgattgctacatcaactgtggctactgcctttatggcgcgtcgtgctttagagcaggctgtccattggatatatagtcacgattcatatttagaagctccctatcgtgctactctatcttctttagtatgggatgatgattttagggatatcgtagattctgaactccacaagcagatagttctgttgattcggtggggaaaccatgctgctcatggtggtgaaattaaggaacgagaagcgattttagctttgcatcatttgtatcagtttgttaattttatcgattattgttacagcaatgagtttgtggagcgttattttgatgagaagtgcttaccactttcagcaaacatcaaataccgagaaactccacaatctatgataaagttacaagacagtttaccagaactgcctgattttcatgaacagatggctgctcagtccgtagaagttcaagagacttatactgaaaaacgtgagactgcagcgcaacggcaagatgtgcctttccatattgatcaattatctgaggcagagacaagaaagctctttattgatatcgatctccgtttagcaggatggatatttgaagaaaactgtcgtgttgagatagccgttgatggtctcaagcacggttcaggaattggttactgtgactatgtactttatggtaaaaatgggaaaattttagcgattgtagaggctaaaaaagcctctgtcaatccagaagtaggggaagtacaggtcaaagaatatgctgaagctcttgagaaacatatcggctatcagccaatttgctttattacaaatggcttgaagcactatatacttgatggtccgaaccgccgccagattgcaggcttttactctcaagaagaattgcaattagtgatggatagacgtcatcttcaaaaaccacttgaggatatttctagtaaaattagggacgatatttccgggcgtcactaccaaaaacacgccattgcaagcgtttgtgaagctttctctaatcatcgtagacaggcacttttggttatggcaactggggctgggaaaactcgtacagcagtttctctagttgatatcttatcacgtcataactgggtaaaaaacgttctcttcttagccgatagaacttccttggttaagcaagcctatgattcgtttagaaaattactcccagatctttccgtttgtaacttcttagaagataaagaaggagctcaatcaagtcgcatggtcttttcaacttatccgaccatgattggagcgattagtggtcaagaagaagtaaatcaacgccctttcactgttgggcattttgaccttatcataattgacgaatctcaccgttctatttatcagaaatacaagtccatttttgattattttgatgcaagaattgtaggcttaacagctactccgcgtcaagatttagataaaaacacctatggattctttaatttggagaatggggttccaacatatgcatatgatttggaagaggctgttaaagacggatatttagtagcctatcattctatcgaaaccaaactgaaactacctacggatggtctacattatgatgatttgtccgaagaagaaaaggaacattttgatagcaaatttgaagacgatagctgtgaaaaagatattgatgggagtgtatttaattcctttgttttcaataaaagtacagtagaaattgttttaaatgaactcatgacaagaggaattcagacagcctcgggtgatgaaattggtaaaactattatttttgctaaaaatcatgatcatgcggaatatatcagaggtatttttaacaaccgctatcctgaaaaagggagcgactatgctcaggtgattgattatagtattaagcattatcagaccttgattgatgattttaaaattaaggagaagtatcctcaaattgcgatttctgtcgatatgttagatacaggtattgatgtaccagaggttgttaatttagtcttcttcaagaaagtacgctctaaaactaagttttggcagatgattggtcgaggaacccgtctatgtaaagatttatttggacctgagcaggataaggaaaacttcttggtatttgattatggggataattttgattattttcgtgcagatccaagagatggagagggtcgtcacattgtttcgttgactcagcgtttatttaatatcaaagtggacttgattcgagaacttcagggactccaataccaagaagatcagtttgcgagagcataccgtcagcagcttgtctcggaacttcaaggtcgtatagagagcttaaatgagttggacttcagggttcgtatggttttagatacagtttatagctataggaaattggaaagttggcagaatctaactgctgttacaagtgaaaccattcaaaaaaatctctctccgcttttatttgatgaagataaagaagatgagatggcgaggagatttgatttgtggttgcttcatattcagttggggcaactgacagctaaatcttccactgttcatatttcccaagtgatgaagacggctagagctctttctgctattggcaatatcccgcaggtttttgagcaggctgaaattatcaggaaagtacaggagcctgaattttggaaagaagttaacttgtctgatttggaaaaaattcgtcttgctattcgagatttattacagtttttggataaaacagaccgtaaaccctactatgttaactttgaagatcgtatactctccactgttcacgagaccacagcatttttgcaggtcaacgatcttcggtcttacaatgaaaaagttgagcattatttgaaaactcatctggatgaggagtccatttctaagctataccataataaaaagttgacatctgatgatatgcttgcacttgaaaaattgctctgggaaaaattaggtagtaaagcagactaccaaagtcattatgaaaataaggcaattccgagattggttcgtgagattattggcttagatagagagtctgccaatcgtattttttctaaatttttgtcggatgagaatcttaatgccaggcagatttcatttgtaaaattgattgtagactacattgtagaaaatggttttttagagacgaaagtgttaacgcaagagccgtttaaatcttatggttctgttcaactactcttccaacaccaactaccagtacttcgtaatattgttcaaatcattgaacttatcaataatcgagctggagaagcggcttaa

SEQ ID NO: 2434 - DNA, 471 bp, Streptococcus pneumoniae
atgaataaatcagaacaccgccaccaacttatacgcgctcttatcacaaaaaacaagattcatacacaggctgagttgcaagcccttcttgctgagaacgacattcaagtaacccaggcaaccctctcacgcgacatcaaaaatatgaacctatcaaaagtccgcgaagaagatagcgcttattatgttcttaacaatggttccatctcaaaatgggaaaaacgtctcgaactctacatggaagacgcccttgtctggatgcgcccagttcaacaccaagtcctactaaaaacccttcctggactggctcaatcctttggttctatcattgatactttgagcttccctgacgctatcgctaccctttgtggtaatgatgtctgtcttatcatctgtgaagatgcagatactgctcaaaagtgctttgaagaactgaaaaaattcgccccaccatttttctttgaagaataa

SEQ ID NO: 2435 - DNA, 2274 bp, Streptococcus pneumoniae
atgcgttttaatcaatatagttatatcaattttccaaaagaaaatgtcttatctgaactaaaaaaatgtggctttgatttacaaaatacagccaatcacaaagactcacttgaaacctttttacgtcgtttctttttcacttatcaagacaccaactacccactttctatcctagcagctgataaaaaaacagacctgctgacattttttcaatcagaagatgaactgacagcagatattttttatactgttgcttttcaacttttaggcttttcttatttggttgacttcgaagatagtgacgtttttcgtaaagaaactggatttcccattatatatggtgacttgattgaaaatctctatcagttactcaatactcgcaccaaaaaaggaaatactcttatcgaccaacttgttagtgatggtcttattccggaggataatgactaccactactttaacggcaagagtttggctactttttctaaccaggatgtcattcgtgaagtcgtttacgttgagtctcgtgtcgatactgaccaaaaagggctatcagacctagtaaaggttagcattattcgccctcgttttgatggaaaaatccctgccatcatgacagccagcccttatcatcagggaaccaatgacaaggctagtgacaaggctctctacaagatggagggcgagcttgaggttaaacttcctcacaagattgagctagagaaacctcaactaaatctcgtccaaccccaaggtaaagctgagcttatagcagaggctgaggaaaagctaactcacatcaactctagctatacactaaacgactacttccttccgagaggctttgccaatctctatgtctcaggtgttggtaccaaagactcgacaggtttcatgactaatggagactaccagcaaatcgaggcttataaaaatgtcatcgattggcttaacggccgttgccgtgcctttactgatcacacgcgccagcgtcaagtcaaggctgattggtcaaacggaaaagttgctacaacaggactttcctatctaggtaccatgtccaatggtcttgcgactacaggagtcgatggtttagaagttatcattgccgaggcaggaatttcatcatggtacaactactaccgtgaaaacggtctggtgactagcccaggtggttatccaggtgaggactttgactcccttgctgagttaacctattctcgtaatctcttagctggcgactatatccgtggcaatgaagctcaccaagctgacttagaaaaagtgaaagctcagctagaccgaaaaactggggactacaatcaattttggcatgaccgcaattatctgctcaatgcccataaagtaaaggcagaggttgtctttactcatggttctcaggattggaatgtcaaaccacttcatgtttaccagatgttccatgctcttcctactcatatacacaagcatctctttttccataatggtgcccatgtttacatgaacaattggcaatcaattgacttccgtgagtccataaatgccttattgaccaagaaattactaggacaggaaacagactttcaacttcctactgttatctggcaggacaatacagctccacagacttggttatcacttgataacttcggtgggcaagaaaactgtgaaaccttctcacttggtcaagaagagcaagctattcaaaaccagtacccagataaggattttgagcgctatggtaagacataccaaaccttcaatacagagctctatcaagggaaagccaatcagattactattaaccttcctgtgactaaagatctccacctaaacggtcgcgctcagctcaatcttcgtatcaaatccagtacaaacaaggggctcttatctgcccaactgctagaatttgggcaaaagaaatacctacaaccttatccagctattttaagtgctagaaccattgacaacggtcgctatcacatgttggaaaatctctgtgaattgccatttagaccagaggcacaacgagtcgtgacaaaaggttaccttaatttacaaaatagaaatgatttactgttagtagaggatattactgcagatgaatggatggacgttcaatttgaactgcagccaactatttacaagctaaaagaaggagacactctccgtttagtcctctatactactgactttgaaatcaccatccgtgacaatacagactaccacttgactgtcgacctcgctcagtccatgcttaccttaccttgctaa

SEQ ID NO: 2436 - DNA, 3102 bp, Streptococcus pneumoniae
ttgatcgcacaactagatacaaaaacagtctatagttttatggaaagcgtcatttcgatcgaaaagtatgtgagagcagctaaagaatacggctacactcatttggctatgatggatattgacaatctttatggcgctttcgactttctagagattacaaaaaaatacggcattcatcctttgctagggcttgaaatgacagtgtttgtagatgatcagggagtaaatttgcgctttttagctctatctagtgtgggctatcagcagttgatgaagctttcgacagccaagatgcagggggagaaaacttggtcagtcctgtcccagtacctggaggatatcgcggtcattgtgccttattttgatagagttgagtcgttagaactaggctgtgattactatataggggtttatccagaaacactagcaagcgaatttcatcatcctatcttacctctttatcgggtcaacgcttttgaaagcagggatagagaagttcttcaagttttaacagcgattaaagaaaatctaccgctcagagaagttcccttgcgttcgagacaagatgtctttatatcagcaagttctttagagaaactattccaagagcgttttccgcaagctttggacaatttagaaaagcttatttcaggcatttcttacgacttggatactagtctgaaactgcctcgttttaatccagctagaccagcagtagaggagttgagagagcgtgctgaactggggcttgttcagaaggggttgactagtaaagaatatcaagatagactagaccaagaattgtctgttattcatgatatgggctttgatgattatttcttggttgtttgggatttgttgcgttttggacgatcgaatggctattatatgggaatgggaaggggttctgcagtaggcagtttggtttcttatgccttagacatcacggggattgacccagtagagaaaaatctgatttttgaacgctttcttaatcgtgaacgctataccatgcctgatattgatattgatatcccagatatttatcgtccagattttatcagatatgttggtaataaatatggtagtaaacatgcggcacaaatcgttactttttcaacctttggagccaagcaagctcttcgagatgtcttgaaacgctttggtgtgccagagtatgaattatctgcaattactaagaaaatcagttttcgtgacaatcttaagtcggcctatgagggcaatctccagtttcgtcagcaaatcaatagtaagttagaataccaaaaagcttttgagattgcttgcaagatagagggctatccaaggcaaacctctgtccatgcggctggtgttgtaattagtgaccaagatttaaccaactacattcctctaaagtatggtgatgaaattccactgactcagtatgatgctcatggagttgaggctagcggacttttgaagatggactttctgggactacgaaatttgacctttgtccagaagatgcaagagttgcttgctgaaatagaaggtattcaccttaaaattgaagaaatagatttggaagacaaagaaacgttagatttatttgcctctggaaatacaaaaggtatctttcaatttgagcaacctggtgctattcgcttgctcaaacgtgttcaaccagtctgttttgaagatgtcgtagcaactacttctctaaatcgaccgggtgctagtgactatatcaataattttgtggcaagaaagcatgggcaggaagaagtgactgttctggatccagtactggaggatattttggctccaacctacggcataatgctctatcaggagcaggttatgcaggttgcccagcgatttgccggatttagtcttgggaaagccgatattttgcgtcgggctatggggaaaaaggatgcctctgccatgcatgagatgagggcttcctttattcaaggttcattagaagctggtcatactgtggaaaaagcagagcaggtctttgatgttatggagaagtttgcaggctatggttttaacaggtcacacgcctatgcctactcagcattggccttccagttggcttattttaaaacacattatccagccatattttatcagatcatgttgaattctgccaacagtgattacttaatagatgcacttgaagcaggttttgaagtggcgcctctgtccatcaacacgattccctatcacgataaaattgccaacaaggccatctatctaggtttgaaatccattaaaggagtcagtaatgatttagctctctggattattgaacatagaccttattctaatattgaagattttatagctaaattacctgagaattatctgaaacttcctctgctagaacctttggtaaaagttggtcttttcgattcatttgaaaaaaatcgtcaaaaagtatttaataacttagctaatctatttgaatttgtgaaagagttgggaagtttgtttggagatgctatttatagttggcaggaatcggaagattggacggaacaagaaaaattttatatggaacaagagcttttagggataggtgtcagcaaacatccactacaagctattgcaagtaaggctatttacccgattaccccaatcggaaatttgtcagaaaatagctatgctattattttggttgaagttcagaaaataaaagtgattcgtaccaaaaagggtgaaaatatggccttcttacaggcagatgatagtaagaaaaaattggatgtcactctcttttcagacttatatcgtcaggttggacaggaaataaaagagggagccttctactatgtaaaaggaaaaatacaatcacgtgatggccgtctgcaaatgattgcacaagaaataagagaagcagttgctgaacgcttttggatacaggtgaaaaatcatgaatcggatcaagaaatttcacgtattttagaacaatttaaaggcccaatcccagtcatcatccggtatgaagaggaacagaaaaccatcgtttctccccatcattttgtagctaaatccaatgaattagaggagaaattgaatgaaatcgttatgaaaacgatttatcgctaa

SEQ ID NO: 2437 - DNA, 189 bp, Streptococcus pneumoniae
atggcagcgttcataccaggtgcgtctccgccactagtcaaaacagcaatacgtttcatattggtttatgctcctttttcttttaacattcttcttgattatatcacatttgattttaaaattcttctattttccgtatttttagcgataaatcgttttcataacgatttcattcaatttctcctctaa

SEQ ID NO: 2438 - DNA, 1008 bp, Streptococcus pneumoniae
atgaaacgtattgctgttttgactagtggcggagacgcacctggtatgaacgctgccatccgtgcagttgttcgtcaagcaatttcagaaggaatggaagtgtttggtatctatgacggatatgctggtatggttgccggtgaaattcatcccctagatgcagcttcagtaggggacatcatttctcgtggtggtacttttcttcactcagctcgttatccagagttcgctcaacttgaagggcaacttaaagggattgagcaattgaaaaaacacggaattgaaggtgtagttgttatcggtggtgacggatcttaccacggcgctatgcgtttgactgaacatggcttcccagctattggtcttccaggtacaatcgataacgatatcgttggtactgactttacaatcggttttgacacagcggttactactgccatggacgctatcaataaaattcgtgatacatcatcaagtcaccgtcgtacttttgtaatcgaagttatgggacgtaacgctggtgatatcgctctttgggctggtattgcaactggtgctgatgaaatcatcatccctgaagcaggcttcaagatggaagatatcgtagcaagcatcaaagctggttatgaatgtggtaaaaaacacaatatcatcgtcttagctgaaggtgtgatgtcagcggctgaatttggtcaaaaacttaaagaagctggagatacaagcgaccttcgtgtaacagaacttggacatattcaacgtggtggttctccaactgcgcgtgaccgtgttttggcgtcacgtatgggtgcacatgctgttaaacttcttaaagaaggtatcggtggtgttgcggttggtattcgtaacgaaaaaatggttgaaaatccaattcttggtactgcagaagaaggggcattgtttagccttactgcagaaggtaagattgtggttaacaacccgcacaaagccgatattgagctatctagcttgaataagagcttgtcataa

SEQ ID NO: 2439 - DNA, 708 bp, Streptococcus pneumoniae
atgaacaaacgtgtaaagatcgttgcaactttgggtcctgcggtagaaatccgtggtggtaaaaaattcggtgaggatggatactggggtgaaaaacttgatgttgaagcttcagctaaaaacattgctaaattgattgaagctggtgctaacacattccgattcaacttctcacacggcgaccaccaagaacaaggtgagcgtatggcaactgttaaacttgcggaaaaaattgcaggtaaaaaagttggtttccttcttgatacaaaaggacctgaaatccgtacagaattgttcgaaggtgaagctaaagaatattcatataaaactggtgaaaaaattcgtgttgcaactaaacaaggaatcaaatcaactcgtgaagtgattgcgttgaacgttgctggtgctcttgatatctatgatgatgttgaagttggtcgtcaagttttggttgacgatggtaaacttggtcttcgtgtggttgctaaagatgatgcaactcgtgaatttgaagttgaagttgaaaacgatggtatcatcgctaaacaaaaaggtgtgaacatccctaacactaaaattcctttcccagctcttgctgaacgcgataacgacgatatccgtttcggtcttgaacaaggtatcaacttcatcgcaatttcattcgtacgtactgcaaaagaatgtgaacgaagttcgtgcaatctgtga

SEQ ID NO: 2440 - DNA, 915 bp, Streptococcus pneumoniae
ttgctgaacgcgataacgacgatatccgtttcggtcttgaacaaggtatcaacttcatcgcaatttcattcgtacgtactgcaaaagaatgtgaacgaagttcgtgcaatctgtgaagaaactggaaacggacatgttcaattgttcgctaaaatcgaaaaccaacaaggtatcgataacttagacgaaattatcgaagcagctgatggtattatgattgctcgtggtgatatgggtatcgaagtaccgttcgaaatggttccagtttatcaaaaaatgattatcaagaaagtcaatgctgcaggtaaagttgttatcactgcaacaaacatgcttgaaacaatgactgaaaaaccacgtgcaactcgttcagaagtatcagacgtattcaacgctgttatcgacggaactgacgctacaatgctgtcaggcgagtctgcaaacggtaaatacccactcgagtcagtaactacaatggctacaatcgacaagaacgctcaagctcttcttaatgaatacggacgtcttgattcagattcatttgagcgtaactctaagacagaagtaatggcttctgctgttaaagatgctactagctcaatggatatcaaattggttgtaactcttactaagacaggtcatactgcacgtttgatttctaaataccgtccaaatgctgacatcttagcattgacatttgacgaattgacagaacgtggcttgatgttgaactggggtgttatcccaatgttgacagatgctccatcttcaactgacgatatgttcgaaatcgctgaacgtaaagcggtagaagcaggtctcgttgagtcaggcgatgatatcgttatcgttgctggtgtgccagtaggagaagctgttcgcacaaacacaatgcgtatccgcacagtacgttaa

SEQ ID NO: 2441 - DNA, 222 bp, Streptococcus pneumoniae
ttgtcgattgtagccattgtagttactgactcgagtgggtatttaccgtttgcagactcgcctgacagcattgtagcgtcagttccgtcgataacagcgttgaatacgtctgatacttctgaacgagttgcacgtggtttttcagtcattgtttcaagcatgtttgttgcagtgataacaactttacctgcagcattgactttcttgataatcattttttga

SEQ ID NO: 2442 - DNA, 201 bp, Streptococcus pneumoniae
agaaaggcatttaacatcactttgcaaaaggcaaatactaaactagagaaaccgataaaccagccccttagttcccatattttcaggcacacactccttagtacactagctgagaagaatgctataatggttagagtggaacacaaaaacgctaaaacagtaaataacatctacactcacgtaagtaaaagaatggagtaa

SEQ ID NO: 2443 - DNA, 303 bp, Streptococcus pneumoniae
ccgctcgatgcaggacaacgatttagatatggagtttccattatcccagacgactacgacccaatcgcttatgtcgtcagcaagtccatggagccaaagataagaaacagcgactacctatttatcaagaataccccacagattgactataataccatcggcatcttccaagtagacggcgctaactatgtcaagaaactccgccaaggctaccttaaaaaaactcaatcccaaataccccgacatccacctagacgaaagcaaccatattcgtaccatcgggaaagttgtcaggctatatag

SEQ ID NO: 2444 - DNA, 255 bp, Streptococcus pneumoniae
ttggatactaagataggtataagtaaaaacaccattagaaattatgaaaaaagggttaggtctactaagaaaaatactatatttgacttagttaaagtattcagtagcttgattgatgccctcttttctccagttcaaaaggattctcctagcgatatccaatctatctacgaccaacgggcaccacccagacaaggtaaagttctgacctatgccgagaggcaactgtatgatcagaaaaacgaagtatcgtaa

SEQ ID NO: 2445 - DNA, 873 bp, Streptococcus pneumoniae
atgaagaaatcaagaaaattagccacattaggaatctgttcagctttgtttttaggcttggctgcttgtcaacaacaacatgctacttctgaggggacgaatcaaaggcaaagcagttcagcgaaagttccatggaaagcttcatacaccaacctaaacaaccaggtaagtacagaagaggtcaaatctctcttatcagctcacttggatccaaatagtgttgatgcattttttaatctcgttaatgactataataccattgtcggctcaactggcttatcaggagatttcacttcctttactcacaccgaatacgatgttgagaaaatcagtcatctctggaatcaaaagaagggcgattttgttgggaccaactgccgtatcaatagttattgtcttttgaaaaattcagtcaccattccaaagcttgaaaagaatgaccagttgcttttcctagataatgatgcgattgataaaggaaaggtctttgattcacaagataaggaagagtttgatattctattttcgagagttccaactgaggcaactacagatgtcaaggttcacgctgaaaagatggaaacattcttctcacaatttcaattcaatgaaaaagctcgaatgctgtctgtagtcttgcacgacaatctggatggcgagtatctgtttgtaggccacgttggggtcttagtacctgctgatgacggtttcttatttgtagagaaattgactttcgaagagccctaccaagcgattaaatttgctagtaaggaagattgctacaagtatttgggcaccaagtatgcggattatacaggcgagggactggctaagccttttatcatggataatgataagtgggttaaactttaa

SEQ ID NO: 2446 - DNA, 384 bp, Streptococcus pneumoniae
atgaattatgaagcaagtaaacaactaactgatgcacgatttaaatgtcttgttggtgttcagcgcaccacttttgaagagatattagctgtattaaaaactgcttatcaacttaaacacacaaaagggggacgaaaacctaaattaagcctagaagaccttcttatggccactcttcaatatgtgcgagaataccgcacttatgaacaaattgcggctgtttttggtatccacgaaagcaacttactccgtcggagccaatgggttgaagtaactcttgttcaaagtagttttacgatttcaagaactcctctcagttctgaggacacggtaatgattgatagacattcccatcaatatcgtatctttggacatagccaataa

SEQ ID NO: 2447 - DNA, 312 bp, Streptococcus pneumoniae
atggaattaaaagattttacagaaaaagaacaggaaatgattaagaaaaggcttacaatgtctaatattagtgacaaagaaactactgagaagattctggcgctagtaccacaagacttgattaagcgaatcccgttttttgtcagaaaacatgctacaacacgtacgattaaacgcatttcaattgaacaccctgaactctacgctgtagctcaaacaagtggtgagattccagaaaaagaatgcgaagaattgcgtcagattatcacaactatctttgaacaaaagatgaataagcatagtattaagtag

SEQ ID NO: 2448 - DNA, 717 bp, Streptococcus pneumoniae
atgaaaaaatattttattggcggtttgggaagcaatgcctatcatagcaaggattttcttcaagaactagattcgcaggtctattttctaaatccatatgaaaagcatcttcgagatgaaacagaattgaaatcatggtttaaaaatgagattgtagaggaagaatttatctgtctgataggtcattctcttggaggagatttagctcgttatctcgcatcggaatttgaagaagtaaagaaactgattcttttggatggtggctatctagatttagataagattttacctttggatacagagttagaggaaactaaaaattatatcaaatctcaaattgttttggacttagatgttcttacttctaaagaaaaatctgaagcaaagcattggtcagaaaatatggagaaagctgtaagacagtcctatcactggaatgttgagtataatagatatgagttggctataaattatgaaaatatagaagcgatactccgcctacggagaaaaatacaagcttttaagagagaagtgggagataccttgtttattagtcctcgctatcctaatgaagctacatggagagaggaagccctaaaagaattgccagactattttgatactatttttttagaaaactttggccatgagctttatactcaagcacctaaagaaatcgctagtctaatgaatgagtggctcgcttattttctatga

SEQ ID NO: 2449 - DNA, 396 bp, Streptococcus pneumoniae
ttgttcgtttttatcttgattttcttaaaaagctctatatacatagggattttctggtttatcgactttggtaaagctgtcgatttccaaggttggaaggttttgtttgagttctttatggtagtgattgaccagttttcctttggctgttatccaagtgttgttttcatactgccgggtattgcccttggtcagcaatccatagacaccagaatctgcgatacagtggataatgccgaatcggaacagaaattgactattggcatgactggggtcgttatagacaaagcctgtaaactggattgtcttgccctcaaactcatctggatagtcgtagatagcctccatgacttccatatagttttcattagtgatctgaatactatcttgggataa

SEQ ID NO: 2450 - DNA, 816 bp, Streptococcus pneumoniae
atgattcgatttttagttttagctggctattttgaactgactatttacctccatctgtcgggcaaactaaaccagtacatcaacatgcactattcctatctggcctatatctccatggtgctttcttttatcttggctatcgttcaattgtatatctggatgaagcaagtcaaaacccacagtcatctgaacagccgattagccaagatgacgagtatttctcttctggctattccacttgtcatcggcttaactttcccaactgttagcttggattctcagactgtttctgctaaaggttatcatttccccctatcggaaggaacggatctagccattcagacaagcgaagggacgacaagccaatatttgaaaccagataccagttcttatttttcaaaatcagcctatgaaaaggaaatgcgaacggcggcggataaatacttatcccaagatagtattcagatcactaatgaaaactatatggaagtcatggaggctatctacgactatccagatgagtttgagggcaagacaatccagtttacaggctttgtctataacgaccccagtcatgccaatagtcaatttctgttccgattcggcattatccactgtatcgcagattctggtgtctatggattgctgaccaagggcaatacccggcagtatgaaaacaacacttggataacagccaaaggaaaactggtcaatcactaccataaagaactcaaacaaaaccttccaaccttggaaatcgacagctttaccaaagtcgataaaccagaaaatccctatgtatatagagctttttaa

SEQ ID NO: 2451 - DNA, 906 bp, Streptococcus pneumoniae
atgactgcttttcaacaactcccatctagtgtacttcaaactggagccatttttctctccattatcattgaagcccttcccttcgttctgataggaagtattgtctcagggctgattgaagtttatatcacacctgacaaggtttatcattttctccctcgaaatcgttgggggagaatcttttttgggacctttgtcggtatacttttcccttcctgtgaatgtggaatcgtccccatcatcaatcgttttctggaaaaaaaggttccaagttacacggccgttccttttcttgtgacagcacctgttatcaatcccattgttctttttgcgacctattctgcctttggcaactccttccatgtcgccctattacgagctctgggttccatcgttgtggctgtaatactaggaatttttctaggatttttctggcaagaaccgattcaaaaagaaaatcgtctagcctgtcatgagcatgatttttctcacttaagtcctgcaaaaaaagtttttcaggtctttgtgcaagccattgatgagttttttgatacgggacgttatttggtatttggctgtctctttgcctctgttatacaggtttatgttccgactcggattctgacctctatcagtgcgactcctctttttgccatcctgctcttgatgattttggcctttcttctttcgctctgtagtgaggcggatgcctttatcggggcttctctactctcgagtttcggtttggctccagttctggcttttctcgtcattggcccaatgctggatatcaaaaatattcttatgatgaaaaattacttgaaagcacgatttattagtcacttcattacgattgtgactctggtcgttttagcctattctctcttgattggagtcatcctatga

SEQ ID NO: 2452 - DNA, 2130 bp, Streptococcus pneumoniae
atggataaaaaatatgaaaaaatctctcaggatttgggagtgacgttaaagcaaattgataccgttctaagtttgacagctgaaggggcgactattccctttatcgcgcgttatcgcaaggacatgactggtagtctggatgaggtggcgattaaggctattattgatttggataaaagtctgacaaatctcaatgaccgtaaggaagctgtcttagctaagattcaagaacaaggtaagttgaccaaggaattggaagaagctatcttagttgccgaaaaattagcagacgttgaagaactctatcttccttataaggaaaagcgtcgtaccaaggcaaccattgcccgtgaagctggactctttcctcttgctcgcttgattttgcagaatatagttgacttagagaaagaagctgaaaagttcgtctgtgaaggatttgcgactggcaaggaagccttgaccggtgcagttgatattttggtcgaagccttatcggaagatgtgaccttgcgttctatgacttatcaggaagtgctgagacactctaaactcacttctcaagccaaggatgaaagtcttgatgaaaagcaggtttttcagatttattatgatttttcagagacagttggaactatgcaaggctatcgtaccttggctctcaatcgtggggagaaacttggtgtcttgaagatcggttttgaacatgcgacggaccgtattcttgccttctttgctactcgtttcaaggtgaaaaatgcttatattgatgaagttgttcagcaatccgttaagaaaaaggtcttgcctgctattgagcgtcgtattcggacagaattaactgagaaagctgaagagggagctatccaacttttttctgacaatctgcgcaatctcctcttggttgctccactgaaagggcgcgtggttcttgggtttgacccagcctttcgtacaggtgccaagctagctgtcgtggatgcaacaggaaaaatgctgacaactcaggttatttatcctgttaaaccagcatcagctcgtcaaatcgaagaagccaagaaagatttagcagatttaattggtcaatacggtgtagagattattgccattggaaatggaacggccagtcgtgaaagtgaagcttttgtagcggaagttctgaaagatttccctgaagtcagctatgttatcgttaatgaaagtggtgcttctgtctattctgccagcgaacttgctcgtcaggagtttccagacttgaccgttgaaaaacgctctgccatttctatcgcccgtcgtttgcaagatcctcttgcggaattggtcaaaatcgatcctaagtcaattggtgtcggtcaataccaacacgatgtcagtcagaagaaactctctgagagtctggactttgttgtcgatacagtggttaaccaagttggtgtcaatgtcaatacagctagcccagctcttctttcacacgtagctggactcaataaaaccatttctgaaaatatcgtcaaataccgtgaggaagagggaaaaatcacttcacgctcccaaatcaagaaagttcctcgtctgggagccaaggcctttgagcaggctgctggtttccttcgtatccctgaaagtagcaatatccttgataatacaggagttcacccagagaattacactgcagttaaggaactcttcaaacgtttagatattaaagacctaaacgaagaagcccaaagcaaactcaagtccctttcagtcaaggaaatggctcaagagctagacctcggtccagaaacccttaaagatatcattgcagatcttctcaaaccaggtcgagatttccgtgattcctttgacgcacctgtgcttcgccaagatgtcctagatatcaaagacctagtggtaggtcagaagctagaaggtgttgtgcgtaacgttgttgacttcggtgccttcgttgatatcgggattcacgaggacggcttgattcatatttctcatatgagtcgcaagtttatcaaacaccctagtcaagtggtgtcagttggagatttggtgagcgtttgggttaagcaaattgatactgaacgtgaaaaagttaatctgtctctcctagctccaaatgaaactgactga

SEQ ID NO: 2453 - DNA, 450 bp, Streptococcus pneumoniae
atgaaactgactgattacgtcaagcaggtttcactagaagacttcggcagaccttttatccatcatgtccagtggaataggcgtctacgttcgacaggtgggcgatttttccccaaagatgggcatttggattttaatcccaaggtttatcaggaactggggttggacgtttttaggaaaattgtccgacatgaactctgtcattatcacctttatttccaagggaagggctatcaacacaaggatcgggattttaaggaacttttgaaagcagtggatggattacggtttgtaccatccttgcccaatagtaactccaaaccactcaagctctatcgttgccaatcctgccagcaaacttatcagcgcaagcgtaggattgataccaaacgctatcgctgtggactttgtcgaggtaaattgcttctgataaatcagcctgaggactga

SEQ ID NO: 2454 - DNA, 255 bp, Streptococcus pneumoniae
atgtctaacctagcagaaagaggaaatatcatgaacagtaaattttataaaatgagacgcaatcgcatgatttcaggagttctggcaggtctgtcagacaagtggaattttgatgttaccctagttcgtttcttgtttgccatttttacagttgcaaactttggacttggcgtgattatctatatcatcctagcttctatcatgcctaccaaggaagaaatcgaagcagaaatgtacggaacaggcccacgttaa

SEQ ID NO: 2455 - DNA, 192 bp, Streptococcus pneumoniae
atgaaacacaaagaacatatactcatcggacttctctatctgctctctccattcatcggtcagctcttagttgaacacacacactttatcggtacagaatttaccgggactgcttatgttatttgctggttatcagttgttatcagcacccaccatttttccaaaaatgtttggtctcagcagcaaaaataa

SEQ ID NO: 2456 - DNA, 759 bp, Streptococcus pneumoniae
atgacacttttagatgtaaaacacgttcaaaaaatttataaaacacgttttcagggcaaccaagtagaagccctcaaggatattcactttaccgtcgaaaagggtgactacgttgccatcatgggtgagtctggttctggtaaatcaactcttctcaatattctagctatgctggataaaccaagtcgtggtcaggtttacttgaatggaactgacaccgcaaccattaaaaattcacaggcctctagcttccgtcgtgaaaagttgggctttgtcttccaagactttaacttgctagatactctatctgtaaaggacaatatcttgcttccgcttgtcttgtcaagaagacctattacagagatgatgaagaaattggtggtgacagctgagaatctgggaataaaccaattacaagagaagtacccttacgagatttctggtggccagaaacagcgtgtagcagtagcacgcgccatcatcactgaacctgaaattctccttgcggacgaaccgacaggagctcttgactccaagtcatctgcagccttacttgatgtctttgatgaaatcaatgagcgcggccaaaccattctcatggtaacccactcaacagcagcagctagcagagctaaacgtgtactctttatcaaagacggcattctttacaatcaaatctaccgtggagagaagacagaacgtcagatgttccaagaaatctctgataccttgactgtcatggcaagcgaggtgaattag

SEQ ID NO: 2457 - DNA, 225 bp, Streptococcus pneumoniae
ttgataaagagtacacgtttagctctgctagctgctgctgttgagtgggttaccatgagaatggtttggccgcgctcattgatttcatcaaagacatcaagtaaggctgcagatgacttggagtcaagagctcctgtcggttcgtccgcaaggagaatttcaggttcagtgatgatggcgcgtgctactgctacacgctgtttctggccaccagaaatctcgtaa

SEQ ID NO: 2458 - DNA, 1989 bp, Streptococcus pneumoniae
atgtttcgattaaccaataagttagcggtatcgaacttgattaaaaaccgcaaactctactatccttttgcgctggctgttctcttggcagtcactctcacctatctcttttactctctaaccttcaatcctaagattgcggaaatccgtggaggaacaaccattcaggctacacttggatttggtatgtttgtcgtcacccttgcgtcagccattatcgttctctatgccaatagttttgtcatgaagaaccgttccaaggaactaggaatttatggcatgttgggcttggagaagcgtcatcttatcagtatgacctttaaggagttagtggtatttgggattctaactgttggagcgggtatcggtattggagccttgtttgacaagttaattttcgctttcctgctcaaactaatgaaattgaaggttgagctggttgctaccttccagacgaaagttgtcattacagtgcttgttgtcttcggtttgattttcctaggcctcatgttcctgaatgcccttcgaatcgcccgtatgaatgccctccagctctctcgtgagaaagctagtggagagaaaaaaggtcgcttccttcctctccaaaccattcttggttccataagtttaggaattggctattatcttgcccttacggtaaaagatcctcttacagccttaacaaccttcttcatagctgttttactggttatctttgggacttatctcttgtttaatgcagggattaccgttttcctccaaatcttaaagaaaaataagaaatactattaccaaccaaataacctcatatctgtttctaacttgattttccgtatgaagaaaaatgcagttggactagcaactatcgctattttgtcaacaatggttttggtaaccatgtcagcagcgacaagcattttcaattccgcagaatcctttaaaaaagttctaaatcctcatgattttggggtttcaggacaaaatgttgaaaaagaagatttggacaaactcttgagccagtttgcaagtgacaatggttataagattaaagaaaaagaagtgtttcgttacacttactttggtgttgcgaaccaagaaggaaataagttaaccttttttgaaaaaggacaaaatcgtgtccaacccacaacagttttcatggtatttgaccaaaaagattatgaaaatatgactggtcaaaaactgtctctatcaggaaatgaggtcggtctctttgccaaaaatgacggactgaaaggacagaaaactctaattctgaatgatcatcaattttctgtaaaagaagaatttaataaagattttattgtcaaccatgtcccaaatcagtttaatattttgactgctgattacaattaccttgttgtacctgatttacaagcctttttgaaccaattcccagattcggatatctataatcagttttacggtggtatgaatgtaaatgtcagtgaagaagaacaactcaaggtcgctgaggagtatgaaaactacctcaatcaatttaatgctcaattagacacagaaggtagctatgtttatggtagcaatctagcagatgctagttctcagatgagtgccctctttggtggtgtcttctttatcggtattttcctatccattatctttatggtcggaactgttctggtcatctactacaaacaaatttctgaaggctacgaagaccgtgaacgctttattatcttgcagaaagtcggtttggaccaaaagcaaatcaagcaaaccatccacaaacaggttttaactgttttcttccttcctttgctctttgccttcatacatctcgcctttgcctaccatatgcttagcctgattttaaaagtgattggtgtactggatacgactatgatgttgattgtgaccttgtctatctgcgctatcttcctcatcgcctatgtgctgattttcatgattacttcaagaagttatcgcaagattgtgcaaatgtaa

SEQ ID NO: 2459 - DNA, 591 bp, Streptococcus pneumoniae
gtggttatcggggttgccagtgccacgaccaatatctggattatctttttatcaggatttgcggctatcttagctggtgccttttcaatggctggtggagaatatgtatccgtttcaactccaaaagataccgaggaagctgccgtttcgcgagaaaaactcttgttagaccaagatagggaactagccaaaaaatccctctatgctgcttatatccaaaatggagaatgcaaaacttctgcccaactcttgaccaataagatctttcttaaaaatccactcaaggctctggtagaggaaaaatatgggattgagtatgaagaatttaccaatccttggcacgctgccatttctagcttcgttgcctttttccttagaagtttgcctccaatgctgtcagtgaccatattcccaagtgaatatcgcatccctgctactgtccttattgtcggtgtggcccttcttctcactggttacactagtgccagacttggaaaggatccgactagaacagctatgattcggaaccttgctattggtctcttgaccaggggagttaccttcctgctcgaacaacttttcagcatttag

SEQ ID NO: 2460 - DNA, 1095 bp, Streptococcus pneumoniae
gtgttatacttgttgttcaaccacaaacacaagaaaggcacagaaatgcaagacaattatactacaaaaggtaaacatttgacaatcgatagccgtcgcttaatcgaaagatggaaaaaagaaggaaaatcaaatagagaaattgcctctctacttggaaaagctcctcaaactatccacactaaaatcaagcgtaggacagtccgaaaatgtcttggaaaagggcgcttcaaagaggtttattctgccgactatgctcaacagtcttatgaaaacaatcgcaagcgctcggtcaagaaatcaagcttgaccaaggaactaaaggaaaagattctccactatcataaccaaaaattttcgcctgaaatgatggtgatggctaaaggggttaacgtgggaatttcaaccatttactattggattcatcatggaaaattggggttaagcaagcaggatctgctttaccctagaaaaggaaaagtgcttaagaaacaggctagcaccaactttaaacctgctggtcaatccatcgcacagcggcctgaagctatcaatcttcgcttggagaatgggcattatgagattgatacggttttacttacgagatcgaaaaactactgcttgcttgtcttgacggatcgaaagagtagacatcagatcatccgattgattccaaataaaagtgctgaggtggtcaatcaggctctaaaactcatcttaaaacaacacaagattctttccatcacggcagataatggaacggaattcaatcgcttgtctgatgtattttctgaggagcacatttattatgcgcacccctatgcctcttgggaaaggggaactaatgagaatcacaacaggctcattcatagatggttacctaagggaaccaagaaaatgactcccaaagaagtcgcattcatcgaaaagtggattaacaactatcctaaaaaatgcttgaactacaagtcacccagagaagacttcttgatggctaacttgaacttgaaatttagcgtcagaaacaaatcacgaaatcgattcaaattttgcaggtcgtttaaatatcctgcgcgcaggtgttcttggtgctaa

SEQ ID NO: 2461 - DNA, 183 bp, Streptococcus pneumoniae
gtggcttttcaaccacgcttcggcattcaaccctgcctgtccgtaggcattttttactcgggtttatatttgctagaaaacatcatctcattttctaagctttattactatatcatgtttttaagaacttgtaaagtattttttgataaaaaacaaaaatataatagattgaaactagaatag

SEQ ID NO: 2462 - DNA, 1476 bp, Streptococcus pneumoniae
ttgaaagagttagatcaaaaccaagccccaatttatgaagccttggtgaagttacgcaagaaaaggattgttccctttgatgttccaggtcacaagcgtggacggggaaatccagaacttgtcgaactcttaggagaaaaatgtgtaggcattgatgtcaattcgatgaaacccttggataatttaggccatcctatttcgattattcgtgatgcagaggagctggctgcagatgcttttggagctagccatgcctttctaatgattggtggaacaacttcatcggtgcagactatgattctggcaacctgcaaggcaggagataagattattctgccacgaaatgtccataaatctgctatcaatgcgttggttctatgtggtgccattcccatctatatcgagatgagtgtagatcctaagattggtatcgctttaggtcttgaaaatgaccgagtagcacaggccataaaggaccatccagatgctaaggctatcctaatcaacaatcctacttactacggcatctgttcagacctaaaggggttgacagaaatggctcatgaagctggcatgatggttttagtagatgaagcccatggagcgcatttgcatttcactggtaaacttccaatttctgctatggatgcaggagctgatatggcagcagtttccatgcataagtctggtgggagtttgacacaaagttcgcttcttttaatcggggagcagatgaatcccgagtacgttcgtcagattataaacctgacccagtctacatctgcctcttacttattgatggctagtttggatatttcacgtcgcaacttggcccttcgtggtaaagagtcgtttgaggaagtcattgagctatccgagtacgctcgtcatgaaatcaatgccattggcggttactatgcttactcaaaagagttaatagatggtgtgtcggtctgtgattttgatgtaaccaagttgtcagtttacactcagggaataggcttaacaggtatcgaggtttatgacctcttgcgagacgaatacgacattcagatcgagtttggtgatatcggcaatatcttggcctatatttccatcggcgaccgcatccaagacatcgagcgcttggttggtgctctggctgatattaagagactctattcacgagatgggaaggacttaatagctggagaatatattcagcccgagttggtgctgtctccacaagaagccttctattcagagagaaaaagtttgaccttagatgagtctgttggacaggtctgtggagaatttgtcatgtgctatcctccagggattcctatcttggctcctggtgaacgcattacacgagaaattgtagactatatccaattcgccaaggaacgtggttgctccctccaagggacggaagatccagaggtcaatcatatcaacgttattaagagaaagacaaactataagaaaagtcaatag

SEQ ID NO: 2463 - DNA, 237 bp, Streptococcus pneumoniae
ttggataaaatcgttggaaagcattcagaatatacctaccaactcttgacacgctaccctaatcctcagaaaaggattgaggcaggatttgataagctgatagaaattaagcgattgaccgcttctaattcaagggctttttgccgtgctctaaaatcatcgccaaatcatcaaattgaaataagaaatagtttagataaaactattgacttttcttatagtttgtctttctcttaa

SEQ ID NO: 2464 - DNA, 528 bp, Streptococcus pneumoniae
atgctttatgtgggcattgatgtcgctaaaaataaacacgatgttacagccttgaatgttccaggaaaaactgttcttaaaccactcactttttcaaataataaagctggttttgaactcttagatctgtctcttcgacaactcaaccaagactgtctcatcgctcttgaaaataccggacattatgcctttaatctactgaacttcctgcatgaacaaggatataaagtttacacctacaatcctttgctcatcaaggaatttgccaaatcattatcacttcgcaagactaaaacggataagaaagacgctcatggcatcgctcttaaacttctttctgaccccaatcgtgaacaatttcaacacgataatcggcaagtagaactaaaaatactggctagacatattcatcgtctcaagaaaaacagtctgattggaaagtacaatacactcgttgtcttgatatcatctttcctgagttggataaaatcgttggaaagcattcagaatatacctaccaactcttga

SEQ ID NO: 2465 - DNA, 861 bp, Streptococcus pneumoniae
atggatttatggttttctgaagttcatactccagatgtcaaattgtctctgagaacagccaagcaactttacgctggaaaaagtgaatggcaggatatcgaagtcttggatacgccagcttttgggaaaatactgattttaaatggccatgtcttgttctcagatgcggatgatttcgtctacaatgaaatgaccgttcacgttcccatggctgtccacccaaatccaaagaaagtattggttattgggggtggtgacggcggtgttgcccaagtattaacactctatcctgaactggaacaaatcgatatcgtggaaccggatgagatgttggtcgaagtctgtcgtgagtatttcccagactttgctgcagggctagatgatcctcgtgttaccatttactaccaaaatgggctacgctttttgcgaaactgcgaagatgattacgatattatcatcaacgatgcgacagatccatttggccatacggaaggactctttaccaaggaattctacggcaatagttatcgagctctgaaggaagacggcatcatgatttaccagcatgggagtcccttctttgacgaggatgagtcggcctgccgaagcatgcaccgcaaggtcaatcaagcctttccaatcagtcgggtttatcaggcccatattccaactagcccagctggctattggttgtttggatttgcatcgaaaaaataccaccctgtcaaagattttgacaaggaaggttggaaaaaacgccagcttttcacagaatactacactgcaaacttacacgtgggatcctttatgttgcccaagtatgttgaggacattttagaagaagaggaaggaaaaaaatga

SEQ ID NO: 2466 - DNA, 1260 bp, Streptococcus pneumoniae
atgagtcgtttactagttattggttgtgggggcgttgcccaagttgctatttcaaagatttgtcaagatagcgaaacatttacagagattatgattgctagccgtaccaagtcaaaatgcgatgacttgaaagcgaagctagaaggcaaaacaagtactaaaattgaaactgcagcacttgatgctgacaaggttgaagaagtgattgccctgattgaaagctacaaaccagaagctgttttgaatgtagctctgccttatcaagatttaaccattatggatgcttgtttggcaacaggtgttcactatatcgatacagccaactacgaagcagaagacacagaagaccctgagtggcgtgctatctacgaaaaacgttgtaaggaacttggttttacagcctactttgactactcatggcagtgggcttatcaagagaaattcaaagaagcaggcttgactgctcttcttggttctggttttgacccaggtgtaactagtgtcttttcagcttatgccctcaaacactattttgatgaaatccattatatcgacattttagactgtaatggcggtgaccacggttatccatttgcaaccaactttaatccagaaattaatctccgtgaggtttctgcgccaggttcttactgggaagatgggaaatgggtcgaagtcgaagctatgtctatcaagcgtgagtatgatttccctcaagttggacaaaaagatatgtatctccttcaccatgaagaaatcgaatcattggccaagaacattccaggtgtcaaacgcattcgtttctttatgacttttggtcaatcttacttgacgcacatgaaatgtcttgaaaatgttggactccttcgtacggataccattaactttaacggccaagaaattgttccaattcaatttttgaaagccttgcttccagatcctgctagccttggcccacgtacagtcggaaaaaccaatattggatgtatctttacaggtgtcaaagatggcgttgaaaagactatctacatctacaatgtttgcgaccatcaagagtgctatgcagaagtcgggtcacaagcaatttcatacacgacaggcgttccagccatgattgggacaaaattagtcatgaacggaacttggaaacaagctggagtgtataaccttgaggagttagatccagatccattcatggaagctttgaatgagtatggtttgccatgggttgtggttgaaaatccacaaatggtggactaa

SEQ ID NO: 2467 - DNA, 1128 bp, Streptococcus pneumoniae
atgaagttagaacaagtaccaacaccagcctatgttattgacttggccaagttagaagctaattgccgcattctacaatatgtacaagaagaggtcggttgcaaggtcttgcttgcccagaaggcatattccctctacaaaacttatcccttgattagccagtatctatcaggtacgacagctagtggactctatgaggccaaattggcaagggaagaatttcctggtgaagtccatgtatttgcgcctgctttcaaggatgcagacttggaggaattgctagagataatggaccatatcgtctttaactcagagagacagttgcgtaaacacggtccgcgttgtcgagaggctggtgtcagtgttggtttgcgcctcaaccctcagtgttcaactcaaggagatcacgcgctctatgacccttgtgcaccaggttctcgctttggagttactatagacaagattccgagtgatttgctagatttggttgacggacttcattttcataccctttgcgagcagggagcagatgatttacaaacaactttgaaagcagtagaagaacagtttggtccctacttacatgaggtaaaatggctcaatatgggtggtggtcatcatattacaagagaaggttacgatgtggatttgctgatttcagaaatcaagcgtatccgaaaaacttacaatcttgaaatctatatcgagcctggtgaagccattgcgcttaatgcgggttatttagcaactgaggtattagatattgtagaaaacggtatggaaatcttggttttagacgcctctgcgacctgccatatgcctgatgtacttgagatgccctatcgtccatctttgagaaatggctttgaggcacaggaaaaagcccatacctacagactttcttctaatacctgtctgacgggcgatgtgattggtgattatagttttgaaaatccagtccaaatcggagacagactttattttcaagacatggccatttattcttttgtcaaaaataatacctttaatggtattggattgccaagcctctatctcatggacgaacagggagactgtagcttactcaaagcttttggctatcaagactttaaagggagattatcatga

SEQ ID NO: 2468 - DNA, 1086 bp, Streptococcus pneumoniae
atgatggacagtccaaaaaaattaggctatcacatgccagcagagtacgaaccccatcatggtaccctcatgatatggccgactcgaccaggatcatggccttttcaaggaaaggctgctaaaagagcatttactcagatcatcgagaccatagcagaaggggaaagagtctatcttttggtggagcaggcctatctatctgaagcccaatcctatcttggagacaaggttgtttatttagacattcccaccaatgatgcctgggcgcgtgatactggcccaaccattctcgtcaatgataaaggtaagaaattagccgtggattgggccttcaatgcttggggaggcacctatgatggtctttatcaagattatgaagaggatgaccaagtagccagtcgttttgctgaggccttgggaaggcctgtctatgatgctaaaccttttgtactggaaggaggcgcaatccatagcgatggtcaaggaactattctcgtaactgaaagttgcttgcttagtcctggtcgcaatcctaacctgactaaagaggagattgaaaacacattattagaaagtcttggtgctgaaaaagttatttggcttccttatggtatttatcaggatgaaaccaatgaacacgtcgataatgttgctgcctttgttggtcctgctgagcttgttttggcttggacagatgacgaaaatgatccccagtatgccatgtcaaaagcagatctcgaactcttagaacaggaaacagatgcaaaaggttgtcacttcaccattcataaattgcctatccctgcagttcgacaagttgtgacagaagaagatttgccaggctacatctatgaagaaggagaagaaaagcgatacgcaggtgaacgactagcagcttcctacgtaaacttttatatcgccaacaaggctgtcttggttccacagtttgaggatgtaaacgaccaagtggccttagatatcctcagcaagtgtttcccagaccgtaaagttgtcggaataccagccagagatattctcttaggtggtggcaatatccactgtatcacccaacaaattccagaatag

SEQ ID NO: 2469 - DNA, 876 bp, Streptococcus pneumoniae
atgagaaatgtaagagttgcaaccattcagatgcaatgcgctaaggatgtggcaacaaatatccaaaccgcagagcgtttagtacgtcaggctgctgagcaaggagcccaaattattctcttgcccgagttgtttgaacatccctatttctgtcaggaacgtcagtatgactactaccagtatgcccaatctgtagcggaaaatactgccattcagcattttaaggtgattgctaaggaactacaagttgttttaccaatcagtttctatgaaaaagatggtaatgtcttgtataactctattgccgtcattgatgcagatggggaagtgctgggcgtttatcgaaagacccacataccagatgaccattattatcaagaaaaattctatttcacgcctggtaacactggtttcaaggtctggaatactcgctatgctaagattggtatcggtatctgttgggatcaatggttccccgaaacagcccgctgtcttgctctgaatggggcagaattgctcttttatccaacagccatcggttcagagccgattttggatacagatagttgtggtcactggcaacgtactatgcaagggcacgcagcagcgaatattgttccagtcatcgcagccaatcgttatggtttagaggaggttactcctagtgaggaaaatggcggacagagttccagtcttgacttctacggttcctcctttatgacggatgaaacaggagctattctagaacgagctgaaagacaagaagaagctgttctgttagctacttatgacctagacaagggagcaagtgaacgcctaaactggggcttgtttcgagatagaagaccagaaatgtatagacaaattacagattag

SEQ ID NO: 2470 - DNA, 810 bp, Streptococcus pneumoniae
atgattaaactactagccttggatatggatggaaccctcctcaatgaagccaaggaaatcccacaggctcacatcgctgctattcaccaagccattgaaaaaggtgtcaaactggttctctgtacgggtcgcccccttttcggtgtcctcccctactacaaaaaactgggactcgacctccagaatgagtatgtgattgttaacaacggttgttcaactcaccagactagcgactggggcttggttgactggcaagaacttagtccagctgacatcgaatacctctatgaccttgctgaaaagagtgatgttcagttgacactttttgacgagtcacattattttgttctcggtggcaaacccaatcaagttattgaaaatgatgctaaactagtattttcagacctgactgaaatttctcttgaagaagcgactagtggaaagttacggatgttccaaggtatgtttttaggaacaaaagaacaaacagacgattttgagcagcgttttgctgaagagctttgccaacgattcagtggagttcgttcgcagcctgtcatttatgaagcaatgccgcttggaacgacaaaggctactgctctttcacgactagctgagattttgaagattgattcctcagagattatggccatgggcgatgctaataacgatatcgaaatgctccagtttgcagggcttgggattgcaatgggaaatgccagcgattatgtcaaatctcttgcggatgccgttacctcaagcaacgaagaagacggcgttgcgcgtgctattgagaaatatattctataa

SEQ ID NO: 2471 - DNA, 222 bp, Streptococcus pneumoniae
atgattttaatgacaaaaaatataaatctaacaaatgaagaattagagctgatacaaggtggagcagatccatatggtaaaaatcctaatggtaggtacgattgggaaatagaaccagtattaactctgccggttcatggattttgtcccagaggcacctatgatttaggatatattggaggaggcaatcatctttgcaaaggaagtgctgcgagattttaa

SEQ ID NO: 2472 - DNA, 672 bp, Streptococcus pneumoniae
atgaaaaaacgggctattcaaattttactagcattgtccttaattttttacaaatcaacttggttttggagagttttcaatcacctcgcaaagccctatctaccagcaagtcgtgaattttttcagattctgcttttgatggagagcggagttcttttcttagcggtcatctatctactggtttttgcaggaaagaaaatttttcatttcaagtggcagctgaggtacttcatctaccttttactgggctacatcatttcatatatgtctgacttcctcttttcgtatttcatatccctgtcttcaaatcagatttctctgaatgaaacggtagaaatgatggggagacaggagttcccttatttcttgctcatcgtttgcttcatcgcccctattgctgaggaattgatttatcgaggtgtgcttatgacaacctttttcaaaaactcaccttggtacggagatgttttgctttctgctattattttcggttatattcatatcaattttgctttaactcctcttgcttttttcatttatgctagtggaggtcttattttagctctattgtatcgcatgactaaaaatctctactatccaatactagttcatattctcatcaatatcactgccttctgggatgtttggttactcctattttcaggaagttag

SEQ ID NO: 2473 - DNA, 909 bp, Streptococcus pneumoniae
atgaacattcaacaattacgctatgttgttgccattgccaatagtggtactttccgtgaagctgctgaaaagatgtatgttagtcagccgagtctgtctatttctgttcgtgatttggaaaaagagttgggttttaagattttccgtcggaccagctcagggactttcttgacccgtcgtgggatggaattctatgaaaaatcgcaagaattggttaaaggatttgatatttttcaaaatcagtatgccaatcctgaagaagaaaaagatgaattttctgttgctagccagcactatgacttcttgccaccaactattacggccttttcagagcgctatcctgactataagaacttccgtatttttgaatcaactactgttcaaatattagatgaagtggcgcaagggcatagtgagattgggattatctacctcaacaatcaaaataaaaaggggattatgcaacgggttgaaaaattaggtctggaggtcatcgaattgattcctttccatacccatatttatctccgtgagggtcatcctttagcccagaaagaggaattagtcatggaggatttagcggatttaccaacggttcgtttcactcaagagaaagacgagtacctttattattcagagaactttgtcgataccagcgctagctcacagatgtttaatgtgacagaccgtgccaccttgaatggtattttggagcggacggacgcctatgcgacaggttctggatttttagatagtgacagtgttaatggtattacagttattcgtctcaaggataacctagataaccgcatggtctatgttaaacgtgaagaagtggagcttagtcaagctgggactctcttcgtagaagtcatgcaagaatattttgatcaaaagaggaaatcatga

SEQ ID NO: 2474 - DNA, 462 bp, Streptococcus pneumoniae
atgaaaaaaagagcaatagtggcagtcattgtactgcttttaattgggctggatcagttggtcaaatcctatatcgtccagcagattccactgggtgaagtgcgctcctggattcccaatttcgttagcttgacctacctgcaaaatcgaggtgcagccttttctatcttacaagatcagcagctgttattcgctgtcattactctggttgtcgtgataggtgccatttggtatttacataaacacatggaggactcattctggatggtcttgggtttgactttgataatcgcgggtggtcttggaaactttattgacagggccagtcagggctttgttgtggatatgttccaccttgactttatcaactttgcaattttcaatgtggcagatagctatctgacggttggagtgattattttattgattgcaatgctaaaagaggaaataaatggaaattaa

SEQ ID NO: 2475 - DNA, 888 bp, Streptococcus pneumoniae
atggaaattaaaattgaaactggtggtctgcgtttggataaggctttgtcagatttgtcagaattatcacgtagtctcgcgaatgaacaaattaaatcaggccaggtcttggtcaatggtcaagtcaagaaagctaaatacacagtccaagagggtgatgtcgtcacttaccatgtgccagaaccagaggtattagagtatgtggctgaggatcttccgctagaaatagtctaccaagatgaggatgtagctgttgtcaacaaacctcagggaatggttgtgcatccgagtgctggtcatactagtggaactctagtcaatgccctcatgtatcatattaaggacttgtctggtatcaatggggttctgcgtccgggaattgttcaccgtattgataaggatacgtcaggtcttctcatgattgctaaaaacgatgatgcgcatctagcacttgcccaagaactcaaagataaaaagtctctccgcaaatattgggcgattgttcatggaaatctgcctaatgatcgtggtgtaattgaagcgccgattggccggagtgaaaaagaccgtaagaaacaggctgtaactgctaaagggaagcctgcagtgacgcgttttcacgtcttggaacgctttggcgattatagcttagtagagttgcaactggagacagggcgcactcatcaaatccgtgtccacatggcttatatcggccattcagtcgctggtgatgaggtctatggtcctcgcaagactttgaaaggacatggacaatttcttcatgccaagactttaggttttactcatccgagaacaggtaagaccttggaatttaaagcagatatcccagagatttttaaggaaaccttggagagattgagaaagtaa

SEQ ID NO: 2476 - DNA, 1884 bp, Streptococcus pneumoniae
atgaaaaagaaattaactagtttagcacttgtaggcgcttttttaggtttgtcatggtatgggaatgttcaggctcaagaaagttcaggaaataaaatccactttatcaatgttcaagaaggtggcagtgatgcgattattcttgaaagcaatggacattttgccatggtggatacaggagaagattatgatttcccagatggaagtgattctcgctatccatggagagaaggaattgaaacgtcttataagcatgttctaacagaccgtgtctttcgtcgtttgaaggaattgggtgtccaaaaacttgattttattttggtgacccatacccacagtgatcatattggaaatgttgatgaattactgtctacctatccagttgaccgagtctatcttaagaaatatagtgatagtcgtattactaattctgaacgtctatgggataatctgtatggctatgataaggttttacagactgctgcagaaaaaggtgtttcagttattcaaaatatcacacaaggggatgctcattttcagtttggggacatggatattcagctctataattatgaaaatgaaactgattcatcgggtgaattaaagaaaatttgggatgacaattccaattccttgattagcgtggtgaaagtcaatggcaagaaaatttaccttgggggcgatttagataatgttcatggagcagaagacaagtatggtcctctcattggaaaagttgatttgatgaagtttaatcatcaccatgataccaacaaatcaaataccaaggatttcattaaaaatttgagtccgagtttgattgttcaaacttcggatagtctaccttggaaaaatggtgttgatagtgagtatgttaattggctcaaagaacgaggaattgagagaatcaacgcagccagcaaagactatgatgcaacagtttttgatattcgacaagacggtttagtaaacatttcaacttcctacaagccgattccaagttttcaagctggttggcataagagtgcatatgggaactggtggtatcaagcgcctgattctacaggagagtatgctgtcggttggaatgaaatcgaaggtgaatggtattactttaaccaaacgggtatcttgttacagaatcaatggaaaaaatggaacaatcattggttctatttgacagactctggtgcttctgctaaaaattggaagaaaattgatggaatctggtattattttaacaaagaaaatcagatggaaattggttgggttcaagataaagagcagtggtattatttggatgttgatggttctatgaagacaggatggcttcaatatatggggcaattgtattactttgctccatcaggggaaatgaaaacgggctgggtaaaagataaagaagcctggtactatatggattctactggtatcatgaagacaggtgagatagaagttgctggacatcattactatctagaagaatcaggagctatgaagcaaggctggcttaaaaaggcaaatgattggtatttctacaagacaggtggttcacgagctataggttggattaaagacaaggataaatggtacttcttgaaagaaaatggtcaattacttgtgaatggtaagacaccagaaggctatactgtggattcaagtggtgcctggttagtggatgttccgatcgagaaatctgctacaattaaaactacaagtcattcagaaataaaagaatccaaagaagtagtgaaaaaggatcttgaaaataaagaaacaagtcaacatgaaagtgttacaaattcttcaactagtcaagatttgacatcctcaacttcacaaagctctgaaacgagtgtaaacaaatcggaatcagaacagtag

SEQ ID NO: 2477 - DNA, 1131 bp, Streptococcus pneumoniae
atgaataatcggagtgagactatgaaatacaaacggattgtctttaaggtgggtacttcttctctgacaaatgaggatggaagtttatcacgtagtaaggtaaaggatattacccagcagttggctatgctgcacgaggctggtcatgagttgattttggtgtcttcaggtgccattgcggctggttttggagccttaggatttaaaaagcgtccgactaaaattgctgataaacaggcttcagcagcggtagggcaggggcttttgttggaagaatatacaaccaatcttctcttgcgtcaaatcgtttctgcacaaatcttgctgacccaagatgactttgtggataagcgtcgttataaaaatgcccatcaggctttgtcggttttgctcaaccgtggggcaattcctatcatcaatgagaatgatagtgtcgttattgatgaggtcaaggttggggacaatgacactctaagtgcccaagtagcggcgatggtccaagcagaccttttggttctcttgacagatgtggacggtctctatactggaaatcctaattcagatccaagagccaaacgcttggagagaatcgagaccatcaatcgtgagattattgatatggctggtggagctggttcgtcaaacggaactgggggtatgttaaccaaaatcaaggctgcaactatcgcgacggaatcaggagttcctgtttatatctgctcatccttgaaatcagattccatgattgaggcggcagaggagaccgaggatggttcttactttgttgctcaagagaaggggcttcgtacccagaaacaatggcttgccttctatgctcagagtcaaggttctatttgggttgataaaggggctgcggaagctctctctcaacatggaaagagtcttctcttatctggtatcgttgaagcagaaggagccttttcttacggtgatatcgtgacagtatttgataaggaaagtggaaaatcacttggaaaaggacgcgtgcaatttggagcatctgctttggaggatatgttgcgttctcaaaaagccaagggtgtcttgatttaccgtgacgactggatttccattactcctgaaatccaactactttttacagaattttag

SEQ ID NO: 2478 - DNA, 1263 bp, Streptococcus pneumoniae
atggtgagtagacaagaacaatttgaacaggtacaggctgttaaaaaatcgattaacacagctagtgaagaagtgaaaaaccaagccttgctagccatggctgatcacttagtggctgctactgaggaaattttagcggctaatgccctcgatatggcagcggctaaggggaaaatctcagatgtgatgttggatcgtctttatttggatgcagatcgtatagaagcgatggcaagaggaattcgtgaagtggttgccttcccagatccaatcggtgaagttttagaaacaagtcagcttgaaaatggtttggttatcacaaaaaaacgtgtagctatgggtgtcatcggtattatctatgaaagccgtccaaatgtgacgtctgatgcggctgctttgactcttaagagtggaaatgcggttgttcttcgtagtggtaaggatgcctatcaaacaacccatgccattgtcacagccttgaagaagggcttggagacgactactattcacccaaatgtgattcaactggtggaagatactagccatgaaagtagttatgctatgatgaaggccaagggctatctagacctcctcattcctcgtggaggagctggcttgatcaatgcagtggttgagaatgccattgtacctgttatcgagacagggactgggattgtccatgtctatgtggataaggatgcagacgaagacaaggcgctgtctatcatcaacaatgctaaaaccagtcgtccttctgtttgtaatgccatggaggttctgctggttcatgaagacaaggcagcaagcatccttcctcgcttggatcaaatgctggttgcagagcgtaaggaagctggactggaaccaattcaattccgcttggatagcaaagcaagccagtttgtttcaggtcaagcagctgagacccaagactttgacaccgagtttttagactatgtccttgctgttaaggttgtgagcagtttagaagaagcggttgcgcacattgaatcccacagcacccatcattcggatgctattgtgacggaaaatgctgaagctgcagcatactttacagatcaagtggactctgcagcggtgtatgttaatgcctcaactcgtttcacagatggaggacaatttggtcttggttgtgaaatggggatttctactcagaaattgcacgcgcgtggtccaatgggcttgaaagagttgaccagctacaagtatgtggttgctggtgatgggcagataagggagtaa

SEQ ID NO: 2479 - DNA, 798 bp, Streptococcus pneumoniae
atgaagattggatttatcggtttggggaatatgggtgctagcttggcaaaatctgtcttgcagactaggacgtcagatgagattctccttgccaatcgtagtcaagctaaggtagatgctttcattgcagactttggtggtcaggcttccagcaatgaagaaatgtttgcagaagcagatgtgatttttctaggagttaagcctgctcagttttctgaactgctttctcaataccagaccatccttgaaaaaagagaaagtcttcttttgatttcgatggcagctggattgaccttagaaaaactagcaagtcttatcccaagccaacaccgaattattcgtatgatgcctaatacccctgcttctatcgggcaaggagtgattagttatgccttgtctcctaattgcagggctgaggacagtgagatcttttgtcagcttttagccaaggctggtctcttggttgaattaggagaaagcttaatcaatgcagcgacaggtcttgcaggttgtggaccagcctttgtctatctctttattgaggccttggcagatgcaggtgttcagacgggattaccacgagaaacagccttgaaaatggcagcccaaactgtggtaggagctgggcaattggtcctagaaagccagcaacatcctggagttttgaaagatcaagtttgtagtccaggcggttcgactattgctggcgtagcaagcctagaagcgcatgcttttcgaggcacagtcatggaggcagttcatcaagcctataaacgaacacaagaactaggtaaataa

SEQ ID NO: 2480 - DNA, 639 bp, Streptococcus pneumoniae
atgtcaaaaggatttttagtctctcttgagggaccagagggagcaggcaagaccagtgttttagaggctctgctaccaattttagaggaaaaaggagtagaggtgttgacgacccgtgaacctggcggagtcttgattggggagaagattcgggaagtgattttggatccaagtcatactcagatggatgctaaaacagagctacttctctatattgccagtcgcagacagcatttggtggaaaaagttcttccagcccttgaagctggcaagttggtcatcatggatcgttttatcgatagttctgttgcctatcagggatttggtcgtggcttagatattgaagccattgactggctcaatcagtttgcgacagatggcctcaaacccgatttgacactctattttgacatcgaggtggaagaagggctggctcgtattgctgctaatagtgaccgcgaggttaatcgtttggatttggaagggttggacttgcataaaaaagttcgtcaaggctacctttctcttctggataaagagggaaatcgcattgtcaagattgatgctagtctccctttggagcaagttgtggaaactaccaaggctgtcttgtttgacggaatgggcttggccaaatga

SEQ ID NO: 2481 - DNA, 252 bp, Streptococcus pneumoniae
ttgctccaaagggagactagcatcaatcttgacaatgcgatttccctctttatccagaagagaaaggtagccttgacgaacttttttatgcaagtccaacccttccaaatccaaacgattaacctcgcggtcactattagcagcaatacgagccagcccttcttccacctcgatgtcaaaatagagtgtcaaatcgggtttgaggccatctgtcgcaaactgattgagccagtcaatggcttcaatatctaa

SEQ ID NO: 2482 - DNA, 891 bp, Streptococcus pneumoniae
atgaaacaagatcaactaaaggcttggcaaccagctcagtttgaccgttttgtccgtatcttagaacaagaccagctcaatcacgcctatctcttttcaggtttctttggaagcttggaaatggcgcaatttttagctaagagcctcttttgtacggataaagttggcgtcttaccatgtgagaaatgccgaagttgcaagctgattgaacaggaagagtttccagatgtcaccttgattaagccagtcaatcaggtcatcaagacagaacgcattcgggaattggtgggacagttttctcaagcagggattgaaagccagcaacaggtctttattatcgagcaagcggataaaatgcatcccaacgcagccaattctctgctcaaggtcatcgaagaaccccagagtgaagtttatattttcttcttgactagcgatgaggaaaagatgttaccgacaatccgaagtcggactcagatcttccactttaaaaagcaagaagaaaaacttatcttactcttagaacaaatgggacttgttaagaaaaaagcgactcttttagctaagtttagtcaatcgcgagctgaagcagaaaagttggctaatcaggcaagtttttggaccttggtcgatgaaagtgaacgcctgctgacttggttagtagctaagaaaaaagaaagttatctacaggttgccaaattagccaacttggcagatgataaggaaaaacaggatcaggttttacggattcttgaagttctctgtgggcaggacctcttgcaggtaagagtaagagtgattctacaagatttactagaagctagaaaaatgtggcaagctaatgtcagctttcaaaatgccatggaatatctggtcttgaaagaaatataa

SEQ ID NO: 2483 - DNA, 318 bp, Streptococcus pneumoniae
atggacaaaaaagaattatttgacgcgctggatgatttttcccaacaattattggtaaccttagccgatgtggaagccatcaagaaaaatctcaagagcttggtagaagaaaatacagctcttcgcttggaaaatagtaagttgcgagaacgcttgggtgaggtggaagcagacgctcccgtcaaggccaagcatgttcgcgaaagtgtccgtcgtatttaccgtgatggatttcacgtatgtaatgatttttatggacaacgtcgagagcaggacgaagaatgtatgttctgtgatgagttgttatacagggagtaa

SEQ ID NO: 2484 - DNA, 870 bp, Streptococcus pneumoniae
atgcaaattcaaaaaagttttaaggggcagtctccctatggcaagctgtatctagtggcaacgccgattggcaatctagatgatatgacttttcgtgctatccagaccttgaaagaagtggactggattgctgctgaggatacgcgcaatacagggcttttgctcaagcattttgacatttccaccaagcagatcagttttcatgagcacaatgccaaggaaaaaattcctgatttgattggtttcttgaaagcagggcaaagtattgctcaggtctctgatgccggtttgcctagcatttcagaccctggtcatgatttggttaaggcagctattgaggaagaaattgcagttgttacagttccaggtgcctctgcaggaatttccgccttgattgccagtggtttagcgccgcagccacatatcttttacggctttttaccgagaaaatcaggccagcaaaagcaatttttcgactcgaaaaaagactatcctgaaactcagattttttatgaatcgccccatcgtgtggcagatacattggaaaatatgctagaagtctacggtgaccgctccgttgtcttggtcagggaattgaccaaaatctatgaagaataccaaagaggtacaatttctgaattgctggaaagcattgctgaaacgtctctcaagggtgaatgtcttctgattgttgaaggtgccagtcaggatgtggaagaaaaagacgaggaagacttgttcttagaaatccaagctcgtatccagcaaggtatgaagaaaaatcaagctattaaggaagtagctaagatttaccagtggaataagagtcaactctacgctgcctaccacgactgggaagaaaaacaataa

SEQ ID NO: 2485 - DNA, 546 bp, Streptococcus pneumoniae
ttgataaatcagaaagaaggtgattttttgcgaacatacgaaaataaagaagaactaaaagctgagatagagaaaacatttgagaaatatattttagaatttgataatattccagaaaatttaaaagataagagagctgatgaagttgacagaactccagcagaaaaccttgcttatcaggttggttggaccaacttggttcttaaatgggaagaagatgaaagaaaggggcttcaagtaaaaacaccatcggataaatttaaatggaatcaacttggtgaattatatcagtggttcacagatacctacgctcatttatctctgcaagagttgaaagcaaaattaaatgaaaatattcattctatctctgcaatgattgattcgttgagtgaggaagaattatttgaaccgcatatgagaaagtgggctgatgaagcgactaaaacagcgacttgggaagtgtataagtttattcatgtaaatacggttgcaccttttggaactttcagaactaaaatcagaaaatggaagaagatagtattataa

SEQ ID NO: 2486 - DNA, 504 bp, Streptococcus pneumoniae
atgtcatttaagaataactggatagacaaggaaggcagagtatttatctattttactgtcgaagaaattatgaaaagaagaaatatctcaaagccaactgccataaaaacattagatgagcttgatataaaaaaaggaataggactgatcgaaagagtaaggcttggacttggtaagccgaacatcatttatgttaaagactttatgagtatatttcaggtaaaagaaaatgacttacagaagtcaaaaaacttaacttcagaagtaaaagattttaacctcagaagtaaagaaaatgaacttcaagaggttaagaaccttgactctaactatatagagaataataagagtaagtatagtaagagagaatatagttttggtgaaaacggacttggaacatttcaaaatgtgtttttagctgctgaagatatatcggatttacaaatcataatgaactcacagcttgagaattacattagacttcctgcaaaactagaatcctag

SEQ ID NO: 2487 - DNA, 450 bp, Streptococcus pneumoniae
aaatcaatcgccctaaaaaaagaattagcgaattattctggtaaaaagaaatgctacgctatgaaggctcaagcgattgtcacaagtcaagggagaattgtttctttggatatcactgtgaactattgtcatgatatgaagttgttcaaaatgagtcgcagaaatatcggacaagctggtaaaatcttggctgacagtggttatcaagggctcatgaagatatatcctcaagcacaaactccacgtaaatccagcaaattcaagccgctaacagttgaagataaaacctataaccatgcgctatctaaggagagaagcaaggttgagaacatctttgccaaagtagaaacgtttaaaatgttttcaacaacctatcgaaatcatcgtaaacgattcggattacgaatgaatttgattgctggtattatcaatcatgaactaggattctag

SEQ ID NO: 2488 - DNA, 402 bp, Streptococcus pneumoniae
atgaatgatgaagcaagtaaacaactaactgatgcacgatttaagcgtcttgttggtgttcagcgcacgacttttgaagagatattagctgtattaaaaacagcttatcaacttaaacacgcaaaaggtggacgaaaacctaaattaagcctagaagaccttcttatggccactcttcaatatgtgcgagaatatcgaacttatgaacaaattgcggctgattttggtattcacgaaagcaacttaatccgtcggagccaatgggttgaagtaactcttgttcaaagtggtgttacgatttcaagaactcctctcagttctgaggacacggtaatgattattgatgcgacggaagtaaaaatcaatcgccctaaaaaaagaattagcgaattattctggtaa

SEQ ID NO: 2489 - DNA, 273 bp, Streptococcus pneumoniae
ttgtttacttgcttcatcattcatagaactactataccatattttgtttcgcaggaagtctattggaaagtaagaaatattgaagctgaggcgattagaagaaattgtgagcgtggtgctattttttcaggtaaaataaaacatcacgaagattctcagtttaaaggagaccactatgttgaatgttatgctgttttagataatacggttatagcaagagatagaataacagtccctatcgatccgttatgtggaaaagattttatagagtag

SEQ ID NO: 2490 - DNA, 1335 bp, Streptococcus pneumoniae
gtgtctcaatcttatatcaatgttatcggtgctggtttggcaggttctgaagcagcttaccaaatcgcagagcgtggtattccagttaaactttatgaaatgcgtggtgtcaagtctacaccccagcataaaacagacaattttgctgagttggtttgttccaattctttgcgtggggatgctttgacaaatgcagttggtcttctcaaggaagaaatgcgtcgcttgggttctgttatcttggaatctgctgaggctacacgtgttcctgccggtggagcccttgcggtggatcgtgatggtttctctcaaatggtgaccgaaaaagtggtcaaccaccccttgattgaagtggtgcgtgatgaaattacagaattgccaacagatgttattacagttgtggcgactggtcccttgactagcgatgccctggctgaaaagattcatgcccttaataatggcgatggcttctatttctacgatgcagcagcgcctattatcgatgtcaacactatcgatatgagtaaggtctatctcaaatctcgttatgataagggagaagcagcctatctcaatgctccaatgaccaagcaagagtttatggatttccatgaagccttggtcaatgcggaagaagcaccgctcaattcttttgaaaaagaaaagtactttgaaggatgtatgccaatcgaagttatggccaaacgtggcattaaaactatgctttatggccctatgaagccagtcggtcttgagtatccggacgactacacaggacctcgtgatggagaatttaaaacaccttatgcggttgtgcaacttcgtcaggataatgcagctggtagcctatacaatattgttggtttccagacccacctcaaatggggagaacaaaagcgtgtcttccaaatgattccgggtcttgaaaatgcggagtttgtccgttatggtgtcatgcatcgcaattcttacatggattcaccaaatcttcttgagcagacttaccgttccaagaaacaaccaaatctcttctttgctggtcagatgacgggggtggaaggctatgttgagtcggcggcttcgggcttagttgcgggaattaacgcagctcgtctcttcaaggaagaaagcgaggttattttccccgagacgacagcgattggaagcttagctcattacattacccatgccgacagcaaacatttccaaccaatgaatgtcaattttgggatcatcaaggagttggaaggcgagcgtatccgtgataccaaggctcgttatgaaaaaattgcagagcgtgcccttgccgacttagaggaatttttgactgtctaa

SEQ ID NO: 2491 - DNA, 738 bp, Streptococcus pneumoniae
atggcgaatcccaagtataaacgtattttaatcaagttatcaggtgaagcccttgccggtgaacgtggcgtagggattgatatccaaacagttcaaacaatcgcaaaagagattcaagaagttcatagcttaggtatcgaaattgcccttgttattggtggaggaaatctctggcgtggagaacctgcagcagaagcaggtatggaccgtgttcaggcagattacactggaatgcttgggactgttatgaatgctcttgtgatggcagattcattgcaacaagttggggttgatacgcgtgtacaaacagctattgctatgcaacaagtggcagagccttatgtccgtggacgtgcccttcgtcaccttgaaaaaggccgtatcgttatctttggtgctggaattggttcaccatacttctcgacagatacaacagcggcccttcgtgcagctgaaatcgaagcagatgccatcctcatggctaaaaatggcgtcgatggtgtgtacaatgccgatcctaagaaggacaagacagccgttaagtttgaagaattgacccaccgtgatgttatcaacaaaggtcttcgtatcatggactcaacagcctcaaccctctcaatggacaacgacattgacttggttgtcttcaacatgaaccaatcaggcaacatcaaacgtgttgtatttggtgaaaatatcggaacaacagtttcaaataatatcgaagaaaaggaataa

SEQ ID NO: 2492 - DNA, 438 bp, Streptococcus pneumoniae
ttggtgagactgggtcattctctctttagctttttcaataattacgttagccatattctttcttattccttttcttcgatattatttgaaactgttgttccgatattttcaccaaatacaacacgtttgatgttgcctgattggttcatgttgaagacaaccaagtcaatgtcgttgtccattgagagggttgaggctgttgagtccatgatacgaagacctttgttgataacatcacggtgggtcaattcttcaaacttaacggctgtcttgtccttcttaggatcggcattgtacacaccatcgacgccatttttagccatgaggatggcatctgcttcgatttcagctgcacgaagggccgctgttgtatctgtcgagaagtatggtgaaccaattccagcaccaaagataacgatacggcctttttcaaggtga

SEQ ID NO: 2493 - DNA, 558 bp, Streptococcus pneumoniae
atggctaacgtaattattgaaaaagctaaagagagaatgacccagtctcaccaatcacttgctcgtgaatttggtggtatccgtgctggtcgtgccaatgcaagcttgcttgaccgtgtacatgtagaatactatggagtcgaaactcctcttaaccaaatcgcttcaattacgattccagaagcgcgtgttttgttggtaacaccatttgacaagtcttcattgaaagacatcgaacgtgccttgaacgcttctgatcttggtatcacaccggctaatgacggttctgtgattcgcttggttatcccagctcttacagaagaaactcgtcgtgaccttgctaaagaagtgaagaaggtcggcgaaaatgctaaagtggctgtccgcaatatccgtcgcgatgctatggacgaagctaagaaacaagaaaaagcacaagaaatcactgaagacgaattgaagactcttgaaaaagatattcaaaaagtaacagacgatgctgttaaacacatcgacgacatgactgctaacaaagagaaagaacttttggaagtctaa

SEQ ID NO: 2494 - DNA, 417 bp, Streptococcus pneumoniae
ttgcaagatttgtattcatatttccttctttcgaataaaactcagccagcaatgccaactgagtttttctgtttatttttagacttccaaaagttctttctctttgttagcagtcatgtcgtcgatgtgtttaacagcatcgtctgttactttttgaatatctttttcaagagtcttcaattcgtcttcagtgatttcttgtgctttttcttgtttcttagcttcgtccatagcatcgcgacggatattgcggacagccactttagcattttcgccgaccttcttcacttctttagcaaggtcacgacgagtttcttctgtaagagctgggataaccaagcgaatcacagaaccgtcattagccggtgtgataccaagatcagaagcgttcaaggcacgttcgatgtctttcaatga

SEQ ID NO: 2495 - DNA, 855 bp, Streptococcus pneumoniae
atgaatacaaatcttgcaagttttatcgttggactgatcatcgatgaaaatgaccgtttttactttgtgcaaaaggatggtcaaacctatgctcttgctaaggaagagggccaacatacagtaggggatacggtcaaaggttttgcatacacggatatgaagcaaaaactccgcctgacaaccttagaagtgactgccactcaggaccaatttggttggggacgtgtcacagaggttcgtaaggacttgggtgtctttgtggatacaggccttcctgacaaggaaatcgttgtgtcactcgatattctccctgagctcaaggaactttggcctaagaagggcgaccaactttacatccgtcttgaagtggataagaaagaccgtatttggggcctcttggcttatcaagaagacttccaacgtcttgctcgtcctgcttacaacaacatgcagaaccaaaactggccagccattgtttaccgtctcaagctgtcaggaacttttgtttacctaccagaaaataatatgcttggttttattcatcctagcgagcgttacgcagagccacgtttggggcaagtattagatgcgcgcgttattggtttccgtgaagtggaccgcactctgaacctctccctcaaaccacgctcctttgaaatgttggaaaacgatgctcagatgattttgacttatttggaaagcaatggcggtttcatgaccttaaatgacaagtcatctccagacgacatcaaggcaacctttggcatttctaaaggtcagttcaagaaagctttaggtggtcttatgaaggctggtaaaatcaagcaagaccagtttgggacagagttgatttag

SEQ ID NO: 2496 - DNA, 216 bp, Streptococcus pneumoniae
atgagaaaatcattttacacttggctcatgaccgagcgcaatcctaaaagtaacagtcccaaagcaattttggcagacctcgcttttgaagagtcagcctttccaaaacatacagatgattttgatgaggtcagtcgctttttggaggagcatgccagtttctcttttaacctaggagattttgacagcatttggcaggaatatctagaacactag

SEQ ID NO: 2497 - DNA, 969 bp, Streptococcus pneumoniae
ttgaaggaacattcaatagacattcaactgagtcatccagatgacctgtttcatctttttggttccaatgaacgccatcttcgtttgatggaagaagagcttgatgttgtgattcatgctcgtacggagattgtccaggttttgggagaagagtctgcttgcgaggaagcccgtcaggttattcaagctctcatggccttggtaaatcgtgggatgaccgttggtacgccagatgtagtgacggctattagtatggtcaaaaatgatgaaattgacaagtttgtcgccctttacgaagaagaaatcatcaaggataatactgggaagcctatccgcgtcaaaaccttaggtcaaaaactttatgtggacagtgtcaaacagcatgatgtgacctttggaattgggccggcaggtacagggaagaccttccttgcagtgaccttggcagtgactgcccttaaacgtgggcaagtcaagcgaattatcctaactcgtccagcggtggaagcgggagagagtcttggatttcttccgggtgatcttaaggagaaggtggatccttaccttcgtcctgtttacgatgccttgtatcaaattcttgggaaagaccaaacgactcgtctcatggagcgtgaaattatcgaaattgcgccccttgcctatatgcgtggccggaccttggatgatgcctttgtcattctcgatgaggcgcaaaacacgaccatcatgcagatgaagatgttcttgacgcgtttaggctttcattctaagatgattgtcaatggagatatcagtcagattgacctgccacgtaatgtcaagtccggtttgattgatgctcaagagaaactcaagaacatccatcagattgactttgttcatttttcagctaaggatgtggttcgccatccagttgtcgctcaaattatccgagcctatgaatattctactgaagttgcacacgactga

SEQ ID NO: 2498 - DNA, 195 bp, Streptococcus pneumoniae
ttgttccctgtgattatgacacaggaagatgcactgatcgtcatcagccacataaaagttctttccatcgtgcctaatcgttgtctcaaacctttggataaaacctttagcctatacaactggattttcctctctcaaaagtatattcttttgcaggcgaacttcctcaaaatcagtcgtgtgcaacttcagtag

SEQ ID NO: 2499 - DNA, 501 bp, Streptococcus pneumoniae
atgattgaccaactatctaagtattacagttgtaggatactaactgaaaaggatattccaagtattttatctttatatgaaagtaatcctctgtattttcagcattgtccaccagagccaaattttgcaactgtaaaagaggacatgctttgtctacctgaaggtaaagctaaggctgataagttttttgttggattttggaatggctctgaccttgtggctgttatggattttgtctatgcatatcctgatgaggagactgtttttattggtttgtttatggttgatcaagcctatcagaggaaagggattggtagtcatattgtgacagaagcactagcttattttgctaagaactttcgaaaggcacgtttggcttatgttaagggaaatccgcaatctcagcatttttgggaaaagcagggctttaaatcaattggatgcgaggttaagcaagaactctatacggttgttatcgttgaacagagcctagaagattag

SEQ ID NO: 2500 - DNA, 276 bp, Streptococcus pneumoniae
gtgacaacgcacgatgaacccgtctatgaaaaacacggtgttctccactataccgttgccaatatccctggtgcggttgctcgcacttcaaccatcgccctaaccaatgtcactcttccttatatcgaagctttggctggcaaaggattcgcacaagcaatctctgaagatgaaggcttgcgtcaaggtgtgaccacttatcaaggttacttgactagcctaccagttgctcaaggacttaatcgtgactacactgatatcaatgatttagtataa

SEQ ID NO: 2501 - DNA, 195 bp, Streptococcus pneumoniae
actcttatatctaattcattcaacattgaagcaagtgtgagagatgctgatgtggtgattggagccattctcatccctggtgcaaaagcaccggaattggtgacagatgagatggtcaaacaaatgcgtccaggctctgtatcgttgaccttgctgttgaccaaggtggccttatcgaaacagctgaccgtgtga

SEQ ID NO: 2502 - DNA, 219 bp, Streptococcus pneumoniae
atcggagctcacttccttactaagcaagctggtggctctggtgttctacctggtggtgtaccaggtgttccaaaaggaaaagtaactatcatcggtgatggtgtcgtcggtacacatgctgcccgcatcgcccttggtcttggtgctcaagtgactattttagatattagtgccaagcgtctctcagttctaaaagaagtctttggaagtcaaatttaa

SEQ ID NO: 2503 - DNA, 426 bp, Streptococcus pneumoniae
atgttaatcggaatcccaaaagaaattaaaaataacgaaaaccgtgtcgccctcacacctgcaggtgttcatagcttagttagtcgtggtcatcgtgtccttatcgaaacaaatgctggtctcggttctggctttactgatgctgactatcaaaagcaaggagctgagattgtcgctactgctggtgaagcttgggcagcagagttggttgtgaaagtaaaagaacctttaagttctgaatacggttactttcgcgacgatcttcttctcttcacctacttgcacatggccgctgctccagaattagcagatgctatgttagcagcaaaaacaacaggaattgcctatgaaactgttcgtgacaatcaaggacaactaccgctcctcgttcctatgagtgaggttgcagatcgtatggctgtttaa

SEQ ID NO: 2504 - DNA, 588 bp, Streptococcus pneumoniae
ttgattggttggaaaagtatggaatcaatttttgtaaaacttgcccagtatccgtctatagaaacggagcgtttattgcttagacctgtaactttggatgatgcggaagcaatgtttgactatgcctcggacaagggtaatacacgttacacttttccaaccaatcaaagtttggaagaaaccaagaataacattgctcagttctatttggctaatcccttgggacgttggggaatagaactaaaaagcaatggtcagtttattggaaccattgacttgcacaagattgattctgttcttaagaaggcagctattggctacattatcaataaaaagtattggaatcaaggattaacgacagaagccaatcgtgctgtgattgagctagcttttgagaagatagggatgaataagttgactgcccttcacgataaggacaatcctgcgtcaggaaaggtcatggagaaatcaggcatgcgtttttcccatgcagaaccatatgcttgtatggaccagcatgaaaaaggccgaatcgtgacaagagttcattatgtcttgaccaaggaagactattttgcaaataaataa

SEQ ID NO: 2505 - DNA, 651 bp, Streptococcus pneumoniae
atggaagcaattatcgagaaaatcaaagagtataaaatcatcgtcatctgtactggtctgggcttgcttgtaggaggatttttcctgctaaaaccagctccacaaacacctgtcaaagagacgaatttgcaggctgaagtcgcagctgtttccaaggatttggtatccgaaaaggaagtgaacaaggaagaaaaggaagaaccccttgaacaagatctaatcacagtagatgtcaaaggtgctgtcaaatcgccagggatttatgacttgcctgtaggtagtcgagtcaatgatgctgttcagaaggctggtggcttgacagagcaagcagacagcaagtcgctcaatctagctcagaaagttagtgatgaggctctggtttacgttcctactaagggagaagaagcagttagccaacagactggtttggggacagcttcttcaataagcaaggaaaagaaggtcaatctcaacaaggccagtctggaagaactcaagcaggtcaagggactgggaggaaaacgagctcaggacattatcgaccatcgtgaggcaaatggcaagttcaagtcagtagacgagctcaagaaggtctctggcattggtggcaaaacaatagaaaagcttaaagactatgttacagtggattaa

SEQ ID NO: 2506 - DNA, 1377 bp, Streptococcus pneumoniae
atgttacagtggattaagaatttctctattcccctaatttacctgagttttctgttactttggctttactacgctattttctcagcatcctatcttgctttgttgggatttgtttttctgctagtctgtctctttttccaatttccttggaaatctgctagcaaagttctagtgatttgtggaatctttggattttggtttgtttttcaaaattggcaacagagtcaagcgagtcaaaatctggcggattctgttgaaagggtacggattttgcctgatactattaaggtcaatggtgatagtctatcctttcgtggcaagtctaacggtcgtgctttccaagtctattataaactccagtccgaggaggagaaagaagcctttcaagctttaaccgacctgcatgagataggactagaagggaagctttcggagccagaagggcagagaaattttggtggctttaattaccaagcctatctgaagactcagggaatttaccagacactcaatattaaaagaatccagtcactccaaaaggttggcagttgggatataggtgaaaaactgtccagtttacgtcgaaaggctgtggtttggattaagatgcacttcccagaccctatgcgcaattacatgacaggactcttgctaggacatctggacaccgattttgaggagatgaatgagctttattccagtttaggaattattcacctttttgccttgtcaggtatgcaggtagggtttttcatgaatggatttaagaaacttgtcttgcgattgggcttgacccaagaaaagttgaaatggctgacttatcccttttcccttatctatgcgggactaactggattttcagcatcggttattcgcagtctcttgcaaaagctactggctcaacatggggttaagggcttggataattttgccttgacggtgcttgtcctctttattgtcatgccaaactttttcttgacagcaggaggagtcttgtcctgcgcttatgcttttatcctgaccatgaccattaaagaagggaaggggctcaaggctgttgctagtgaaagtctagtcatctccttgggcatattgcccattatatccttctattttgcggaatttcaaccttggtctatccttttgacctttgtcttttcctttctatttgacttgaccctcttaccgctcctgtctattttatttgtcctttcctttctctatccagtcattcagctgaactttatctttgaatggttggagggcattattcgcttggtctcacaggtgacaagtaggcctctagtctttggacaacccaatgaatggcttttaaccctattgttaaatattctttggctttggtctatgatttga

SEQ ID NO: 2507 - DNA, 918 bp, Streptococcus pneumoniae
atggcttttaaccctattgttaaatattctttggctttggtctatgatttgaggaaaaaccttaaaggattaacagtattgagtttattgattacaggtctctttttcttgaccaagtatccactggaaaatgaaatcaccatgctggatgtggggcaaggagaaagtattttcctacgggatgtaactgggaaaaccattctcatagatgtaggtggtaaggcagaatcttataagaaaatcgaaaaatggcaagaaaagatgacgaccagcaatgcccagcgaaccttgattccctatctcaaaagtcgaggagtagctaagattgaccagctaattttgactaacacggacaaggagcatgttggagatttgtcagaggtgaccaaggctttccatgtaggggagattttagtatcaaaaggcagtttgaagcagaagcaatttgtggtagaactacaggcgactaaaacaaaggtgcgtagtatgacagtaggggagaacttgcccatttttggaagtcagttagaagttctatctccaaggaaaatgggagatggaggacacgatgataccctagttctgtatgggaaattcttggataagcaatttctcttcacgggaaatttggaggagaaaggagagaaggacttgctgaagcactatccagacttgaaagtaaatgttttgaaagctagccaacatggcaataaaaaatcatcaagcccagcctttctagaaaaactcaaaccagagcttactcttatctcagttggaaagagcaatcgaatgaaactcccccatcaggaaacattgacacgactggaaggtatcaatagcaaagtttatcgaactgaccagcaaggagctatacgttttaaggggttggatagttggaaaatcgaaagtgttcgatag

SEQ ID NO: 2508 - DNA, 588 bp, Streptococcus pneumoniae
atgttgcagcttactcatgtgaccttaaaaacgcgacaagtcatcttgcaagatgcggatttcacctttaaaaagggtaggttttatggtcttcttgctatcaatggctctggaaagacgaccctgttccgtgccattagcaatttaattcccataagtagtggaaatatcgcagcccctccttctttattttattatgagagtattgaatggctggatggaaacttaagtgggatggactaccttcgtcttatcaaaaacatctggaagtcagacctaaacttgagagatgaaatcgcctactgggaaatggctgactatatcagtcttcccatccgcaagtattccttaggcatgaagcaacgcttggtgattgctatgtattttctcagtcaggcaaaatgctggctcatggatgagattacaaatggcttagacgagtattatcgacagaagttttttgataggctagcacaaatcgatagacaagaacagctggttcttttaagttcccactataaggaagagttggttgatatctgcgatagagtagtaaccattcatcaggggcagatagaagaggtttag

SEQ ID NO: 2509 - DNA, 1176 bp, Streptococcus pneumoniae
atgaaagatgttagtctatttttattgaaaaaagttttcaaaagtcgtttaaactggattatcttacttttatttgcatctgtactcggtgttaccttttatttaaatagtcagactgcaaactcacacagcttggagagcaggttggaaagtcgcattgcagccaacgagagagccatcaatgaaaatgaagcgaaactttcccaaatgtctgacaccagctcggaggaataccagtttgctaaaagtaatttagaattgcaaaaaaatcttttgaagcgaaagacagaaattctgactttattaaaagaagggcgctggaaagaggcctactatctgcagtggcaagatgaagagaagaattatgaatttgtatcaaatgacccgactgctagctctggcttaaaaatgggggttgaccgcgaacggaagatttaccaagccctgtatcccttgaacataaaagcacatactttggagtttccgacccacgggattgatcagattatctggattttagaggctatcatcccaagcttgtttgtggttgctattatttttatgctaacacaactatttgcagaaagatatcaaaatcatctggacacagctcacttatatcctgtttcaaaagtgacatttgcaatgtcttctcttggagttggagtgggctatgtaactgtgctgtttatcggaatctgtggcttttcttttctagtgggaagtctgataagtggttttggacagttagattatccctacccgatttatagcttagtgaaacaagaggtaactattggaaagatgcaggatgtattatttcctagcttgctcttagctttcttagcctttatcgtcattgtggaagttgtgtatttgattgcttactttttcaagcaaaaaatgcctgtcctctttctttcactcattgggattgttggcttattgtttggcatccaaaccattcagcctcttcaaaagattgcacatctgattccctttacttacttgcgttcagtggagattttatctggaagattacctaagcagattgataatgtcgatctaaattggagcatgggaatggtcttacttccttgcctgattatctttttgctattgggaattctatttattgaaagatggggaagttcacagaaaaaaagaattttttaa

SEQ ID NO: 2510 - DNA, 264 bp, Streptococcus pneumoniae
atatacaagcccgcacgttatgatagcgtttcttcgaaacttttcatccgtagggccaggcaacttaatgtcacaaggcgagaagctctcacttctgcttttctcaacttttatatgataccaagttttctagctcttgtcaagataaaaagttattttttgaaaagtttgtgtttgtattttggtttggttttcaaatcaaaaagagagaatcaagttgattccctctctatgttagtttttacttattttccctacctatag

SEQ ID NO: 2511 - DNA, 588 bp, Streptococcus pneumoniae
gtgcgggcttgtatatttacgagtccgctattgtttttctctaataaaacaaaagaggtgaaaaccatagcaaagcaagacttattcatcaatgatgagattcgtgtacgtgaagttcgcttgattggtcttgaaggagaacagctaggcattaagccactcagtgaagcgcaagctttggctgataacgctaatgttgacctagtattgattcaaccccaagccaaaccgcctgttgcaaaaattatggactacggtaagttcaaatttgagtaccagaagaagcaaaaagaacaacgtaaaaaacaaagcgttgttactgtgaaagaagttcgtctaagtccaactattgacaagggtgactttgatacaaaacttcgtaatgcacgtaagttccttgaaaaaggaaataaagttaaggtatctattcgctttaagggtcgtatgattacccataaagagattggtgcaaaagttttagccgagtttgctgaagcaactcaagatattgccatcatcgaacaacgtgctaaaatggatggacgtcaaatgttcatgcaattggcgccagcgactgacaaaaaataa

SEQ ID NO: 2512 - DNA, 201 bp, Streptococcus pneumoniae
atgccaaaacaaaaaacacaccgcgcatcagctaaacgtttcaaacgtacaggttctggtggacttaaacgtttccgtgcttacacttctcaccgtttccacggaaaaactaagaaacaacgtcgtcatcttcgtaaagcatctatggtgcattcaggagattacaaacgtatcaaagcaatgcttactcgcttgaaataa

SEQ ID NO: 2513 - DNA, 360 bp, Streptococcus pneumoniae
atggcacgtgttaaaggtggcgttgtatcacgcaaacgtcgtaaacgtattcttaaattagcaaaaggttactatggagctaaacacatcttattccgtactgcaaaagaacaagtaatgaactcttactactatgcataccgtgaccgtcgtcagaaaaaacgtgacttccgcaaattgtggattactcgtatcaatgcggcagctcgtatgaacggactttcatactcacaattgatgcatggtttgaaattggctgagattgaagttaaccgtaaaatgcttgctgacttggctgttaacgatgcagtagctttcacagctcttgcagatgcagctaaagcaaaacttggtaaataa

SEQ ID NO: 2514 - DNA, 381 bp, Streptococcus pneumoniae
atggcttcaaaaatgctacacacttgcttacgagtagaaaatcttgaaaaatcaatcgcattttatcaagatgcttttggttttaaagaattgcgtcgcagagattttccagaccatgccttcacgattgtctatctaggtcttgagggtgatgattatgagttggagttgacttataactacgatcacggtccgtatgtggttggtgatgggtttgcccatatcgctctcagtacacctgatcttgaggcacttcatcaagaacacagtgcaaaaggctatgaagtgactgagccaaatggtctaccaggaactacaccaaactattactttgtcaaagaccctgatggatataaggtcgaagtcattcgtgaaaaataa

SEQ ID NO: 2515 - DNA, 570 bp, Streptococcus pneumoniae
atgaatctcacatgtaagaagcgtttgggtgtcattcggttggaaaccatgaaggtggttgcacaagaggaaatcgcgccagcaatctttgaattagtcctagaaggagaaatggttgaagccatgcgagcaggccaatttcttcatctgcgtgtaccagacgatgcccatctcttacgtcgtcctatttcaatttcgtctattgacaaggcaaacaagcagtgtcacctcatttatcggattgagggagctgggactgcaattttttcaaccttaagtcagggagacactcttgatgtgatggggcctcagggaaatggttttgacttgtctgaccttgatgagcagaatcaggttctccttgttggtggtgggattggtgttccacccttgcttgaggtggccaaggaattgcatgaacgtggagtgaaagtagtgacagtcctcggttttgctaataaggatgctgttattttgaaaacggaattggctcagtatggtcatgtctttgtaacgacagatgatggttcttatggcatcaagggaaatgtttcccgttgtttttcatga

SEQ ID NO: 2516 - DNA, 282 bp, Streptococcus pneumoniae
atgatggttcttatggcatcaagggaaatgtttcccgttgtttttcatgatttaaacagtcagtttgaacctctttactcgtgtggggctccattaatgatgaagtatatcaatcaaacctttgatgatcacccaagagcctatttatctctggaatctcgtatggcttgtgggatgggagcttgctatgcctgtgttctaaaagtaccagaaaacgagacggtcagccaacgcgtctgtgaagatggtcctgttttccgcacaggaacagttgtattataa

SEQ ID NO: 2517 - DNA, 939 bp, Streptococcus pneumoniae
atgactacaaatcgattacaagtttctctacctggtttggatttgaaaaatccgattattccagcatcaggctgttttggctttggacaaaagtatgccaagtactatgatttagaccttttaggttctattatgatcaaggcgacaacccttgaaccacgttttgggaatccaactccaagagtggcagagacgcctgctggtatgctcaatgcaattggcttgcaaaatcctggtttagaggttgttttggctgaaaagctaccttggctggaaagagaatatccaaatcttcctattattgccaatgtagctggtttttcaaaacaagagtatgcagctgtttctcatgggatttccaaggcaactaatgtaaaagctatcgagctcaatatttcttgtcccaatgttgaccactgtaatcatggacttttgattggtcaagatccagatttggcttatgatgtggtgaaagcagctgtggaagcctcagaagtgccagtttatgtcaaattaaccccgagtgtgaccgatatcgttactgtcgcaaaagctgcagaagatgcgggagcaagtggcttgaccatgatcaatactctggttggaatgcgctttgacctcaaaaccagaaaaccaatcttggccaatggaacaggtggaatgtcaggtccagcagtctttccagtagccctcaaactcatccgccaagtagcccaaacaacagacctgcctatcattggaatggggggagtggattcgactgaagctgccctagaaatgtatctggctggggcatctgctatcggagttggaacagctaactttaccaatccttatgcctgccctgacatcatcgaaaatttaccaaaagtcatggataaatacggtattagcagtctggaagaactccgtcaggaagtaaaagagtctctgaggtaa

SEQ ID NO: 2518 - DNA, 2166 bp, Streptococcus pneumoniae
atgaatttaggagaattttggtacaataaaataaataagaccataggaagaaggttaatgaagaaagtaagatttatttttttagctctgctatttttcttagctagtccagagggtgcaatggctagtgatggtacttggcaaggaaaacagtatctgaaagaagatggcagtcaagcagcgaatgagtgggtttttgatactcattatcaatcttggttctatataaaagcagatgctaactatgctgaaaatgaatggctaaagcaaggtgacgactatttttacctcaaatctggtggctatatggccaaatcagaatgggtagaagacaagggagccttttattatcttgaccaagatggaaagatgaaaagaaatgcttgggtaggaacttcctatgttggtgcaacaggtgccaaagtaatagaagactgggtctatgattctcaatacgatgcttggttttatatcaaagcagatggacagcacgcagagaaagaatggctccaaattaaagggaaggactattatttcaaatccggtggttatctactgacaagtcagtggattaatcaagcttatgtgaatgctagtggtgccaaagtacagcaaggttggctttttgacaaacaataccaatcttggttttacatcaaagaaaatggaaactatgctgataaagaatggattttcgagaatggtcactattattatctaaaatccggtggctacatggcagccaatgaatggatttgggataaggaatcttggttttatctcaaatttgatgggaaaatagctgaaaaagaatgggtctacgattctcatagtcaagcttggtactacttcaaatccggtggctacatggcagccaatgaatggatttgggataaggaatcttggttttacctcaagtttgatggcaaaatggctgaaaaagaatgggtttacgattctcatagtcaagcctggtactacttcaaatccggtggttacatgacagccaatgaatggatttgggataaggaatcttggttttacctcaaatctgatgggaaaatagctgaaaaagaatgggtctacgattctcatagtcaagcttggtactacttcaaatccggtggttacatgacagccaatgaatggatttgggataaggaatcttggttttacctcaagtctgatggcaaaatggctgaaaaagaatgggtctacgattctcatagtcaagcctggtactacttcaaatctggtggctacatggcgaaaaatgagacagtagatggttatcagcttggaagcgatggtaaatggcttggaggaaaagctacaaatgaaaatgctgcttactatcaagtagtgcctgttacagccaatgtttatgattcagatggtgaaaagctttcctatatatcgcaaggtagtgtcgtatggctagataaggatagaaaaagtgatgacaagcgcttggctattactatttctggtttgtcaggctatatgaaaacagaagatttacaagcgctagatgctagtaaggactttatcccttattatgagagtgatggccaccgtttttatcactatgtggctcagaatgctagtatcccagtagcttctcatctttctgatatggcagtaggcaagaaatattattcggcagatggcctgcattttgatggttttaagcttgagaatcccttccttttcaaagatttaacagaggctacaaactacagtgctgaagaattggataaggtatttagtttgctaaacattaacaatagccttttggagaacaagggcgctacttttaaggaagccgaagaacattaccatatcaatgctctttatctccttgcccatagtgccctagaaagtaactggggaagaagtaaaattgccaaagataagaataatttctttggcattacagcctatgatacgaccccttacctttctgctaagacatttgatgatgtggataagggaattttaggtgcaaccaagtggattaaggaaaattatatcgataggggaagaactttccttggaaacaaggcttctggtatgaatgtggaatatgcttcagacccttattggggcgaaaaaattgctagtgtgatgatgaaaatcaatgagaagctaggtggcaaagattag

SEQ ID NO: 2519 - DNA, 1683 bp, Streptococcus pneumoniae
atggaatacaatcacaaggagagaacgatgtcatttgacggattttttttacaccacatagttgaggaattgcgaagcgaattagtgaatggtcgcatccagaaaatcaatcagccttttgaacaagagttggtcttgcaaatccgcagcaatcgccaaagccatcgcctgctcctttctgcccatccagtttttggacgcattcagctgacccaaacgacttttgaaaatccagcccaaccttctacctttatcatggttttgagaaagtatttgcagggggccctgattgagtcgattgagcaagtggaaaatgaccgtattgtggaaattacagtttccaataaaaacgagattggagaccatatccaggctaccttgattatcgaaattatggggaaacacagtaatattctactggtcgataaaagcagtcataaaatcctcgaagttatcaaacacgtcggtttttcacaaaatagctaccgcaccttacttccaggatcgacctatatcgctccgccaagtacagaatctctcaatccttttactatcaaggatgaaaagctctttgaaatcctgcaaacccaagaactaacagcaaaaaatcttcaaagcctttttcaaggtctgggacgcgatacggcaaatgaattggaaaggatactggttagtgaaaaactttccgctttccgaaattttttcaatcaggaaaccaagccatgcttgactgagacttccttcagtccagttccttttgcaaatcaggtgggagagccttttgcaaatctttctgatttgttggacacctactataaggataaggctgagcgcgaccgcgtcaaacagcaggccagtgaactgattcgtcgtgttgaaaatgaacttcagaaaaaccgacacaaactcaaaaaacaggaaaaagagttactggcgacagacaacgctgaagaatttcgtcaaaaaggagaattgctgacaaccttcctccaccaagtgcctaacgaccaagaccaggttatcctagacaactactataccaaccaacctatcatgattgcgcttgataaggctctgactcccaaccagaatgcccaacgctattttaaacggtatcagaaactcaaagaagctgtcaaatacttgactgatttgattgaagaaaccaaagccactattctctatctggaaagtgtagaaaccgtcctcaaccaagctggactggaagaaatcgctgaaatccgtgaagaattgattcaaacaggttttatccgcagaagacaacgggagaaaatccagaaacgcaaaaaactagaacaatatctagcaagcgatggcaaaaccatcatctatgtcggacgaaacaatcttcaaaatgaggaattgacctttaaaatggcccgcaaggaggaactttggttccatgctaaggacattcctggaagccatgttgtcatctcaggaaatcttgacccatctgatgcagtcaagacagacgcagcagagttagctgcctacttctctcaagggcgcctgtcgaatctggtgcaggtagatatgattgaagtcaaaaaactcaataaaccaactggtggaaaacccggctttgtcacttacacaggacaaaagaccctccgcgtcacaccagactccaaaaaaattgcatccatgaaaaaatcctga

SEQ ID NO: 2520 - DNA, 231 bp, Streptococcus pneumoniae
ctgcttttatcgaccagtagaatattactgtgtttccccataatttcgataatcaaggtagcctggatatggtctccaatctcgtttttattggaaactgtaatttccacaatacggtcattttccacttgctcaatcgactcaatcagggccccctgcaaatactttctcaaaaccatgataaaggtagaaggttgggctggattttcaaaagtcgtttgggtcagctga

SEQ ID NO: 2521 - DNA, 498 bp, Streptococcus pneumoniae
atgtatattgaaatggtagatgaaactggtcaagtttcaaaagaaatgttgcaacaaacccaagaaattttggaatttgcagccaaaaaattaggaaaagaagacaaggagatggcagtcacttttgtgaccaatgagcgtagtcatgaacttaatctggagtaccgtgacaccgaccgtccgacagatgtcatcagccttgagtataaaccagaattggaaattgcctttgacgaagaggatttgcttgaaaatccagaattggcagagatgatgtctgagtttgatgcctatattggggaattgttcatctctatcgataaggctcatgagcaggccgaagaatatggtcacagctttgagcgtgagatgggcttcttggcagtacacggctttttacatattaacggctatgatcactatactccggaagaagaagcggagatgttcggtttacaagaagaaattttgacagcctatggactcacaagacaataa

SEQ ID NO: 2522 - DNA, 396 bp, Streptococcus pneumoniae
atggactcacaagacaataaacgaaaatggaaaaatcgtgacctgatatccagtttagaatttgccatcacaggaatttttactgctatcaaggaagaacgcaatatgcgaaaacatgcagtgacggctctagtggtcatccttgcaggttttggttttcaggtgtcacgaatcgaatggctctttctcctgttgagcattttcttggtggtagcctttgaaattatcaattctgctatcgaaaatgtggtggatttggccagtcactatcacttttccatgctggctaaaaatgccaaggatatggcggctggcgcggtatttgtggtttctctttttgcagccttaacaggcgcattgatttttctcccacgaatctgggatttattattttaa

SEQ ID NO: 2523 - DNA, 900 bp, Streptococcus pneumoniae
atgacttttaaatcaggctttgtagccattttaggacggccccatgttgggaagtcaacctttttaaatcacgttatgggggcaaagattgccatcatgagtgacaaggcgcagacaacgcgcaataaaatcatgggaatttacacaactgataaggagcaaattgtctttatcgacacaccagggattcacaaacctaaaacaactctcggagatttcatggttgagtctgcctacagtacccttcgcgaagtggacaccgttcttttcatggtgcctgctgatgaagcgcgtggtaagggggacgatatgattatcgagcgtctcaaggctgccaaggttcctgtgattttggtggtgaataaaatcgataaggtccatccagaccagctcttgtctcagattgatgacttccgtaatcaaatggactttaaggaaattgttccaatctcagcccttcagggaaataacgtgtctcgtctagtggatattttgagtgaaaatctggatgaaggtttccaatatttcccgtctgatcaaatcacagaccatccagaacgtttcttagtttcagaaatggttcgcgagaaagtcttgcacctaactcgtgaagagattccgcattctgtagcagtagttgttgactctatgaaacgagacgaagagacagacaaggttcacatccgtgcaaccatcatggtcgagcgcgatagccaaaaagggattatcatcggtaaaggtggcgctatgcttaagaaaatcggtagcatggcccgtcgtgatatcgaactcatgctaggagacaaggtcttcctagaaacctgggtcaaggtcaagaaaaactggcgcgataaaaagctagatttggctgactttggctataatgaaaaagaatactaa

SEQ ID NO: 2524 - DNA, 825 bp, Streptococcus pneumoniae
atgcctgaattacctgaggttgaaaccgtttgtcgtggtttagaaaaattgattataggaaagaagatttcgagtatagaaattcgctaccccaagatgattaagacggatttggaagagtttcaaagggaattgcctagtcagattatcgagtcaatgggacgtcgtggaaaatatttgcttttttatctgacagacaaggtcttgatttcccatttgcggatggagggcaagtatttttactatccagaccaaggacctgaacgcaagcatgcccatgttttctttcattttgaagatggtggcacgcttgtttatgaggatgttcgcaagtttggaaccatggaactcttggtgcctgaccttttagacgcctactttatttctaaaaaattaggtcctgaaccaagcgaacaagactttgatttacaggtctttcaatctgcccttgccaagtccaaaaagcctatcaaatcccatctcctaaaccagaccttggtagctggacttggcaatatctatgtggatgaggttctctggcgagctcaggttcatccagctagaccttcccagactttgacagcagaagaagcgactgccattcatgaccagaccattgctgttttgggccaggctgttgaaaaaggtggctccaccattcggacttataccaatgcctttggggaagatggaagcatgcaggactttcatcaggtctatgataagactggtcaagaatgtgtacgctgtggtaccatcattgagaaaattcaactaggcggacgtggaacccacttttgtccaaactgtcaaaggaaggactga

SEQ ID NO: 2525 - DNA, 183 bp, Streptococcus pneumoniae
ttggtggacgaatgggtcggcaatccaatggttgaaagcccttgctgttttagaaaatttgtcacagttgacttacctgaggcaattcccccagtgattccgatgatttttcccatcagtccttcctttgacagtttggacaaaagtgggttccacgtccgcctagttgaattttctcaatga

SEQ ID NO: 2526 - DNA, 609 bp, Streptococcus pneumoniae
atgggaaaaatcatcggaatcactgggggaattgcctcaggtaagtcaactgtgacaaattttctaaaacagcaagggctttcaaccattggattgccgacccattcgtccaccaactacagaaaacctggtggtcgtctgtttgaggctttagtacagcactttgggcaagaaatcattcttgaaaacggagaactcaatcgccctctcatagctagtctcatcttttcaaatcctgaagagcaaaaatggtctaatcaaattcaaggggagattatccgtgaggaactggctactttgagagaacagttggctcagacagaagagattttcttcatggatattcccctactttttgaacaggactacagcgattggtttgctgagacttggttggtctatgtggaccgagatgcccaagtagaacgcttaatgaaaagggaccagttgtccaaagatgaagctgagtctcgtatggcagcccagtggcctttagaaaaaaagaaagatttggccagccaggttcttgataataatggcaatcagaaccagcttcttaatcaagtgcatatccttcttgagggaggtaggcaagatgacagagattaa

SEQ ID NO: 2527 - DNA, 201 bp, Streptococcus pneumoniae
atgggcataaaaggtacaaccaaagaaatactggctcctgtcagaaaattaccaaaccaggcaatacgcagattatccttccagttaatctctgtcatcttgcctacctccctcaagaaggatatgcacttgattaagaagctggttctgattgccattattatcaagaacctggctggccaaatctttctttttttctaa

SEQ ID NO: 2528 - DNA, 1200 bp, Streptococcus pneumoniae
atgacagagattaactggaaggataatctgcgtattgcctggtttggtaattttctgacaggagccagtatttctttggttgtaccttttatgcccatcttcgtggaaaatctatgtgtatggagtcagcaagtcgctttttatgcaggcttagcaatttctgtctctgctatttccgcggcgctcttttctcctatttggggtattcttgctgacaaatacggccgaaaacccatgatgattcgggcaggtcttgctatgactatcactatgggaggcttggcctttgtcccaaatatctattggttaatctttcttcgtttactaaacggtgtatttgcaggttttgttcctaatgcaacggcactgatagccagtcaggttccaaaggagaaatcaggctctgccttaggtactttgtctacaggcgtagttgcaggtactctaactggtccctttattggtggctttatcgcagaattatttggcattcgtacagttttcttactggttggtagttttctatttttagctgctattttgactatttgctttatcaaggaagattttcaaccagtagccaaggaaaaggctattccaacaaaggaattatttacctcggttaaatatccctatcttttgctcaatctctttttaaccagttttgtcatccaattttcagctcaatcgatcggccctattttggctctttatgtacgcgacttagggcagacagagaatcttctttttgtctctggtttgattgtgtccagtatgggcttttccagtatgatgagtgcaggagtcatgggcaagctaggtgacaaggtgggcaatcatcgtctcttggttgtcgcccagttttattcagtcatcatctatctcctctgtgccaatgcctctagcccccttcaactaggactctatcgtttcctctttggcttgggaaccggtgccttgattcccggggttaatgccctactcagcaaaatgactcccaaagccggcatttcgagggtctttgccttcaatcaggtattcttttatctgggaggtgttgttggtcccatggcaggttctgcagtagcaggtcaatttggctaccatgctgtcttttatgcgacaagcctttgtgttgcctttagttgtctctttaacctgattcaatttcgaacattattaaaagtaaaggaaatctag

SEQ ID NO: 2529 - DNA, 150 bp, Streptococcus pneumoniae
gtgcgagtaaaaattaatctcaaatgctcctcttgtggcagtatcaattacctaaccagtaaaaattcaaaaacccatccagacaagattgaggttttaaagtattgtcccaaggaaagaaaagtaaccctacatcttgaatctaagtag

SEQ ID NO: 2530 - DNA, 234 bp, Streptococcus pneumoniae
atgtataacctattattaaccattttattagtattatctgttgtgattgtgattgcaattttcatgcaaccaaccaaaaaccaatccagcaatgtatttgatgccagttcaggtgatttgtttgaacgcagtaaagctcgcggttttgaagctgtaatgcagcgtttgacagggattttagtctttttctggctagccattgccttagcattgacggtattatcaagtagataa

SEQ ID NO: 2531 - DNA, 2355 bp, Streptococcus pneumoniae
atgaaagatagaataaaagaatatttacaagacaagggaaaggtgactgttaatgatttggctcaggctttgggaaaagacagttccaaggattttcgtgagttgattaaaaccttgtccttaatggaaagaaagcaccaaattcgttttgaagaagatggtagtctgacattagaaattaagaaaaaacatgagattaccctcaaggggatttttcatgcccataaaaacggctttggctttgttagtctggaaggcgaggaggacgacctttttgtagggaaaaatgatgtcaactatgctattgatggtgataccgtcgaggtagtgattaagaaagtcgctgaccgcaataagggaacagcagcagaagccaaaattattgatatcctagaacacagtttgacaacagttgtcgggcaaatcgttctggatcaggaaaagcctaagtatgctggctatattcgttcaaaaaatcagaaaatcagtcaaccgatttatgttaagaaaccagccctaaagttagaaggaacagaagttctcaaggtctttatcgataaatacccaagcaagaaacatgatttctttgtcgcgagtgttctcgatgtggtgggacactcaacggatgtcggaattgatgttcttgaggtcttggaatcaatggacattgtatccgagtttccagaagctgttgttaaggaagcagaaagtgtgcctgatgctccgtctcaaaaggatatggaaggccgtctggatctaagagatgaaattacctttaccattgacggtgcggatgccaaggacttggacgatgcagtgcatatcaaggctctgaaaaatggcaatctggagcttggggttcacatcgcagatgtttcttattatgtgaccgaggggtctgcccttgacaaggaagcccttaaccgtgcgacttctgtttacgtgacagaccgagtggtgccaatgcttccagaacgactatcaaatggcatctgctctctcaatccccaagttgaccgcctgacccagtctgctattatggagattgataaacatggtcgtgtggtcaactataccattacacaaacagttatcaagaccagttttcgtatgacctatagcgatgtcaatgatatcctagctggcgatgaagaaaagagaaaagaatatcataaaattgtatcaagtatcgaactcatggccaagcttcatgaaactttagaaaacatgcgtgtgaaacgtggagctctcaattttgataccaatgaagcgaagattttagtggataaacaaggtaagcctgttgatatcgttcttcggcagcgtggcattgccgagcggatgattgagtcttttatgttgatggctaatgaaacagttgccgaacatttcagcaagttggatttgccttttatctatcgaattcacgaggagcctaaggctgaaaaggttcagaagtttattgattatgcttcgagttttggcttgcgtatttatgggactgccagtgagattagtcaggaggcacttcaagacatcatgcgtgctgttgagggagaaccttatgcagatgtattgtccatgatgcttcttcgctctatgcagcaggcttgttattcggagcacaatcacggccactatggactagctgctgactattatactcactttaccagtccaattcgtcgttatccagaccttcttgttcaccgtatgattcgggattacggccgttctaaggaaatagcagagcattttgaacaagtgattccagagattgcgacccagtcttccaaccgtgaacgtcgtgccatagaagctgagcgtgaagtcgaagccatgaaaaaggctgagtatatggaagaatacgtgggtgaagagtatgatgcagttgtatcaagtattgtcaaattcggtctctttgtcgaattgccaaacacagttgaaggcttgattcacatcactaatctacctgaattttatcatttcaatgagcgtgatttgactcttcgtggagaaaaatcaggtatcactttccgagtgggtcagcagatccgtatccgtgttgaaagagcggataaaatgactggagagattgatttttcattcgtacctagtgagtttgatgtgattgaaaaaggcttgaaacagtctagtcgtagtggcagagggcgtggttcaaatcgtcgttcggataagaaggaagacaagagaaaatcaggacgctcaaatgataagcgtaagcattcacaaaaagacaagaagaaaaaaggaaagaaatctttttacaaggaagtagctaagaaaggagccaagcatggcaaagggcgagggaaaggtcgtcgcacaaaataa

SEQ ID NO: 2532 - DNA, 468 bp, Streptococcus pneumoniae
atggcaaagggcgagggaaaggtcgtcgcacaaaataaaaaggcacgccacgactatacaatcgtagatacgctagaggcagggatggtcctgactggaactgaaatcaagagtgtacgagctgctcgaattaatctcaaggatggctttgctcaagtgaaaaatggagaagtttggctgagcaatgttcatatcgcgccttacgaagagggcaatatctggaaccaggaaccagaacgtcgtcgtaaactcctgctccataaaaagcaaattcaaaaattggaacaagagaccaaagggacaggaatgaccttagttccccttaaggtctatataaaagatggctacgctaagcttcttttaggacttgccaaagggaagcatgactatgacaaacgggagtctatcaaacgtcgtgagcaaaatcgagatatcgcgcgtgtgatgaaagctgttaatcagcgataa

SEQ ID NO: 2533 - DNA, 861 bp, Streptococcus pneumoniae
atggaaaaattagttgcctataaacgcatgcctttgtggaataaacaaacaatgcctgaagctgttcagcaaaagcacaatacaaaagttgggacttgggggaaaattactgtcttgaagggagctctcaagtttattgaattgacagaagaaggggaagttctagctgaacacctctttgaagcaggggcagacaatccaatggcccaacctcaagcctggcaccgagtggaagctgccacagatgatgtggaatggtacttggaattttattgtaaacctgaggattattttgctaaaaaatacaataccaatcctgttcattcagaggtcctagaggccatgcagacagtgaaacaagggaaagctttggatttgggttgtggtcaggggcgtaattctctttttctagcccagcaagattttgatgtgacggctgtagatcaaaatggactagctcttgaaatcttgcaaagcattgtggagcaggaagatttggacatgcctgttgacctttacgatatcaattcagctagcattgaacaagaatatgattttatcgtttcaacagttgttctcatgtttctacaagcggaccgcattccagctattattcaaaatatgcaggagaaaaccagtgttggtggttacaaccttatcgtttgtgccatggacacggaggattatccttgctcggttaacttcccattcacctttaaagaaggagaactggcagactattacaaggattgggaattggttaagtacaatgaaaatccaggccatttgcaccgtcgcgatgagaatggcaatcgtattcaactacgctttgcgaccttactagctaagaaaatcaagtaa

SEQ ID NO: 2534 - DNA, 387 bp, Streptococcus pneumoniae
ctcttgaaatcttgcaaagcattgtggagcaggaagatttggacatgcctgttgacctttacgatatcaattcagctagcattgaacaagaatatgattttatcgtttcaacagttgttctcatgtttctacaagcggaccgcattccagctattattcaaaatatgcaggagaaaaccagtgttggtggttacaaccttatcgtttgtgccatggacacggaggattatccttgctcggttaacttcccattcacctttaaagaaggagaactggcagactattacaaggattgggaattggttaagtacaatgaaaatccaggccatttgcaccgtcgcgatgagaatggcaatcgtattcaactacgctttgcgaccttactag

SEQ ID NO: 2535 - DNA, 222 bp, Streptococcus pneumoniae
cgcaaatggatctggcctccacaagctgggcaggtgtatgcttgcttctcaagtttatcctctaacacatttaccaattctcccctagtatctctcgcaacaaacatgaattccctccttttctatatcattcgtaaaaaagaaaaaagatcaggaaaattcctaatcttcatgtgtgtttacttgattttcttagctagtaaggtcgcaaagcgtagttga

SEQ ID NO: 2536 - DNA, 954 bp, Streptococcus pneumoniae
atgtttgttgcgagagatactaggggagaattggtaaatgtgttagaggataaacttgagaagcaagcatacacctgcccagcttgtggaggccagatccatttgcgtcaaggaccaagtgtacggacgcattttgcccataaatccttaaaagactgtgattttttctttgaaaatgaaagtccagaacacatagccaataaggaatccctctatcactggttgaaaaaagagacaaaggttcaattagagtacccgctttcagaacttaaacagattgcggatgtatttgtaaatggcaatctagctctagaagttcagtgtagtcccttgcctcagaaagtccttaaagagcgaagtgagggctatcgtagtcagggttaccaagtactgtggttgctgggtcaaaaactgtggctcaaggagcgtttgactcgtctacagcaaggttttctgtatttcagtcaaaacatgggcttttatgtttgggaattagacaaggaaaaacaagttttaagactcaaatacctgatttaccaggatctccgcggtaaactccattatcaaatcaaggaattttcctatggtcaaggtagtttattggaaatattgcgtcttccctataagagacaaaaaatatctcattttacagtttctgaggacaaggacatctgtcgctatattcggcaacaactttattatcaaaatctcttttggatgaaagaacaagcagaagcctatcaaaagggagaaaatatcctgacttatggactgaaagaatggtatccacaaattcgaccaatagtgggcaaatttttccagattgaacaagacttgactagctattatcggaacttttatacctattaccaaaaaaatcctcaaaatgattggcaaaagctttatccaccagccttttatcagcaatatttcttgaaaaatatggtagaatag

SEQ ID NO: 2537 - DNA, 1803 bp, Streptococcus pneumoniae
atggtattacaaagaaatgaaataaatgaaaaagatacatgggatctatcaacgatctacccaactgaccaggcttgggaagaagccttaaaagatttaacagaacaattggagacagtagcccagtatgaaggccatctcttggatagtgcggataacctactagaaatcactgaattttctcttgaaatggaacgccagatggagaagctttacgtttatgctcatatgaagaatgaccaggatacacgtgaagctaagtatcaagagtactatgccaaggccatgacactctacagccagttagaccaagccttttcattctatgagcctgaatttatggagattagcgaaaagcagtatgctgactttttagaagctcaaccaaagctgcaggtttatcaacactattttgacaagctcttgcaaggcaaggatcacgttctttcacaacgtgaagaagaattattggctggagctggagaaatctttggttcagcaagtgaaaccttctctatcttggacaatgcggatattgtgttcccttatgtcctagacgatgatggtaaagaagttcagctatctcatgggacttacacacgtttgatggagtctaaaaaacgtgaggttcgccgtggtgcctatcaagctctttatgcgacttacgaacaattccaacacacctatgccaaaaccttgcaaaccaatgttaaggtgcaaaattaccgtgctaaagttcgtaactacaagagtgctcgtcatgcagccctcgcagcgaattttgttccagaaagtgtttatgacaatttggtagcagcagttcgcaagcatttgccactcttacatcgctatcttgagcttcgttcaaaaatcttggggatttcagatctcaagatgtacgatgtctacacaccgctttcatctgttgaatacagttttacctaccaagaagccttgaaaaaagcagaagatgctttggcagtcttgggtgaggattacttgagccgtgtcaaacgtgccttcagcgagcgttggattgatgtttacgaaaatcaaggcaagcgttcaggtgcctactctggtggttcttatgataccaatgcctttatgcttctcaactggcaggacaatctggacaatctctttactcttgttcatgaaacaggtcacagtatgcattcaagctatactcgtgaaactcagccttatgtttacggagattactctatctttttggctgagattgcctcaactaccaatgaaaatatcttgacggagaaattattggaagaagtggaagacgacgcaacacgctttgctattctcaataacttcctagatggtttccgtggaacagttttccgccaaactcaatttgctgagtttgaacacgccattcaccaagcagatcaaaatggggaggtcttgacaagcgatttcctaaataaactctacgcagacttgaaccaagagtattatggtttgagtaaggaagacaatcctgaaatccaatacgagtgggctcgtattccacacttttactataactactatgtatatcaatattcaactggatttgcggccgcctcagccttggctgaaaaaattgtccatggtagtcaagaagaccgtgaccgctatatcgactacctcaaggcaggtaagtcggactatccacttaatgtcatgagaaaagctggtgttgatatggagaaggaagactacctcaacgatgcctttgcagtctttgaacgccgtttaaatgagtttgaagcccttgttgaaaaattaggattggcataa

SEQ ID NO: 2538 - DNA, 714 bp, Streptococcus pneumoniae
atggttgaatcgtatagtaagaatgctaaccataacatgcgtcgtcctgtcgtcaaagaagaaattgtagacttgatgcgtcagcgtcaaaagcaggtcacaggtttcttgaaagaattggaagactttgcccgcaaggaaaatattcctattattccccatgaaacggttgcttatttccgttttcttatggaaaccatgcagcctaaaaatattctggaaattgggacggctatcggtttttcagctctcttgatggctgaacatgcgccaaatgctaagattacaactattgatcgtaatccagaaatgattggttttgccaaggaaaattttgcccagtttgacagtcgcaagcaaatcactctcctagagggagatgcggtggatgtcttatctacactgacagagtcttatgatttcgtctttatggattctgccaagtctaaatacatcgtctttctgccagaaatcctcaaacatttggaagttggtggtgtggttgtcttggatgatatttttcaaggtggtgatgttgccaaggatattatggaagtccgtcgtggtcagcgaaccatttatcgaggccttcaaaaattatttgatgcaaccttagacaatccagaactcaccgcaacattagtgcctttaggagatggtattctcatgcttcgtaaaaatgtagcagatgttcaactgtctgaaagcgaatga

SEQ ID NO: 2539 - DNA, 942 bp, Streptococcus pneumoniae
atgaagaaaaaattattggcaggtgccatcacactattatcagtagcaactttagcagcttgttcgaaagggtcagaaggggcagaccttatcagcatgaaaggggatgtcatcacagaacatcaattttatgagcaagtgaaaaacaacccttcagcccaacaagtcttgttaaatatgaccatccaaaaagtttttgaaaaacaatatggctcagagcttgatgataaagaggttgatgatactattgccgaagaaaaaaaacaatatggcgaaaactaccaacgtgtcttgtcacaagcaggtatgactcttgaaacacgtaaagctcaaattcgtacaagtaaattagttgagttggcagttaagaaggtagcagaagctgaattgacagatgaagcctataagaaagcctttgatgagtacactccagatgtaacggctcaaatcatccgtcttaataatgaagataaggccaaagaagttctcgaaaaagccaaggcagaaggtgctgattttgctcaattagccaaagataattcaactgatgaaaaaacaaaagaaaatggtggagaaattacctttgattctgcttcaacagaagtacctgagcaagtcaaaaaagccgctttcgctttagatgtggatggtgtttctgatgtgattacagcaactggcacacaagcctacagtagccaatattacattgtaaaactcactaagaaaacagaaaaatcatctaatattgatgactacaaagaaaaattaaaaactgttatcttgactcaaaaacaaaatgattcaacatttgttcaaagcattatcggaaaagaattgcaagcagccaatatcaaggttaaggaccaagccttccaaaatatctttacccaatatatcggtggtggagattcaagctcaagcagtagtacatcaaacgaatag

SEQ ID NO: 2540 - DNA, 342 bp, Streptococcus pneumoniae
atgttggaacaggcattcaaagagaagcactacgagaatacgattctccatagtgaccaaggctggcaataccaacacgattcttatcatcgcttcctagagagtaagggaattcaagcatctatgtcacgcaaaggaaacagccaagacaacggtaggatggaatctttctttggcattttaaaatccgaaatgttttatggctatgagcaaacatttaaatcacttaatcaattggaacaagccattatagactatattgattattacaacaataagagaattaagataaaactaaaaggacttagctctgtgcaatacagaactaaatccttcggataa

SEQ ID NO: 2541 - DNA, 573 bp, Streptococcus pneumoniae; identical to SEQ ID NO: 19

SEQ ID NO: 2542 - DNA, 273 bp, Streptococcus pneumoniae
aagcagttatgtactattttagattcacttttctatactaagatgagtagggaggaaaaggtaaaagtttatgcccaaactcttcacataagaactctagcttacccattctatggaatcttgcattatccattaaaacttccagactcatacccttctaaaatctattcaaaccacgtcagcttcacattatatatgttggttacctcacaagttttatctgcaacctcaaagctgttctttgagcagcctacagctagcttcctagtttaa

SEQ ID NO: 2543 - DNA, 192 bp, Streptococcus pneumoniae
attgatttaaattctcaaatcatattattcagttcttatttcattttgctctacaatcctgttgagaagacacgtgttcatatcaaaaaggtattggcaagttgcaatacctttttacgaggctcttttatcttatttttgtttcaactgactatatctcctatggttctagttcagaaggctaggctataa

SEQ ID NO: 2544 - DNA, 621 bp, Streptococcus pneumoniae
atgaaactctactttgtccgccacggtcgtaccctctggaaccaagaaggtcgttttcaaggtgctagcggtgattctcctcttcttcctgaatccattgaaaccctaaaacgacttggccagtatctcaaggaaattccttttgatcagatttattcaagtgatttacctcgagcggtcaaatctgctgagattatccaaagtcaactctataccccctgttctttagaaatcgttcctaatctccgtgaatggcaacttgggaagttagaaggtttgaaaattgcaaccttggaagctatttacccgcaacaaatccaggcttttcgttcaaatcttgctcaatttgacactcgaatgttcggagccgaatccctctatagtacaactcagcggaccatccaatttatcaaatcattaaaagatagtccagctgagcgtattctaattgtcggacacggcgccaatcttactgccagtcttcgtactctcctaggctataaagaaccacttcttcgtaaagatggcggtctagcaaatgccagcctgaccattatagaaacccatgattttgaaacattcactctcaatacttggaatgatacttcttatcaatcataa

SEQ ID NO: 2545 - DNA, 483 bp, Streptococcus pneumoniae
atggcaaaaaaagttaaaatcaaaaaaacattggtggaacaaatcctatctaaagcagctatccctcatcaggggattcaaatcaatgccctagaaggagagcttcctcaaggttatgaacgagatcagattttcaaaaccttggcgcttttgggagacaagaccggaccgattatcggaattgtccctatcactcagcacttgtctgaaaagaaactagctaaaatttctggcaataaaaaagtgagcatgattccacaaaaggacttagaaaaaacaactggttacattcatggagccaataatcctgtcggaattcgtcagaaacacaattatcccatttttatcgataaaattgctctagatttggatcgaatgattgtctctgcaggcgaagtcggacacagcattatcgtcgcgccacaagacttggctagctttgtaaaggcagactttgtagatattttggaggacatcaagtaa

SEQ ID NO: 2546 - DNA, 843 bp, Streptococcus pneumoniae
atgctctcatggttagcacgcgttattaaagggattgtaattgctcttggatttatcctaccgggaatttccggaggggttctagcagcaatcttaggaatctatgaacgaatgattggctttctggcccatccctttaaagactttaaagaaaatgttttgtactttattccagttgccatcggtatgcttctgggaatcggcttattttcctacccgattgaatacctgcttgaaaattatcaggtttttgtattatggagctttgcgggagctattatcggtacagttcctagcctcctcaaagaatcaactcgagaatctgaccgagacaagattgatttagcttggttatggacaacctttatcatttctggattaggactctatgccttaaattttgtcgttggaaccttaagcgccagctttcttaacttcgtcctagcaggcgcactattggcccttggcgtcttggttcctggcctcagtccatcaaatttacttttgattttgggactctatgctcctatgttgactggttttaaaacttttgatctcttgggaaccttctttccgattggaattggtgcaggtgcaactctcatcgttttttcaaaattgatggattatgccttaaacaactaccactcacgcgtctatcatttcatcatcggtatcgtcctatcaagtacccttttgatcttaattccaaatgcaggaaacgctgaaagtatccaatacacaggactttcacttgtcggttatgtcatcatcgccttcttctttgcgctgggaatctggcttggtatttggatgagtcaattggaggataaatataaataa

SEQ ID NO: 2547 - DNA, 789 bp, Streptococcus pneumoniae
atgagaaaacaaattcatccacttattttatttagtttttttgggattatgatgttcattttaatcatcaatcgcccacttaatgacagccaatcgtttaaaacaaaatccaatatagcacaggctttgaaacacttagacaaaccgattattgacctctctggctggcagcgtcctgaggaaatcaactacgatgccctctcacaaaatatttcaggtgctattgttcgtgttcacagtggtgctcaaacaacaaaagaaaatgatgcttcatttatcaatggaatagacaaggcctataagagtcatatcactgaacttcaaaagcggaatgtcccagttgctgtctacgcttatgtagctggaaaaagtgtccaagaaatggaaaaggctgccgaagttttctacaatgctgcctctccttacagccctagttactattggcttgacgtggaaaataaaaccatgtctaatatgaacgaaggtgtcgaaaactttcgagcaaaactagcatcactaggtgctaaaaacatcggcatctacgttggtgtctacttcatggaagaaacacgtattgatacaggcaagtttacctctgtgtggattccgtcctacggctcaaactcaggatttttggagagcagtcctaaaactgatttagattatgatattcaccaatacacatctaaaggaaaaattgccggctttgaccacgatttagatatcaacgttatctctcccttaaaaaataaagaagaaacctttcgaaaactttttttaaaaccttaa

SEQ ID NO: 2548 - DNA, 1380 bp, Streptococcus pneumoniae
atgtcaaattttgccattattttagcagcgggtaaagggactcgcatgaaatctgatttgccaaaagttttgcacaaggttgcgggtatttctatgttggaacatgttttccgtagtgtgggagctatccaacctgaaaagacagtaacagttgtaggacacaaggcagaattggttgaggaggtcttggctggacagacagaatttgtgactcaatctgaacagttgggaactggtcatgcagttatgatgacagaacctatcttagaaggtttgtcaggacacaccttggtcattgcaggagatactcctttaatcactggtgaaagcttgaaaaacttgattgatttccatatcaatcataaaaatgtggccactatcttgactgctgaaacggataatccttttggctatggacgaattgttcgtaatgacaatgctgaggttcttcgtattgttgagcagaaggatgctacagattttgaaaagcaaatcaaggaaatcaacactggaacatacgtctttgacaacgagcgtttgtttgaggctttgaaaaatatcaataccaataacgctcaaggcgaatactatattacagacgtcattggtattttccgtgaaactggtgaaaaagttggcgcttatactttgaaagattttgatgaaagtcttggggtaaatgaccgtgtggcgcttgcgacagctgagtcagttatgcgtcgtcgcatcaatcataaacacatggtcaacggtgttagctttgtcaatccagaagcaacttatatcgatattgatgttgagattgctccggaagttcaaatcgaagccaatgttatcttgaaagggcaaacgaaaattggtgctgagactgttttgacaaacggtacttatgtagtggacagcactatcggagcaggagcggtcattaccaattctatgattgaggaaagtagtgttgcagacggtgtgacagtcggtccttatgctcacattcgtccaaattcaagtctgggtgcccaagttcatattggtaactttgttgaggtgaaaggatcttcaatcggtgagaataccaaggctggtcatttgacttatatcggaaactgtgaagtgggaagcaacgttaatttcggtgctggaactattacagtcaactatgacggcaaaaacaaatacaagacagtcattggagtcaatgtctttgttggttcaaattcaaccattattgcaccagtagaacttggtgacaattccctcgttggtgctggttcaactattactaaagacgtgccagcagatgctattgctattggtcgcggtcgtcagatcaataaagacgaatatgcaacacgtcttcctcatcatcctaagaaccagtag

SEQ ID NO: 2549 - DNA, 546 bp, Streptococcus pneumoniae
atggagtttgaagaaaaaacgcttagccgaaaagaaatctatcaaggaccaatatttaaactggtccaagatcaggttgaattaccagaaggcaagggaactgcccgacgggatttgattttccacaatggggctgtctgtgttttagcagtaacggatgaacaaaaacttatcttggtcaagcagtaccgcaaagctatcgaggctgtctcttacgaaattccagccggaaaattggaagtaggagaaaacacagcccctgtggcagctgcccttcgtgaattagaggaagaaacagcctatacagggaaattagaactcttgtacgatttttattcagctattggcttttgtaatgagaagttaaaactatatttagcaagcgatttgacaaaagtggaaaatccgcgtccgcaggatgaggatgaaaccttggaagtccttgaagtgagcttagaagaagcgaaagaattaatccaatcaggtcatatctgtgatgccaagacaattatggctgttcagtattgggagttgcagaaaaaatag

SEQ ID NO: 2550 - DNA, 315 bp, Streptococcus pneumoniae
atgggtaaatctttattaacggatgaaatgattgaaagagctaatagaggcgaaaaaatttcaggtcctcctttgctagatgataatgaggaaactaagattttaccaacctcttcttcccgttttggttatgccaatcctaaggatcatggttttagccaggaaaccttgaagattcaggtcgaaccatctattcataaaagccgtcgtattgaaaataccaagagaaatgtcttcaattctaagttgaataaaatcttatttgcggtcatctttctcttgattttgcttgttttagcaatgaaacttttgtaa

SEQ ID NO: 2551 - DNA, 693 bp, Streptococcus pneumoniae
atgaaaataggaattattgctgctatgccagaagaactggcttatctggtccagcatttagataatacccaggagcaagttgttttgaggaatacctatcatacaggaaccattgcttctcatgaagtcgttcttgtagaaagtggaattggtaaggtcatgtctgctatgagtgtggcgattttggctgatcatttccaggtggatgcccttattaatacgggttcagctggggcagtagcagaaggtatcgctgttggggatgtcgtgattgctgacaaattagcctatcatgacgtggatgtcacagcttttggctatgcttatggacaaatggcgcaacaaccgctttatttcgaatcagacaaaacctttgttgctcaaatccaagagagtttatctcaattggaccaaaactggcatcttggtttgattgctacaggagatagttttgttgcaggaaatgacaagatagaagcgattaagtcccatttcccagaagttttagccgtggagatggagggggcagctattgctcaagcagcgcatgccctcaatctcccagtcttagtcatcagagctatgagtgacaatgccaaccatgaagcaaacatcttttttgatgagtttattatcgaagctggacgtcgctctgcccaagtcttgttgacctttttgaaggctttagattaa

SEQ ID NO: 2552 - DNA, 492 bp, Streptococcus pneumoniae
atgagtattgaaatgaccgtcagtgagattgcagaggtcttaggattatctcgccaagcaatcaataaccgtgtcaaagaattaccagaagaagacacagataaaaatgacaaaggggtaacagttgttaccagaagtggcttgattaagctagaagaaatctataaaaaaacgatttttgaagatgagcctgtcagtgaagatgtcaaacaacgtgaactgatggagattctagtggatgagaagaatgcagaaattcttcgtctttatgaacaattaaaagccaaggatcgtcagttatcagaaaaagacgagcagatgcgtatcaaagaccgtcagattgctgagaaagacaaacaattagatcagcaacaacaattgacccttcaagccatgaaggatcaagaaaatcttaagctagagctggaccaagcaaaagaagaagtccaatccactaaaaaaggcttttttgctcgtttatttggaggataa

SEQ ID NO: 2553 - DNA, 591 bp, Streptococcus pneumoniae
atggaacgattagaagattacattgcttttgatttagaatttaatcagcacgaaggacaaacacacttgattcaagtatcggcagtgcgttttagagatggtcgggaaatcgatgcctatgattcctatgttcataccagcgtccctctaaaaagctttatcaatggtttgaccgggattacagctgagaccttaaaagatgctcctccagttgagaaagtcttagaagaattccaagagtttgtgggttctttgctgatgataggctacaatgctgctaaaagtgatttacctattttagcagagcatggtttagactatagccaacagtacaaggtggatttgtatgatgaagcttttgaacgtcggagttcagatttacatggtattgccaatctcaaattgcaaactgttgcctcatttcttggatttcaaggtcagtctcataatagtttagaggatgctcggatgacggcgcgtgtttacgaatccttcttagagtcggatcaagctagggaattgttagagacagaaagtagcttatcaaacaatccttttggtggcttggacttgtctcaattatttgactag

SEQ ID NO: 2554 - DNA, 771 bp, Streptococcus pneumoniae
atggttcatctacctcaacttatttctcaccgaggggtttccaatgcaaatgggattcaaaatacagtagagtccttggaaactacagcacaactcaaaccagacttggtggagacggacgtgcaggaaacaaaagatgggcagtttgtcatgatgcatgatgctaacttgaaaaatctagcaggtatcaataaaagtcctcaagacttaaacttggaggagcttaaagggattgatatttttgaaaatggctaccagactaaaatttcaagctttgaagattatctcagtcgagccaacgaacttggtcaaaaattactaattgaaattaaaaccagtaaaaaagatagtccagacatgatgaaccgctttttagcccgttatgctgcaatgctcaagatttatggacatcaaatccagtctttagactaccatgttgtcgaaaaagtaagacagtatgatgccgaactgccagtttatttcatcatgccctacaattctgtctttcctaaaacaagagcgacaggatatactatggagtactcaaccttggatgaatattttgtaagcaaactatggacaacggatcagaaactttatgtctggactgtcaatgattcagaagctatcagcaaatctcttcacttaggagtagatggagtgattacagatgatttggaaaaagttcagcgggaaatagaagtagcccaagaagatccagaatatacggatttgctcttgaaaaaagcattggaattctttgaattttag

SEQ ID NO: 2555 - DNA, 348 bp, Streptococcus pneumoniae; identical to SEQ ID NO: 2066

SEQ ID NO: 2556 - DNA, 141 bp, Streptococcus pneumoniae
ttggttgcaggtctaacaaatggtgaattaatcgctccaatgacttacgaagagatgatgacgagcgacttttttgaagtatggtttcagaagtttttcttaccaacattaaccacaccatcggttattatagtaaaatga

SEQ ID NO: 2557 - DNA, 201 bp, Streptococcus pneumoniae
gtggtagcaagcgcttcggctagctcaacgagcacacaagctcaagagcaagttgacaagtctgaacttcgtgccttgagtcaagagttagaccaacgcttgaaagctttggcaacaatatctgatccgaaaatcgatgcaaccaaggctgtcctcctagatgctcaaaaagctccggaagatagtgccttgacagagtaa

SEQ ID NO: 2558 - DNA, 633 bp, Streptococcus pneumoniae
atgttttacttgagtttgtcaaggattgctttaagctcctctactagtttagtttctgtctctgctgagccattttcttctttcacgaaatcaagggtttcttggagaaggttttgggctttggcaaggacttttttatccgctttttctgcatctagctgtcctagaaccttgatcaattccgtgcttaattgctggatttctgactctttcttacggcgaatcagccagaaggcaatcacgcctaggagggcaagtagactgaccacaatcactcctgccggaactgagtttgtttcagtcatcttatctgaatccttactatcttccgttccttgttttgcatccttcttgtcctgtgcaggcttgctgtcgctagcatttgctttcacatctttgagagagtccaaggcagcccagccttcacagactctactgcagtatgcagaccttactctgtcaaggcactatcttccggagctttttgagcatctaggaggacagccttggttgcatcgattttcggatcagatattgttgccaaagctttcaagcgttggtctaactcttgactcaaggcacgaagttcagacttgtcaacttgctcttgagcttgtgtgctcgttgagctag

SEQ ID NO: 2559 - DNA, 300 bp, Streptococcus pneumoniae
atgactgaaacaaactcagttccggcaggagtgattgtggtcagtctacttgccctcctaggcgtgattgccttctggctgattcgccgtaagaaagagtcagaaatccagcaattaagcacggaattgatcaaggttctaggacagctagatgcagaaaaagcggataaaaaagtccttgccaaagcccaaaaccttctccaagaaacccttgatttcgtgaaagaagaaaatggctcagcagagacagaaactaaactagtagaggagcttaaagcaatccttgacaaactcaagtaa

SEQ ID NO: 2560 - DNA, 708 bp, Streptococcus pneumoniae
ttggaaacgatagtatttttaatctctgtttttctagcaggtgttttatcctttttttctccttgtatttttcctcttctgccagtctatgctgggattttattggatgatcaagaaagtgcaaaaagcttttctttgtttgggagaaaggttctctggtcaggcttgattcgaacactttgctttatcgctggtatctctctcattttctttattctaggctttggtgctggttactttggtcatattctctatgcaaattggtttcgatatggcatgggagctattattatcattttgggtcttcaccagatggaaatttttcatttgaagaaattagaagttcaaaaaagttttacctttaaaaaatcagattctaatcgttattggtcagcttttttacttggtattacctttagctttggttggacaccttgtattggtccagttttaagttctgttttagcacttgcggcttctggaggcaatggcgcttggcaaggagcgatttatactctcatttacactctgggcatggcccttcctttcttggtattggcactagcttcaggtctagtcatgccatattttagtaaaatcaagcgtcatatgatgctactaaagaaaattggtggtttcctcattgttttaatgggaattttgttactattaggacaagtaaatgttctagctggaatttttgaataa

SEQ ID NO: 2561 - DNA, 558 bp, Streptococcus pneumoniae
atgaaaaaagtaatgtttgctggcttaagtctcttgtcattagttgtattgatggcctgtggtgaggaagaaactaaaaagactcaagcagcacaacagccaaaacaacaaacgactgtacaacaaattgctgttggaaaagatgctccagacttcacattgcaatccatggatggcaaagaagttaagttatctgattttaagggtaaaaaggtttacttgaagttttgggcttcatggtgtggtccatgcaagaaaagtatgccagagttgatggaactagcggcgaaaccagatcgtgatttcgaaattcttactgtcattgcaccaggaattcaaggtgaaaaaactgttgagcaattcccacaatggttccaggaacaaggatataaggatatcccagttctttatgataccaaagcaaccaccttccaagcttatcaaattcgaagcattcctacagaatatttaattgatagccaaggaaagattggaaagattcaatttggtgctatcagtaatgcggatgcagaagcagcatttaaagaaatgaactag

SEQ ID NO: 2562 - DNA, 1392 bp, Streptococcus pneumoniae
atgaatatatttagaacaaagaatgttagtttagataaaacagagatgcataggcatttgaagttatgggatttgattttgctgggtatcggagccatggtagggacaggcgtctttacaatcacaggtactgcagctgcaacacttgctggcccagccctagtgatttcaatcgttatttctgccttgtgtgtgggattatcagccctcttttttgcagaatttgcctcgcgagtacccgctacaggaggtgcctatagttacctctatgctatcttaggagaattccctgcctggttggctggttggttaaccatgatggagttcatgacagccatatcaggcgtagcttcgggttgggcagcttattttaaaggcttgctctctcaatacgggatagcctttcctcaggctttaaatggtacctttaatcctcaagcagggacatttgttgatttattgcctattcttgtcttggtcttggtgacttcgcttgttttactaaatgccaaggcagccttacgctttaattcgattctagttattttgaaattttccgctttagctctctttgttttagtaggaatttggaatattaagtttgataattggagcaattttgctccttacggttttggacaaatctatggagctagcactggtattatggctggtgcgtccttgatgttcttcggttttttgggatttgaatccatctctatggctgtagatgaagtcaagactcctcaaaaaaatattcctagagggattgtcttatcgctttctatcgtaaccattctctatgccttggtgacccttgttttgactggtgtggttcactatagtcatttaaatgtcgatgatgccgttgcctttgcccttcgtagtgttgggattagttgggcagccaactatgtgtcattagtggctatcttgaccttgattacagtttgtatttcgatgacctatgccctatcgcgtatgatttacagtttagcacgtgacggcttagtgcctgctgcctttaaggaactgacgaagactagcaagataccaaagaatgctactatcttgacaggtctagcttcagcagtagcagcaggaatgttcccactagccagtattgcagcctttttaaatatttgtaccttagcctacttgatcatgttggcttatggtctgattcgcttacggaaagaaaaaggaatgcccaaagctggggaatttaaaacaccattggtacctctgttaccaattttatcgatcatcatttgtttatccttcatgttacagtataatatgaatacctggattgctttcctagttgcgttgttagtaggaagtattatttacttcacttatggctataagcattctaccatagaagaataa

SEQ ID NO: 2563 - DNA, 924 bp, Streptococcus pneumoniae
  unsure (608): n at each above location is unknown.
ttgttcatgaagaaacaaaatttatttttagtcctgttaagtgtctttcttttgtgcttgggggcttgtggtcaaaaggaaagtcagacaggaaaggggatgaaaattgtgaccagtttttatcctatctacgctatggttaaggaagtatctggtgacttgaatgatgttcggatgattcagtcaagtagtggtattcactcctttgaaccttcggcaaatgatatcgcagccatctatgatgcagatgtctttgtttaccattctcatacactcgaatcttgggcaggaagtctggatccaaatctaaaaaaatccaaagtgaaggtcttagaggcttctgagggaatgaccttggaacgtgtccctggactagaggatgtggaagcaggggatggagttgatgaaaaaacgctctatgaccctcacacatggctagatcctgaaaaagctggagaagatacccaaattatcgctgataaactttcagaggtggatagtgagcataaagagacttatcaaaaaaatgcgcaagcctttatcaaaaaagctcaggaattgactaagaaattccaaccaaaatttgaaaaagcgactcagaaaacatntgtaacacaacatacagccttttcttatctagcgaagagatttgggcttaatcaacttggtattgcaggcatctctcctgaacaagaaccaagtccacgacaattaacagaaattcaggaatttgttaaaacctataaggttaaaacgatttttacagaaagtaatgcttcttcaaaagtagctgaaactcttgtcaaatcaacaggtgtgggtcttaaaactctgaatcctttagaggcagacccacaaaatgacaagacctatttagaaaatctggaagaaaatatgagtgttctagcagaagaattaaagtga

SEQ ID NO: 2564 - DNA, 2517 bp, Streptococcus pneumoniae
atgaaaatcaataaaaaatatctagcaggttcagtggcagtccttgccctaagtgtttgttcctatgaacttggtcgtcaccaagctggtcaggttaagaaagagtctaatcgagtttcttatatagatggtgatcaggctggtcaaaaggcagaaaatttgacaccagatgaagtcagtaagagagaggggatcaacgccgaacaaattgttatcaagattacggatcaaggttatgtgacctctcatggagaccattatcattactataatggcaaggttccttatgatgccatcatcagtgaagaacttctcatgaaagatccgaattatcagttgaaggattcagacattgtcaatgaaatcaagggtggctatgtgattaaggtagacggaaaatactatgtttaccttaaagatgcggcccatgcggacaatattcggacaaaagaagagattaaacgtcagaagcaggaacacagtcataatcataactcaagagcagataatgctgttgctgcagccagagcccaaggacgttatacaacggatgatgggtatatcttcaatgcatctgatatcattgaggacacgggtgatgcttatatcgttcctcacggcgaccattaccattacattcctaagaatgagttatcagctagcgagttagctgctgcagaagcctattggaatgggaagcagggatctcgtccttcttcaagttctagttataatgcaaatccagttcaaccaagattgtcagagaaccacaatctgactgtcactccaacttatcatcaaaatcaaggggaaaacatttcaagccttttacgtgaattgtatgctaaacccttatcagaacgccatgtagaatctgatggccttattttcgacccagcgcaaatcacaagtcgaaccgccagaggtgtagctgtccctcatggtaaccattaccactttatcccttatgaacaaatgtctgaattggaaaaacgaattgctcgtattattccccttcgttatcgttcaaaccattgggtaccagattcaagaccagaacaaccaagtccacaatcgactccggaacctagtccaagtctgcaacctgcaccaaatcctcaaccagctccaagcaatccaattgatgagaaattggtcaaagaagctgttcgaaaagtaggcgatggttatgtctttgaggagaatggagtttctcgttatatcccagccaaggatctttcagcagaaacagcagcaggcattgatagcaaactggccaagcaggaaagtttatctcataagctaggagctaagaaaactgacctcccatctagtgatcgagaattttacaataaggcttatgacttactagcaagaattcaccaagatttacttgataataaaggtcgacaagttgattttgaggttttggataacctgttggaacgactcaaggatgtctcaagtgataaagtcaagttagtggatgatattcttgccttcttagctccgattcgtcatccagaacgtttaggaaaaccaaatgcgcaaattacctacactgatgatgagattcaagtagccaagttggcaggcaagtacacaacagaagacggttatatctttgatcctcgtgatataaccagtgatgagggggatgcctatgtaactccacatatgacccatagccactggattaaaaaagatagtttgtctgaagctgagagagcggcagcccaggcttatgctaaagagaaaggtttgacccctccttcgacagaccatcaggattcaggaaatactgaggcaaaaggagcagaagctatctacaaccgcgtgaaagcagctaagaaggtgccacttgatcgtatgccttacaatcttcaatatactgtagaagtcaaaaacggtagtttaatcatacctcattatgaccattaccataacatcaaatttgagtggtttgacgaaggcctttatgaggcacctaaggggtatagtcttgaggatcttttggcgactgtcaagtactatgtcgaacatccaaacgaacgtccgcattcagataatggttttggtaacgctagtgaccatgttcgtaaaaataaggcagaccaagatagtaaacctgatgaagataaggaacatgatgaagtaagtgagccaactcaccctgaatctgatgaaaaagagaatcacgctggtttaaatccttcagcagataatctttataaaccaagcactgatacggaagagacagaggaagaagctgaagataccacagatgaggctgaaattcctcaagtagagaattctgttattaacgctaagatagcagatgcggaggccttgctagaaaaagtaacagatcctagtattagacaaaatgctatggagacattgactggtctaaaaagtagtcttcttctcggaacgaaagataataacactatttcagcagaagtagatagtctcttggctttgttaaaagaaagtcaaccggctcctatacagtag

SEQ ID NO: 2565 - DNA, 3120 bp, Streptococcus pneumoniae
atgaaatttagtaaaaaatatatagcagctggatcagctgttatcgtatccttgagtctatgtgcctatgcactaaaccagcatcgttcgcaggaaaataaggacaataatcgtgtctcttatgtggatggcagccagtcaagtcagaaaagtgaaaacttgacaccagaccaggttagccagaaagaaggaattcaggctgagcaaattgtaatcaaaattacagatcagggctatgtaacgtcacacggtgaccactatcattactataatgggaaagttccttatgatgccctctttagtgaagaactcttgatgaaggatccaaactatcaacttaaagacgctgatattgtcaatgaagtcaagggtggttatatcatcaaggtcgatggaaaatattatgtctacctgaaagatgcagctcatgctgataatgttcgaactaaagatgaaatcaatcgtcaaaaacaagaacatgtcaaagataatgagaaggttaactctaatgttgctgtagcaaggtctcagggacgatatacgacaaatgatggttatgtctttaatccagctgatattatcgaagatacgggtaatgcttatatcgttcctcatggaggtcactatcactacattcccaaaagcgatttatctgctagtgaattagcagcagctaaagcacatctggctggaaaaaatatgcaaccgagtcagttaagctattcttcaacagctagtgacaataacacgcaatctgtagcaaaaggatcaactagcaagccagcaaataaatctgaaaatctccagagtcttttgaaggaactctatgattcacctagcgcccaacgttacagtgaatcagatggcctggtctttgaccctgctaagattatcagtcgtacaccaaatggagttgcgattccgcatggcgaccattaccactttattccttacagcaagctttctgctttagaagaaaagattgccagaatggtgcctatcagtggaactggttctacagtttctacaaatgcaaaacctaatgaagtagtgtctagtctaggcagtctttcaagcaatccttcttctttaacgacaagtaaggagctctcttcagcatctgatggttatatttttaatccaaaagatatcgttgaagaaacggctacagcttatattgtaagacatggtgatcatttccattacattccaaaatcaaatcaaattgggcaaccgactcttccaaacaatagtctagcaacaccttctccatctcttccaatcaatccaggaacttcacatgagaaacatgaagaagatggatacggatttgatgctaatcgtattatcgctgaagatgaatcaggttttgtcatgagtcacggagaccacaatcattatttcttcaagaaggacttgacagaagagcaaattaaggctgcgcaaaaacatttagaggaagttaaaactagtcataatggattagattctttgtcatctcatgaacaggattatccaggtaatgccaaagaaatgaaagatttagataaaaaaatcgaagaaaaaattgctggcattatgaaacaatatggtgtcaaacgtgaaagtattgtcgtgaataaagaaaaaaatgcgattatttatccgcatggagatcaccatcatgcagatccgattgatgaacataaaccggttggaattggtcattctcacagtaactatgaactgtttaaacccgaagaaggagttgctaaaaaagaagggaataaagtttatactggagaagaattaacgaatgttgttaatttgttaaaaaatagtacgtttaataatcaaaactttactctagccaatggtcaaaaacgcgtttcttttagttttccgcctgaattggagaaaaaattaggtatcaatatgctagtaaaattaataacaccagatggaaaagtattggagaaagtatctggtaaagtatttggagaaggagtagggaatattgcaaactttgaattagatcaaccttatttaccaggacaaacatttaagtatactatcgcttcaaaagattatccagaagtaagttatgatggtacatttacagttccaacctctttagcttacaaaatggccagtcaaacgattttctatcctttccatgcaggggatacttatttaagagtgaaccctcaatttgcagtgcctaaaggaactgatgctttagtcagagtgtttgatgaatttcatggaaatgcttatttagaaaataactataaagttggtgaaatcaaattaccgattccgaaattaaaccaaggaacaaccagaacggccggaaataaaattcctgtaaccttcatggcaaatgcttatttggacaatcaatcgacttatattgtggaagtacctatcttggaaaaagaaaatcaaactgataaaccaagtattctaccacaatttaaaaggaataaagcacaagaaaactcaaaacttgatgaaaaggtagaagaaccaaagactagtgagaaggtagaaaaagaaaaactttctgaaactgggaatagtactagtaattcaacgttagaagaagttcctacagtggatcctgtacaagaaaaagtagcaaaatttgctgaaagttatgggatgaagctagaaaatgtcttgtttaatatggacggaacaattgaattatatttaccatcaggagaagtcattaaaaagaatatggcagattttacaggagaagcacctcaaggaaatggtgaaaataaaccatctgaaaatggaaaagtatctactggaacagttgagaaccaaccaacagaaaataaaccagcagattctttaccagaggcaccaaacgaaaaacctgtaaaaccagaaaactcaacggataatggaatgttgaatccagaagggaatgtggggagtgaccctatgttagatccagcattagaggaagctccagcagtagatcctgtacaagaaaaattagaaaaatttacagctagttacggattaggcttagatagtgttatattcaatatggatggaacgattgaattaagattgccaagtggagaagtgataaaaaagaatttatctgatttcatagcgtaa

SEQ ID NO: 2566 - DNA, 189 bp, Streptococcus pneumoniae
aattctcccaaagtcagagttttatttctaacttttgagagaacttcatttttgattcagactttttctactgctattccttacgctatgaaatcagataaattcttttttatcacttctccacttggcaatcttaattcaatcgttccatccatattgaatataacactatctaagcctaatccgtaa

SEQ ID NO: 2567 - DNA, 189 bp, Streptococcus pneumoniae
gttagtcaaaaagaaggaattcaagcaaaacaaattgttattaagattacagatcaaggttatgtaacttctcatggcgatcattatcgctactataatggtaaagttccttttgatgcgctctttagtgaagagctattaatgaaagcccccaactatcagccgaaagatcaagatatcgtcagttag

SEQ ID NO: 2568 - DNA, 201 bp, Streptococcus pneumoniae
gttaagggaggatatattattaaggtagatggaaagtattatgtttaccttaaagatcaagctcatgcagaaaatgtacgaacaaaagatgaaatcaatcgccaaaaacaagaacatggtaaagacgataaaggagctagtgcagaagtatctgtagcaaaattacagggacgttatactaccgatgatggttatatatag

SEQ ID NO: 2569 - DNA, 483 bp, Streptococcus pneumoniae
ttgtcggtgacaccgaataatggtgtttctgcagcagatgatggttatgtctttaaccctaatgatattgtcagagatacaggtgatgcttatatagtaagacacggggatcactatcattatattcctaagtcatctcttaacaatcccccatcacactctaacacggaagaggcaggaagttcttctagttctgtattaagtaatccgtcactacatgtccaccatgaggaagaagatggtcatggttttgatgccaatcgaattataagtgaagattcagaaggttttgtgattcctcatggcgaccacaatcactacatcaaggttcaaactaagggatatgaagcggctttgaaaaacaagattccatccctgcaatccaactatcaacctggaacttttgatgagaaggcagtcttggcaaaagtagatcaacttctagctgatagcagaagcatctacaaagacagattgagttag

SEQ ID NO: 2570 - DNA, 240 bp, Streptococcus pneumoniae
ttgtctgattccttcttcatggatttgttccaagagttgatttgccttgctcaaaagactttctacttcttccttgctatctgtcgcagattattggttgctatctaccatgtactcctaaaacaggagagttataatccaagattacaaggccttacagaaataagaaatccagataagacaatgttcgtccaagacgctattcgcttcgcacaacagcacggattcaatatgctttaa

SEQ ID NO: 2571 - DNA, 258 bp, Streptococcus pneumoniae
ttgagcaaggcaaatcaactcttggaacaaatccatgaagaaggaatcagacaatccttggcagaagaagtagaaaatctaaaagctgccacaaacaaggttgatgcagacttggatgaagtaaacagtcaggtaaaagatgttttgactcgtatcgctagcgcccttcaacaagaaaaggaaaatgctgagcaagattctcagacacttgtactctatcaaaaactctacgatattctcatgtcgcttagaaagtaa

SEQ ID NO: 2572 - DNA, 435 bp, Streptococcus pneumoniae
atgctgagcaagattctcagacacttgtactctatcaaaaactctacgatattctcatgtcgcttagaaagtaataatggatctgatgcggactttgataaggtggatgcattattagatcaactttctgctaatagtaaagacaaaacagctttacttgaatcgacaaaagctattctagttttgaatcatcaaatccagtcaaaagctagcgcaagtgaagaaacaagtccagcaagaaatgctgaagcaaatggtgataacaccagtgctgagaaccaaccaaacgcaactgcagaatctaacattgaaactgctagcgacgaaaacaaaccaagcaatacaagagattctaaacctgctgaatcaacttcagaaaataaaacaacagaatcttctacaactactggaaatcaagaaaaaccagtagaataa

SEQ ID NO: 2573 - DNA, 1224 bp, Streptococcus pneumoniae
atgacttatccaaatctcttggaccgcttcttaacctatgttaaggtcaacacgcgctctgatgaacactctactactactccaagtacacagagtcaggttgacttcgcaacaaatgtcctaattcctgaaatgaaacgtgttggactgcaaaatgtttactatctaccgaatggttttgctattggaaccttgccagccaacgatccgtctttaacacgtaagattggttttatatcgcacatggatactgctgattttaatgctgaaggagtcaatccacaggtaattgaaaactacgatggtggtgtgattgaactagggaattctggtttcaaactcgatccagctgacttcaagagtcttgaaaaatatccaggacaaacgctcatcacaacagatggaacaaccttgctaggtgctgatgacaagtcaggaattgctgaaattatgacagccattgaatatctaactgctcatcctgaaattaagcactgtgagattcgtgttggttttggtccagatgaagaaatcggtgttggtgccaataaatttgatgcagaagattttgatgtggattttgcctacactgttgatggtggtccactaggtgaacttcagtacgagactttctcagccgctggtgctgaattgcatttccaaggccgtaatgtccaccctggtactgccaaagggcagatggtcaatgcccttcagctagcaattgattttcataatcaacttccagaaaatgaccgacctgagttaactgaaggttaccaaggtttttaccatctaatggatgtgacaggtagtgttgaggaggcgcgtgcaagctacatcattcgtgattttgaaaaagatgcctttgaagcgcgtaaagcatccatgcaatctatcgctgataagatgaatgaagaacttgggagcaaccgtgtcactctcaacttgacagaccagtactacaatatgaaagaagtcattgaaaaagatatgactccaattaccgttgctaaagccgttatggaagatctaggtatcacgcctattatcgaaccaatccggggtggaacagacggctctaagatttcctttatgggaatcccaactccgaatatctttgcaggtggcgaaaatatgcacggacgttttgaatacgttagccttcagactatggaacgtgcagttgataccatcattggcatcgtagcttataaaggctaa

SEQ ID NO: 2574 - DNA, 1095 bp, Streptococcus pneumoniae
atgaaaaaagcaattttaatgatgaccttcggttcaccagaagagattacctttgaaggtgtagctgattttttcacaaatattcgtcgtggggtgagaccccaagaccacgagattcagactctctatgataattatgtacgaattggaggcacgcctctgcaaaaaattacccgtcaagaggttgccttggtagaagctaggctggggaatgaatacagtgtctactttgctaataagttttccagtccctttattccagatgtgatcggtcaaatggaagcagacggaattgaacagtgtatttgcttgattttggagccccattattctttctactctgtcatgggctatgaaaaatttttagaaagcaaacaaattcaatttttggtcattaaggactggtatcaggaagaagcgctcttaaactattgggtagatgaaattgctaagattttaaaagaagaagttaagcaagacagctgtaaagtcatcttttcagcccatagtgtgcccatttttgccttggactttggtgatccttatatagaccaaattttcgaaaatagcaagctagtcgctgaaaaactgggcttgagttcagaacaatataccaacacttggcagagtgagagtgatattggtattccatggattaaaccagatgttttggagtatctcagagaacagacagaacatccagaccattatatttttgtacctattagtttcatcagtgagcatattgaggtcttgtttgacaatgatgtagaatgttatgacttatgccaggaatttggggtaaactaccatcgtccaccaatgccaaatacagattctcgtttgattgatgctttggtcaatacagttagagtcaatgaaaatcaagagtttaaggaatttctcccagaagaagagacctttgatgagttagttccttcagacgagacgaaaaacattttagctgaatctgaagatttacaaatgccagaatttgtgaaaaaactgattgagaaaaaagggcgggagaatgttaagatgccttatcttatcaaaaaaatgcttgaaaaagcaggcaagttacccaaagagtaa

SEQ ID NO: 2575 - DNA, 378 bp, Streptococcus pneumoniae
atgttaaaaaatctaaaatcgttcttgcttcgaggaaatgttattgaccttgctgtcggtgttgtaattgcctctgcttttggtgctatcgttacttcacttgtaaacgacattatcactcctcttattttaaatcccgctttgaaagctgctaaagttgaacgtatcgctcaactttcttggcatggagtcggctatggtaacttcttaagtgctattatcaattttatctttgtgggtaccgccctcttctttattatcaagggcattgaaaaagcacagaaactgactggcataaagaaagaaaaaactgccgaaaaaaaaccaaccgaattggaagtccttcaagaaataaaagctctccttgagaaaaaataa

SEQ ID NO: 2576 - DNA, 261 bp, Streptococcus pneumoniae
tcccaaattgatccggttgtatttaagccaaaaaaagaaaatagctttatccgtttaaggaaaattttttcttgctggcctttctacttttctgttagactggtttttaacttttttcttgtaacccaatttcctcacattatagggcaattcgtaactgaaaacattgataagataaaggctattgaaacaataattgcacaaatattcattattatcatcaattatatcttgagcaaggcctatatttttagaaaataa

SEQ ID NO: 2577 - DNA, 384 bp, Streptococcus pneumoniae
atgatgagtcaaaagattattgggattgaccttggtggaacttctatcaaatttgcaatcttaacaacagcaggagaaatccaaggaaaatggtcaatcaagaccaacattttggatgagggaagtcatatcgttgatgatatgattgagtctattcaacatcgtttggacttgcttggattggcagcagcggacttccaaggcattggaatgggatcaccaggtgtggttgaccgtgacaaagggactgttatcggtgcctacaacttgaactggaaaacccttcaaccaatcaaacaaaagattgaaaaagctttgggcattccatttttcatcgataatgatgccaacgtagcagctcttggtgagcgctggatgggtgct

SEQ ID NO: 2578 - DNA, 264 bp, Streptococcus pneumoniae
atggtaaaatggctgtcaatgaatgggttgatggtggacgttattatgttggcgctgacggagtttggaaggaaggtcaagcaagtacagtttcttctagtaatgatagcaatagtgaatatttctgctgctttaggaaaggcaaaaagttataattcgttattccacatgtcaaaaaaacgtatgtatagacaattaacttctgattttgataaattttcaaatgatgcagctcaatatgccattgatcatttagataattaa

SEQ ID NO: 2579 - DNA, 819 bp, Streptococcus pneumoniae
ttgtcaacgattgataaatcaggagttcttcctttttcagcgcaaacggtgcaggctgacatacaaacgcttaccccaatggcaaaatattatattattcttccgaaggatgcagaaatatataaaacttggagaggtactgtcaatattcccattattgatgctacaaaaactactccagaattatcttatttcaaagaagatcatcgcaactatatagctaatgagaataagtctggtgccaattacatagagtggaagggaacagtagaagagtttaaagaggccattaagaagttgactgataaaaaatcaactactgcaacaccaaaaaaggatgaaaagccaacaccaaaaccggatgagaagccaaaaccaacacctacagttcagtctggttgggtaggttcatcctattatcaagatggtaaaaaagtcattagtaagtggatttttgataaaaaatataattcatacttctatctagatgcatcaggaaattatgttcaaaacgcttgggtaggtaactattatcttaaatcaggcggatacatggctaaaggtgaatgggtttatgatgccacctatcaagcttggtattatttgacatcagatggttcttatgcttacagtacatggcaaggaaattactatctaaaatcggatggtaaaatggctgtcaatgaatgggttgatggtggacgttattatgttggcgctgacggagtttggaaggaaggtcaagcaagtacagtttcttctagtaatgatagcaatagtgaatatttctgctgctttaggaaaggcaaaaagttataa

SEQ ID NO: 2580 - DNA, 1530 bp, Streptococcus pneumoniae
ttgatgaaatcaaaaatagttttgggagcttcgctagcgatcgcaacacttagcttagtatctcttgtcgagattgaaggactctcaccgtttttaatagagaatgttagcgcaaatactcattctgcaaataaagttattaatcataaagtaagtatttacttagaaaatgctgatgaaggtaaaggtctaactgtaaacttttcaacagacagtgttagtccaaatttatttgatgagttcgaaaaaaagagtggaattacaataactactatgttagtgaatgctaagacaggtgaagttgtagaaaaaagattaacaccaagcgtttttttacgttccaatgatttaaccagtgggaccatatcttcgtttatttttagtgaatatcctgatggagaatataaatatgttgtgtctaaaggagactttatcgatcctaagactcagtttaaacatcagtatagaggagaatctccagtttttagaatacgtaatcgaaaatatgtggagttgggaacaactgataaaaaattagatgaaagacgtgataatagcgtttataaagatggggttgttgaacacaaggtaaatttaagtttaacaagttatcaaggaggtaatggagttactgcaattttttcaactgatagtgttaactctaacttacttaattcttttggtgaaaaggctaaaaaagttttgattaggtctaagttaattaatgttaagactggcgaggttattgatgaaacgttttctccaaaagtaagtttaacctctaaaattttgaaaagtggttctacagcagtattttattttatagatttaactgatggcgaatataaatatgttgcgtatgaaagccagcaatatactgatcctcaaacaacattgactcatcagtatagaggagaatctcctatttttagtatcaaagatggaaaattttctggtttagtatctgcctcaaaaccagacgaaaacccgaagccaacgccaaaaccggatgagaaaccaaaaccttcagcaccacaacaggagaaaccaaaacctacagttcagtctggttgggtaggttcatcttattatcaaaatggtaaaaaagtcactagtaagtggatttttgataaaaaatataattcatacttctatctagatgcatcaggaaattatgttcaaaacgcttgggtaggtaactattatctcaaatcaggcggatacatggctaaaagtgagtggatttatgataagaactatggttcatactactatctaacatcagaaggcagctacgctcgtaacacttggtcaggcaattattatttgaagtcaaatggtaagatggctaaaagtgagtgggtatacgatagtaactacaaatcatattactacttgacatcagaaggaagttatgctcgtaacacttgggtaggcaattactatcttaaatcaaacggtaaaatggctgttaatgaacgtacaccagatggttatcgtgtagatggttcaggtaaatgggttaaataa

SEQ ID NO: 2581 - DNA, 1722 bp, Streptococcus pneumoniae
atgcatagaaaaacagtgattgattttaggactttgggggagagatatacctttaccaagcctattaaagagttgaaaacgagaaatgtagaagaagtggcagatttgctggcacaagtggaaagctaccaagagcaaggttattatgtggtggggtatgtcagctacgaggctgcacctgcttttgaggaaaaattagcagttcacaaggatcccctactgggagagtacctgctttattttactgttcatgatagcgtagaaacttcctctattcctctgacttatgaggatattgatttgccctcaaattggcaggaagtaacgtctgcagcagactatgaaaaggccattgcccaaattcaccatcatttacggcagggagatacctatcaggtcaactacaccgtccaacttaagcaaaagttaaatgccaatccttttgccatctacaatcgtatggtggtagagcaggaggcgggctacaatgcctatgtggaacatgacgagatggcagtgatttccatgagcccagagctcttttttgagcaaaatgatcgcgagttgacaacacgaccaatgaaggggacgactcagcgtggggtaactgaccaagaagatcttgaacaggccagttggttggaacaggatcccaaaaatcgctctgaaaatatgatgattgtggacctcttgcgcaatgatatgaaccgtatttctgaagttgggagcgagcacgtggagcgtctgtgtcaggtagagcagtattcaactgtttggcagatgacttcgaccatcaagagtcagttgcgagaggatgtggaccttgttgaaatcttccgctcactctttccttgtggttccataacgggtgcaccgaaaattgcgacaatggagattatcaaggacttggagcctcaaccgcgtggagtctactgtggaacgattggtctcttgcttccaaatggacgacggatttttaatgtggccattcgtaccattcaacttcacaaaggtcaagccatttatggagttggcggagggattacttgggatagcacatgggaatctgaataccgagaggttcatcaaaaggcagcagttctttatcgtaaacaagctcgcttccaactgattacgacaggggaaatcagccagaagaacctgttgtttgaagatcaacatctggaaagactgagaaaagctagtcgttattttgcctttccttttgatgcagaagacttgggacacaagattgaggaagagtgtcaggattgtgaagctaatcgagattaccgcttgcgaatcagccttagcaaatctggagagatagaagtcaatcgtcaagtattaacccctctcagtacaagcttttgtcaggcccaagtctgccttcaggaagctgctttgaatcaatcctttacctactttaaaaccactcaccgaccgcatttgagcctaggagaacaagagaagatttaccacaataagtcaggagaactgcttgaaacctctataggaaatttggttctgaaaatcgctggaaaactctacacaccgcctatccgacttggaatcttgccaggaatttaccgtcagtatttgctagaaacaggacaggtagaagagaaagtcttgaccttggcagatttagcccaagcagaagctatttacggctgtaatgcagtgagaggcttgtatgagttgcaagtgataggattgtga

SEQ ID NO: 2582 - DNA, 5892 bp, Streptococcus pneumoniae
gtgtttaaaaaagaccgtttttcaattcgtaagattaagggagttgtaggctctgtatttcttggaagccttttgatggctccttctgtagtggacgcagccacctatcactatgtaaataaagagattatttcacaagaagctaaagatttaattcagacaggaaagcctgacaggaatgaagttgtatatggtttggtgtatcaaaaagatcagttgcctcaaacagggacagaagcatctgttttgacagcttttggtttgctgactgttgggagcttgcttttaatctacaagagaaagaaaattgctagcgtctttctagttggagctatgggattggtagttcttcctagtgcaggggctgtagacccagttgcgaccctagcgctggctagtcgagagggtgttgttgaaatggagggctatcgctatgttggttatctatcaggtgacatcctcaaaacgcttggcttggacactgttttagaagaaacctcagcaaaacctggagaggtgactgtagtcgaagttgagactcctcaatcaacaacaaatcaggagcaagctaggacagaaaaccaagtagtagagacagaggaagcacctaaaacagaagaaagtccaaaggaagaaccaaaatcggagataaaacctactgacgacacccttcctaaagtagaagaggggaaagaagattcagcagaaccagctccagttgaagaagtaggtggagaagttgagtcaaaaccagaggaaaaagtagcagttaagccagaaagtcaaccatcagacaaaccagctgaggaatcaaaagttgaaccaccagtagaacaagcaaaaggcccagaacaacccgtgcaacctacacaagctgagcaaccaaggataccaaaagattcatcacaaccagaagatcctaaagaagataggggagcggaagatacaccgaaacaagaagatacacagccagaagtagtagaaacaaaagatgaggctgctaatcaacctgttgaagaaccaaaagttgaaacgcctgctgtagaaaaacaaacggaaccaaaagttgaacaagtaggtgaaccagtcgagccaagtgaagacgaaaaggcaccagtctctccagaaaagcaaccagaagctcctgaagagaaggctgtagaggaaacaccgaaaccagaagataaaataaagggtattggtactaaagaaccagttgataaaagtgagttaaataatcaaattgataaagctagttcagtttctcctactgattattctacagcaagttacaatgctcttggacctgttttagaaactgcaaaaggtgtctatgcttcagagcctgtaaaacagcctgaggtaaatagcgagacaaataaacttaaaacggctattgacgctctaaacgttgataaaagtgaattacaggaacaattaagagttgctgaacaaaaacaacaagctgactatagcgctaaaacttggagggaattcaaaattgctgaacttcaagctaaagaaatcaacaaccaaactacaccacttcctaaacaaagtgaaatagatgcagctactaaggctcttcaagacgctcttcaagctcttgctgtagataaaactgtattacaaaacgctattaacacagctaatagcaaacgtgaagaagagtatactgctcagacatggaaagcgttagaagatgctcttacagcagtgaatcctgttaatgaagatgaaactgcaactcaaagcaaagtagacgaagctactagaaacttagaagaagctatcaataacctagttctattaactgaaaaaccggtattaacatttattgagactgataagaaagcattagaacgtgaagtagttgctaagtattctctagaaaaccaaaataaaacaaaaattaaatcaatcacagctactctgaaaaaaggagaaacagttgttagcactgtagagcttataggcgatgatgtaactaatgaaactataacctctgcatttaagaatctagagtactacaaagaatacaccctatctacaactatggtttacgatagaggtgacggtgatgtaacagaaatcttagataatcaaccaatccaactagatcttaaaaaagttgagcttaaaaatattaaacgtacagatttaatcaaatacgaaaatggaaaagaaactaatgaatcactaataacaactgttcctgatgataagcggaattattatttaaaaataacttcaaagaatcaaaaaactacattactagctgttaaaaatatagaagaaactacggttaacggaacacctgtatataaagttacagcaatcgcagacaatttagtctctagaactgctgataataaatttgaagaagaatacgttcactatattgaaaaacctaaagtccacgaagataatgtatattataacttcaaagaattagtggaggctattcaaaacgatccttcaaaagaatatcgtctgggacaatcaatgagcgctagaaatgttgttcctaatggaaaatcatatatcactaaagaatttacaggaaaacttttaagttctgaaggaaaacaatttgctatcactgagttggaacatccattatttaatgtgataacaaacgcaacgataaataatgtgaattttgaaaatgtagagatagaacgttctggtcaagataatattgcatcattagccaatactatgaaaggttcttcagttattacaaatgtcaaaattacaggcacactttcaggtcgtaataatgttgctggatttgtaaataatatgaatgatggaactcgtattgaaaatgttgctttctttggcaaactacactctacaagtggaaatggctctcatacagggggaattgcaggtacaaactatagaggaattgttagaaaagcatatgttgatgctactattacaggaaacaaaacacgcgccagcttgttagttcctaaagtagattatggattaactctagaccatcttattggtacaaaagctctcctaactgagtcggttgtaaaaggtaaaatagatgtttcaaatccagtagaagttggagcaatagcaagtaagacttggcctgtaggtacggtaagtaattctgtcagctatgctaagattatccgtggagaggagttattcggctctaacgacgttgatgattctgattatgctagtgctcatataaaagatttatatgcggtagagggatattcgtcaggtaatagatcatttaggaaatctaaaacatttactaaattaactaaagaacaagctgatgctaaagttactactttcaatattactgctgataaattagaaagtgatctatctcctcttgcaaaacttaatgaagaaaaagcctattctagtattcaagattataacgctgaatataaccaagcctataaaaatcttgaaaaattaataccattctacaataaagattatattgtatatcaaggtaataaattaaataaagaacaccatctaaatactaaagaagttctttctgttaccgcgatgaacaacaatgagtttatcacaaacctagatgaagctaataaaattattgttcactatgcggacggtacaaaagattactttaacttgtcttctagcagtgaaggtttaagtaatgtaaaagaatatactataactgacttaggaattaaatatacacctaatatcgttcaaaaagataacactactcttgttaatgatataaaatctattttagaatcagtagagcttcagtctcaaacgatgtatcagcatctaaatcgattaggtgactatagagttaatgcaatcaaagatttatatttagaagaaagcttcacagatgttaaagaaaacttaacaaacctaatcacaaaattagttcaaaacgaagaacatcaactaaatgattctccagctgctcgtcaaatgattcgtgataaagtcgagaaaaacaaagcagctttattactaggtttaacttacctaaatcgttactatggagttaaatttggtgatgttaatattaaagaattaatgctattcaaaccagatttctatggtgaaaaagttagcgtattagacagattaattgaaatcggttctaaagagaacaacattaaaggttcacgtacattcgacgcattcggtcaagtattggctaaatatactaaatcaggtaatttagatgcatttttaaattataatagacaattgttcacaaatatagacaatatgaacgattggtttattgatgctacagaagaccatgtctacatcgcagaacgcgcttctgaggtcgaagaaattaaaaattctaaacatcgtgcattcgataatttaaaacgaagtcaccttagaaatactatactcccactactgaatattgataaagcacatctttatttaatttcaaattataatgcaattgcctttggtagtgcagagcgattaggtaaaaaatcattagaagatattaaagatatcgttaacaaagctgcagatggttatagaaactattatgatttctggtatcgtctagcgtctgataacgttaaacaacgactactaagagatgctgttattcctatttgggaaggttataacgctcctggtggatgggttgaaaaatatggccgctataataccgacaaagtatatactcctcttagagaattctttggtcctatggataagtattataattataatggaacaggagcttatgctgctatatatcctaactctgatgatattagaactgatgtaaaatatgttcatttagaaatggttggtgaatacggtatttcagtttacacacatgaaacaacacacgtcaacgaccgtgcgatttacttaggtggctttggacaccgtgaaggtactgatgctgaagcatatgctcagggtatgctacaaactcctgttactggtagtggatttgatgagtttggttctttaggtattaatatggtatttaaacgcaaaaatgatgggaatcagtggtatattacagatccaaaaactctaaaaacacgagaagatattaatagatatatgaagggttataatgacactttaactcttcttgatgaaattgaggctgaatctgtgatttctcaacaaaataaagatttaaatagtgcatggttcaaaaaaatagatagagaataccgtgataacaataaattaaatcaatgggataaaattcgaaatctaagtcaagaagagaaaaatgaattaaatattcaatctgttaatgatttagttgatcaacaattaatgactaatcgcaatccaggtaatggtatctataaacccgaagcaattagctataacgatcaatcaccttatgtaggtgttagaatgatgaccggtatctacggaggtaatactagtaaaggtgctcctggagctgtttcattcaaacataatgcttttagattatggggttactacggatacgaaaatgggttcttaggttatgcttcaaataaatataaacaacaatctaaaacagatggtgagtctgttctaagtgatgaatatattatcaagaaaatatctaacaatacatttaatactattgaagaatttaaaaaagcttacttcaaagaagttaaagataaagcaacgaaaggattaacaacattcgaagtaaatggttcttccgtttcatcatacgatgatttactgacattgtttaaagaagctgttaaaaaagatgccgaaactcttaaacaagaagcaaacggtaataaaacagtatctatgaataatacagttaaattaaaagaagctgtttataagaaacttcttcaacaaacagatagctttaaaacttcaatctttaaataa

SEQ ID NO: 2583 - DNA, 234 bp, Streptococcus pneumoniae
ttatttaactcacttttatcaactggttctttagtaccaataccctttattttatcttctggtttcggtgtttcctctacagccttctcttcaggagcttctggttgcttttctggagagactggtgccttttcgtcttcacttggctcgactggttcacctacttgttcaacttttggttccgtttgtttttctacagcaggcgtttcaacttttggttcttcaacaggttga

SEQ ID NO: 2584 - DNA, 324 bp, Streptococcus pneumoniae
acttttatcaactggttctttagtaccaataccctttattttatcttctggtttcggtgtttcctctacagccttctcttcaggagcttctggttgcttttctggagagactggtgccttttcgtcttcacttggctcgactggttcacctacttgttcaacttttggttccgtttgtttttctacagcaggcgtttcaacttttggttcttcaacaggttgattagcagcctcatcttttgtttctactacttctggctgtgtatcttcttgtttcggtgtatcttccgctcccctatcttctttaggatcttctggttgtga

SEQ ID NO: 2585 - DNA, 564 bp, Streptococcus pneumoniae
atgaacgagacacagattcaaagagaaacacgtcaggtagtggaagatgttttagaaaagaccaatttgaagcagggggccctttttgttttaggtctatcttctagtgaggtgctaggtggtcagattgggaaagaatccagtcaagagattggtgagctgatagtggagactatcttgggtattctaagtagtagaggtatccatttagcagttcaaggttgtgagcatgtcaatcgggctctcgttgttgaacgtcaggtggcagagcagtttggtctggaaattgtcagtgtccatcctactcttcatgcaggaggttcggggcagttggcagcctttaagtttatgcaggatccagttgaggttgaatttatcaaggctcatgctggattggatatcggagacactgcaattggcatgcatgtcaagcatgttcaggttccgattcgccctattttgagagagattggtcatgcccatgtaacggcactggctagtcgtccaaaattaatcggaggtgcgcgtgcgcactatccgcaagacgctattagaaagtcttga

SEQ ID NO: 2586 - DNA, 1134 bp, Streptococcus pneumoniae
aactctggaagcctatctcaatcaactccagttggggcagcaggctttgccttcattatcaatgaaaaccatgaatttgtctaccatcctcaacacacagtttatagttcgtctagcaaaatggaggctatgaaaccctacatcgatacaggtcagggttatactcctggtcacaaatcctacgtcagtcaagagaagattgcaggaactgattggacggtacttggcgtgtcatcattggaaaagttagaccaggttcggagtcagctcttgtggaccttgcttggggccagtgtcacatctcttcttgtctgtctctgcttagtgtggttcagtcttaaacgctggattgctcctttgaaggatttgagagaaaccatgttggaaattgcttctggtgctcaaaatcttcgtgccaaggaagttggtgcctatgaactgagagaagtaactcgccaatttaatgccatgttggatcagattgatcagttgatggtagctattcgtagccaggaagaaacgacccgtcagtaccaacttcaagccctttcgagccagattaatccacatttcctctataacactttggacaccatcatctggatggctgaatttcatgatagtcagcgagtggtgcaggtgaccaagtccttggcaacctatttccgcttggcgctcaatcaaggcaaggacttgatttgtctctctgacgaaatcaatcatgtccgccagtatctctttatccagaaacaacgctatggagataagctggaatacgaaattaatgaaaatgttacctttgataatttagtcttacccaagctggtcctacaaccccttgtagaaaatgctctttaccatggcattaaggaaaaggaaggtcagggccatattaaactttctgtccagaaacaggattcgggattggtcatccgtattgaggatgatggcgttggcttccaagatgctggtgatagtagtcaaagtcaactcaaacgtgggggagttggtcttcaaaatgtcgatcaacggctcaaacttcattttggagccaattaccagatgaagattgattctagaccccaaaaagggacgaaagttgaaatatatataaatagaatagaaactagctaa

SEQ ID NO: 2587 - DNA, 189 bp, Streptococcus pneumoniae
ttgttgatgcaaagggagccaatcttggtgtgcttcgtttggatatttcttcatgaaactctggaagcctatctcaatcaactccagttggggcagcaggctttgccttcattatcaatgaaaaccatgaatttgtctaccatcctcaacacacagtttatagttcgtctagcaaaatggaggctatga

SEQ ID NO: 2588 - DNA, 558 bp, Streptococcus pneumoniae
atgaagcgttcttctcttttagttagaatggttatttccatctttctggtctttctcattctcctagctctggttggaactttctactatcaatcaagttcttcagccattgaggccaccattgagggcaacagccaaacgaccatcagccagactagccactttattcagtcttatatcaaaaaactagaaaccacttcgaccggtttgacccagcagacggatgttctggcctatgctgagaatcccagtcaagacaaggtcgagggaatccgagatttgtttttgaccatcttgaagtcagataaggacttgaaaactgttgtgctggtgaccaaatctggtcaggtcatttctacagatgacagtgtgcagatgaaaacttcctctgatatgatggctgaggattggtaccaaaaggccattcatcagggagctatgcctgttttgactccagctcgtaaatcagatagtcagtgggtcatttctgtcactcaagaacttgttgatgcaaagggagccaatcttggtgtgcttcgtttggatatttcttcatga

SEQ ID NO: 2589 - DNA, 738 bp, Streptococcus pneumoniae
atgacctacacaatcttaatcgtagaagatgaatatctggtaagacaaggtttgactaaactggtcaatgtagcagcctacgatatggaaatcattggtcaggctgaaaatggaaggcaggcttgggaattgatccaaaagcaggtgccagatatcattttaaccgatatcaacatgcctcatctaaatggcatccagttggccagtctggtacgagaaacctatcctcaggttcatttggtctttttaacaggttacgatgattttgattatgccttgtctgctgtcaaactaggtgtggacgactacctgctcaaacccttttctcgtcaggatattgaggaaatgttggggaaaatcaaacaaaaactagacaaggaagagaaagaagagcagttacaagatttattgactaataggtttgaaggaaacatggcccagaaaatccagtctcatctggctgatagccaatttagtttaaagtctttagccagtgacttaggttttagtccgacctatctgagttccttgattaagaaagagttgggcttgccttttcaggattatctggtgagagaacgtgttaaacaagccaagctcttgcttttaactacagatctgaagatttatgagatcgcagagaaggttggttttgaagatatgaactattttacccaacgttttaagcagattgcaggtgtgacacctcgtcagtttaagaagggagaagaccgatga

SEQ ID NO: 2590 - DNA, 1113 bp, Streptococcus pneumoniae
atgaatgataagttaaaaatcttcttgttgctaggagtattttttctagccataaccggtttctatgttctattgatacgaaatgcagggcagacagatgcctcgcaaattgaaaaggcggcagttagccaaggaggaaaagcagtgaaaaaaacagaaattagtaaagacgcagacttgcacgaaatttatctagctggaggttgtttctggggagtggaggaatatttctcacgcgttcccggggtgacggatgccgtttcaggctatgcaaatggtagaggagaaacaaccaagtacgaattgattaaccaaacaggtcatgcagaaaccgtccatgtcacctatgatgccaagcaaatttctctcaaggaaatcctgcttcactatttccgcattatcaatccaaccagcaaaaataaacaaggaaatgatgtggggacccagtaccgtactggtgtttattacacagatgacaaggatttggaagtgattaaccaagtctttgatgaggtggctaagaaatacgatcaacctctagcagttgaaaaggaaaacttgaagacttttgtggtggctgaggattaccatcaagactatctcaagaaaaatccaaatggctactgccatatcaatgttaatcaggcggcctatcctgtcattgatgccagcaaatatccaaaaccaagtgatgaggaattgaaaaagaccctgtcacctgaggagtatgcagttacccaggaaaatcaaacagaacgagctttctcaaaccgttactgggataaatttgaatccggtatctatgtggatatagcaactggggaacctctcttttcatcaaaagacaaatttgagtctggttgtggctggcctagttttacccaacccatcagtccagatgttgtcacctacaaggaagataagtcctacaatatgacgcgtatggaagtgcggagccgagtaggagattctcaccttgggcatgtctttacggatggtccacaggacaagggcggcttacgttactgtatcaatagcctctctatccgctttattcccaaagaccaaatggaagaaaaaggctacgcttatttactagattatgttgattaa

SEQ ID NO: 2591 - DNA, 594 bp, Streptococcus pneumoniae
ttgaataaaatggaaaggaatatcaatatgaaaaaatggcaaacatgtgttcttggagcaggttcgctcctttgtttgacggcttgttcaggcaagtccgtgactagtgaacaccaaacgaaagatgaaatgaagacggagcagacagctagtaaaacaagcgcagctaaagggaaagaggtggctgattttgaattgatgggagtagatggcaagacctaccgtttatctgattacaagggcaagaaagtctatctcaaattctgggcttcttggtgttccatctgtctggctagtcttccagatacggatgagattgctaaagaagctggtgatgactatgtggtcttgacagtagtgtcaccaggacataagggagagcaatctgaagcggactttaagaattggtataagggattggattataaaaatctcccagtcctagttgacccatcaggcaaacttttggaaacttatggtgtccgttcttacccaacccaagcctttatagacaaagaaggcaagctggtcaaaacacatccaggattcatggaaaaagatgcaattttgcaaactttgaaggaattagcctag

SEQ ID NO: 2592 - DNA, 711 bp, Streptococcus pneumoniae
  unsure (493): n at each above location is unknown.
atgggtcatattttcttttttctaagtgtctttttggcagggattctatccttcttttctccttgtatcttacctttgttaccggtctatacaggagtgttactagatgataaggatggtgctcaggcttctagcggcaaattttcaatctcagttactagtttattacgaactctggcctttatagcaggaatttcctttatatttattttgttgggctatggagctggttttttaggcgatttgctttatgcttcttggttccaatatcttactggggcaattattatccttcttggtttgcaccaaatggagattctacactttaaggagctttataaggaaaagaggctacaactgcaaggacaggggcaaaatggtaagggctatagtcaggcatttttattgggcttgacctttagttttgcttggacgccttgcgtggggccggttctggggtctgttttggccttggcggcttcaggtggttcangagcttggcagggagctggtctcatgttggtgtatacgctgggcttggcgctaccattcttgcttctagctctgacctctagttatgttttgaaacatttccgaaaacttcatccctatctcggaatcctcaaaaaagtgggtggttttctcattattgtgatgggactcttggttctgtttggaaatgcttcaattttaagtcaattatttgaataa

SEQ ID NO: 2593 - DNA, 861 bp, Streptococcus pneumoniae
atgaaaaagtggtggaaagagctgatagacaagcctttattaaaagcttttttgcattattatcaagcatcagatagtgagttgaccagtgtcgcagtagcctactattggttgatttcgattttccccctgcttttggtggtggtcaatatcctcccctattttcagattcctgtgggagaatttttgggctttatgaaagacgttctgcccccaagcctctatgaaggtgtggaaaaaatagccagagaagttttgacgcaaccttcaacaggtttattgagtttttctgttttatcggcgttatggagtttttcaaaatctatgaatttcttgcaaaaagcttttaacaaggcttatggcgtcgaaaagagtcgtggacttatttcccatcagatgctaagtctcctagtcagttttggcttgcagatcctctttgcgtttgccttgtttttgatcttatttggtcagatgattttggctttacttgctcattattggacaaaagatggcattatctatcaggctttacaagggttggcaggtcctctgatttacgccctcctctttgctatcttggtcatgctttattattttcttcccaatctatctaacaggaaaattagctataccctaccaggcagtgcctttgttctcttagtgattttaggtttactaactctgttctctagttatctcaattactatgtccatcatttggtggatgtccgaattttaggttccgttcttcttgttgttatgatgttttggtttatcttgattgctaaaattgttatcctaggcgcggttatcaatgccagtatgcagagtttgaaagatccggtctttaaaaaagactaa

SEQ ID NO: 2594 - DNA, 2055 bp, Streptococcus pneumoniae
gtggaattactgatttacctcatcctatttttactggttttgattgtctcaagtacaaccaataagctcctgccctttttgcctctccctttggtgcagattcttttaggaattgtgattggtctctttttacccaatactgactttcaccttaatacggagttgtttttggcactggttatcggacccttgcttttccgagaggctgaagaagcagatgttacggctattttaaaacactggcgaatcattgtttatctcatatttccagtgatttttatctcgaccctgagtttgggtggcttggcccatcttctttggttcagccttcccttggcagcttgcttggctgttggtgcagcccttggtcctacggacttggtggcctttgcctctctttcggagcgttttagctttcctaagcgcgtgtccaatattcttaagggcgaaggactcttgaatgatgcttctggtttggtggcttttcaggtagctttgacagcttggacaactggagctttttctctggggcaagctagcagttcgctcatcttttcaatcctaggcggttttttaattggatttttaacagccatgaccaaccgcttcctccataccttcttgctaagtgtgcgcgcaacggatattgccagtgaacttttattagaattgagtttgcctctagtgaccttctttctggcagaagaagtccatgtttcagggattattgccgtcgtagttgctggaattttaaaggcaagtcgcttcaagaaaatcacgctcctcgaagcccaagtggatacggtgaccgagacggtctggcatacagtgacctttatgctcaacggttctgtctttgtgattttagggatggagttggaaatgatagcagaacctatcttgaccaatccaatctataatcctctacttttattgctatctctcatcgcccttacctttgtcctctttgtcattcgttttattatgatctatggctattatgcctatagaacccgacgcctcaagaaaaagctaaataagtatatgaaggacatgtttctcttgaccttttcaggtgttaagggaacggtgtcgattgctacgattctcttgataccaagtaatctagaacaggagtatcctctcttgcttttccttgttgcaggtgtgacgcttgtcagctttttaacaggtctcttggtcttgcctcatctttctgatgaagaggaagaaagcaaggattatctcatgcatatcgccattttgaatgaagtaacgctagagttggaaaaagagttggaagacaccagaaataaacttcccctctatgcggctattgacaattatcatggacgtattgaaaatctcattttaagccaagaaaaccaggatgatcaagaagattgggctgctttgaaactcttgattcttagtattgaaagtgatggtttggagcaggcctatgaagaggggaacattagcaatcgtgtttaccgagtttaccaacgttatctgaaaaatatagaacaaggaatcaatcgtaaacttgcctcaagactgacctattatttccttgtttctttgcggattttacgttttctccttcatgaagtttttactctcggaaagaccttccgtagctggaagaacaaggagcaaagccgtctccgtgctcttgattatgaccaaattgcagagctctatcttgccaatacggagatgattattgaaagtttggaaaacctgaagggagtctacagccgctctttgattagttttatgcaggagtctcgtcttcgagaaacaactattattagcagtggtgcctttgtcgaacgggttatcaatcgtgtcaaacccaacaatatcaatgaaatgctgagaggctattatctggagcgcaagttgattttcgaatacgaagaaaaacgattgattacgactaagtatgccaagaaattacgacaaaatgtaaataacttagagaactattccttgaaggaagctgccaataccctgccgtatgatatggtggaattggtaagaagaaattag

SEQ ID NO: 2595 - DNA, 192 bp, Streptococcus pneumoniae
ttgctcttgaaatggaacggtgccagagaaaaattgagcacaaagactgttccaagattgaccaaaaaatcaaagagcagaaggagatatttgaatcctgttgtaaaaaagattaaggaggacgtgcgtggaattactgatttacctcatcctatttttactggttttgattgtctcaagtacaaccaataa

SEQ ID NO: 2596 - DNA, 255 bp, Streptococcus pneumoniae
atggataaacaatacctacacgaaaagctggatgccatgcgccagaattttgttgaatcaacccaccacgaacgagcggtgggcgtgctagaccaagcgcatatgagcaaaaaaatgcttaaaatcaagaaaaaattagttgctcttgaaatggaacggtgccagagaaaaattgagcacaaagactgttccaagattgaccaaaaaatcaaagagcagaaggagatatttgaatcctgttgtaaaaaagattaa

SEQ ID NO: 2597 - DNA, 189 bp, Streptococcus pneumoniae
gcatttttttgctcatatgcgcttggtctagcacgcccaccgctcgttcgtggtgggttgattcaacaaaattctggcgcatggcatccagcttttcgtgtaggtattgtttatccatgtctgtatctctctaatttttcaatcatcactaaaaacggcgggttgttgacttggtttaaagttcggtaa

SEQ ID NO: 2598 - DNA, 564 bp, Streptococcus pneumoniae
ttgaaaatgaaaagaccacttgagatggcacatgattttttggctgaggtcgtgacaaaagaggatgtcgtagtggatgcgactatgggaaatggtcatgacacgctttttttagccaagctagccaagcaagtctatgcctttgatattcagaagcaagccttggaaaagacccaagagcgtttgcatcaggctgacttgacaaatgcccagttaatcttgcaaggccatgagacactggaccagtttgtgataaaagctaaggcagggatttttaatctgggctatttgccgtcagctgataagtctgtcatcacccgaccgcagacaacgattgaggcattagaaaagctatgtggcttacttgtcaaaggtggacgaattgctattatgatttactatggtcatgaaggaggcgatctcgagagagatgctgtcttggattttgtgatccagttgaaccaacaagagtacacagctgccatttaccgaactttaaaccaagtcaacaacccgccgtttttagtgatgattgaaaaattagagagatacagacatggataa

SEQ ID NO: 2599 - DNA, 447 bp, Streptococcus pneumoniae
gtggaaacggtcaagcgtttgagaaagtatcccaagattgagattgtttcccatttgatcaatggtttgcctggtgaaacccatgagatgatggttgaaaatgtccgccgttgtgtcacgaataacgatattcaagggattaaactgcatttgctccatcttatgacaaatactcgtatgcaacgagattaccatgagggacgtttacaattgatgagtcaggacgaatatgtcagggtcatctgtgaccaactggaaattattcccaaacatatcgtcatccatcgaattacaggagatgcgcctagggatatgctgcttgggcctatgtggagcctcaataaatgggaagctctcaacagcattgagatggagatgcgacgtcgtggaagtgttcaaggatgcaaggctgtaaaacaggagtttgaaaatgaaaagaccacttga

SEQ ID NO: 2600 - DNA, 252 bp, Streptococcus pneumoniae
ttttataaggaaattgactttattcaccgtaagtggccagatgttcagaagtatctggtttattttcaaaattttaccaacacccgtgaaaaggtggaagttattcgagagcgttatgaacaggctatcaatgagccaggtgtggtaggaatcaatattggaacgcgcccagactgtttaccagacgaaaccatcgaatatttggctgagttatcggagtgcatgcatgtgacggttgaattgggcttgtag

SEQ ID NO: 2601 - DNA, 438 bp, Streptococcus pneumoniae
tactcaaataccaagactggaaaagccaaatccgcaaagtttcgtcctagtttttttaatctaaaaagtttggttaggataatgcagacgactaaggtcagtatcaataataaaatagatgctaatttcattaaaatcatacccatattgtatcataaaaaaaggctaatggaaacgagaaacagaggaatttataggaaagtcaggcttttgagattgtgggtgatttttgttataatgaaagttataaaatcttataataccttgaatgattattatcgaaaactctttggagaaaagacttttaaagtccctattgatgcgggatttgactgtcccaatcgtgatggaactgtggctcatggaggctgtactttttgtacggtttccggttctggagatgccattgtggcaccagatgcgcctatccgtgagtaa

SEQ ID NO: 2602 - DNA, 360 bp, Streptococcus pneumoniae
atgggtatgattttaatgaaattagcatctattttattattgatactgaccttagtcgtctgcattatcctaaccaaactttttagattaaaaaaactaggacgaaactttgcggatttggcttttccagtcttggtatttgagtattacttgattacagctaaaacctttacccataatttcctccctagactggggctagccctctcgttcctagccattattctcgtctttttcttccttttgaaaaaacgcagcttttactatcctaaattcatcaaattcttctggcgtgcaggattcttattaacccttatcatgtatatagaaatgattgttgaattgttcttaatgaaatag

SEQ ID NO: 2603 - DNA, 246 bp, Streptococcus pneumoniae
atgcatattcactataacacaaatcaaacaactttaccactagaaatcagttccttcttgccacaagatcatctcgtttttactattgaaaaagtggtgaataccttggaggattgtcacttccacgccttctatcatgcctttgatcgcccgtcttatcaccctaaaatgcttgtatctactcttctatttgcctattcacaagggattttctctggtcgaaaaattgaaaaatggaagagttag

SEQ ID NO: 2604 - DNA, 624 bp, Streptococcus pneumoniae
atggaagagttagtgaccttagattgtttgtttattgacggaactaagattgaagccaatgccaacaagtatagttttgtgtggaagaaaacgacagagaaattctccgccaaacttcaagaacagatacaagtctattttcaagaagaaatcactccccttctgattaaatatgccatgtttgataaggaacaaaagagaggctataaacagtcagctagaaacttagcgaattggcactataatgacaaggaggatagctacacacatcctgatggctggtgctatcgttttcaccataccaaatatcagaaaacacagacagactttcaacaagaaatcaaggtttactacgccgacgaacctgaatcagcccctcaaaagggactgtatatgaacgaacgctatcaaaacttgaaagctaaagaatgtcaggcgcttttatctccccaaggtagacagattttcgctcaacgcaagattgatgtggaacctgtctttgggcagataaaggcttctttgggttacaagagatgtaatctgagagggaagtgtcaagtgagaattgacatgggattggtacttatggccaataacctcctaaaatatagtgaaatgaaataa

SEQ ID NO: 2605 - DNA, 6519 bp, Streptococcus pneumoniae
atgatagtagaagaaaaggctgataaagctttggaaactaaaaatgtagttgaaaggacagaacaaagtgaacctagttcaactgaggctattgcatctgagaagaaagaagatgaagccgtaactccaaaagaggaaaaagtgtctgctaaaccggaagaaaaagctccaaggatagaatcacaagcttcaagtcaagaaaaaccgctcaaggaagatgctaaagctgtaacaaatgaagaagtgaatcaaatgattgaagacaggaaagtggattttaatcaaaattggtactttaaactcaatgcaaattctaaggaagccattaaacctgatgcagacgtatctacgtggaaaaaattagatttaccgtatgactggagtatctttaacgatttcgatcatgaatctcctgcacaaaatgaaggtggacagctcaacggtggggaagcttggtatcgcaagactttcaaactagatgaaaaagacctcaagaaaaatgttcgccttacttttgatggcgtctatatggattctcaagtttatgtcaatggtcagttagtggggcattatccaaatggttataaccagttctcatacgatatcaccaaataccttcacaaagatggtcgtgagaatgtgattgctgtccatgcagtcaacaaacagccaagtagccgttggtattcaggaagtggtatctatcgtgatgtgactttacaagtgacagataaggtgcatgttgagaaaaatgggacaactattttaacaccaaaacttgaagaacaacaacatggcaaggttgaaactcatgtgaccagcaaaatcgtcaatacggacgacaaagaccatgaacttgtagccgaatatcaaatcgttgaacgaggtggtcatgctgtaacaggcttagttcgtacagcgagtcgtaccttaaaagcacatgaatcaacaagcctagatgcgattttagaagttgaaagaccaaaactctggaccgttttaaatgacaaacctgccttgtacgaattgattacgcgtgtttaccgtgacggtcaattggttgatgctaagaaggatttgtttggttaccgttactatcactggactccaaatgaaggtttctctttgaatggtgaacgtattaaattccatggagtatccttgcaccacgaccatggggcgcttggagcagaagaaaactataaagcagaatatcgccgtctcaaacaaatgaaggagatgggagttaactccatccgtacaacccacaaccctgctagtgagcaaaccttgcaaatcgcagcagaactaggtttactcgttcaggaagaggcctttgatacgtggtatggtggcaagaaaccttatgactatggacgtttctttgaaaaagatgccactcacccagaagctcgaaaaggtgaaaaatggtctgattttgacctacgtaccatggtcgaaagaggcaaaaacaaccctgctatcttcatgtggtcaattggtaatgaaataggtgaagctaatggtgatgcccactctttagcaactgttaaacgtttggttaaggttatcaaggatgttgataagactcgctatgttaccatgggagcagataaattccgtttcggtaatggtagcggagggcatgagaaaattgctgatgaactcgatgctgttggatttaactattctgaagataattacaaagcccttagagctaagcatccaaaatggttgatttatggatcagaaacatcttcagctacccgtacacgtggaagttactatcgccctgaacgtgaattgaaacatagcaatggacctgagcgtaattatgaacagtcagattatggaaatgatcgtgtgggttgggggaaaacagcaaccgcttcatggacttttgaccgtgacaacgctggctatgctggacagtttatctggacaggtacggactatattggtgaacctacaccatggcacaaccaaaatcaaactcctgttaagagctcttactttggtatcgtagatacagccggcattccaaaacatgacttctatctctaccaaagccaatgggtttctgttaagaagaaaccgatggtacaccttcttcctcactggaactgggaaaacaaagaattagcatccaaagtagctgactcagaaggtaagattccagttcgtgcttattcgaatgcttctagtgtagaattgttcttgaatggaaaatctcttggtcttaagactttcaataaaaaacaaaccagcgatgggcggacttaccaagaaggtgcaaatgctaatgaactttatcttgaatggaaagttgcctatcaaccaggtaccttggaagcaattgctcgtgatgaatctggcaaggaaattgctcgagataagattacgactgctggtaagccagcggcagttcgtcttattaaggaagaccatgcgattgcagcagatggaaaagacttgacttacatctactatgaaattgttgacagccatgggaatgtggttccaactgctaataatctggttcgcttccaattgcatggccaaggtcaactggtcggtgtagataacggagaacaagccagtcgtgaacgctataaggcgcaagcagatggttcttggattcgtaaagcatttaatggtaaaggtgttgccattgtcaaatcaactgaacaagcagggaaattcacccttactgcccactctgatctcttgaaatcgaaccaagtcactgtctttactggtaagaaagaaggacaagagaagactgttttggggacagaagtgccaaaagtacagaccattattggagaggcacctgaaatgcctaccactgttccgtttgtatacagtgatggtagccgtgcagaacgtcctgtaacctggtcttcagtagatgtgagcaagcctggtattgtaacggtgaaaggtatggctgacggacgagaagtagaagctcgtgtagaagtgattgctcttaaatcagagctaccagttgtgaaacgtattgctccaaatactgacttgaattctgtagacaaatctgtttcctatgttttgactgatggaagtgttgaagagtatgaagtggacaagtgggagattgccgaagaagataaagctaagttagcaattccaggttctcgtattcaagcgaccggttatttagaaggtcaaccaattcatgcaacccttgtggtagaagaaggcaatcctgcggcacctgcagtaccaactgtaacggttggtggtgaagctgtcacaggtcttactagtcaaaaaccaatgcaataccgcactcttgcttatggagctaagttgccagaagtcacagcaagtgctaaaaatgcagctgttacagttcttcaagcaagcgcagcaaacggcatgcgtgcgagcatctttattcagcctaaagatggtggccctcttcaaacctatgcaattcaattccttgaagaagcgccaaaaattgctcacttgagcttgcaagtggaaaaagctgacagtctcaaagaagaccaaactgtcaaattgtcggttcgagctcactatcaagatggaacgcaagctgtattaccagctgataaagtaaccttctctacaagtggtgaaggggaagtcgcaattcgtaaaggaatgcttgagttgcataagccaggagcagtcactttgaacgctgaatatgagggagctaaaggccaagttgaactcactatccaagccaatactgagaagaagattgcgcaatccatccgtcctgtaaatgtagtgacagatttgcatcaggaaccaagtcttccagcaacagtaacagttgagtatgacaaaggtttccctaaaactcataaagtcacttggcaagctattccgaaagaaaaactagactcctatcaaacatttgaagtactaggtaaagttgaaggaattgaccttgaagcgcgtgcaaaagtctctgtagaaggtatcgtttcagttgaagaagtcagtgtgacaactccaatcgcagaagcaccacaattaccagaaagtgttcggacatatgattcaaatggtcacgtttcatcagctaaggttgcatgggatgcgattcgtccagagcaatacgctaaggaaggtgtctttacagttaatggtcgcttagaaggtactcaattaacaactaaacttcatgttcgcgtatctgctcaaactgagcaaggtgcaaacatttctgaccaatggaccggttcagaattgccacttgcctttgcttcagattcaaatccaagcgacccagtttcaaatgttaatgacaagctcatttcctacaataaccaaccagccaatcgttggacaaactggaatcgtagtaatccagaagcttcagtcggtgtcctattcggagattcaggtattttgagcaaacgttcagttgataacttaagcgttggcttccatgaagaccatggagttggtgcaccgaagtcttatgtgattgagtattatgttggtaagactgtcccaacagctcctaaaaaccctagttttgttggtaatgaggaccatgtctttaatgattctgccaactggaaaccagttactaatctaaaagcccctgctcaactcaaggctggagaaatgaaccactttagctttgataaagttgaaacctatgctgttcgtattcgcatggtgagagcagacaacaaactaggaacgtctatcacagaggtacaaatctttgcgaaacaagttgcggcagccaagcaaggacaaacaagaatccaagttgacggtaaagacttagcaaacttcaaccctgatctgacagactactaccttgagtctgtagatggaaaagttccggcagtcacagcaagtgttagcaacaatggtctcgctaccgtcgttccaagcgttcgtgaaggtgagccagttcgtgtcatcgcgaaagctgaaaatggcgacatcttaggagaataccgtctgcacttcactaaggataagaacttactttctcataaaccagttgctgcggttaaacaagctcgcttgctacaagtaggtcaagcacttgaattgccgactaaggttccagtttacttcacaggtaaagacggctacgaaacaaaagatttgtcagttgaatgggaagaagttccagcagaaaatctgacaaaagcaggtcaatttaccgttcgaggccatgtccttggtagtgatcttgttgctgaggtcactgtacgagtgacagacaaactaggcgaagctctttcagataaccctaactatgatgaaaacagtaaccaggcctttgcttcagcaaccaatgatattgacaaaaactctcatgaccgcgttgactatctcaatgacggagatcattcagaaaatcgtcgttggacaaactggtctccaacaccatcttctaatccagaagtatcagcgggtgtgatcttccgtgaaaatggtaagattgtagaacggactgttgcgcaagccaaacttcacttctttgcagatagtggtacggatgcaccaactaaactcgttttagaacgctatgtcggtccagagtttgaagtgccaacctactattcaaactaccaagcctacgacgcagaccatccattcaacaatccagaaaattgggaagctgtgccttatcgtgcggataaagacatcgcagctggtgatgaaatcaacgtaacatttaaagctgtcaaagccaaagctatgagatggcgtatggagcgtaaagcagataagagcggtgttgcgatgattgagatgaccttccttgcaccaagtgaattgcctcaagaaagcacgcaatcgaagattcttgtagatggaaaagaacttgctgatttcgctgaaaatcgtcaagactatcaaattacctataaaggtcaacggccaaaagtctcagttgaagaaaacaatcaagtagcttcaactgtggtagatagtggagaagatagccttccagtacttgttcgcctcgtttcagaaagtggaaaacaagtcaaggaataccgtatccacttgactaaggaaaaaccagtttctgagaagacagttgctgctgtacaagaagatcttccaaaactcgaatttgttgaaaaagatttggcctacaagacagttgagaaaaaagattcaacactgtatctaggtgaaactcgtgtagaacaagaaggaaaaactggtaaagaacgtatctttacagcgattaatcctgatggaagtaaggaagaaaaactccgtgaagtggtagaagctccgacagaccgcatcgtcttggttggaaccaaaccagtagctcaagaagctaaaaaaccacaagtgtcagaaaaagcagatacaaaaccaattgattcaagtgaagctagtcaaactaataaagcccagttaccaaatacaggtagtgcggcaagccaagcagcagtagcagcaggtttagctcttctaggtttgagtgcaggattagtagttactaaaggtaaaaaagaagactag

SEQ ID NO: 2606 - DNA, 186 bp, Streptococcus pneumoniae
ttgaattggattttcgcagagtgtaaattgttgaaactaggttgtcataccatgtataccacttgggctttagtagtagctaactgcactaaatataatataaggagggttttatggggaaaggccattggaatcggaaaagagtttatagcattcgtaagtttgctgtgggagcttgctcagtaa

SEQ ID NO: 2607 - DNA, 192 bp, Streptococcus pneumoniae
atgaaaatcaaagagcaaactaggaagctagccgcaggttgctcaaaacacagttttgaggttgtagataagactgacgaagtcagctcaaaacatggttttgaggttgtagatgaaactgacgaagtcagtaatcatatctacggcaaggcgacactgacgaagtttgaattggattttcgcagagtgtaa

SEQ ID NO: 2608 - DNA, 432 bp, Streptococcus pneumoniae
ttactgacttcgtcagtttcatctacaacctcaaaaccatgttttgagctgacttcgtcagtcttatctacaacctcaaaactgtgttttgagcaacctgcggctagcttcctagtttgctctttgattttcattgagtttatattttataggagcgcattattttgcttttgctgcgtactcttcgttacgtttgatcatttgttttctgtaccaagcaaagataccgatatagaatacaaggaaggctactgcaccaaggattgctttgatatcaccagttgtagtgttaccaattgtccaaccaagaagtttttcgattggtccttcaagagtagagtgagtaatcaattgagtttggctcacaccttctgggaaggcacctacacctttagcaagttctgttgcaaatggtgcaataagtgtacctga

SEQ ID NO: 2609 - DNA, 786 bp, Streptococcus pneumoniae
ttgaacaagaaaatcggtttctggggatctaaattcttcatcggtttcatccttggtatcgttattggtattatgggaactccacatccaattgcaggtgttgcagatgcagataaatggcgtcttgttatcaaaggatggttgtctcttggtttgactgccggtgtatctttggaactcttctcacttatcggttcatggttcatcgcagccgtagaaccactatcacaaggtattacaaacgttgctactaaacgtcttcaaggacgtaaattcaatatcggtcttgactggccattcatcgctggtcgtgctgaaatctgggcttgtgccaacgtacttgcaccaatcatgttgattgaagcagtgcttctttcaaaagttggaaatggtatcttgccacttgcaggtatcatcgctatgggtgttactccagctctcttggttgtaactcgtggtaaattgctccgtatgattatcttcggaacactcttgttgccactcttccttctttcaggtacacttattgcaccatttgcaacagaacttgctaaaggtgtaggtgccttcccagaaggtgtgagccaaactcaattgattactcactctactcttgaaggaccaatcgaaaaacttcttggttggacaattggtaacactacaactggtgatatcaaagcaatccttggtgcagtagccttccttgtattctatatcggtatctttgcttggtacagaaaacaaatgatcaaacgtaacgaagagtacgcagcaaaagcaaaataa

SEQ ID NO: 2610 - DNA, 693 bp, Streptococcus pneumoniae
  unsure (667): n at each above location is unknown.
atggatgcaatctttgacctaatcggaaaggttttcaatcccatcttagaaatgggtggacctgtcatcatgttaatcattttgacagtattggctttactttttggagtgaaattctccaaagcgcttgaaggtggtatcaaacttgccatcgctcttacaggtatcggtgctatcatcggtatgctaaatggtgctttctcagcatcacttgcaaaattcgttgaaaacactggtatacaattgagtattaccgacgttggttgggcaccactcgcaacaatcacttggggttctgcttggacactatacttcttgctcatcatgttgattgtcaacgtagtgatgcttgctatgaagaaaaccgatacacttgatgtcgatatctttgatatctggcacttgtctatcacaggtctcttgattaaatggtatgctgataacaatggtgtgagtcaaggggtttcactctttattgctacagcagctatcgtccttgtcggtgtgttgaaaattatcaactctgacttgatgaaacctacatttgatgaccttcttaacgccccaagttcatcaccaatgacatcaactcacatgaactacatgatgaacccagttatcatggttttggataagatttttgaaaaatcttcccaggccttgatanatatgactttgatgctgctaaattga

SEQ ID NO: 2611 - DNA, 306 bp, Streptococcus pneumoniae
atgattaaaattcttgctgcctgcggtgcaggtgttaactcaagtcaccaaattaaaagtgctctagaagaagaactttcaaaccgtggttatgatgttcactgtgatgcagtcatggtgaaagatgtaaacgaagaccttatgaaaggttacgatatctttacaccaatcgctgcaacagaccttggttttgaaccaggtatcccagttatcgaagctggaccaatcttattccgtatcccagcaatgagcgctccagtatttgacaatattgaagcagctattaaagaacacggattaagctaa

SEQ ID NO: 2612 - DNA, 477 bp, Streptococcus pneumoniae
atggtattagattatttctttgacaaaaaccttgtgttttgcttagaagcggataatcaagaacaactctttgatcaggttgcaactttattggaagaacgagaaattgtcactccaacttatcgtgaagccttgatcacgcgtgaaaagtcatttccaactggtttagatatggaatttctaggaaaggacttgccaaatgtagcgattcctcatacagatattgttcataatctagctgagaaagtggtggttgttcgattagaaaaaccagtaacttttcacaatatgatagctcctgataaggaagtagaagtatccttgctcttctttatcatcaataactcaagttcaagtcaaacaaatattctggctcagttgatggactttttcacaggaaatggacatcttgaagacctatcaaaaatttccgaaccagaaaaactttatgcttacattgctgaagcaaccgcttaa

SEQ ID NO: 2613 - DNA, 6417 bp, Streptococcus pneumoniae
atgaaaaaaagtacagtattgtcattaaccacagctgcagttattttagcagcctatgcccctaatgaggtagtcttagcagacacatctagctctgaagatgctttaagcatctctgataaagaaaaagtagtagtagataaggaaacagaaaataaagagaaacataaagatatccatagtgctatggaaacttcacaggattttaaagagaagaaaatagcagtcattaaggaaaaagaagttgttagtaaaactcctgtgatagacactaaaactagcaatgaagaaaattccaataaatcccaaggagatcatacggactcatttgtgaataaaaacacagaaaatcccaaaaaagaagataaagttgtctatattgctgaatttaaagataaagaatctggagaaaaagcaatcaaggaactatccagtcttaagaatacaaaagttttatatacttatgatagaatttttaacggtagtgccatagaaacaattccagataacttggacaaaattaaacaaatagaaggtatttcatcggttgaaagggcacaaaaagtccaacccatgatgaatcatgccagaaaggaaattggagttgaggaagctattgattacctaaagtctatcaatgctccatttgggaaaaattttgatggtagaggtatggtcatttcaaatatcgatactggaacagattataggcataaggctatgagaatcgatgatgatgctaaagcctcaatgagatttaaaaaagaagacttaaaaggaactgataaaaatttctggttgagtgataaaatccctcatgcgttcaattattataatggtggcaaaatcactgtagaaaaatatgatgatggaagggattattttgacccacatgggatgcatattgcagggattcttgctggaaatgatactgaacaagatatcaaaaactttaacggcatagatggaattgcgcctaatgcacaaattttctcttataaaatgtattctgacgcaggatctgggtttgcgggtgatgaaacaatgtttcatgctattgaagattctatcaaacacaacgttgatgttgtttcggtatcatctggttttacaggaacaggtcttgtaggtgagaaatattggcaagctattagggcattaagaaaagcaggcattccaatggttgtcgctacgggtaactatgcgacttctgcttcaagttcttcatgggatttagtagcaaataatcatctgaaaatgaccgacactggaaatgtaacacgaactgcagcacatgaagatgcgatagcggtcgcttctgctaaaaatcaaacagttgagtttgataaggttaacattggaggacaaagttttaaatacagaaatataggggcctttttcgataagaataaaatcacaacaaatgaagatggaacaaaagctcctagtaaattaaaatttgtatatataggcaaggggcaagaccaagatttgataggtttggatcttaggggcaaaattgcagtaatggatagaatttatacaaaggatttaaaaaatgcttttaaaaaagctatggataagggtgcacgcgccattatggttgtaaatactgtaaattactacaatagagataattggacagagcttccagctatgggatatgaagcggatgaaggtactaaaagtcaagtgttttcaatttcaggagatgatggtgtaaagctatggaacatgattaatcctgataaaaaaactgaagtcaaaagaaataataaagaagattttaaagataaattggagcaatactatccaattgatatggaaagttttaattccaacaaaccgaatgtaggtgacgaaaaagagattgactttaagtttgcacctgacacagacaaagaactctataaagaagatatcatcgttccagcaggatccacatcttgggggccaagaatagatttacttttaaaacccgatgtttcagcacctggtaaaaatattaaatccacgcttaatgttattaatggcaaatcaacttatggctatatgtccggaactagtatggcgactccaatcgtagcagcttctactgttttgattcgaccaaaattgaaggaaatgcttgaaaaacccgtattaaaaaatcttaaaggtgatgataaaatagaccttacaagtcttacaaaaatagccctacaaaatactgcaagacctatgatggatgcaacttcttggaaagaaaaaagtcaatactttgcatcacctagacagcagggggcggggctaattaatgtggccaacgctttgagaaatgaagttgtagcgactttcaaaaacacggattctaaaggtttggtaaattcatatggttccatttctcttaaagaaataaaaggtgataaaaaatactttacaattaagcttcacaatacatccaacaggcctttaacctttaaagtttcagcatcagcggtaactacagattctctaactgacagactaaaactggatgaaacatataaagatgaaaaatctccagatggtaagcaaattgttccagaaattcatccagaaaaagtcaaaggggcaaatattacatttgagcatgacactttcactataggggcaaattctagctttgatttaaatgcggttataaatgttggggaggctaaaaataaaaataaatttgtagaatcatttattcattttgagtcagtagaagaaatggaagcattaagctccaatggcaagaaaaccgacttccaaccatctttatcaatgcccctaatgggatttgctgggaattggaaccacgaaccaatccttgataaatgggcttgggaagaaggatcaaaatcaaaaacaatggaaggttatgatgatgacggtaaaccaaaaattccaggaaccttaaataaggggattggtggagaacatggtatagataaatttaatccagcaggagttatccaaaatagaaaagataaaaatagaacatctctagatcaagatccagacttatttgcctttaacaaccaaggtgttcatgcagaatccactagtggttctaagattgctaacatttatcctttagattcaaatggaaatcctcaagatgctcaactagaaagaggactaactccatctccacttgttctaagaagtgcagaagaaggactaatttcaattgtaaacaccaacaaagaaggagaaaaccaaaaagaccttaaagttgtatcaagagagcacttcataagaggaattctaaattctaagggaaatgacgctaagggtatcaaatcatccaaactaaaagtttggggtgacttgaaatgggatggactcatctataacccaagaggtagagaagaaaatgccccagaaagtaaggataaccaagatccagctactaagatacgaggacaatttgaaccgattgcggaaggtcaatatttctataaatttaaatatagattaactaaagattacccatggcaggtttcctatattcctgtaaaaattgataacacagcccctaagattgtttcggttgatttttcaaatcctgaaaaaattaagctaatcacaaaggatacttatcacaaggtaaaagatcaatacaagaatgaaactttatttgctagagatcaaaaagaacatcctgaaaaatttgatgagattgcaaatgaggtgtggtatgcaggagctgctcttgttaatgaagatggagaggttgagaaaaatcttgaagtaacttatgcaggtgagggtcaaggaagaaataggaagcttgataaagatgggaatactatctatgaaattagcggagcaggagatctaagaggaaaaatcatcgaagtaatcgccctagatggagcaagcaactttaccaaaatccataggattaaatttgctaatcaagctgatgaaaaagggatgatttcctattatctagtagatcctgatcaggattcatctaaataccaaaagcttggcgaaattcctgaatctaaatttaagaatttaaaaaatgttaaagatgatagcctaaacaaagagacagctgaggtggaaaataaccttttagtagataatcagtctatcgaaggaaaatctctctttaatattcataaaactatttcaacaattagagactttgaaaataaagacctaaagaaactcattaaaaagaaatataagcaagaagacgactttgtaaatggtggaacaagaacagtagagcgtgattataaatacgatgataaaggaaatataatagcctacgatgatgggactgatctagaatatgaaactgagaaacttgacgaaatcaaatcaaaaatttatggtgttctaagtccgtctaaagatggacactttgaaattcttggaaagataagtaatgtttctaaaaatgccaaggtatattatgggaataactataaatctatagaaatcaaagcgaccaagtatgatttccactcaaaaacgatgacatttgatctatacgctaatattaatgatattgtggatggattagcttttgcaggagatatgagattatttgttaaagataatgatcagaaaaaagctgaaattaaaattagaatgcctgaaaaaattaaggaaactaaatcagaatatccctatgtatcaagttatgggaatgtcatagaattaggggaaggagatctttcaaaaaacaaaccagacaatttaactaaaatggaatctggtaaaatctattctgattcagaaaaacaacaatatctgttaaaggataatatcattctaagaaaaggctatgcactaaaagtgactacctataatcctggaaaaacggatatgttagaaggaaatggagtctatagcaaggaagatatagcaaaaatacaaaaggccaatcctaatctaagagccctttcagaaacaacaatttatgctgatagtagaaatgttgaagatggaagaagtacccaagctgtattaatgtcggctttggacggctttaacattataaggtatcaagtgtttacatttaaaatgaacgataaaggggaagctatcgataaagacggaaatcttgtgacagattcttctaaacttgtattatttggtaaggatgataaagaatacactggagaggataagtccaatgtagaagctataaaagaagatggctccatgttatttattgataccaaaccagtaaacctttcaatggataagaactactttaatccatctaaatctaataaaatttatgtacgaaatccagaattttatttaagaggtaagatttctgataagggtggttttaactgggaattgagagttaatgaatcggttgtagataattatttaatctacggagatttacacattgataacactagagattttaatattaagctgaatgttaaagacggtgacatcatggactggggaatgaaagactataaagcaaacggatttccagataaggtaacagatatggatggaaatgtttatcttcaaactggctatagcaatttgaatgctaaagcagttggagtccactatcagtttttatatgataatgttaaacccgaagtaaacattgatcctaagggaaatactagtatcgaatatgctgatggaaaatctgtagtctttaacatcaatgataaaagaaataatggattcgatggtgagattcaagaacaacatatttatataaatggaaaagaatatacatcatttaatgatattaaacaaataatagacaagacactaaacattaagattgttgtaaaagattttgcaagaaatacaaccgtaaaagaattcattttaaataaagatacgggagaggtaagtgaattaaaacctcatagggtaactgtgaccattcaaaatggaaaagaaatgagttcaacgatagtgtcggaagaagattttattttacctgtttataagggtgaattagaaaaaggataccaatttgatggttgggaaatttctggtttcgaaggtaaaaaagacgctggctatgttattaatctatcaaaagatacctttataaaacctgtattcaagaaaatagaggagaaaaaggaggaagaaaataaacctacttttgatgtatcgaaaaagaaagataacccacaagtaaaccatagtcaattaaatgaaagtcacagaaaagaggatttacaaagagaagatcattcacaaaaatctgattcaactaaggatgttacagctacagttcttgataaaaacaatatcagtagtaaatcaactactaacaatcctaataagttgccaaaaactggaacagcaagcggagcccagacactattagctgccggaataatgtttatagtaggaatttttcttggattgaagaaaaaaaatcaagattag

SEQ ID NO: 2614 - DNA, 204 bp, Streptococcus pneumoniae
tggtatgaatgtgcttataatgtatcccggttaacgaaagttttggacttatactcttcgaaaatctcttcaaaccacgtcaacgtcgccttgccgtgcgtatggttactgactacgtcagttctatccacaacctcaaaacagtgttttgagcaatctgcggctagtttcctagtttgctctttgattttcattgagtactaa

SEQ ID NO: 2615 - DNA, 198 bp, Streptococcus pneumoniae
ttgcttgctactttagagagtgaagctcgtaaaaaagttggttatctgcaggtcaaaacagtggcagaaggttctaataaagattatgatcgaacaaatgacttttatcgaggtcttggctttaaaaagttagagatttttcttcaactatggaatccgcaaaatccttgtcagattttgattaaaaagcttgaataa

SEQ ID NO: 2616 - DNA, 786 bp, Streptococcus pneumoniae
atgaaaaaatatcaacgaatgcatctgatttttatcagacaatacatcaaacaaatcatggaatataaggtggattttgtggttggtgtcttgggagtctttctggctcaaggcttgaatctcttgtttctcaatgtcatctttcaacatattccattcctagaaggctggacctttcaagagatagctttcatttatggattttccttgattcccaagggaatggaccatctcttttttgacaatctctgggcactagggcaacgcctagtccgaaaaggagagtttgacaagtatctgactcgtcccatcaatcctctctttcacatcctagttgaaacctttcagattgatgccttgggtgaactcttagtcggtggtattttattgggaacaacagtgaccagcattgtttggactcttccaaaattcctgcttttcctagtttgtattccttttgcgaccttgatttatacttctcttaaaatcgcaacagccagtatcgccttttggactaagcagtcaggcgccatgatttacatcttctatatgttcaatgactttgctaagtatccgatttctatttacaattctcttcttcgttggttgattagctttatcgtgcctttcgcctttacagcctattatccagctagctatttcttacaggaaaaggatgtgttctttaacgtaggaggtttgatgttgatttctctggttttctttgttatttcccttaaactttgggataagggcttagattcctacgaaagtgcgggttcgtaa

SEQ ID NO: 2617 - DNA, 861 bp, Streptococcus pneumoniae
ttgaggatattatccgtcgcttctaccgaaaggagctctaggatgatcaaattgtggagacgttataaaccctttatcaatgcaggggttcaggagttgattacttaccgagtcaactttattctctatcggattggcgatgtcatgggggcttttgtggccttttatctctggaaggctgtctttgattcttcgcaagagtctttgattcagggcttcagtatggcggatatcaccctctacatcatcatgagttttgtgaccaatcttctgactagatccgattcgtcctttatgattggggaggaggtcaaggatggctccattatcatgcgtttgttgcgaccagtgcattttgcggcctcctatcttttcaccgagcttggttccaagtggttgatttttatcagcgttggccttccatttttaagtgtcattgtcttgatgaaaatcatatcgggtcaaggtattgtagaggtgctaggattaactgtcctttatctttttagcttaacgctcgcctatctgattaactttttctttaatatttgctttggattttcagcctttgtgtttaaaaatctttggggttccaacctacttaagacttccatagtggcttttatgtcggggagtttgattcccttggcattctttccaaaggttgtttcagatattctttcctttttgcctttttcatccttgatttatactccagttatgatcattgttggaaaatacgatgccagtcagattcttcaggcactccttttgcagttcttctggctcttagtgatggtgggattgtctcagttgatttggaaacgggtccagtcctttatcaccattcaaggaggttag

SEQ ID NO: 2618 - DNA, 954 bp, Streptococcus pneumoniae
gtgaagattgttaaggaaccgggcttgaagggggctttgcgctcctttattcatcctgaaaagcagacctttgaagcggtcaaggatttgacctttgaggttccaaaagggcagattttaggatttatcggggcaaatggtgctgggaagtcgacaaccattaaaatgctgacaggaattttgaaaccaacatctggtttttgtcggattaacggcaagattccccaggacaatcggcaagattatgtcaaagatattggcgtagtctttggacaacgcacccagctatggtgggatttggctctgcaagagacctacactgtcttaaaagagatttatgatgtgccaaactcgctctttcataagcgcatggactttttgaatgaagtcttggatttgaaggactttatcaaggatcccgtgcggactctttcactgggacaacggatgcgggcggatattgcggcctccttgctccacaatcccaaggttctttttttagatgagccgaccattggtttggacgtttcggttaaggataatattcgtcgggcaattactcagatcaatcaagaggaagaaactaccattcttttgaccactcacgatttgagtgatattgagcaactttgtgatcggattttcatgattgacaaggggcaagagatttttgatggaacggtgagccaactcaaggagacctttggtaagatgaagactctctcttttgaactgctaccaggtcaaagtcatctcgtctctcactatgaaggtctgtctgatatgaccattgatagacaaggaaacagcctcaacattgaatttgatagttctcgctaccagtcagctgacattatcaagcaaaccctgtctgattttgaaatccgcgatttgaagatggtggatacggatattgaggatattatccgtcgcttctaccgaaaggagctctag

SEQ ID NO: 2619 - DNA, 249 bp, Streptococcus pneumoniae
attaccaacctactcatcttctcaccagagggcggtattaactttgatcataaaatcggatactccctctatccagaaaatatgctcagaatgattgtctctaaacaatacctgctcttttacctcattcatgaaaaagaagtccataccctgagaattatcaactcacgcaccgactacctaaaccaactcgaccacctctttcgtacatgtaggaaactattttcctcacaaataatctcattataa

SEQ ID NO: 2620 - DNA, 396 bp, Streptococcus pneumoniae
tacgaaacaattgctaaaacatttatagaaattaattttactttcccaatcgatttgttctcatcttatttcaatccgctatatattatggtatcgaatcttcatcagaatgataaaattaatcaattaatatctgattacaaacagaatatgaaagctttttatatcactattgaaaaatttatacgagatgatgaaagccttaagtgttattttacaaaggttatttcaagtcgttccaaggtaacaagtctagatcagattgaagctgataaaacgatacaaagaaaatattcaagtgagctaaaaaaatttattggattttataatgagattatttgtgaggaaaatagtttcctacatgtacgaaagaggtggtcgagttggtttaggtag

SEQ ID NO: 2621 - DNA, 474 bp, Streptococcus pneumoniae
gtgcgtatggttcatactacgtcagatctatccacaacctcaaaacagtgttttgagcaacctgaggctagtttcctagtctgctctttggttttcattgagtataacacattgttagaagttggtttaaattccctaatcagtttgttcacatttaccttcgatatattatatcccatagttaaggttggtcatacagatgattatagtcatggagccgtaaaacttagtgtttctttagttgacaaagatgtcatgaaaaaaatatctgtaactgtaataggatattttgaaataaatatagatgaaaatatcaccgatattctatacgtaaatggtactgctattctttatccttatttacgttctattgtttcaatagtttcggcaattgatagcagtgaagcaatgttgctacctaccattaatgttttagagttactagataaatctcaaccttttgaagaagaataa

SEQ ID NO: 2622 - DNA, 690 bp, Streptococcus pneumoniae
atggctaaaaaaagcaaacaacttcgtgctgctcttgagaaaatcgacagcacaaaagcatacagcgtagaagaagctgtagcacttgcaaaagaaactaactttgcaaaatttgatgcaactgtagaagttgcttacaacttgaacatcgatgttaaaaaagctgaccaacaaatccgtggagcaatggtattgccaaacggtactggtaaaacttcacgcgttcttgttttcgcacgtggtgcaaaagctgaagaagcaaaagctgctggtgcagactttgttggtgaagatgaccttgttgctaaaatcaacgacggttggttggacttcgacgtagttatcgctacacctgatatgatggctcttgttggacgtcttggacgtgtccttggaccacgtaacttgatgccaaaccctaaaactggtactgtaacaatggatgttgctaaagcagttgaagagtctaaaggtggtaaaatcacttaccgtgctgaccgtgcaggtaacgttcaagcaatcatcggtaaagtatcatttgaagctgaaaaattggttgaaaacttcaaagctttcaacgaaacaatccaaaaagcaaaaccagctacagctaaaggaacttacgtaacaaacttgactatcacaactactcaaggtgttggtatcaaagttgacgtaaactcactttaa

SEQ ID NO: 2623 - DNA, 426 bp, Streptococcus pneumoniae
atggctaaaaaagtcgaaaaacttgtaaaattgcaaatccctgctggtaaagctacaccagctccaccggttggacctgctcttggtcaagctggtatcaacatcatgggattcacaaaagagttcaacgctcgtacagctgaccaagctggtatgatcattccagttgttatctcagtttacgaagataaatcatttactttcatcactaaaacaccaccagctgctgttcttttgaaaaaagctgcaggtgttgaaaaaggatcaggtacacctaacaaaactaaagttgctacagttactcgtgcgcaagtacaagaaattgcagaaactaagatgccagatttgaacgcagcaaacgtagagtctgcaatgcgtatgatcgaaggtactgctcgttctatgggattcactgttgttgactaa

SEQ ID NO: 2624 - DNA, 225 bp, Streptococcus pneumoniae
aattgcaagagaaaagtttattttttatactcaatgaaaatcaatgagcaaactaggaagctagccgcaggctactcaaagtatagctttgaggttgcaaataaaactgacgaagtcagctcaaaacactgttttgagattgtggatagaactgacgaagtcagtaaccatacgcacggtaaggcgacgttgacgtggtttgaagagattttcgaagagtattaa

SEQ ID NO: 2625 - DNA, 717 bp, Streptococcus pneumoniae
atgaaaaaaagataccttgtcttgacagctttgctagccttgagtctagcagcttgttcacaagaaaaagcaaaaaatgaagacggagaagctaagacagaacagacagccaaagctgatggaacagtcggaagtaagtctcaaggagctgcccagaagaaagcagaagtggtcaataaaggtgattactacagcattcaaggcaaatacgatgaaatcatcgtagccaacaaacactatccattgtctaaagactataatccaggggaaaatccaacagctaaggcagagttggtcaaactcatcaaagcgatgcaagaggcaggtttccccattagcgaccattacagtggctttagaagttatgaaactcagaccaagctctatcaagattatgtcaaccaagatgggaaggcagcagctgaccgctactctgctcgacctggttatagcgaacaccagacaggcttggcctttgatgtgattgggactgatggtgatttggtgacagaagaaaaagcagcccaatggcttttggaccatgcagctgattatggctttgttgtccgttatctcaaaggcaaggaaaaggaaacaggctatatggctgaagaatggcacttgcgttatgtaggaaaagaagctaaagaaattgctgagagtggtctcagtttggaagaatactatggctttgaaggcggagattacgtcgattaa

SEQ ID NO: 2626 - DNA, 180 bp, Streptococcus pneumoniae
caaagctgtcaagacaaggtatctttttttcatttctactcctttatttctaatagtttatctacttctgacgataaacattcgactaatcttttaatctcttccggttttacttggcaagtttctgctgtcatttcttcaaagggaacccaccaaactggcccacgtcccttgagaccg

SEQ ID NO: 2627 - DNA, 510 bp, Streptococcus pneumoniae
ttgttgatgcttatcttaagagcgaggcggtatcatagaatgtgcttaatctgtcagagaatcgaactcattaaagctgggcaaaatccctactttgtcaaagagttggaaacaggctatcttgtgattggagaccaccagtattttgcaggatatagtctttttctagctaaggaacacgttaccgaattgcaccatttgaaaaaggaaacaagactccgttttctcgaagaaatgagtctagtccaagaggcagttgccaaggcatttgctgctgagaaaatgaatatcgaactgctaggaaatggcgatgcccatcttcattggcatctgtttcctagacgaagaggtgatatgaatggtcacggtctcaagggacgtgggccagtttggtgggttccctttgaagaaatgacagcagaaacttgccaagtaaaaccggaagagattaaaagattagtcgaatgtttatcgtcagaagtagataaactattagaaataaaggagtag

SEQ ID NO: 2628 - DNA, 216 bp, Streptococcus pneumoniae
ttggcgaaagagcaagatattccatttaagctcgacatctatccattttacggatcggacgcttcagcagcgatgtcagcaggtgcagaggtcaagcatgcacttcttggagctggtattgagtccagtcactcttatgagcggacccacatcgattcagtagtagcgactgagcgtattgttgatgcttatcttaagagcgaggcggtatcatag

SEQ ID NO: 2629 - DNA, 528 bp, Streptococcus pneumoniae
atgaatcaaacagtagaatatatcaaagaactgacagccatcgcatcgccaacgggctttactcgtgaaatttcgaattatttagtcaagactctagaaggttttggttaccagccagttcgcacagctaagggtggtgtcaatgtgaccatcaaaggtcaaaatgatgagcaacatcgctatgtgactgctcatgtggatacgctgggtgctattgttcgtgctgtcaaaccagatggtcgtcttaaattggaccgtatcggtggttttccttggaacatgattgaaggtgaaaactgtaccgttcatgtggctagcacaggtcaaaaggtatcaggaaccatcctcatccaccaaacttcttgccatgtctacaaggatgcaggaactgcagagcgcacgcaggacaatatggaagtgcgtttggatgtaaaagtaagcaatgaaaaagaaactcgtgctcttgggattgaggtcggtgattttatcagcttcgatccacgaactgttgtgactgatacaggtttt

SEQ ID NO: 2630 - DNA, 342 bp, Streptococcus pneumoniae
ttggatattgccaatttgggtcttgatgcgattatcaagtactcaattccagtattggttatcttgtacccaatcacgattgctatcgttatgattgtcattgtcaacaaatttgttgccctttcaaaaccaggtatgcagttgccaattgctgtggtaacagttattgccattgcaagcgtacaaggaagctcgtttaaggttgagtttcttgcaaatcttgttagcgttcttccttttgccaaggcatctctcccatggttggtgccagccattgttggaatcttgctctcattggttctaccaaacaagcaagaaagcgatgtttttgaaatggaataa

SEQ ID NO: 2631 - DNA, 945 bp, Streptococcus pneumoniae
atgaaggaaatttttatggctaaaaaaggtaccctaacaggtttgctcctgtttggaatattttttggtgcggggaacttgatttttccgccttctctaggtgctctatctggagaacattttcttcctgccatcgcaggttttgtcttttcaggcgttggtatcgccgtcttgacccttattattggaacgctaaatcctaaaggatatatctacgagatttcaacgaagatagcgccttggtttgcgactctttacctctcagttctttacttgtcaatcggtccattctttgctaccccacgtactgctacaacagcttacgaagtagggattagcccccttttgtcggatgcaaataaaggacttggcttgattgtatttacggttctgtattttgcggcagcctatttgatttcgcttaatccatcaaaaatcttagaccgcattggacgtattttaacgccagtctttgcaattttgattgttatcttggtcgttctgggagctatcaaatatggtggaacaagtcctcaaactgcttcagctgcttatcaagcttctgcctttggtacaggtttcctagaaggttacaataccttggacgcccttgcctcagtggcctttagcgtaatcgcagttcaaaccttgaaacaacttggattttcaagtaagaaaaaatacatttcaactatttgggttgttggtatcgttgttgcccttgccttcagcgctctttacatcggtttaggttttcttggaaatcatttcccagtaccagctgaagcgatgaagggtggaacaccaggtgtttacatcttgtcacaagccactcaagaaatctttggctcaacagctcaactcttccttgcagctatggttaccgtaacctgcttcacaaagaatgttggtttaattgtgtcaacaagttgagttcttaatgaa

SEQ ID NO: 2632 - DNA, 189 bp, Streptococcus pneumoniae
ttgaagagattttcgaagagtattagaagaaaaagaatgaaagaaatagcctttgacgcattttaccagctttaccaaaacgaccagctttctttagtggatgtgagagaagtggatgagtttgcagctcttcatttagaaggtgcccacaacctaccgcttagtcaattggctgatagttatgattaa

SEQ ID NO: 2633 - DNA, 240 bp, Streptococcus pneumoniae
ctttttcttctaatactcttcgaaaatctcttcaaaccacgtcagcgtcgccttaccgtgcgtatgttaccgacttcgtcagttttatctgcaacttcaaagctgtactttgagcagcctacgactagcttcctagtttgctctttgattttcattgactataaaatggttttaattctttttttcaaatctggcactacttctgcctcaaaccaaggatttttggccatccagatttga

SEQ ID NO: 2634 - DNA, 579 bp, Streptococcus pneumoniae
atgtctcaaatcgaaagaatcaaacaggctatcatggcggattcgcagaatgccagctatacagagcgtggcattgagcctctctttgcagcgccaaaaactgctcgcatcaatatcatcggtcaggctccgggacttaaaactcaagaagcaggcctttactggaaagataaaagtggtgaccgcttgcgggactggctaggtgtggatgaagataccttttacaattcaggttattttgctgttttgcctatggatttctactttccaggacatggcaagtcgggtgatcttccgcctcgtacaggttttgcagaaaaatggcatccgcaggtcttacaggaattgcctgatattcagttaaccctcttgattgggcaatatgcccaagcctactatttacaggagaaaatcagtgggaaggtaacggagagggtgaaacactataaagactatctgccagcctattttccgctagttcacccatcaccacgaaatcaaatctggatggccaaaaatccttggtttgaggcagaagtagtgccagatttgaaaaaaagaattaaaaccattttatag

SEQ ID NO: 2635 - DNA, 1401 bp, Streptococcus pneumoniae
atgacagcaattgattttacagcagaagtagaaaaacgcaaagaagacctcttggctgacttgtttagccttttggaaatcaattcagaacgtgatgacagcaaggctgatgcccagcatccatttgggcctggtccagtaaaagccttggagaaattccttgaaatcgcagaccgcgatggctacccaactaagaatgttgataactatgcaggacattttgagtttggtgatggagaagaagttctcggaatctttgcccatatggatgtggtgcctgctggtagcggttgggacacagacccttacacaccaactatcaaagatggtcgcctttatgcgcgcggggcttcggacgataagggtcctacaacagcttgttactatggtttgaaaatcatcaaagaattgggtcttccaacttctaagaaagttcgcttcatcgttggaacagacgaagaatcaggctgggcagacatggactactactttgagcacgtaggacttgccaaaccagatttcggtttctcaccagatgctgaatttccaatcatcaatggtgaaaaaggaaatatcacggaatacctccactttgcaggagaaaatacaggtgttgcccgtcttcacagctttacaggtggtttacgtgaaaatatggtaccagaatcagcaacagcagtcgtttcaggtgacttggctgacttgcaagctaaactagatgcctttgttgcagaacacaaacttagaggagaactccaagaagaagctggcaaatacaaggtgacgatcattggtaaatcagcccacggtgctatgcctgcttcaggtgtcaatggcgcaacttaccttgccctcttcctcagccagtttggctttgctggtccagccaaagactaccttgacatcgcaggtaaaattctcttgaacgatcatgagggtgaaaatcttaagattgctcatgtggatgaaaagatgggtgctctttctatgaatgccggcgtcttccacttcgatgaaacaagtgctgataataccattgccctcaacatccgctatccaaaaggaacaagtccagaacaaatcaagtcaatccttgaaaacttgccagttgtttctgttagcctgtctgaacacggtcacacgcctcactatgtgccaatggaagatccacttgtgcaaaccttgttgaatatctatgaaaaacaaactggctttaaaggtcatgaacaagtcatcggtggtggaacctttggtcgcttgctagaacgcggagttgcctacggtgctatgttcccagactcgattgataccatgcaccaagccaatgaatttatcgccttggatgatcttttccgagcagcagcaatttatgccgaagctatttacgaattgatcaaataa

SEQ ID NO: 2636 - DNA, 606 bp, Streptococcus pneumoniae
atgaaatttcttgaattaaataaaaaacgtcatgcgactaagcattttactgataagcctgttgatcccaaagatgtgcgtacggctatcgaaattgcaaccttggcgccaagcgcccacaacagccagccttggaaatttgtggtggtacgtgagaaaaatgctgaactggcaaagttagcttatggttccaattttgaacaggtatcatcagcgcctgtaaccattgccttgtttacagatacggacttagccaaacgtgctcgtaagattgcccgtgttggtggtgctaataacttttctgaagagcaacttcaatattttatgaaaaatctgccagctgagtttgcccgttacagtgagcaacaagtcagcgactacctagctctcaatgcaggtttggttgccatgaacttggttcttgcattgacagaccaaggaattggttctaacattattcttggttttgacaaatcaaaagttaatgaagttttggaaatcaaagaccgtttccgcccagaactcttgatcacagtgggttatacagacgaaaaattggaaccaagctaccgcttgccagtagatgaaatcatcgagaaaagatag

SEQ ID NO: 2637 - DNA, 240 bp, Streptococcus pneumoniae
ttctcacaggcaaccaaaaatggtaggatagctagtaataggctaaattttttcatactgtctccattcaaatgtaaagtacttgctagtttatcagaaactttcctgataaaccaatatatatcttttatgtctgtgatagaaaaacttaatcatgaaaaatccctgcaagctctttcaaattatggtagaatggaagcagtagaattagaaaaggaaatcgattatgaaatttcttga

SEQ ID NO: 2638 - DNA, 801 bp, Streptococcus pneumoniae
atgaaaaaatttagcctattactagctatcctaccatttttggttgcctgtgagaatcaagctacacccaaagagactagcgctcaaaagacaatcgtccttgctacagctggcgacgtgccaccatttgactacgaagacaagggcaatctgacaggctttgatatcgaagttttaaaggcagtagatgaaaaactcagcgactacgagattcaattccaaagaaccgcctgggagagcatcttcccaggacttgattctggtcactatcaggctgcggcagataacttgagttacacaaaagagcgtgctgaaaaatacctttactcgcttccaatttccaacaatcccctcgtccttgtcagcaacaagaaaaatcctttgacttctcttgaccagatcgctggtaaaacaacacaagaggataccggaacttctaacgctcaattcatcaataactggaatcagaaacacactgataatcccgctacaattaatttttctggtgaggatattggtaaacgaatcctagaccttgctaacggagagtttgatttcctagtttttgacaaggtatccgttcaaaagattatcaaggaccgtggtttagacctctcagtcgttgatttaccttctgcagatagccccagcaattatatcattttctcaagcgaccaaaaagagtttaaagagcaatttgataaagcgctcaaagaactctatcaagacggaacccttgaaaaactcagcaatacctatctaggtggttcttacctcccagatcaatctcagttacaataa

SEQ ID NO: 2639 - DNA, 834 bp, Streptococcus pneumoniae
atgaaccataaaatcgcaattttatcagatgttcatggcaatgcgacggcgctagaagcagtgattgcagatgctaaaaatcaaggggccagtgaatattggcttctgggagatatttttcttcctggtccaggcgcaaatgacttagtcgccctgctaaaggaccttcctatcacagcaagtgttcgaggcaattgggatgatcgtgtccttgaggtcttggatggcgaatatggtttggaatatccgaaagaaatccagtcaatgcgcatgacccagtttttgatggagcgaatggatcctgcaacgattgtctggctacgaagcttgcctttgctggaaaagaaagaaattgacggattgcgcttttctatctctcataatttacctgacaaaaactatggtggtgacttgctagttgagaatgatacagagaaatttgaccaactgctagatgcggaaacggacgtggcagtttatggtcatgttcacaagcagttgcttcgttatggaagtcaagggcaacaaatcatcaatccagggtcgattggcatgccctattttaattgggaggcgttaaaaaatcaccgtgcccagtatgccgtgatagaggttgaagatggggaattggtaaatatcctatttcgtaaagtcgcttatgattacgaggctgagttagaatttgccaaatccaagaggcttccctttatcgaaatgtatgaagaactgcgtcgtgaagataactatcagaggcacaatctggaactattagcaagcttaatagaaaagcataggtatgtagaggatgtgaagaatttttttgattttttgtaa

SEQ ID NO: 2640 - DNA, 1845 bp, Streptococcus pneumoniae
atgaacaacttgattaaatcaaaactagagctcttgccgaccagccctggttgctacattcataaggataaaaatggcaccattatctatgtaggaaaggctaaaaatctgcgtaatcgagtacggtcctattttcgtggaagtcataataccaagacagaggctctggtgtctgaaattgtggattttgaatttattgttacggagtctaatattgaggcacttctcctagaaattaacctgatcaaggaaaacaagcccaagtacaatatcatgctcaaggatgacaagtcctatcctttcatcaaaatcaccaatgagcgctatccacgcttgattatcactcgtcaggtcaaaaaggacggaggtctttattttggaccctatcccgatgtgggggcagccaatgaaatcaagcggttgctggatcggatattcccttttcgtaagtgtaccaacccgccctctaaggtctgtttttattaccatatcggtcaatgcatggcccacaccatctgtaagaaggatgaggcttatttcaagtctatggctcaggaggtgtctgattttctgaaaggtcaggatgacaaaatcatcgatgatctcaagagtaaaatggcagtagcagcacaaagtatggagtttgaacgtgcggcggaataccgtgacctgattcaggctattggaacgcttcgaaccaagcaacgggtcatggcgaaagatttgcaaaatcgcgatgtctttggctactatgtggataagggctggatgtgtgtgcaggttttctttgtccgtcagggtaagcttatcgagcgcgatgtcaatctcttcccctacttcaatgatccagatgaggattttttgacctatgtaggacaattctatcaagaaaaatctcatctagttcccaatgaggtactgattccgcaggatattgacgaagaggctgtcaaggccttggtggattccaagattcttaagcctcaacgtggagagaaaaaacaactggtcaatctagccataaaaaatgctcgtgttagtctagagcagaagttcaatctgctagaaaaatctgtcgaaaagactcaaggagctattgaaaatctagggcgtttgctccaaatcccgaccccagtacgtatcgagtccttcgataactctaatatcatgggaactagccctgtttcggctatggtggtctttgtcaacggtaaaccgagtaagaaggattaccgtaagtacaagataaaaacggttgttggaccagacgactatgccagcatgagagaggtcattcgcagacgctatggtcgagtacagcgtgaggctttgactcctccagatttgattgtgattgatggggggcaaggtcaagtcaatatcgctaagcaggttatccaagaggaactgggcttggatattccaattgctgggctgcaaaagaatgataagcaccaaacccatgaattgctctttggagatccgcttgaggtggtggacttgtctcgcaattctcaggaatttttcctcctccaacgcatccaagatgaggtgcaccgctttgctatcactttccaccgccaactgcgctccaaaaattctttctcatctcaattggatgggattgacggtctgggacctaaacgcaagcagaatcttatgaagcatttcaagtctttgaccaaaatcaaggaagccagtgtggatgagattgtcgaagttggggtacctagagtcgttgcagaggctgtgcaaagaaagttgaacccgcagggagaagccttgcctcaagtagcagaagaaagagtagattaccaaacggaaggaaaccacaatgaaccataa

SEQ ID NO: 2641 - DNA, 723 bp, Streptococcus pneumoniae
ttgctagaaaggtggagagacatgcgctggctttttcgtttgataggggctttcttttcttttgtgtggcgtttgttttggcgtctggtttggatagttgtgctcttatgtgtgcttgctttcggacttctctggtatctgaacggggattttcaaggagcgctaaagcaagcagaacggtcagtaaaaattggtcaacaaagtattgaccaatgggagaaaacagggcaactgcctaagttaagccagacagatagtcaccagcattctgaaggaaggtggccacaggcctctgctcgtatttacctggatccgcagatggattcacgctttcaagaggcttatttagaagcaatccagaactggaatcaaactggtgcttttaactttgaactcgtgactgagtctagtaaggcggatattaccgctacggagatgaacgacggaggcactcctgtggcaggagaggcggaaagtcaaactaatctcttaacagggcaattcttgtccgtaacggtgcggttgaatcattattatttgtccaatccatactatggctactcctatgaacgccttgtccatacggcagaacatgagttaggtcatgcgattggcttggaccatacagatgagaagtctgtcatgcaaccagcaggttccttttatggtatccaggaagaggatgttgcaaacctccgaaaaatatatgagactagtgagtag

SEQ ID NO: 2642 - DNA, 1233 bp, Streptococcus pneumoniae
atggcactaacaacactcacgaaagaagagtttcagacttattctgatcaggtttcttctcgttcctttatgcaatctgtccagatgggggatttgctagaaaaaagaggggctcgaattgtttatcttgctttgaaacaagaaggagaaattcaagttgcagctctggtttatagcttgcccatgctgggtggtctgcatatggaactcaattcggggccgatttatacccaacaagatgctcttccagttttttatgcagagttaaaagaatatgccaagcaaaatggtgtattagagttgcttgtaaaaccttatgaaacttatcaaacttttgatagccaaggtaatccaatagatgctgagaaaaaaagtattattcaaggtttgactgatttaggttatcaatttgatggcttaacaacaggttacccaggtggagaaccagattggttatactataaagatttaactgaattaactgaaaagagtttgcttaaaagttttagcaaaaagggtaaacccttggtgaaaaaggctgaaacctttggcattcggttgaaaaagttaaaacgtgaagaactatcgatttttaagaatataacaaaagaaacctctgaacgtagagaatatagtgataaaagtttagaatattatgagcatttttatgatacttttggagaacaagcggagtttctcatagcaagcttgaatttttcggagtatatgagcaaattgcaaggtgaacaaagtaaactagaagaaaaattggacaagttgcgacttgatttgagtaaaaatcctcattctgagaaaaaacaaaatcaactgagagaatattctagtcaatttgaaacgtttgaagttcgaaaagcagaagcgcgagacttgattgaaaaatatggagaagaagatattgttttagctgggagtttatttgtttatatgcctcaggaaacgacttatctctttagtggttcctacactgagtttaataagttctatgcccctgcactgcttcaaaaatatgttatgttggaaagcataaaacgtggaatacctaaatacaacttcctaggcattcaagggatttttgatggaagtgatggtgttttgcgttttaaacagaattttaatggctatattgtacgcaaagcaggtactttccgttaccatccatcgcctttaaaatacaaagctatccagttactcaaaaaaatagtaggacgttaa

SEQ ID NO: 2643 - DNA, 1221 bp, Streptococcus pneumoniae
atgtaccgttatcaaattggcattcccacattagaatatgatcagtttgtcaaagaacatgaattagccaatgtattacaaagtagtgcttgggaggaagttaagtctaattggcaacatgagaagtttggtgtttacagggaagaaaaattactggcgacagctagtattttgattagaactcttccgctaggctataaaatgttttacatcccaagaggacctatattggattatggggataaagaactcttgaattttgccattcagtctattaagtcctatgctcgcagtaagagagcggtttttgtgacttttgacccaagtatttgcctatctcaaagtttaatcaatcaggaaaagacagaatttcctgaaaatctggctattattgatagtttgcaacaaatgggagtaaggtggtcaggaaaaacggaggaaatgggagacaccattcaacctcgtattcaggcgaaaatatacaaggaaaattttgaagaagataaactttccaagtcaacaaaacaggctattcgaacagcacgaaacaaagggcttgagattcaatatggtggactggaactattagattcattttcggagttgatgaaaaaaactgagaagcgaaaagagattcatttgaggaatgaagcctattataaaaaattgttagataattttaaggacaaggcctatatcaccttggccaccttggatgtttctaaacgttcgcaagaattagaagaacagttagcgaaaaatagagccttggaagagacctttactgagtcgactcgaacttcaaaagtagaagcgcagaagaaggaaaaagaacgtttgttagaggaattgaccttcttgcaggaatatatagatgtaggtcaagcgagagttcctttagcggctactttgagtttggaatttggtactacctctgtcaatatatatgctggtatggatgatgattttaaacgttacaatgcaccaattttaacatggtatgaaacggctcgctatgcctttgagcgaggtatggtctggcaaaatttaggtggtgttgaaaactctctcaatggtggactttatcattttaaggaaaaatttaatccaacgattgaagaatacttgggtgaatttacaatgcccactcatcctctctatcctctgttaagacttgctcttgatttccgtaaaacattaagaaaaaaacatagaaagtaa

SEQ ID NO: 2644 - DNA, 780 bp, Streptococcus pneumoniae
atgccagtaatgaaaatcgagtattactcacaagtattggatatggagtgggggatgaatgtcctctaccctgatgccaatcgagtgagagaaccagagtgtgaagatattcccgtcttgtaccttttgcacgggatgtctggaaatcataatagttggcttaagcggaccaatgtagaacgcttgcttcgaggaactaatctcatcgttgttatgcccaataccagcaatggttggtacaccgatacccagtatggttttgactactacacggctctagcagaggaattgccacaggttctgaaacgcttcttccctaatatgactagcaagcgtgaaaagacctttatagctggtctttctatgggaggctacggctgtttcaaactggctcttgcgacaaatcgtttttctcatgcagctagtttttcaggtgccctcagctttcaaaacttttctcctgaaagtcaaaatctgggaagtccagcctactggagaggtgtttttggagagattagagactggacaactagtccctattctcttgaaagtctggctaaaaaatcggataaaaagaccaaactttgggcgtggtgtggcgaacaggatttcttgtacgaagccaataatctcgcagtgaaaaatctcaaaaaactaggttttgatgtgacctatagccatagcgctggaactcacgagtggtactactgggaaaaacaattggaagtttttttaacaactctaccaattgatttcaaattagaagagagactgacttag

SEQ ID NO: 2645 - DNA, 1662 bp, Streptococcus pneumoniae
atgagtaatatcagtttaacaacacttggtggtgtgcgtgagaatggaaaaaatatgtacattgctgaaattggagagtccatttttgttttgaatgtagggttaaaatatcctgaaaatgaacaattaggggtcgatgtggtgattccaaacatggattacctttttgaaaatagcgaccgtattgctggggttttcttgacccacgggcatgcggatgcgattggtgctctaccttatctcttggcagaggctaaagttcctgtatttgggtctgagttgaccattgagttggcaaagctctttgtcaaaggaaatgatgccgttaagaaatttaatgatttccatgtcattgatgagaatacggagattgattttggtgggacagtggtttccttcttccctacgacttactccgttccagagagtctgggaattgtcttgaagacatcggaaggaagcatcgtttatacaggtgacttcaaatttgaccaaacggctagtgaatcttatgcaactgattttgctcgtttggcagagattggtcgtgacggcgtcctggctctcctcagtgattcggccaatgcagacagcaatattcaggtggctagtgaaagtgaagttagggatgaaattacccaaactattgctgactgggaaggtcgtatcatcgttgcagctgtttccagtaatctttctcgtattcagcagatttttgacgctgcggataaaacaggtcgacgtatcgtcttgacaggatttgatattgaaaatatcgtccgcacagcgattcgtcttaagaagttgtctttagccaacgaaattctcttgattaagcctaaagatatgtctcgctttgaagaccatgagttgattattcttgagacaggtcgtatgggtgaacctatcaatggacttcgtaagatgtcgattggtcgccatcgttatgtagaaatcaaggatggggacctggtctatattgctacggctccgtctattgctaaagaagcctttgttgcgcgtgtagaaaatatgatttatcaggcaggtggggttgtcaaattgattacccaaagtttacatgtatcagggcacggaaatgtgcgtgatttgcagctgatgatcaatcttttgcaacctaagtacctcttccctgtccaaggggagtatcgtgagttggatgctcacgctaaggctgccatggcagttgggatgttgccagaacgcatcttcattcctaaaaaggggacgaccatggcttacgagaatggagactttgttccagctggatcggtttcagcaggagatatcttaattgatgggaatgccattggtgatgttggaaatgttgttcttcgtgaccgtaaggtcttgtcagaggatggaattttcatcgtggctattacagtcaaccgtcgtgagaagaaaattgtggctagagctcgtgttcacacgcgtggatttgtttatctcaagaagagtcgcgatattctccgtgaaagttcagaattgattaaccaaacggtagaagattatcttcaaggagatgactttgactgggcagatcttaaagggaaggttcgagataatttgaccaagtatctctttgaccaaaccaagcgtcgtccagctattttaccagtagtcatggaagcaaaataa

SEQ ID NO: 2646 - DNA, 1941 bp, Streptococcus pneumoniae
atgacttcggcttctattgtgaaggaaagtttggaacaacttggtgctgagtgccgagtttacctgccaaatcgttttaccgatggctatggccctaatgctagtgtttataaatactttatcgagcaagatagaatttccttgattgtgacggtggacaatggggttgctggtcatgaggctattgcattggctcagtctatgggagtagatgtcattgtgacagaccatcattccatgcctgaaaccctgccagatgcttatgctattgtccatcctgaacatccagatgcggattatccttttaaatatttggctggttgtggagttgctttcaagttggcttgtgccctgttagaagaagtgcaagtggaattgcttgatttggtcgctattggaactattgcagatatggtgagtctgacggatgaaaatcgtatcttagttcaatatggtctggaaatgttgggtcatacccagcgcattggtctgcaagaaatgctggacatggctgggattgctgccaacgaagtaacagaagaaacggttggtttccagattgctcctcgtttgaatgccttgggccgcttggatgatcccaatcctgccattgatttgttgactggatttgatgatgaggaagcgcatgagattgcccttatgattcaccagaaaaacgaagagcgcaaggaaatcgttcagtctatctatgaagaagccaagaccatggtggatcctgagaagaaggttcaggtcttggccaaggaaggctggaatcctggggttctaggaatcgtggctggtcgtttattggaagaattgggacagacagtcattgttcttaatataaaagacggtcgtgccaagggcagtgctcgtattgtggaaccggtcgatatttttgaagctctggatccccatcgagacctcttcatcgcctttggaggtcatgcaggtgcagcgggtatgacgctggaagttgagcaactctcagatttatctcaggttttggaagattatgttcgtgaaaaaggtgcagatgctggtggcaagaataagttaaacctagatgaagagttggatttggaggcacttagcttggaaacggtcaaaagttttgaacgtttagctccttttggaatggataatcagaaacctattttttatatcaagaattttcaggtcgaaagtgctcgtactatgggggcaggtaatgcccatctaaagctgaaaatttccaagggtgaggcgagttttgaagtggtagcctttggtcaaggcagatgggcgacagagttttctcaaaccaagaatctagagttagcggttaaattgtctgtcaaccaatggaatggccaaactgccctccagttgatgatggtggatgcgcgagtggaaggtgttcaactttttaacattcgtggaaaaaatgcagtcttgccagaaggtgttccagtcttggattttcctggagaactgccaaatcttgcggctagtgaagctattgtcgtaaaaaacattccagaggatattactcagctgaagaccatttttcaggaacagcatttctctgctgtctatttcaaaaatgatattgacaaggcctattatctgacaggttatgggactagagatcagtttgccaaattgtacaagactatttaccagttcccagagtttgatattcgctacaagctgaaagatttggctgcatatcttaatattcaacaaatcttgctggtcaagatgattcaagtatttgaagaactaggctttgtgacgataaaagatggtgtgatgacagtcaataaagaggcgccaaagcgggagataggagaaagtcaaatttaccaaaatctcaaacaaaccgttaaagaccaagaaatgatggcgctgggtacggtgcaagaaatttatgattttttgatggaaaaagagtag

SEQ ID NO: 2647 - DNA, 1980 bp, Streptococcus pneumoniae
gaaaatattctcgtttatggagactatgatgcggatggcatgacttcggcttctattgtgaaggaaagtttggaacaacttggtgctgagtgccgagtttacctgccaaatcgttttaccgatggctatggccctaatgctagtgtttataaatactttatcgagcaagatagaatttccttgattgtgacggtggacaatggggttgctggtcatgaggctattgcattggctcagtctatgggagtagatgtcattgtgacagaccatcattccatgcctgaaaccctgccagatgcttatgctattgtccatcctgaacatccagatgcggattatccttttaaatatttggctggttgtggagttgctttcaagttggcttgtgccctgttagaagaagtgcaagtggaattgcttgatttggtcgctattggaactattgcagatatggtgagtctgacggatgaaaatcgtatcttagttcaatatggtctggaaatgttgggtcatacccagcgcattggtctgcaagaaatgctggacatggctgggattgctgccaacgaagtaacagaagaaacggttggtttccagattgctcctcgtttgaatgccttgggccgcttggatgatcccaatcctgccattgatttgttgactggatttgatgatgaggaagcgcatgagattgcccttatgattcaccagaaaaacgaagagcgcaaggaaatcgttcagtctatctatgaagaagccaagaccatggtggatcctgagaagaaggttcaggtcttggccaaggaaggctggaatcctggggttctaggaatcgtggctggtcgtttattggaagaattgggacagacagtcattgttcttaatataaaagacggtcgtgccaagggcagtgctcgtattgtggaaccggtcgatatttttgaagctctggatccccatcgagacctcttcatcgcctttggaggtcatgcaggtgcagcgggtatgacgctggaagttgagcaactctcagatttatctcaggttttggaagattatgttcgtgaaaaaggtgcagatgctggtggcaagaataagttaaacctagatgaagagttggatttggaggcacttagcttggaaacggtcaaaagttttgaacgtttagctccttttggaatggataatcagaaacctattttttatatcaagaattttcaggtcgaaagtgctcgtactatgggggcaggtaatgcccatctaaagctgaaaatttccaagggtgaggcgagttttgaagtggtagcctttggtcaaggcagatgggcgacagagttttctcaaaccaagaatctagagttagcggttaaattgtctgtcaaccaatggaatggccaaactgccctccagttgatgatggtggatgcgcgagtggaaggtgttcaactttttaacattcgtggaaaaaatgcagtcttgccagaaggtgttccagtcttggattttcctggagaactgccaaatcttgcggctagtgaagctattgtcgtaaaaaacattccagaggatattactcagctgaagaccatttttcaggaacagcatttctctgctgtctatttcaaaaatgatattgacaaggcctattatctgacaggttatgggactagagatcagtttgccaaattgtacaagactatttaccagttcccagagtttgatattcgctacaagctgaaagatttggctgcatatcttaatattcaacaaatcttgctggtcaagatgattcaagtatttgaagaactaggctttgtgacgataaaagatggtgtgatgacagtcaataaagaggcgccaaagcgggagataggagaaagtcaaatttaccaaaatctcaaacaaaccgttaaagaccaagaaatgatggcgctgggtacggtgcaagaaatttatgattttttgatggaaaaagagtag

SEQ ID NO: 2648 - DNA, 759 bp, Streptococcus pneumoniae
atggctttagtagaatttaaaaacgtcgaaaaatattacggagactaccacgcactccgcaacatcaatctccgttttgaaaaaggacaagttgttgtcctgcttggaccttctggctctgggaagtccactcttatccgtacgatcaatggtttagagactgttgacaaaggaagtctcctagtcaatgggcaccaagttgctggtgccagccagaaagatttggtacctcttcgcaaggaagtcggcatggtttttcaacattttaacatttatccacacaaaactgtgttagaaaacgtaacacttgcacccattaaagttctaggaattgataaaaaagaagctgaaaaaaccgcccaaaaatatctggaatttgtaaatgtgtgggacaagaaagattcctatcccgccatgctatctggtggacaaaaacagcggatcgccatcgctcgtggtcttgctatgcatccggaactcctcctctttgatgaaccaacatctgctcttgatcctgagactatcggagatgttctagcagttatgcagaaactggcgcatgatgggatgaacatgatcatcgttacccacgaaatgggctttgctcgagaggttgcggaccgcattatctttatggccgacggagaagttttagtagatacgacagatgtcgataacttttttgacaatccaagcaaacctcgtgcccaacaattcctcagcaaaattatcaaccacgaaagtgacaaagtcaaataa

SEQ ID NO: 2649 - DNA, 195 bp, Streptococcus pneumoniae
ttgcgaagaggtaccaaatctttctggctggcaccagcaacttggtgcccattgactaggagacttcctttgtcaacagtctctaaaccattgatcgtacggataagagtggacttcccagagccagaaggtccaagcaggacaacaacttgtcctttttcaaaacggagattgatgttgcggagtgcgtggtag

SEQ ID NO: 2650 - DNA, 219 bp, Streptococcus pneumoniae
atgcggtccgcaacctctcgagcaaagcccatttcgtgggtaacgatgatcatgttcatcccatcatgcgccagtttctgcataactgctagaacatctccgatagtctcaggatcaagagcagatgttggttcatcaaagaggaggagttccggatgcatagcaagaccacgagcgatggcgatccgctgtttttgtccaccagatagcatggcggga

SEQ ID NO: 2651 - DNA, 795 bp, Streptococcus pneumoniae
atgaaaaaaaaattctttttatcagcattattgattagccttttcggccttgctgctgccaaaccagtccaggctgatactagtatcgcagacattcaaaaaagaggcgaactggttgtcggtgtcaaacaagacgttcccaattttggttacaaagatcccaagaccggtacttattctggtatcgaaaccgacttggccaagatggtagctgatgaactcaaggtcaagattcgctatgtgccggttacagcacaaacccgcggcccccttctagacaatgaacaggtcgatatggatatcgcgacctttaccatcacggacgaacgcaaaaaactctacaacttcaccagtccctactacacagacgcttctggatttttggtcaataaatctgccaaaatcaaaaagattgaggacctaaacggcaaaaccatcggagtcgcccaaggttctatcacccaacgcctgattactgaactgggtaaaaagaaaggtctgaagtttaaattcgtcgaacttggttcctacccagaattgattacttccctgcacgctcatcgtatcgatgccttttccgttgaccactctattctatctggctacactagtaaacggacagcactactagatgatagtttcaagccatctgactacagtattgttaccaagaaatcaaatacagagctcaacgactatcttgataacttggttactaaatggagcaaggatggtagtttgcagaaactttatgaccgttacaagctcaaaccatctagtcataccgcagattaa

SEQ ID NO: 2652 - DNA, 678 bp, Streptococcus pneumoniae
atgacagatttatcatcttggacagcctattttcaggattttggacaatttttcaatggtttcctctttactcttgccctagcgattggatcctttatcctcgccatggtcttaggaatcttctttggtgccatgtcaaccagtaaacgtccaattttacgcattttagctcgcatcttcgtggaattttaccaaaacactcccctcttggtgcagtttgttattgttttttatggcctacctcttatcagtgaccacatcatcatgattccaatttattggacagccgttctctgcgtgggactctatcacggcgcttatatcgctgaggttattcgttcagggattcagtctattcctagtggtcagatggaggccgccttgtcgcaaggttttacctatatcagtgccatgcgcttgattatcttgcctcaggccttccgcatcattctccctccattgaccaaccaaattgttaacctcatcaagaacacatctactgtagctatcatctctggagtagacttgatgtttgtgactaagtcttggtcggctctcaacggaaactatatcccagcctttttaggtgctgctcttctctactttgccctatgcttccctgttgcccagtttggtcgcaagatggagcaagccaataaaaaagcctattcactttag

SEQ ID NO: 2653 - DNA, 660 bp, Streptococcus pneumoniae
atggaatctattttagaaattttaaccccagataacctagtctttatctttaaaggatttggcttgaccctctatatttctctgattgccatcatcctctctactatcatcggtaccgtgcttgccgtcatgcgaaatggaaaaaatcctatcttacgcattatttccagtatttatatcgagtttgtgcgcaacgttcccaaccttctctggatttttactatctttttggtgttcaaaatgaaatccacaccagcaggtattacagcctttactctctttacatcagcagccttggctgagattattcgaggcggtctcaatgccgtagacaagggacaatacgaagcaggaatgtcacaaggcttcacctcagcccaaatcctctactacatcattctcccacaagccatccgcaaaatgctaccagccatcatttctcagtttgttaccgtgattaaggataccagtctcctctactctgttatcgccctacaagaactctttggagccagccaaattctcatgggccgttatttcgaaccagagcaggtcttcagtctttacatcctgattgccctcatctacttcagctttaacctagcaatttctaacctgtctcatatgctagcaaaacgttggcaacaagctgcagaataa

SEQ ID NO: 2654 - DNA, 1203 bp, Streptococcus pneumoniae
atggaattttctatgaaatcagtcaaaggactactctttatcatagctagttttatcttgactcttttgacttggatgaacacttctccccaattcatgattccaggactagctttaacaagcctatctctgacttttatcctagccactcgtctcccactactagaaagctggtttcacggtttggagaaggtctacaccgtccacaaattcacagcctttctctccatcatcctactaatctttcataactttagtatgggcggtttgtggggctctcgcttagctgctcagtttggtaatcttgccatctatatctttgccagcatcatccttgtcgcctatttaggcaaatacatccaatacgaagcttggcgatggattcaccgcctggtttacctagcctatattttaggactctttcacatctacatgataatgggcaatcgtctccttacatttaatcttctaagttttcttgttggtagctatgcccttttaggcttactagctggtttttatatcatttttctatatcaaaagatttccttcccctatctagggaaaattacccatctcaaacgcttaaatcacgatactagagaaattcaaatccatcttagcagacctttcaactatcaatcaggacaatttgcctttctaaagattttccaagaaggctttgaaagtgctccacatcccttttctatctcaggaggtcatggtcaaactctttactttactgttaaaaattcaggcgaccataccaagaatatctatgataatcttcaagccggcagcaaagtaaccctagacagagcttacggacacatgatcatagaagaaggacgagaaaatcaggtttggattgctggaggtattgggatcacccccttcatctcttacatccgtgaacatcctattttagataaacgggttcacttctactatagcttccgtggagaagaaaatgcagtctaccttgatttactccgtgactatgctcagaaaaatcctaattttgaactccatctaatcgacagtacaaaagacggctatcttaattttgaacaaaaagaagtgcccgaacatgcaaccgtctatatgtgtggtcctatttctatgatgaaggcacttgccaaacagattaagaaacaaaatccaaaaacggagcttatttacgaaggattcaagttcaaataa

SEQ ID NO: 2655 - DNA, 882 bp, Streptococcus pneumoniae
atggcaatcgtttcagcagaaaaatttgtccaagcagcccgtgacaacggttatgcagttggtggatttaacacaaacaatcttgagtggactcaagctatcttgcgcgcagcagaagctaaaaaagctccagttttgatccaaacttcaatgggtgctgctaaatacatgggtggttacaaagttgctcgcaacttgatcgctaaccttgttgaatcaatgggtatcactgtaccagtagctatccaccttgaccacggtcactacgaagatgcacttgagtgtatcgaagttggttatacttcaatcatgtttgacggttcacaccttccagttgaagaaaatcttaaattggctaaagaagttgttgaaaaagcacacgctaaaggtatctcagtagaagctgaagttggtactatcggtggtgaagaagacggaatcatcggtaaaggtgaattggctccaatcgaagacgctaaagcaatggttgaaactggtatcgacttcttggcagctggtatcggtaacatccacggtccttacccagtaaactgggaaggtcttgaccttgaccacttgcaaaaattgacagaagctcttccaggattcccaatcgtattgcacggtggatcaggtattcctgatgagcaaatccaagcagctatcaaacttggtgttgccaaagttaacgttaacacagaatgccaaatcgcattcgctaacgcaactcgtaaatttgctcgtgactacgaagcaaacgaagcagaatacgacaagaaaaaactcttcgacccacgtaaattcttggctgacggtgtaaaagctatccaagcatcggttgaagaacgtatcgacgtattcggttcagaaggtaaagcataa

SEQ ID NO: 2656 - DNA, 1329 bp, Streptococcus pneumoniae
atgaaacgaacaggtttatttgcaaagatatttatctataccttctcgatatttagtgttctggttatctgccttcatttagctatttattttctttttccttcgacttatctgagtcatcgtcaggaaaccattggtcaaaaggcaacagccattgcccagtccctagaagggaaagataggcagagtatcgagcaagtgttagacttgtattcccagactagtgatatcaaggggaccgtcaaaggtgagatgaccgaggacaagttagaagtcaaggacagtcttcctctggacacagaccgccagacaacctctctctttattgaggagcgcgaggtgaaaacgcaagacggtggtactatgattctccagtttctagcttccatggatttacaaaaggaagcggagcaaatcagtctccagtttcttccctataccttgctggcctcctttctgatttccctcttggtggcctacatctacgctcggactattgttgcaccgattttggaaatcaagcgggtgacccgtcggatgatggacctggattcccaagtgcgattgcgcgtggattctaaggatgagataggtaatctcaaggaacaaatcaatagcctttaccagcatctcttgactgttattgcggacttgcatgaaaagaatgaagccattctccagctggagaagatgaaggtcgaattcctacgaggagcttctcatgaattgaaaacaccgctggctagtttgaaaatcctaatcgaaaatatgagagagaatatcggtcgttataaggatagagaccagtatctgggagttgccttggggattgtggatgaactcaatcaccatgttctgcagatactttccctctcttctgtgcaggaattgcgagatgatagggaaacaattgacctcctccagatgacgcaaaatctggtcaaagattatgccttgctagccaaggaaagagagctccagatagacaatagtttgacccatcagcaggcttatctaaacccatcagttatgaagttgattctttctaatctcatcagcaatgccattaagcactctgttccaggtggcttagttcgaattggagaaagagaaggagaactttttatcgaaaatagctgtagctcagaggaacaagaaaaactagcccagtctttttctgacaatgctagtcgcaaggtcaaggggtctggtatggggctctttgtggttaagagtctattagaacatgaaaaattagcttatcgtttcgagatggaggagaatcgtttaaccttctttatagattttccaaaagtcgcccaagactag

SEQ ID NO: 2657 - DNA, 657 bp, Streptococcus pneumoniae
atgaaaattttaattgtagaagatgaagagatgatccgtgagggggtcagtgattatttgacggattgtggctatgaaactattgaggcagcggacggtcaggaagctctggagcaattttctagctatgaggtggccctggttttactggatatccagatgcccaagcttaacggcttagaagttctagctgagattcgtaaaaccagtcaggttcctgtcttgatgttgacagcttttcaggatgaggaatacaagatgagtgcctttgcctctttggcagatggctatctggaaaaacctttctccctctccctcttaaaagtgagggtggacgcgattttcaagcgctactacgatacaggacgaatcttttcttacaaggataccaaggtggactttgaaagctacagtgcaagcctcgcaggtcaagaagtgcctatcaatgccaaagagttggaaattctggactatctagtgaaaaatgaaggccgggccttgactcggtctcagattatcgatgccgtctggaaagcgacagatgaggttccctttgaccgtgttattgatgtttatatcaaggaattgcggaaaaagctagacttggattgtatcctcactgtgcgcaatgttggttataaattggagcgaaaatga

SEQ ID NO: 2658 - DNA, 1380 bp, Streptococcus pneumoniae
atgttacacaacgcatttgcctatgttacaaggaagtttttcaaatcgattgtcatcttcctgattattctcctcatggcgagcttgagtttggtcggcttgtcaatcaagggagctactgccaaggcttctcaggagacctttaaaaatatcaccaatagcttctccatgcaaatcaatcgtcgcgtcaaccaaggaacgcctcgcggtgctgggaatatcaagggtgaagacatcaaaaaaatcaccgaaaacaaggccattgagtcttatgtcaaacgtatcaacgctatcggagatttgactggatatgacctgattgaaacgccagaaaccaagaagaatctcactgctgatcgtgccaaacgttttggaagtagcttgatgattacaggtgtcaatgactcctctaaagaagacaagtttgtctctggttcttataaactagtcgaaggagagcacttaaccaacgacgacaaggataaaatcctcttgcacaaggacttggcagccaaacacggctggaaagtaggggacaaggttaaactggactctaatatctacgatgcagataatgaaaaaggagccaaggaaacagttgaagtgacaatcaagggactctttgatggtcataataagtcagcagtaacctactcacaagaactttacgaaaacacagctattacagacattcacactgctgcaaaactttatggatacacagaagacacagccatttatggggacgcaaccttctttgtaacagcagacaagaacttggatgatgttatgaaagagttgaatggcatcagtggtatcaactggaagagctacacactcgtcaagagctcctctaactacccagctcttgagcaatctatatctggtatgtacaagatggccaacctcctcttctggggtagtttgagcttctcagttctcctccttgccctcttgctcagcctttggatcaacgcccgtcgcaaggaagtgggaattctcctctctatcggcctcaagcaggcaagtatcttgggtcaattcatcaccgaatctatcttgattgctatccctgctctagtttctgcttacttcctagctaattacactgcccgtgcaattggaaacactgtccttgccaatgtgacttcaggtgttgccaaacaggctagtaaggcggctcaagcctctaaccttggtggtggtgcagaagtagatggctttagcaagaccttgtcgagcctagacatttctattcagacatcagactttatcatcatttttgtccttgccttggttctagtggttctcgttatggcgcttgcttcaagcaatctccttagaaaacaaccaaaagagctcttgctggatggtgaataa

SEQ ID NO: 2659 - DNA, 648 bp, Streptococcus pneumoniae
atgactttattacaattacaagatgttacctaccgttataagaatactgctgaagcagtcctatatcagatcgattataattttgaacccggaaaattttacagtattattggggaatcaggagcaggaaaatccacactcttgtccctacttgctggtctagatagtcctgttgaaggttctatcctttttcaaggagaggatattcgtaagaagggctattcttaccatcgcatgcaccatatttccctggtctttcaaaattataacttgatagattatctttctccgctggaaaatatccgcttggtcaacaaaaaggcaagcaagaatacacttcttgagcttggtttggatgaaagccagatcaagcggaatgttctccagttatcaggtggtcaacagcaacgtgttgccattgctcgcagtttggtctcagaagctccagttattctagctgatgagccaacaggaaatctggatcctaaaactgctggagatattgtcgaactactcaaatcacttgcccagaaaacaggtaaatgtgtgattgtcgtaactcacagtaaagaagtggcacaagcgtcagatattacacttgaattaaaggataagaaactgactgaaacgcgcaatactagtaaataa

SEQ ID NO: 2660 - DNA, 1278 bp, Streptococcus pneumoniae
atgaatccaatccaaagatcttgggcttatgtcagcagaaagcgactgagaagttttattttatttctgattttattggtcttattggccggaatttcagcctgtttgactctgatgaagtccaacaaaacagtagaaagcaatctttataaatcactcaatacatctttttctattaagaagatagagaatggtcagacattcaagttgtcagacctagcatctgtaagcaagattaaggggctggaaaatgtctctcctgaacttgagacggtcgcaaaactaaaagacaaggaagcagtgactggcgagcagagcgtggagcgtgatgatttatcagctgcagacaataacttggttagcttaacggctcttgaggattcatccaaggatgtaacctttaccagttcggctttcaatctaaaagaagggcgacaccttcaaaaaggggattccaagaaaatccttatccacgaagaattggctaagaagaacggtctttcacttcatgacaagattggcttggatgctggtcagtctgaatctggaaaaggacaaacagtagagtttgagattattggcatcttttctggtaaaaaacaagagaaattcacaggcttgtcttctgacttcagtgaaaatcaagtctttacagactatgaaagtagccaaacccttttgggcaatagtgaagctcaagtcagtgcagcacgcttctatgtagaaaatcctaaggaaatggacggactcatgaagcaggtagaaaacttggccttggaaaatcaaggctaccaagtcgaaaaggaaaacaaggcttttgaacaaatcaaagactcagttgcaactttccaaaccttcctgaccatcttcctttatgggatgttgatagcaggagctggagccttaattctggttttgtctctctggttgagagaacgggtctatgaagtggggattttacttgcacttggaaaaggcaagagctcgatcttcctacaattctgtttagaggtagttttggtatctcttggagctttgcttccagcatttgttgcaggaaatggaatcacaacttacctactccaaactctactagcaagtggagatcaggcaagcttacaagatacactagccaaagcaagcagtttatcaactagcatcttatcttttgcagaatcctatgtttttctagttctgcttagttgcttatctgtagccctttgtttcctattcttatttagaaaatcaccgaaagaaattttatcatctattagttaa

SEQ ID NO: 2661 - DNA, 255 bp, Streptococcus pneumoniae
gaggggctagagattatcccctactcgatatttttttttttcgtatttcataaacatttcatatttgggttttataatagtcttacaaatatggaggtgacaaatgaatccaatccaaagatcttgggcttatgtcagcagaaagcgactgagaagttttattttatttctgattttattggtcttattggccggaatttcagcctgtttgactctgatgaagtccaacaaaacagtagaaagcaatctttataa

SEQ ID NO: 2662 - protein, 110 aa, Streptococcus pneumoniae
LKHHYQIYQLLLFHFQNKDPEKFFGLIEDTLKQVHPIFQTVFKTFLKNKEKIVNALQLPYSNAKLEATNNLIKLIKRNAFGFRNFENFKKRIFIALNIKKERTNFVLSRA

SEQ ID NO: 2663 - protein, 172 aa, Streptococcus pneumoniae
MEQLHFITKLLDIKDPNIQILDIINKDTHKEIIAKLDYDAPSCPECGNQLKKYDFQKPSKIPYLETTGMPTRILLRKRRFKCYHCSKMMVAETSIVKNNHQIPRIINQKIAQKLIEKISMTDIAHQLSISTSTVIRKLNDFHFKHDFSCLPEIMSWDVETVRGVTVSIGRWR

SEQ ID NO: 2664 - protein, 108 aa, Streptococcus pneumoniae
NSPGSDCFNREMEMSFIAQDFNNLNIITVLEGRTQAIIRNHFLRYDRAVRCRVKIITMDMFSPYYGLAKQLRFQISRLRLKQSPRLFHSRMLKSFLIAFTLCNILAVL

SEQ ID NO: 2665 - protein, 189 aa, Streptococcus pneumoniae
VLDRFHIVQHLSRAMSRVRVQIMNQFHRKSHEYKAIKRYWKLIQQDSRKLSDKRFYRPTFRMHLTNKEILDKLLSYSQDLKHHYQLYQLLLFHFQNKEPEKFFGLIEDNLKQVHPLFQTVFKTFLKDKEKIVNALQLHYSNAKLEATNNLIKLIKRNAFGFRNFENFKKRIFIALNIKKERTKFVLSRA

SEQ ID NO: 2666 - protein, 121 aa, Streptococcus pneumoniae
VHLLKYCQVSMDLFTYHKFHTNGLKIQKKLLKLVKKFKLKFLKLTQMQNACHFLLKLLKNVQPKKKDKKKKNVLLVHVVQDVKKSVISNFQKHKQDFQWLICLVISNFNQIENSQNPLFTK

SEQ ID NO: 2667 - protein, 400 aa, Streptococcus pneumoniae
MNEFEDLLNSVSQVETGDVVSAEVLTVDATQANVAISGTGVEGVLTLRELTNDRDADINDFVKVGEVLDVLVLRQVVGKDTDTVTYLVSKKRLEARKAWDKLVGREEEVVTVKGTRAVKGGLSVEFEGVRGFIPASMLDTRFVRNAERFVGQEFDTKIKEVNAKENRFILSRREVVEAATAAARAEVFGKLAVGDVVTGKVARITSFGAFIDLGGVDGLVHLTELSHERNVSPKSVVTVGEEIEVKILDLNEEEGRVSLSLKATVPGPWDGVEQKLAKGDVVEGTVKRLTDFGAFVEVLPGIDGLVHVSQISHKRIENPKEALKVGQEVQVKVLEVNADAERVSLSIKALEERPAQEEGQKEEKRAARPRRPRRQEKRDFELPETQTGFSMADLFGDIEL

SEQ ID NO: 2668 - protein, 78 aa, Streptococcus pneumoniae
NTLRYFAFYLDYYLRTGVAGFEPTHEGVKVPCLTAWLYPINEMEREGFEPPNPKERIYSPPRLASSLSLLQSTWTIIS

SEQ ID NO: 2669 - protein, 76 aa, Streptococcus pneumoniae
MSKKDKKIEIQVADAKVNVGKDSFEGYTLTIGKKVIGEIAELDGQFAIIKNGNVDSFYKKLEKAVEILIENYNLAK

SEQ ID NO: 2670 - protein, 214 aa, Streptococcus pneumoniae
MKILVTGFNPFGGEKINPALEAVKLLPSEINGAEVRWVEIPTVFYKSSEVLEAEILRYQPDAVLCIGQAGGRTGLTPERVAINQDDARIPDNEGNQPIDTPIRIDGASAYFSSLPIKAMVQAIKKQGLPAVVSNSAGTFVCNHLMYQALYLVDKKFPNMRAGFMHIPYMMEQVVNKPNTAGMSLCDIVRGIEVAIEAIVDYKDKDLQLVGGETH

SEQ ID NO: 2671 - protein, 307 aa, Streptococcus pneumoniae
MTELAKQLLELTYIVIGCQFLHTAYCSYKDKTNPVRLGTSAFWTLLSITFIGGSYMPNMSIGIIVILLSLLTLFKQVRIGTLPSLDEMKANIESNRLKNKIFIPVMLMAILALVLAQMIPEFSKISISLAALFATISVLVITNSHPKSLLSENNRMTQQVSTSGIVPQLLGALGAIFTVAGVGDVISHLISGIVPSDSRFIGVLAYVLGMVLFTMIMGNAFAAFTVITAGVGVPFVFALGANPIVAGALAMTAGYCGTLLTPMAANFNALPAALMDMKDQNGVIKAQAGVALVMIVIHIFLMYFLAF

SEQ ID NO: 2672 - protein, 236 aa, Streptococcus pneumoniae
LNIKEFDMEWIRLIGIAIIVVGFILKFDTIATVVLAGLVTALVSGVSLVEFLEILGKEFSNQRVLTIFMVTLPLVGLSETFGLKQRSIDLIRKIKGLTVGNFYTVYFFIRELAGFFSIRLGGHPQFVRPLVQPMGEAAAESQLGRKLTEVEDETIKARAAANENFGNFFAQNTFVGAGGVLLIGGTLDQLGYESNYAGIASTSIIVAVITLIVVGIYNYLFDKKLISKKTRGGEQK

SEQ ID NO: 2673 - protein, 234 aa, Streptococcus pneumoniae
VVLSTSAILVACGKTDKEADAPTTFSYVYAVDPASLGYSIATRTSRTDVIGNVIDGLMENDKYGNVAPSQKDYDLNSTGWAPSYQDPASYLNIMDPKSGSAMKHLGITKGKDKDVVAKPGLDKYKKLLEDAVSEITDLEKRYEKYAKAQAWSTDSSLLMPTASSGGFPVVSNVVPFSKPYSQVGIKGEPYIFKGMKLQKDIVTTKEYNEVFKKWQKEKLESNSKYQKELEKYIK

SEQ ID NO: 2674 - protein, 340 aa, Streptococcus pneumoniae
MTVTIDWENLGFSYMKLPYRYLAHFKNGQWDQGELTEDATLHISESSPSLHYGQQAFEGLKAYRTKDGSVQLFRPDENAKRLQRTCDRLLMPQVPTDMFVEACKAVVRANEEYVPPYGTGGTLYLRPLLIGVGDIIGVKPAEEYIFTIFAMPVGNYFKGGLVPTNFLIQDEYDRAAPNGTGAAKVGGNYAASLLPGKMAKSRHFSDVIYLDPSTHTKIEEVGSANFFGITADNEFVTPLSPSILPSITKYSLLYLAEHRLGLTPIEGDVPIDNLDRFVEAGACGTAAVISPIGGIQHGDDFHVFYSETEVGPVTRKLYNELTGIQFGDIEAPEGWIVKVD

SEQ ID NO: 2675 - protein, 823 aa, Streptococcus pneumoniae
MSNIQNMSLEDIMGERFGRYSKYIIQDRALPDIRDGLKPVQRRILYSMNKDSNTFDKSYRKSAKSVGNIMGNFHPHGDSSIYDAMVRMSQNWKNREILVEMHGNNGSMDGDPPAAMRYTEARLSEIAGYLLQDIEKKTVPFAWNFDDTEKEPTVLPAAFPNLLVNGSTGISAGYATDIPPHNLAEVIDAAVYMIDHPTAKIDKLMEFLPGPDFPTGAIIQGRDEIKKAYETGKGRVVVRSKTEIEKLKGGKEQIVITEIPYEINKANLVKKIDDVRVNNKVAGIAEVRDESDRDGLRIAIELKKDANTELVLNYLFKYTDLQINYNFNMVAIDNFTPRQVGIVPILSSYIAHRREVILARSRFDKEKAEKRLHIVEGLIRVISILDEVIALIRASENKADAKENLKVSYDFTEEQAEAIVTLQLYRLTNTDVVVLQEEEAELREKIAMLAAIIGDERTMYNLMKKELREVKKKFATPRLSSLEDTAKAIEIDTASLIAEEDTYVSVTKAGYIKRTSPRSFAASTLEEIGKRDDDRLIFVQSAKTTQHLLMFTSLGNVIYRPIHELADIRWKDIGEHLSQTITNFETNEEILYVEVLDQFDDATTYFAVTRLGQIKRVERKEFTPWRTYRSKSVKYAKLKDDTDQIVAVAPIKLDDVVLVSQNGYALRFNIEEVPVVGAKAAGVKAMNLKEDDVLQSGFICNTSSFYLLTQRGSLKRVSIEEILATSRAKRGLQVLRELKNKPHRVFLAGAVAEQGFVGDFFSTEVDVNDQTLLVQSNKGTIYESRLQDLNLSERTSNGSFISDTISDEEVFDAYLQEVVTEDK

SEQ ID NO: 2676 - protein, 647 aa, Streptococcus pneumoniae
VSKKEININNYNDDAIQVLEGLDAVRKRPGMYIGSTDGAGLHHLVWEIVDNAVDEALSGFGDRIDVTINKDGSLTVQDHGRGMPTGMHAMGIPTVEVIFTILHAGGKFGQGGYKTSGGLHGVGSSVVNALSSWLEVEITRDGAVYKQRFENGGKPVTTLKKIGTAPKSKTGTKVTFMPDATIFSTTDFKYNTISERLNESAFLLKNVTLSLTDKRTDEAIEFHYENGVQDFVSYLNEDKEILTPVLYFEGEDNGFQVEVALQYNDGFSDNILSFVNNVRTKDGGTHETGLKSAITKVMNDYARKTGLLKEKDKNLEGSDYREGLAAVLSILVPEEHLQFEGQTKDKLGSPLARPVVDGIVADKLTFFLMENGELASNLIRKAIKARDAREAARKARDESRNGKKNKKDKGLLSGKLTPAQSKNPAKNELYLVEGDSAGGSAKQGRDRKFQAILPLRGKVINTAKAKMADILKNEEINTMIYTIGAGVGADFSIEDANYDKIIIMTDADTDGAHIQTLLLTFFYRYMRPLVEAGHVYIALPPLYKMSKGKGKKEEVAYAWTDGELEELRKQFGKGATLQRYKGLGEMNADQLWETTMNPETRTLIRVTIEDLARAERRVNVLMGDKVEPRRKWIEDNVKFTLEEATVF

SEQ ID NO: 2677 - protein, 213 aa, Streptococcus pneumoniae
MITIVLLILAYLLGSIPSGLWIGQVFFQINLREHGSGNTGTTNTFRILGKKAGMATFVIDFFKGTLATLLPIIFHLQGVSPLIFGLLAVIGHTFPIFAGFKGGKAVATSAGVIFGFAPIFCLYLAIIFFGALYLGSMISLSSVTASIAAVIGVLLFPLFGFILSNYDFLFIAIILALASLIIIRHKDNIARIKNKTENLVPWGLNLTHQDPKK

SEQ ID NO: 2678 - protein, 409 aa, Streptococcus pneumoniae
MGQLHFITKLLDIKDTNIQIIDVVNRDSHKEIIAKLDYDAPSCPGCGNQLKKYDFQKPSKIPYLETTGMPTRILLRKRRFKCYQCSKIAVAETSLVKKNHQIPRIINQKIAQKLIEKISMTDIAHQLSISTSTVIRKLNDFHFKHDFSCLPEIMSWDEYAFTKGKMSFIAQDFNNLNIITVLEGRTQAIIRNHFLRYDRVVRCRVKIITMDMFSPYYGLAKQLRFHIVQHLSCAMSRVRVQIMNQFHRKSHEYKAIKRYWKLIQQDSRKLSDKRFYRPTFRIHLTNKEILDKLLSYSQDLKHHYQLYQLLLFHFQNKEPEKFFGLIEDNLKQVHPIFQTVFKTFLKDKEKIVNALQLHYSNVKLEATNNLIKLIKRNAFGFRNFENFKKRIFIALNIKKERTKFVLSRA

SEQ ID NO: 2679 - protein, 277 aa, Streptococcus pneumoniae
MTEFLLVLLLKSIKLARWTYYYHLKQLDKTDKDQELKAEIQSIFIEHKGNYAYRRVHLELRNRAYLVNHKRVQGLIKVLNLQAKMRQKRKYSSHKGDVGKKAENLIQGQFEGSKTMEKCYTDVTEFAIPASTQKLYLSPVLDGFNSEIIAFNLSCSPNLEQVQTMLEQAFKEKHYENTILHSDQGWQYQHDSYHRFLESKGIQASMSRKGNSPDNGMMESFFGILKSEMFYGYEKSFQSFKQLEQAIIDYIDYYNNKRIKVKLKGLIPVQYRTKSFG

SEQ ID NO: 2680 - protein, 190 aa, Streptococcus pneumoniae
MNCTPKVRQKKSNFWGVFIMKLTYDDKVQIYELRKQGYSLEKLSNKFGINNSNIRYMIKLIDRYGIEFVKKGKNRYYSPDLKQEMIHKVLHEGWTKDRVSLEYGLPSRTILLNWLAQYRKNGYTIVEKTRGRVPKMGRKPKTRPEERTELERLQAENEYLRAEKAILKKLRELRLKEEKEKEERQKLFKN

SEQ ID NO: 2681 - protein, 33 aa, Streptococcus pneumoniae
MIKLIDRYGIEFGKKGKNRYYSPDLKQEMIYKV

SEQ ID NO: 2682 - protein, 318 aa, Streptococcus pneumoniae
MSIITLLPLLVSSMLIYSAPLIFTSIGGVFSERGGVVNVGLEGIMVMGAFSGVVFNLEFAEQFGAATPWLSLLVAGLVGSVFSIIHAAATVHFRADHVVSGTVLNLMAPALAVFLVKVLYNKGQTDNLSQTFGRFDFPVLANIPVIGDIFFKSTSLLGYLAIAFSFLAWFILFKTQFGLRLRSVGEHPQAADTLGINVYKMRYLGIIISGFLGGIGGAIYAQSISVNFSVTTIVGPGFIALAAMIFGKWNPIGAMLSSLFFGLSQSLAVIGSQLPFLQGVPAVYLQIAPYVLTILVLAAFFGKAVAPKADGINYIKSK

SEQ ID NO: 2683 - protein, 361 aa, Streptococcus pneumoniae
VETWERRRVMSKKLQQISVPLISVFLGILLGAIVMWIFGYDAIWGYEELFYTAFGSLRGIGEIFRAMGPLVLIGLGFAVASRAGFFNVGLPGQALAGWILSGWFALSHPDMPRPLMILATIVIALIAGGIVGAIPGILRAYLGTSEVIVTIMMNYIVLYVGNAFIHAFPKDFMQSTDSTIRVGANATYQTPWLAELTGNSRMNIGIFFAIIAVAVIWFMLKKTTLGFEIRAVGLNPHASEYAGISAKRTIILSMIISGALAGLGGSVEGLGTFQNVYVQGSSLAIGFNGMAVSLLAANSPIGILFAAFLFGVLQVGAPGMNAAQVPSELVSIVTASIIFFVSVHYLIERFVKPKKQVKGGK

SEQ ID NO: 2684 - protein, 511 aa, Streptococcus pneumoniae
MAHENVIEMRDITKVFGGFVANDKINLHLRKGEIHALLGENGAGKSTLMNMLAGLLEPTSGEIAVNGQVVNLDSPSKAASLGIGMVHQHFMLVEAFTVAENIILGSELTKNGVLDIAGASKEIKALSERYGLAVDPSAKVADISVGAQQRVEILKTLYRGADILIFDEPTAVLTPSEIDELMAIMKNLVKEGKSIILITHKLDEIRAVSDRVTVIRRGKSIETVEIAGATNADLAEMMVGRSVSFKTEKQASKPKEVVLSIKDLVVNENRGVPAVKNLSLDVRAGEIVGIAGIDGNGQSELIQAITGLRKVESGSIELKGDSIVGLHPRQITELSVGHVPEDRHRDGLILEMMISENIALQTYYKEPHSKNGILNYSNITSYAKKLMEEFDVRAASELVPAAALSGGNQQKAIIAREIDRDPDLLIVSQPTRGLDVGAIEYIHKRLIEERDNGKAVLVVSFELDEILNVSDRIAVIHDGKIQGIVSPETTNKQGLGVLMAGGNLGKEKSDV

SEQ ID NO: 2685 - protein, 139 aa, Streptococcus pneumoniae
PFPSIPAIPTISPARTSKDRFLTAGTPRFSLTTKSLIDKTTSFGLEACFSVLKETERPTIISAKSALVAPAISTVSIDFPRRITVTRSETARISSNLWVIKIIDFPSLTRFFIIAINSSISDGVKTAVGSSKIRISAPL

SEQ ID NO: 2686 - protein, 363 aa, Streptococcus pneumoniae
LQHRCTSYLGGSVMNKKQWLGLGLVAVAAVGLAACGNRSSRNAASSSDVKTKAAIVTDTGGVDDKSFNQSAWEGLQAWGKEHNLSKDNGFTYFQSTSEADYANNLQQAAGSYNLIFGVGFALHNAVEEAAKEHTDLNYVLIDDVIKDQKNVASVTFADNESGYLAGVAAAKTTKTKQVGFVGGIESEVISRFEAGFKAGVASVDPSIKVQVDYAGSFGDAAKGKTIAAAQYAAGADIVYQVAGGTGAGVFAEAKSLNESRPENEKVWVIGVDRDQEAEGKYTSKDGKESNFVLVSTLKQVGTTVKDISNKAEKGEFPGGQVIVYSLKDKGVDLAVTNLSEEGKKAVEDAKAKILDGSVKVPEK

SEQ ID NO: 2687 - protein, 129 aa, Streptococcus pneumoniae
MATTELIELAIETSKHAYVPYSHFPIGAVLVAKDGNVYTGVNIENVSYPLTNCGERTAIFKAISEGQREFSELIVYGQTEKPISPCGACRQVMVEFFEQDLKVTLVAKDKSTVEMTVGELLPYSFTDLN

SEQ ID NO: 2688 - protein, 99 aa, Streptococcus pneumoniae
KSLLQACLLTDQEKIVVCQLAQKAGADFVNTSTGFSTGGATIADVRLMRETVGSDMGVKAAGGARSYADALAFVEAGATRIGTSAGVAILKGELADGDY

SEQ ID NO: 2689 - protein, 60 aa, Streptococcus pneumoniae
LTPISDPTVSRINLTSAIVAPPVEKPVDVLTKSAPAFWANWQTTIFSWSVRRQACNNDFH

SEQ ID NO: 2690 - protein, 118 aa, Streptococcus pneumoniae
MKLNKYIDHTLLEQDAKKEQIDSLLSEAREYDFASVCVNPTWVEHAKKGLEGTDVKVCTVVGFPLGATTSAVKAFETKEAIQNGADEIDMVINVGALKSGNLALVESDIRAVVEASGA

SEQ ID NO: 2691 - protein, 425 aa, Streptococcus pneumoniae
MRAVDLIQKKRDGQELTSSEIEWLVEGYVSGTVPDYQMSAFAMAVYFKGMTTREISDLTMNMVKTGQEFDLSAIDGVKVDKHSTGGVGDKVTLILAPLVASFGVPVAKMSGRGLGHTGGTIDKLESIKGYQVERSQEDFIRQVQDIGVSVIGQSDQLVKADKLLYALRDVTATVDTIPLIASSVMSKKIAAGADAILLDVTVGEGAFMKTVDEARELAQTMVDLGKVVGRKTVAVITDMSQPLGRAIGNRLEILEALEILQGQGRQDITHFICELAQIMLGLANVNKTVEEVHQHLENGQALAKFEEMVQAQGGDLEDLYRPVNVAHVVEIPAQETGVISALPAMDFGLYAMRLGAGRAVKSDVLDYETGIVFEKKIGDSVQKGEIVAKVYTNEKIPPQLVTDFQKCVKISDEVKKIREIVEIIS

SEQ ID NO: 2692 - protein, 196 aa, Streptococcus pneumoniae
MSKMYYAENPDAAHDIHELRVDLLGQKMTFLTDAGVFSKKIVDFGSQLLLKCLEVNQGETVLDVGCGYGPLGLSLAKAYGVQATMVDINTRALDLARRNAEKNNAKATIFQSNIYEQVEGHFDHVISNPPIRAGKQVVHEIIEKSKDFLETGGDLTIVIQKKQGAPSAKSKMEDVFGNCEILKKDKGYYILRSVKE

SEQ ID NO: 2693 - protein, 72 aa, Streptococcus pneumoniae
MTLFYHNLTQIVNRLQIDNKTKKTEESESRSHFLQSLSTLINNKPFRTINITVQIKTKSLSSIIRQIIISIA

SEQ ID NO: 2694 - protein, 99 aa, Streptococcus pneumoniae
ILLIYKLIKGAFWFTTYRRCTMKILKCYILELCFILSFALPFIKGANADNGRCFVETYYGFTFLMEHAIVTAVFICSFLIAFLLKNDGRNGLLRVVIAF

SEQ ID NO: 2695 - protein, 316 aa, Streptococcus pneumoniae
MIDKIPRGKQMTNEFLHFEKISRQTWQSLHRKTTPPLTEEELESIKSFNDQISLQDVTDIYLPLAHLIQIYKRTKEDLAFSKGIFLQRESKSQPFIIGVSGSVAVGKSTTSRLLQILLSRTFTDATVELVTTDGFLYPNQTLIEQGILNRKGFPESYDMEALLNFLDRIKNGQDVDIPVYSHEVYDIVPKKKQSVKAADFVIVEGINVFQNPQNDRLYITDFFDFSIYVDAGVDDIESWYLDRFLKMLSLAQNDPDSYYYRFTQMPIGEVESFAHQVWTSINLTNLQNYIEPTRNRAEVILHKSKNHEIDEIYLKK

SEQ ID NO: 2696 - protein, 78 aa, Streptococcus pneumoniae
LANIKSAIKRAELNVKQNEKNSAQKSAMRTAIKAFEANPSEELFRAASSAIDKAETKGLIHKNKASRDKARLSAKLAK

SEQ ID NO: 2697 - protein, 174 aa, Streptococcus pneumoniae
MKIAIIGYSGSGKSTLAEKLSNYYSIPKLHMDTLQFQPGWQDSDHEWMLTEIKNFLTKHKAWVIDGNYSWCYYQERMQEADQIIFLNFSPLTCLFRAFKRYLKYRGKVRESMAADCPERFDWEFIRWILWDGRSKTQKENYQKLCQEYSHKVTILRNQRELDQFLDKKRKSYNS

SEQ ID NO: 2698 - protein, 236 aa, Streptococcus pneumoniae
MSIHIAAQQGEIADKILLPGDPLRAKFIAENFLGDAVCFNEVRNMFGYTGTYKGHRVSVMGTGMGMPSISIYARELIVDYGVKKLIRVGTAGSLNEEVHVRELVLAQAAATNSNIVRNDWPQYDFPQIASFDLLDKAYHIAKELGMTTHVGNVLSSDVFYSNYFEKNIELGKWGVKAVEMEAAALYYLAAQYHVDALAIMTISDSLVNPDEDTTAEERQNTFTDMMKVGLETLIAE

SEQ ID NO: 2699 - protein, 170 aa, Streptococcus pneumoniae
VSAQITINHKKARYVRIELEGYNALSLAEVEVFRFIATNGETAIQVSKPVQPISQTPVKDKTLTIQHSGAYIARYSITWEEVPVDKDGNQVVRSHSWEGNGRNQTAGFVLNLPIKENMRNLRVKIEKKTGLLWNRWQTIYENRPILAQPHRKITHWGTILNSKVSDDDVL

SEQ ID NO: 2700 - protein, 191 aa, Streptococcus pneumoniae
LESRKLAVSGKIKHYVVDNDNVVTPLIHNNRDIVTFTGNSRFKHRSRGYFESPMNDIPNFNIGKQAILDKHGYRDPKLDKVRFFKKQALPRSSSQPSAEPMENIALGKQVTQSSTVFGGDARRAVDGKVDGNYGHNSVTHTNFQSKPWWQVDLAKEETIRQINIYNRTDTAQDRLANFDVILLDSSGKEIE

SEQ ID NO: 2701 - protein, 135 aa, Streptococcus pneumoniae
VVIGVLDSKEELKESENDAPKLETPLREEPRLAPQTLPEASEVLENKREESKVEITEPAQADDIRKVVGELAKDISITKLYMTGHSLGGYLAQIAAVEDYQKYPDFYNHVLRKVTTFSAPKVITSRTVWDAKNGF

SEQ ID NO: 2702 - protein, 269 aa, Streptococcus pneumoniae
MTFLNKIHETATFLKEKGIAAPEFGLILGSGLGELAEEIENPVVVDYAEIPNWGRSTVVGHAGKLVYGELAGRKVLALQGRFHFYEGNPLEVVTFPVRVMKVLGCEGVIVTNAAGGIRFGPGTLMAISDHINMTGQNPLMGENLDDFGPRFPDMSRAYTPEYRATAHEVAKKLNIKLDEGVYIGVTGPTYETPAEIRSYKTLGADAVGMSTVPEVIVAAHSGLKVLGISCITNFAAGFQEELNHEEVVEVTERVKGDFKGLLKAILAEL

SEQ ID NO: 2703 - protein, 180 aa, Streptococcus pneumoniae
MTRYALLVRGINVGGKNKVVMAELRQELTNLGLEKVESYINSGNIFFTSIDSKAQLVEKLETFFAVHYPFIQSFSLLSLEDFEAELENLPAWWSRDLARKDFLFYTEGLDVDQVIATVESLELKDEVLYFGKLGIFWGKFSEESYSKTAYQKYLLKVPFYRHITIRNAKTFDKIGQMLKK

SEQ ID NO: 2704 - protein, 403 aa, Streptococcus pneumoniae
MSKFNRIHLVVLDSVGIGAAPDANNFVNAGVPDGASDTLGHISKTVGLNVPNMAKIGLGNIPRETPLKTVAAESNPTGYATKLEEVSLGKDTMTGHWEIMGLNITEPFDTFWNGFPEEILTKIEEFSGRKVIREANKPYSGTAVIDDFGPRQMETGELIIYTSADPVLQIAAHEDIIPLDELYRICEYARSITLERPALLGRIIARPYVGEPGNFTRTANRRDLAVSPFSPTVLDKLNEAGIDTYAVGKINDIFNGAGINHDMGHNKSNSHGIDTLLKTMGLAEFEKGFSFTNLVDFDALYGHRRNAHGYRDCLHEFDERLPEIIAAMRENDLLLITADHGNDPTYAGTDHTREYIPLLAYSPAFKGNGLIPVGHFADISATVADNFGVETAMIGESFLDKLV

SEQ ID NO: 2705 - protein, 246 aa, Streptococcus pneumoniae
LNKKRFHSKIRTENDGGKSVENLKKMAGIKAAEFVSDGMVVGLGTGSTAYYFVEEIGRRIKEEGLQITAITTSSVTTKQAEGLNIPLKSIDQVDFVDVTVDGADEVDSQFNGIKGGGGALLMEKVVATPSKEYIWVVDESKLVEKLGAFKLPVEVVQYGAEQVFRHFERAGYKPSFREKDGQRFVTDMQNFIIDLALDVIENPIAFGQELDHVVGVVEHGLFNQMVDKVIVAGRDGVQISTSKKGK

SEQ ID NO: 2706 - protein, 61 aa, Streptococcus pneumoniae
KYAFYFYQTNKNEFIFDVFDLFISFQLRKQTLNFDTSSLALKQAHFKNHKLREGSRCICLF

SEQ ID NO: 2707 - protein, 290 aa, Streptococcus pneumoniae
MKVINQTLLEKVIIERSRSSHKGDYGRLLLLGGTYPYGGAIIVAALAAVKSGAGLVTVGTDRENIPALHSHLPEAMAFALQDKQLLKEQLEKAEVVLLGPGLGDDASGEDLVKQVFAGLKQNQILIVDGGALTILARTSLSFPSSQLILTPHQKEWEKLSGITIEKQKEDTTASALTSFPKGTILVEKGPATRVWQAGQSDYYQLQVGGPYQATGGMGDTLAGMIAGFVGQFRQASLYERVAVATHLHSAIAQELSQENYVVLPTEISRYLPKIMKIICQQERVSKDKLV

SEQ ID NO: 2708 - protein, 306 aa, Streptococcus pneumoniae
VLEGTCSFWYNGRYLKEKRSDMTQIIDGKALAAKLQGQLAEKTAKLKEETGLVPGLVVILVGDNPASQVYVRNKERSALAAGSRSEVVRVPETITQEELLDLIAKYNQDPAWHGILVQLPLPKHIDEEAVLLAIDPEKDVDGFHPLNMGRLWSGHPVMIPSTPAGIMEMFHEYGIDLEGKNAVVIGRSNIVGKPMAQLLLAKNATVTLAHSRTHNLAKVAAKADILVVAIGRAKFVTADFVKPGAVVIDVGMNRDENGKLCGDVDYEAVAPLASHITPVPGGVGPMTITMLMEQTYQAALRTLDRK

SEQ ID NO: 2709 - protein, 71 aa, Streptococcus pneumoniae
SATSRANPISCVTITIVIPDLARSCITANTSPTISGSKAEVGSSKSKTSGSIANPRAMAIRCCCPPDRLCG

SEQ ID NO: 2710 - protein, 244 aa, Streptococcus pneumoniae
MTETLIKIENLHKSFGKNEVLKGINLEIKRGEVVVIIGPSGSGKSTLLRSMNLLEEATKGKLIFEGVDITDKKNDLFAMREKMGMVFQQFNLFPNMTVMENITLSPIKTKGESREVAEKRAQELLEKVGLPDKADAYPQSLSGGQQQRIAIARGLAMEPDVLLFDEPTSALDPEMVGEVLAVMQDLAKSGMTMVIVTHEMGFAREVADRVIFMADGVVVEDGTPEQIFEQTQEQRTKDFLSKVL

SEQ ID NO: 2711 - protein, 127 aa, Streptococcus pneumoniae
LIGDKVIFSITVILGKRLNCWKTMPIFSRMANRSFFLSVISTPSKISFPLVASSNKFIERSKVDFPLPEGPMITTTSPLLISRLMPFNTSFFPKDLCKFSIFIKVSVIISYLLVPYVFQKLSRLLSE

SEQ ID NO: 2712 - protein, 227 aa, Streptococcus pneumoniae
MNFSFLPKYLPYFNYGAVVTILISICVIFLGTILGVVLAFGQRSKFKPLVWLANLNVWIFRGTPMMVPIMIAFALMHINAPTIQIGILGVDFSRLIPGILIISMNSGAYVSETVRAGINAVPKGQLEAAYSLGIRPKNAMRYVILPQAVKNILPALGNEFITIIKDSSLLSAIGVMELWNGATTVSTTTYLPLTPLLFAAFYYLIMTSILTVALKAFEKHMGQGDKK

SEQ ID NO: 2713 - protein, 76 aa, Streptococcus pneumoniae
MESHLVRIINRLEAMANDGGNLKRNFEREGVVVAEVAYSHDEENGPIFTLRDVEDRETYTFDSIDLIAMEIYELLY

SEQ ID NO: 2714 - protein, 752 aa, Streptococcus pneumoniae
MLCQNCKINDSTIHLYTNLNGKQKQIDLCQNCYKIIKTDPNNSLFKGMTDLNNRDFDPFGDFFNDLNNFRPSSNTPPIPPTQSGGGYGGNGGYGSQNRGSAQTPPPSQEKGLLKEFGINVTEIARRGDIDPVIGRDDEIIRVIEILNRRTKNNPVLIGEPGVGKTAVVEGLAQKIVDGDVPHKLQGKQVIRLDVVSLVQGTGIRGQFEERMQKLMEEIRKREDIILFIDEIHEIVGAGSASDGNMDAGNILKPALARGELQLVGATTLNEYRIIEKDAALERRMQPVKVDEPTVDETITILKGIQKKYEDYHHVQYTDAAIEAAATLSNRYIQDRFLPDKAIDLLDEAGSKMNLTLNFVDPKVIDQRLIEAENLKSQATREEDFEKAAYFRDQIAKYKEMQKKKITDQDTPIISEKTIEHIIEQKTNIPVGDLKEKEQSQLIHLAEDLKSHVIGQDDAVDKIAKAIRRNRVGLGTPNRPIGSFLFVGPTGVGKTELSKQLAIELFGSADSMIRFDMSEYMEKHSVAKLVGAPPGYVGYDEAGQLTEKVRHNPYSLILLDEVEKAHPDVMHMFLQVLDDGRLTDGQGRTVSFKDAIIIMTSNAGTGKTEASVGFGATREGRTNSVLGELGNFFSPEFMNRFDGIIEFKALSKDNLLQIVELMLADVNKRLSSNNIRLDVTDKVKEKLVDLGYDPKMGARPLRRTIQDYIEDTITDYYLENPSEKDLKAVMTSKGNIQIKSAKKAEVKSSEKEK

SEQ ID NO: 2715 - protein, 82 aa, Streptococcus pneumoniae
EVNGLVRQEAILDVAIGKSCSCFNRSIGILNVVVIFVFLLNPFENSDCFIHRWFIDFNRLHTTLEGSILFNDTVFIEGSSTD

SEQ ID NO: 2716 - protein, 60 aa, Streptococcus pneumoniae
MLLAKMMQSIRLPRLFAVIVSDLVPLTAQSEASSSLGQLVSVRQNFPNNWLSNFLVLLIV

SEQ ID NO: 2717 - protein, 69 aa, Streptococcus pneumoniae
MYSLISKRIILSAEPKSSIASCLESSVLPTPVGPTKRKLPIGRLGVPSPTRLRRIALAILSTASSWPIT

SEQ ID NO: 2718 - protein, 113 aa, Streptococcus pneumoniae
LVAGLTNGELIAPITYEEMMTSDFFEAWFQKFLLPTLTTPSVIIMDNARFHRMGKLELLCEEFGHKLLPLPPYSPEYNPIEKTWAHIKKHLKKVLPSCCNTFYEALLSCSCFN

SEQ ID NO: 2719 - protein, 115 aa, Streptococcus pneumoniae
MWYNLFMAYSIDFRKKVLSYCERTGSITEASHVFQISRNTIYGWLKLKEKTGELNHQVKGTKPRKVDRDRLKNYLTDNPDAYLTEIASEFGCHPTTIHYALKAMGYTRKKEPQLL

SEQ ID NO: 2720 - protein, 140 aa, Streptococcus pneumoniae
VNTDYIARYGVYAVIPNPEQKQIVLVQEPNGAWFLPCGKIEAGENHQEALKRELIEELGFTAEIGTYYGQADEYFYSRHRDAYYYNPAYLYEATPFKEVQKPLENFNHIAWFPIDEAIKNLKRGSHKWAIESWKKQHKID

SEQ ID NO: 2721 - protein, 99 aa, Streptococcus pneumoniae
MKLINTTNSHSQLVKSQLESTDATLVEVYSAGNTDVIFTQAPLHYEILISNKHRAIREPEIETIQEFFLKRKIDKASVDEANIKTLYSEKLIGISIPIK

SEQ ID NO: 2722 - protein, 197 aa, Streptococcus pneumoniae
KYSIYKLKCDRNENKGDVGKKAENLIQGQFEGSKTMEQCYIDVTEFAIPASTQKLYLSPVLDGFNSEIIAYNLSTSPNLEQVQTMLEQAFKEKHYENTILHSDQGWQYRHDSYHRFLESKGIQASMSRKGNSPDNGMMESFFGILKSEMFYGYEKSFQSLKQLEQAIVDYIDYYNNKRIKVKLKGLSPVQYRTKSFG

SEQ ID NO: 2723 - protein, 87 aa, Streptococcus pneumoniae
FSLDLLLKAIKLARSTYYYHLKQLDKTDKDQELKAEIQSIFIEHKGNYAYRRIYLELRNRAYLVNYKRVQGLMKVLNLQAKMRQKRK

SEQ ID NO: 2724 - protein, 33 aa, Streptococcus pneumoniae
MIKLIDRYGIEFGKKGKNRYYSPDLKQEMIHKV

SEQ ID NO: 2725 - protein, 116 aa, Streptococcus pneumoniae
MIIQLSDLGQVHLVCSKIDMRQGIDSLAYVVKTHFELDPFSGQVFLFCGGRKDRFKALYWDGQGFWLLYKRFENGRLTWPSTEKDVKALTPEQVDWLMKGFSITPKINPSESRDFY

SEQ ID NO: 2726 - protein, 101 aa, Streptococcus pneumoniae
LLWTHTGESFFLIAGGCNTEWMNVFLEELSQAYPDDYLLFVMDNAIWHKSSTLKIPTNIGFAFIPPYTPEMNPIEQVWKEIRKRGFKNKAFQTLEDVMNQL

SEQ ID NO: 2727 - protein, 88 aa, Streptococcus pneumoniae
MTVGEEKAFLARHLKATEAGEFVTIDALFQAYKKELGRSYTRDAFYQLLKRHGWRNIMPRPEHPRKTDAQTIVASKNKISIQEEKKAL

SEQ ID NO: 2728 - protein, 575 aa, Streptococcus pneumoniae
MSNGQLIYLMVAIAVILVLAYVVAIFLRKRNEGRLEALEERKEELYNLPVNDEVEAVKNMHLIGQSQVAFREWNQKWVDLSLNSFADIENNLFEAEGYNHSFRFLKASHQIDQIESQITLIEEDIAAIRNALADLEKQESKNSGRVLHALDLFEELQHRVAENSEQYGQALDEIEKQLENIQSEFSQFVTLNSSGDPVEAAVILDNTENHILALSHIVDRVPALVTTLSTELPDQLQDLEAGYRKLIDANYHFVETDIEARFHLLYEAFKKNQENIRQLELDNAEYENGQAQEEINALYDIFTREIAAQKVVENLLATLPTYLQHMKENNTLLGEDIARLNKTYLLPETAASHVRRIQTELESFEAAIVEVTSNQEEPTQAYSVLEENLEDLQTQLKDIEDEQISVSERLTQIEKDDINARQKANVYVNRLHTIKRYMEKRNLPGIPQTFLKLFFTASNNTEDLMVELEQKMINIESVTRVLEIATNDMEALETETYNIVQYATLTEQLLQYSNRYRSFDERIQEAFNEALDIFEKEFDYHASFDKISQALEVAEPGVTNRFVTSYEKTRETIRF

SEQ ID NO: 2729 - protein, 648 aa, Streptococcus pneumoniae
MTEEIKNLQAQDYDASQIQVLEGLEAVRMRPGMYIGSTSKEGLHHLVWEIVDNSIDEALAGFASHIQVFIEPDDSITVVDDGRGIPVDIQEKTGRPAVETVFTVLHAGGKFGGGGYKVSGGLHGVGSSVVNALSTQLDVHVHKNGKIHYQEYRRGHVVADLEIVGDTDKTGTTVHFTPDPKIFTETTIFDFDKLNKRIQELAFLNRGLQISITDKRQGLEQTKHYHYEGGIASYVEYINENKDVIFDTPIYTDGEMDDITVEVAMQYTTGYHENVMSFANNIHTHEGGTHEQGFRTALTRVINDYARKNKLLKDNEDNLTGEDVREGLTAVISVKHPNPQFEGQTKTKLGNSEVVKITNRLFSEAFSDFLMENPQIAKRIVEKGILAAKARVAAKRAREVTRKKSGLEISNLPGKLADCSSNNPAETELFIVEGDSAGGSAKSGRNREFQAILPIRGKILNVEKASMDKILANEEIRSLFTAMGTGFGAEFDVSKARYQKLVLMTDADVDGAHIRTLLLTLIYRYMKPILEAGYVYIAQPPIYGVKVGSEIKEYIQPGADQEIKLQEALARYSEGRTKPTIQRYKGLGEMDDHQLWETTMDPEHRLMARVSVDDAAEADKIFDMLMGDRVEPRREFIEENAVYSTLDV

SEQ ID NO: 2730 - protein, 190 aa, Streptococcus pneumoniae
MKGMKYHDYIWDLGGTLLDNYETSTAAFVETLALYGITQDHDSVYQALKVSTPFAIETFAPNLENFLEKYKENEARELEHPILFEGVSDLLEVISNQGGRHFLVSHRNDQVLEILEKTSIAAYFTEVVTSSSGFKRKPNPESMLYLREKYQISSGLVIGDRPIDIEAGQAAGLDTHLFTSIVNLRQVLDI

SEQ ID NO: 2731 - protein, 184 aa, Streptococcus pneumoniae
MVKVAVILAQGFEEIEALTVVDVLRRANITCDMVGFEEQVTGSHAIQVRADHVFDGDLSDYDMIVLPGGMPGSAHLRDNQTLIQELQSFEQEGKKLAAICAAPIALNQAEILKNKRYTCYDGVQEQILDGHYVKETVVVDGQLTTSRGPSTALAFAYELVEQLGGDAESLRTGMLYQDVFGKNQ

SEQ ID NO: 2732 - protein, 416 aa, Streptococcus pneumoniae
LYESIRLVYMKRSLDSRVDYSLLLPVFFLLVIGVVAIYIAVSHDYPNNILPILGQQVAWIALGLVIGFVVMLFNTEFLWKVTPFLYILGLGLMILPIVFYNPSLVASTGAKNWVSINGITLFQPSEFMKISYILMLARVIVQFTKKHKEWRRTVPLDFLLIFWMILFTIPVLVLLALQSDLGTALVFVAIFSGIVLLSGVSWKIIIPVFVTAVTGVAGFLAIFISKDGRAFLHQIGMPTYQINRILAWLNPFEFAQTTTYQQAQGQIAIGSGGLFGQGFNASNLLIPVRESDMIFTVIAEDFGFIGSVLVIALYLMLIYRMLKITLKSNNQFYTYISTGLIMMLLFHIFENIGAVTGLLPLTGIPLPFISQGGSAIISNLIGVGLLLSMSYQTNLAEEKSGKVPFKRKKVVLKQIK

SEQ ID NO: 2733 - protein, 816 aa, Streptococcus pneumoniae
MKTIGNRYVVVDLEATSTGSKAKIIQVGIVVIEDGEIVDHYTTDVNPHEPLDAHIKELTGLTDQRLAQAPDFSQVARKIFDLVEDGIFVAHNVQFDANLLAENLFFEGYELRNPRVDTVELAQVFFPELEKYSLPILCRELGIPLKHAHTALSDAQATAELLLFLREKMTQLPKGLLERLLEMADALLYESYLVIEETYRNQSILSSPDLVQVQGLYFKKTAASLELRKLSQDFSKNISLLNLEVREEQESFAKEVGLLLKDEPVFLIQAPTGIGKTYGYLLPALSQSKERQIVLSVPTKILQNQIMEEEGKRLKEVFHTDIHSLKGPQNYLKLDAFYHSLQENDENRLFRRFKMQVLVWLTETETGDLDEIGQLYRYQHFLADLRHDGNLSSQSLFVTEDFWKRSQERAETCKLLVTNHAYLVTRLEDNPEFVSDRLLIIDEVQKILLALENLLQETYDIQSIIDLIDKALVGEENRVQQRILESIRFECLYLIEQFQSGKSRKNILDSLDNLHQYFSELEVEGFDELVRYFTAEGDYWLEVTETSQKKIQISSTKSGRTLLSSLLPESCQVLGVSATLEISQRVSLADLLGYPEAKFVKIESRGKQEQEVVMVKDFPLVTETSLEVYAREVAALLVEIQAFQQPILVLFTAKDMLLAVSDLLTVSHLAQYKNGDVHQLKKRFEKGEQQILLGAASFWEGVDFSSHPFVIQVVPRLPFQNPQEPLTKKINQELNQEGKNAFYDYQLPMAIIRLKQALGRSMRREYQRSLTLILDRRIVGKRYGKQIVASLAEEATVKTISRSEVDEAIDRFFNEL

SEQ ID NO: 2734 - protein, 309 aa, Streptococcus pneumoniae
MEKIVITATAESIEQVEQLLEAGVDRIYVGEKDFGLRLPTTFSYDQLREIAKLVHDAGKELIVAVNALMHQDMMDRIKPFLDFLEEIKTDYITIGDAGVFYVVNRDGYSFKTIYDASTMVTSSRQINFWGQKAGASEAVLAREIPSAELFKMPEILEIPAEVLVYGASVIHHSKRPLLQNYYNFTHIDDEKTHKRDLFLAEPSDPESHYSIFEDNHGTHIFANNDLDLMIKLTELVEHGFTRWKLEGLYTPGQNFVEIAKLFIQARNLIQEGNFSHDQVFLLDEEVRKLHPKNRFLDTGFYDYDPDMVR

SEQ ID NO: 2735 - protein, 95 aa, Streptococcus pneumoniae
MPVRKLQSYEVDYQEELNQQLPHYQAYTPEAQSDANLKEILFFINIAVFCICIAIFSFIFLALKLSTALAFAAAIGFSLLVLKVQRSIIKRKRRR

SEQ ID NO: 2736 - protein, 444 aa, Streptococcus pneumoniae
MFSKLKKTWYADDFSYFIRNFGVFTLIFSTMTLIILQVMHSSLYTSVDDKLHGLSENPQAVIQLAINRATEEIKDLENARADASKVEIKPNVSSNTEVILFDKDFTQLLSGNRFLGLDKIKLEKKELGHIYQIQVFNSYGQEEIYRVILMETNISSVSTNIKYAAVLINTSQLEQASQKHEQLIVVVMASFWILSLLASLYLARVSVRPLLESMQKQQSFVENASHELRTPLAVLQNRLETLFRKPEATIMDVSESIASSLEEVRNMRFLTTSLLNLARRDDGIKPELAEVPTSFFNTTFTNYEMIASENNRVFRFENRIHRTIVTDQLLLKQLMTILFDNAVKYTEEDGEIDFLISATDRNLYLLVSDNGIGISTEDKKKIFDRFYRVDKARTRQKGGFGLGLSLAKQIVDALKGTVTVKDNKPKGTIFEVKIAIQTPSKKKK

SEQ ID NO: 2737 - protein, 224 aa, Streptococcus pneumoniae
MIKILLVEDDLGLSNSVFDFLDDFADVMQVFDGEEGLYEAESGVYDLILLDLMLPEKNGFQVLKELREKGITTPVLIMTAKESLDDKGHGFELGADDYLTKPFYLEELKMRIQALLKRSGKFNENTLTYGNIVVNLSTNTVKVEDTPVELLGKEFDLLVYFLQNQNVILPKTQIFDRLWGFDSDTTISVVEVYVSKVRKKLKGTTFAENLQTLRSVGYLLKDVQ

SEQ ID NO: 2738 - protein, 848 aa, Streptococcus pneumoniae
MQAVEHFIKQFVPEHYDLFLDLSRETKTFSGKVTITGQAQSDRISLHQKDLEITSVEVAGQARPFTVDHDNEALHIELAEAGQVELVLAFSGKITDNMTGIYPSYYTVDGVKKEVLSTQFESHFAREAFPCVDEPEAKATFDLSLRFDQAEGELALSNMPEIDVENRKETGIWKFETTPRMSSYLLAFVAGDLQGVTAKTKNGTLVGVYSTKAHPLSNLDFSLDIAVRSIEFYEDYYGVKYPIPQSLHIALPDFSAGAMENWGLVTYREVYLVVDENSTFASRQQVALVVAHELAHQWFGNLVTMKWWDDLWLNESFANMMEYVCVDTIEPSWNIFEDFQTGGVPLALERDATDGVQSVHVEVKHPDEINTLFDGAIVYAKGSRLMHMLRRWLGDADFAKGLHAYFEKHQYSNTIGSDLWDALGQASGRDVAAFMDSWLEQPGYPVLTVKVENDVLKISQKQFFIGENEDKNRLWVVPLNSNWKGLPDTLETESIEIPGYAALLAENEGALRLNTENTAHYITDYQGDLLEAVLAELETLDNTSKLQIVQERRLLAEAGHISYADLLPVLDKLAKEESYLVVSAVSQVISALERFIDEGTDAETAFKGLVAKLARHNYDRLGFEAKDGESDEDELVRQLAVSMMIRSNDAEARQVASQIFATHKENLAELPAAIRSQVLINEMKHHETKDLLALYLDTYTHATDAVFKRQLTAALAYSTDADNIQNLITSWKDKFVVKPQDLSAWYYQFLAHQATQKTAWSWARENWAWIKAALGGDMSFDSFVILPAHVFKTQQRLAEYKEFFEPQLSDLALSRNIGMGIKEIAARVDLISREKAAVEAVVLQYGNA

SEQ ID NO: 2739 - protein, 146 aa, Streptococcus pneumoniae
MIPQEMWNKYKQINPLIGDEIDAWAFGVEPDLLADLVFKGEKTATASAYDLYVLEDEPLPQVGTFDIILDSQNQSVCIVEITKVSVELFNQVSAQHAFKEGEGDKSLAYWRQVHEDFFTDCLGEVGLTFTSESKVVLEEFRKVYPL

SEQ ID NO: 2740 - protein, 291 aa, Streptococcus pneumoniae
MAMRNQLALSGEKILEKIYPQLFHHVGMIRGEYLLRELNQNIILASCQQFVKDYLETICSLYSDEEVWYRFSELTNTEANCLVGTREFFDEGHPLFGYRGTRRLLACLDEFQAEAHVVTEVYQTNPNLSVIFPFVNDDDQLKQAITVLRQQGFTGKVGTMIELPSAYFDLSSILETGISKIVVGMNDLTSFVFATMRNSQWHDMESPIMLDMLRDMQDKARKNKIDFAVAGYLNTSFIQKMNQLGIKCIIHYSSIPEIFDLEIDHPDHLKHIKEESKKLQRSTHDTARNVE

SEQ ID NO: 2741 - protein, 242 aa, Streptococcus pneumoniae
MELFKTWKKNMVLYGLKSQIGTVYRNNDRTTSFYDVGNFLYLAGELDSRFWEDFVRKYGLDYKIIISENTNWQDFLHRKVGLNSFTRYSFKDKANFQVEFLNNLVTHLEEGYNIVPIDNHIYNCFSTEEWSQDLQGDFESYQDFVLKGGFGFVILKNNELIAGISSGLVYRKAVEVEVATRPNEQGNGFAKKLGAAMILESLNRDMFPLWDAHNEASKKVAEFLGYELSEPYEAFELEEILI

SEQ ID NO: 2742 - protein, 159 aa, Streptococcus pneumoniae
MEIKNHFGVYCVCFENGKLLCIEKTRGPYQHRYDLPGGSQQLGEGLTETLTREVMEETGFTVRSYSNPRIYDVFVREELKNFMVHHVMALYDVEMNESAPQVTISEAVSDGANDSLGYIWMDIQEITEENASPLVLKVKSELLGFPELDKTSYMNWKVK

SEQ ID NO: 2743 - protein, 75 aa, Streptococcus pneumoniae
SFFSKWKSERHARTNLDNRWWLVFEVGGVGWKSKITLGSTVFALKMESYFVLKKREALINIGMIYLEAVSNLVKD

SEQ ID NO: 2744 - protein, 232 aa, Streptococcus pneumoniae
MTKRVLITGVSSGIGLAQARLFLEKGYQVYGVDQGEKPLLEGDFHFLQRDLTLDLEPIFDWCPQVDVLCNTAGVLDDYKPLLEQTAQDIQEIFEINYIIPVELTRYYLTQMLENKKGIIINMCSIASSLAGGGGHAYTSSKHALAGFTKQLALDYAEAGIQVFGIAPGAVKTAMTAADFEPGGLADWVASETPIKRWIEPEEIAELSLFLASGKASAMQGQILTIDGGWSLK

SEQ ID NO: 2745 - protein, 88 aa, Streptococcus pneumoniae
MKNVELKEKNMTFEEILPGLKAKRKYVRTGWGGAENYVQLFDTIEQNGLALEMTPYFLINVSGEGEGFSMWSPTVCDVLATDWVEVHD

SEQ ID NO: 2746 - protein, 308 aa, Streptococcus pneumoniae
MRYITLGQDDKELSEIVLGMMRIKDKSVKEVEELVETALSVGINAFDLADIYGRGRCEELLGLVLKNRPDLREKMWIQSKCGIRIEEFTYFDFSKDYIIKSVDGILQRLKIDHLDSLLLHRPDALMESDQVAEAFDLLYKQGKVRDFGVSNQNPMMMELLKKDVKQPLAVNQLQLSAAFTPGFESAFHVNMEDSQAAMRDGSIFEYCKLHDVVIQAWSVLQFGYFKGNFVGNEKFQALNQVLDRLAIKYGVTSSTIAISWILRYPAKMQAVVGTTNPKHLREVSQAANFSLTRKEWYEIYLAAGNNLP

SEQ ID NO: 2747 - protein, 271 aa, Streptococcus pneumoniae
MKKMKYYEETSALLHEFSEENQKYFEELWESFNLAGFLYDEDYLREQIYLMMLDFSEAERDGMSAEDYLGKNPKKIMKEILKGAPRSSIKESLLTPILVLVVLRYYQLLSDFSKGPLLTVNLLTFLGQLLIFLIGFGLVATILRRSLVQDSPKMKIGTYIVVGTIVLLVVLGYVGMASFIQEGAFYIPAPWDSLSVFTISLVIGIWNWKEAVFRPFVSMIIAHLVVGSLLRYYEWMGISNVFLTKVIPLAVLFIGIFVLFRGFKKIKWSEV

SEQ ID NO: 2748 - protein, 71 aa, Streptococcus pneumoniae
VMKETQLLKGVLEGCVLDMIGQKERYGYELVQTLREAGFDTIVPGTIYPLLQKLEKNQWIRGDMRRRRWSR

SEQ ID NO: 2749 - protein, 78 aa, Streptococcus pneumoniae
MKIKEQTRKLAAGCSKHCFEVVDRTDEVSSKHVFEVVDETDEVSSKHCFEVVDETDEVSNHTYGRATLTWFEEIFEEY

SEQ ID NO: 2750 - protein, 81 aa, Streptococcus pneumoniae
YSSKISSNHVSVALPYVWLLTSSVSSTTSKQCFELTSSVSSTTSKTCFELTSSVLSTTSKQCFEQPAASFLVCSLIFIEYK

SEQ ID NO: 2751 - protein, 679 aa, Streptococcus pneumoniae
VLEKQVSFAWKGKIMSEKNFYITTPIYYPSGKLHIGSAYTTIACDVLARYKRLMGYDVFYLTGLDEHGQKIQQKAEEAGITPQAYVDGMAVGVKELWQLLDISYDKFIRTTDDYHEKVVAQVFERLLAQDDIYLGEYSGWYSVSDEEFFTESQLAEVFRDEAGNVTGGIAPSGHEVEWVSEESYFLRLSKYQDRLVEFFKAHPEFITPDGRLNEMLRNFIEPGLEDLAVSRTTFTWGVPVPSNPKHVVYVWIDALLNYATALGYAQDEHGNFDKFWNGTVFHMVGKDILRFHSIYWPILLMMLDVKLPDRLIAHGWFVMKDGKMSKSKGNVVYPEMLVERYGLDPLRYYLMRNLPVGSDGTFTPEDYVGRINYELANDFGNLLNRTFSMINKYFDGQIPAYVEGVTEFDHVLAEVAEQSIADFHTHMEAVDYPRALEAVWTLISRTNKYIDETAPWVLAKDEALRDQLASVMSHLAASIRVVAHLIEPFMMETSRAVLTQLGLEEVSSLENLSLADFPADVTVVAKGTPIFPRLNMEEEIAYIKEQMEGNKPAVEKEWNPDEVELKLNKDEIKFEDFDKVEIRVAEVKEVSKVEGSDKLLQFCLDAGDGEDRQILSGIAKYYPNEQELVGKKVQIVANLKPRKMMKKYVSQGMILSAEHDGKLTLLTVDPAVPNGSVIG

SEQ ID NO: 2752 - protein, 419 aa, Streptococcus pneumoniae
MQNLKFAFSSIMAHKMRSLLTMIGIIIGVSSVVVIMALGDSLSRQVNKDMTKSQKNISVFFSPKKSKDGSFTQKQSAFTVSGKEEEVPVEPPKPQESWVQEAAKLKGVDSYYVTNSTNAILTYQDKKVENANLTGGNRTYMDAVKNEIIAGRSLREQDFKEFASVILLDEELSISLFESPQEAINKVVEVNGFSYRVIGVYTSPEAKRSKIYGFGGLPITTNISLAANFNVDEIANIVFRVNDTSLTPTLGPELARKMTELAGLQQGEYQVADESVVFAEIQQSFSFMTTIISSIAGISLFVGGTGVMNIMLPSVTERTREIGLRKALGAQRANILIQFLIESMILTLLGGLIGLTIASGLTALAGLLLQGLIEGIEVGVSIPVALFSLAVSASVGMIFGVLPANKASKLDPIEALRYE

SEQ ID NO: 2753 - protein, 233 aa, Streptococcus pneumoniae
MKQLISLKNIFRSYRNGDQELQVLKNINLEVNEGEFVAIMGPSGSGKSTLMNTIGMLDTPTSGEYYLEGQEVAGLGEKQLAKVRNQQIGFVFQQFFLLSKLNALQNVELPLIYAGVSSSKRRKLAEEYLDKVELTERSHHLPSELSGGQKQRVAIARALVNNPSIILADEPTGALDTKTGNQIMQLLVDLNKEGKTIIMVTHEPEIAAYAKRQIVIRDGVISSDSAQLGKEEN

SEQ ID NO: 2754 - protein, 399 aa, Streptococcus pneumoniae
MKKKNGKAKKWQLYAAIGAASVVVLGAGGILLFRQPSQTALKDEPTHLVVANEGSVASSVLLSGTVTAKNEQYVYFDASKGDLDEILVSVGDKVSEGQALVKYSSSEAQAAYDSASRAVAKADRHINELNQARNEAASAQAPQLPAPVGGEDATVQSPTPVAGNSVASIDAQLGDARDARADAAAQLSKAQSQLDATTVLSTLEGTVVEVNSNVSKSPTGASQVMVHIVSNENLQVKGELSEYNLANLSVGQEVSFTSKVYPDKKWTGKLSYISDYPKNNGEAASPAAGNNTGSKYPYTIDVTGEVGDLKQGFSVNIEVKSKTKAILVPVSSLVMDDSKNYVWIVDEQQKAKKVEVSLGNADAENQEITSGLTNGAKVISNPTSSLEEGKEVKADEATN

SEQ ID NO: 2755 - protein, 448 aa, Streptococcus pneumoniae
MREYDIIAIGGGSGGIATMNRAGEHGAKAAVIEEKKLGGTCVNVGCVPKKIMWYGAQIAETFHQFGEDYGFKTTDLNFNFATLRRNREAYIDRARSSYDGSFKRNGVDLIEGHAEFVDSHTVSVNGELIRAKHIVIATGAHPSIPNIPGAELGGSSDDVFAWEELPESVAILGAGYIAVELAGVLHTFGVKTDLFVRRDRPLRGFDSYIVEGLVKEMERTNLPLHTHKVPAKLEKTTDGITIHFEDGTSHTASQVIWATGRRPNVKGLQLEKAGVTLNERGFIQVDEYQNTVVEGIYALGDVTGEKELTPVAIKAGRTLSERLFNGKTTAKMDYSTIPTVVFSHPAIGTVGLTEEQAIKEYGQDQIKVYKSSFASMYSACTRNRQESRFKLITAGSEEKVVGLHGIGYGVDEMIQGFAVAIKMGATKADFDATVAIHPTSSEEFVTMR

SEQ ID NO: 2756 - protein, 178 aa, Streptococcus pneumoniae
LKKAHVYAIPAIGAALIAVLAQISLPIGPVPFTLQNFAIGLIATVFRPREAVLSAGLYLLLGAIGLPVFAGGGAGFQALVGPTAGYLWFYLVYSGLTSSLTNSKSGVVKIFLANLLGDALVFVGGILSLHFLAGMAFEKALVVGVLPFIIPDLGKLLAISFISRPLLQRLKNQTYFTN

SEQ ID NO: 2757 - protein, 111 aa, Streptococcus pneumoniae
LKKLLLWGFFPLSFQTLANFWLLVLLAVPYFNALKIRLTLLTKKGYRVIMTQYPFFYFENLYSMKIKEQTRKLAAGCSKHCFEVVDETDEVSNHTYGKAKLMRFEEIFEEY

SEQ ID NO: 2758 - protein, 79 aa, Streptococcus pneumoniae
MKLKKEKKMAEFTFEIEEHLLTLSENEKGWTKEINRVSFNGAPAKFDIRAWSPDHTKMGKGITLSNEEFQTMVDAFKGN

SEQ ID NO: 2759 - protein, 106 aa, Streptococcus pneumoniae
MRHKFQQVLDKIHDFLNGHDQPDQTETNSLTATIEEAIQKQTAVHLILSETSFTGDIIKYDQQGQQIIVKNFSKNVSRIIRISDIQRLRFVPSTVQTAQKNRFKKE

SEQ ID NO: 2760 - protein, 112 aa, Streptococcus pneumoniae
MQVIKRNGEIAEFNPDKIYQAILKAAQTVYVLTDDLRQNLAQVTKKVVLDLQEAKVERATISMIQSMVEHRLLGAGYITIAEHYISYRLQRDLERSGYGDHIAVHLHFEQIR

SEQ ID NO: 2761 - protein, 239 aa, Streptococcus pneumoniae
MKIDILTLFPEMFSPLEHSIVGKAREKGLLDIQYHNFRENAEKARHVDDEPYGGGQGMLLRAQPIFDSFDAIEKKNPRVILLDPAGKQFDQAYAEDLAQEEELIFICGHYEGYDERIKTLVTDEISLGDYVLTGGELAAMTMIDATVRLIPEVIGKESSHQDDSFSSGLLEYHQYTRPYDYRGMVVPDVLMSGHHEKIRQWRLYESLKKTYERRPDLLEHYQLTVEEEKMLAEIKENKE

SEQ ID NO: 2762 - protein, 172 aa, Streptococcus pneumoniae
MNYFNVGKIVNTQGLQGEMRVLSVTDFAEERFKKGAELALFDEKDQFVQTVTIASHRKQKNFDIIKFKDMYHINTIEKYKGYSLKVAEEDLNDLDDGEFYYHEIIGLEVYEGDSLVGTIKEILQPGANDVWVVKRKGKRDLLLPYIPPVVLNVDIPNKRVDVEILEGLDDED

SEQ ID NO: 2763 - protein, 266 aa, Streptococcus pneumoniae
VDFFMKRFEVSTEIGSLSVAYQKQKKVLVCLNGAGLLPSYENFSLILEKPPPTIGYLTIDFPNTGRSPIYDQAGKNLDNLADVVYEALEELGISEYILCVHSWSGILACKLLEKPIKCQTLVVIEPTTKKVMFADFSENPYPEMEEQMRLIDECGPELYFKNLTQATFSPETNKKIWELMQEKGLELENQDPEFQISGEITEEDFENLSIESHVPVFIFCQTYREKEYRESEYWTSNTKLILGGNHHYLQWSESEKIAAIIRELSE

SEQ ID NO: 2764 - protein, 79 aa, Streptococcus pneumoniae
MDTIENLIIAIVKPLISQPDALTIKIEDTPEFLEYHLNLDQSDVGRVIGRKGRTISAIRTIVYSVPTEYKKVRIVIDEK

SEQ ID NO: 2765 - protein, 90 aa, Streptococcus pneumoniae
MAVKIRLTRMGSKKKPFYRINVADSRSPRDGRFIETVGTYNPLVAENQVTLKEDRVLAWLANGAQPSDTVRNILSKEGVLKKFHDSKFSK

SEQ ID NO: 2766 - protein, 69 aa, Streptococcus pneumoniae
MLSVNTILEKFYKEHQVKPFISPERELDTWLLSPKPVPKRNMDLLVDDSLAGDIILLWRIQFGTFTTET

SEQ ID NO: 2767 - protein, 134 aa, Streptococcus pneumoniae
FLAFRELASFTSFLKIWFPKYFEYTYGIDAPKHLKTLVEKGYALVETSFDSLDHLNTTMKKNILKKKGVTGLSKMKSCDLDQALHEHFSEEELAGHFHVLLWTFLQWHCYHTQYLSKRLVRKLYCSSSSKFPNC

SEQ ID NO: 2768 - protein, 70 aa, Streptococcus pneumoniae
MSFYGLFYNGIAITPNTYLSAWFVNFIAALPLNFLIVEPIARFILSSFQKPFTGEEVEDFQDDDEIPTII

SEQ ID NO: 2769 - protein, 267 aa, Streptococcus pneumoniae
MKKLATLLLLSTVALAGCSSVQRSLRGDDYVDSSLAAEESSKVAAQSAKELNDALTNENANFPQLSKEVAEDEAEVILHTSQGDIRIKLFPKLAPLAVENFLTHAKEGYYNGITFHRVIDGFMVQTGDPKGDGTGGQSIWHDKDKTKDKGTGFKNEITPYLYNIRGALAMANTGQPNTNGSQFFINQNSTDTSSKLPTSKYPQKIIEAYKEGGNPSLDGKHPVFGQVIGGMDVVDKIAKAEKDEKDKPTTAITIDSIEVVKDYDFKS

SEQ ID NO: 2770 - protein, 120 aa, Streptococcus pneumoniae
TRVSTFFVGFDNFLWILACREFRRGICRVLVDEELAAIGVWLTSISHSKSTADVIQIRSNLVLETSSFVFSLILVMPDGLTTCTVPFWISSLDHKAIDDTVEGNTVIVAFFGVSEEIFNR

SEQ ID NO: 2771 - protein, 513 aa, Streptococcus pneumoniae
MSILEVKNLSHGFGDRAIFEDVSFRLLKGEHIGLVGANGEGKSTFMSIVTGKMLPDEGKVEWSKYVTAGYLDQHSVLAERQSVRDVLRTAFDELFKAEARINDLYMEMAEDGADVDALMEEVGELQDRLESRDFYTLDAKIDEVARALGIMDFGMDTDVTSLSGGQRTKVLLAKLLLEKPDILLLDEPTNYLDAEHIDWLKRYLQNYENAFVLISHDIPFLNDVINIVYHVENQQLTRYSGDYYQFQEVYAMKKSQLEAAYERQQKEIADLKDFVARNKARVATRNMAMSRQKKLDKMDIIELQSEKPKPSFDFKPARTPGRFIFQAKNLQIGYDRPLTKPLNLTFERNQKVAIIGANGIGKTTLLKSLLGIISPIAGEVERGDYLELGYFEQEVEGGNRQTPLEAVWNAFPALNQAEVRAALARCGLTTKHIESQIQVLSGGEQAKVRFCLLMNRENNVLVLDEPTNHLDVDAKDELKRALKEYRGSILMVCHEPDFYEGWIDQIWDFNNLT

SEQ ID NO: 2772 - protein, 160 aa, Streptococcus pneumoniae
MMKKTYNHILVWGVIFYSICIVYFCFTPQEQSTVGVGTPDIQHLGRLVFLLTPFNSLWKLGEVSDIGQLCWIFLQNILNVFLFFPLIFQLLYLFPNLRKTKKVLLFSFLVSLGIECTQLILDFFFDFNRVFEIDDLWTNTLGGYLAWLLYKRLHKNKIRN

SEQ ID NO: 2773 - protein, 361 aa, Streptococcus pneumoniae
MKPSIHSLAHQTMQEWVLEQGEKKFRADQIWEWLYRKRVQSFEEMTNLSKDLIAKLNDQFVVNPLKQGIVQESADGTVKYLFELPDGMLIETVLMRQHYGLSVCVTTQVGCNIGCTFCASGLIKKQRDLNNGEIVAQIMLVQKYFAERGQDERVSHIVVMGIGEPFDNYNNVLNFFRTINDDKGMAIGARHITVSTSGLAHKIRDFADEGVQVNLAVSLHAPNNELRSSIMKINRAFPIEKLFAAIEYYIETTNRGVTFEYIMLNEVNDGVEQALELTELLKNIKKLSYVNLIPYNPVSEHDQYSRSPKERVLAFYDTLKKKGVNCVVRQEHGTDIDAACGQLRSNTMKRDRQKAVAAVNP

SEQ ID NO: 2774 - protein, 176 aa, Streptococcus pneumoniae
MRKEIAPELYNYNKFPGPEFHLHGDKVETEGIAFSLVENIKDAFDVTTFNQRFSEVLTKFDYIVGDWSNEQLRLRGFYKDDRTEEKLEKISRLQDYLLEYCSYGCAYFVLENEAPKRASFDKKMRKTEEETPSRKGKKPTQTKRKSNADKKNRRRQKDQHSQKEDKGQRHFVIRQK

SEQ ID NO: 2775 - protein, 201 aa, Streptococcus pneumoniae
MAIILPELPYAYDALEPYIDAETMHLHHDKHHQTYVNNANAALEKHPEIGEDLEALLADVESIPADIRQALINNGGGHLNHALFWELMTPEKTAPSAELAAAIDATFGSFEEFQAAFTAAATTRFGSGWAWLVVNKEGKLEVTSTANQDTPISEGKKPILGLDVWEHAYYVKYRNVRPDYIKAFFSVINWNKVDELYAAAK

SEQ ID NO: 2776 - protein, 345 aa, Streptococcus pneumoniae
MLAIEESQKLTLSNLPSLSLFTGTDQGQFEVMKSQVLKQIGYDSADLNFAYFDMKEVVYKDVELELVSLPFFADEKIVILDYFMDITTAKKRFLTDDELKSFEEYLDNSSPTTKLIIFAEGKLDSKRRLVKLLKRDAKVFDAVEVKEQELRQYFQKWSQKQGLQFTNHSFENLLIKSGFQFSEIQKNLLFLQSYKANSVIEEEDIVNAIPKTLQDNIFDLTQFILTKKMDQARDLVRDLTLQGEDEIKLIAVMLGQFRTFTQVKILAESGQTESQIASSLGSYLGRNPNPYQIKFALRDSRGLSLSFLKQAISYLIETDYQIKTGLYEKGFLFEKALLQIASQVN

SEQ ID NO: 2777 - protein, 311 aa, Streptococcus pneumoniae
MVSTKTQIAGFEFDNCLMNAAGVACMTIEELEEVKNSAAGTFVTKTATLDFRQGNPEPRYQDVPLGSINSMGLPNNGLDYYLDYLLDLQEKESNRTFFLSLVGMSPEETHTILKKVQESDFRGLTELNLSCPNVPGKPQIAYDFETTDRILAEVFAYFTKPLGIKLPPYFDIVHFDQAAAIFNKYPLKFVNCVNSIGNGLYIEDESVVIRPKNGFGGIGGEYIKPTALANVHAFYQRLNPQIQIIGTGGVLTGRDAFEHILCGASMVQVGTTLHKEGVSAFDRITNELKAIMVEKGYESLEDFRGKLRYID

SEQ ID NO: 2778 - protein, 396 aa, Streptococcus pneumoniae
MSERKLFTSESVSEGHPDKIADQISDAILDAILAKDPEAHVAAETAVYTGSVHVFGEISTNAYVDINRVVRDTIAEIGYTNTEYGFSAETVGVHPSLVEQSPDIAQGVNEALEVRGNADQDPLDLIGAGDQGLMFGFAVDETEELMPLPIALSHKLVRRLAELRKSGEISYLRPDAKSQVTVEYDENDRPVRVDTVVISTQHDPEATNEQIHQDVIDKVIKEVIPSSYLDDKTKFFINPTGRFVIGGPQGDSGLTGRKIIVDTYGGYSRHGGGAFSGKDATKVDRSASYAARYIAKNIVAAGLAKKAEVQLAYAIGVAQPVSVRIDTFGTGTVAESQLEKAARQIFDLRPAGIIQMLDLKRPIYRQTSAYGHMGRTDIDLPWERLDKVDALKEAVK

SEQ ID NO: 2779 - protein, 447 aa, Streptococcus pneumoniae
MSFTKFQFKNYIREALKELKFTTPTEVQDKLIPIVLAGRDLVGESKTGSGKTHTFLLPIFQQLDEASDSVQAVITAPSRELATQIYQVARQISAHSDVEVRVVNYVGGTDKARQIEKLASNQPHIVIGTPGRIYDLVKSGDLAIHKAKTFVVDEADMTLDMGFLETVDKIAGSLPKDLQFMVFSATIPQKLQPFLKKYLSNPVMEKIKTKTVISDTIDNWLISTKGHDKNAQIYQLTQLMQPYLAMIFVNTKTRADELHSYLTAQGLKVAKIHGDIAPRERKRIMNQVQNLDFEYIVATDLAARGIDIEGVSHVINDAIPQDLSFFVHRVGRTGRNGLPGTAITLYQPSDDSDIRELEKLGIKFSPKMVKDGEFQDTYDRDRRANREKKQDKLDIEMIGLVKKKKKKVKPGYKKKIQWAVDEKRRKTKRAENRARGRAERKAKRQTF

SEQ ID NO: 2780 - protein, 271 aa, Streptococcus pneumoniae
MKFLTLNTHSWMEKEAEEKFQILLEDILEKDYDLICFQEINQEMTSSEVEVNDLYQALPAAEPIHQDHYVRLLVEKLLEQGKNYYWTWAYNHIGYDRYHEGVAILSKTPIEAREILVSDVDDPTDYHTRRVALAETVVDGKELAVASVHLSWWDKGFQEEWARFEAVLKKLNKPLLLAGDFNNPAGQEGYQAILASPLDLQDAFEVAQEKSGSYTVPPEIDGWKGNTEPLRIDYVFTTKELAVENLHVVFDGNKSPQVSDHYGLNAMLNWK

SEQ ID NO: 2781 - protein, 87 aa, Streptococcus pneumoniae
LSVKNFILFSQNKRLEYSFQPQVYYNSTLATAVLAAREPVFSNLTDLIASPFVKTTTVDVSRPAARIASKSAVTRRSPAATFCPSAT

SEQ ID NO: 2782 - protein, 726 aa, Streptococcus pneumoniae
MMKDTFKNVLSFEFWQKFGKALMVVIAVMPAAGLMISIGKSIVMINPTFTPLVITGGILEQIGWGVIGNLHILFALAIGGSWAKERAGGAFAAGLAFILINRITGTIFGVSGDMLKNPDAMVTTFFGGSIKVADYFISVLEAPALNMGVFVGIISGFVGATAYNKYYNFRKLPDALSFFNGKRFVPFVVILRSAIAAILLAAFWPVVQTGINNFGIWIANSQETAPILAPFLYGTLERLLLPFGLHHMLTIPMNYTALGGTYDILTGAAKGTQVFGQDPLWLAWVTDLVNLKGTDASQYQHLLDTVHPARFKVGQMIGSFGILMGVIVAIYRNVDADKKHKYKGMMIATALATFLTGVTEPIEYMFMFIATPMYLVYSLVQGAAFAMADVVNLRMHSFGSIEFLTRTPIAISAGIGMDIVNFVWVTVLFAVIMYFIANFMIQKFNYATPGRNGNYETAEGSEETSSEVKVAAGSQAVNIINLLGGRVNIVDVDACMTRLRVTVKDADKVGNAEQWKAEGAMGLVMKGQGVQAIYGPKADILKSDIQDILDSGEIIPETLPSQMTEAQQNTVHFKDLTEEVYSVADGQVVGLEQVKDPVFAQKMMGDGFAVEPANGNIVSPVSGTVSSIFPTKHAFGIVTEAGLEVLVHIGLDTVSLEGKPFTVHVAEGQKVAAGDLLVTADLDAIRAAGRETSTVVVFTNGDAIKSVKLEKTGSLAAKTAVAKVEL

SEQ ID NO: 2783 - protein, 311 aa, Streptococcus pneumoniae
MDTMISRFFRHLFEALKSLKRNGWMTVAAVSSVMITLTLVAIFASVIFNTAKLATDIENNVRVVVYIRKDVEDNSQTIEKEGQTVTNNDYHKVYDSLKNMSTVKSVTFSSKEEQYEKLTEIMGDNWKIFEGDANPLYDAYIVEANTPNDVKTIAEDAKKIEGVSEVQDGGANTERLFKLASFIRVWGLGIAALLIFIAVFLISNTIRITIISRSREIQIMRLVGAKNSYIRGPFLLEGAFIGLLGAIAPSVLVFIVYQIVYQSVNKSLVGQNLSMISPDLFSPLMIALLFVIGVFIGSLGSGISMRRFLKI

SEQ ID NO: 2784 - protein, 68 aa, Streptococcus pneumoniae
TTTRTLFSISVASFAVLKITDANIATKVKVIMTELTAATVIQPFRFKLFKASNKWRKNLLIIVSILSF

SEQ ID NO: 2785 - protein, 230 aa, Streptococcus pneumoniae
MSIIEMRDVVKKYDNGTTALRGVSVSVQPGEFAYIVGPSGAGKSTFIRSLYREVKIDKGSLSVAGFNLVKIKKKDIPLLRRSVGVVFQDYKLLPKKTVYENIAYAMEVIGENRRNIKRRVMEVLDLVGLKHKVRSFPNELSGGEQQRIAIARAIVNNPKVLIADEPTGNLDPDNSWEIMNLLERINLQGTTILMATHNSQIVNTLRHRVIAIENGRVVRDESKGEYGYDD

SEQ ID NO: 2786 - protein, 74 aa, Streptococcus pneumoniae
ISHELSGSRFPVGSSAINTLGLFTIARAIAIRCCSPPESSFGKERTLCFNPTRSKTSITRLLILRRFSPITSIA

SEQ ID NO: 2787 - protein, 306 aa, Streptococcus pneumoniae
LNVFKNTYNTFHKMEELQDEVEILLDFLAEDESVHDELVAQLAELDKIMTSYEMTLLLSEPYDHNNAILEIHPGSGGTEAQDWGDMLLRMYTRYGNAKGFKVEVLDYQAGDEAGIKSVTLSFEGPNAYGLLKSEMGVHRLVRISPFDSAKRRHTSFTSVEVMPELDDTIEVEIREDDIKMDTFRSGGAGGQNVNKVSTGVRLTHIPTGIVVQSTVDRTQYGNRDRAMKMLQAKLYQMEQEKKAAEVDSLKGEKKEITWGSQIRSYVFTPYTMVKDHRTSFEVAQVDKVMDGDLDGFIDAYLKWRIS

SEQ ID NO: 2788 - protein, 218 aa, Streptococcus pneumoniae
MAVKDFMTRKVVYISPDTTVSHAADLMREQGLHRLPVIENDQLVGLVTEGTIAQASPSKATSLSIYEMNYLLNKTKVKDVMIRDVVTVSGYASLEDATYLMLKNKIGILPVVDNHQVYGVITDRDVFQAFLEIAGYGEEGIRVRFVTEDEVGVLGKIVSLIVEENLNISHTVNIPRKDGKVIIEVQIDESIDLPALKEKFEANGIQVEEIARTSAKVL

SEQ ID NO: 2789 - protein, 236 aa, Streptococcus pneumoniae
MSMLKVENLSVHYGMIQAVRDVSFEVNEGEVVSLIGANGAGKTTILRTLSGLVRPSSGKIEFLGQEIQKMPAQKIVAGGLSQVPEGRHVFPGLTVMENLEMGAFLKKNREENQANLKKVFSRFPRLEERKNQDAATLSGGEQQMLAMGRALMSTPKLLLLDEPSMGLAPIFIQEIFDIIQDIQKQGTTVLLIEQNANKALAISDRGYVLETGKIVLSGSGKELASSEEVRKAYLGG

SEQ ID NO: 2790 - protein, 66 aa, Streptococcus pneumoniae
MISKISWMKIGASPIDGSSKRRSFGVDIRARPMASICCSPPERVAASWFFRSSRRGKREKTFFKLA

SEQ ID NO: 2791 - protein, 254 aa, Streptococcus pneumoniae
MALLEVKQLTKHFGGLTAVGDVTLELNEGELVGLIGPNGAGKTTLFNLLTGVYEPSEGTVTLDGHLLNGKSPYKIASLGLGRTFQNIRLFKDLTVLDNVLIAFGNHHKQHVFTSFLRLPAFYKSEKELKAKALELLKIFDLDGDAETLAKNLSYGQQRRLEIVRALATEPKILFLDEPAAGMNPQETAELTELIRRIKDEFKITIMLIEHDMNLVMEVTERIYVLEYGRLIAQGTPDEIKTNKRVIEAYLGGEA

SEQ ID NO: 2792 - protein, 318 aa, Streptococcus pneumoniae
MKENLKVNILWLLLLLAGYSLISVLVSVGVLNLFYVQILQQIGINIILAVGLNLIVGFSGQFSLGHAGFMAIGAYAAAIIGSKSPTYGAFFGAMLVGALLSGAVALLVGIPTLRLKGDYLAVATLGVSEIIRIFIINGGSLTNGAAGILGIPNFTTWQMVYFFVVITTIATLNFLRSPIGRSTLSVREDEIAAESVGVNTTKIKIIAFVFGAITASIAGSLQAGFIGSVVPKDYTFINSINVLIIVVFGGLGSITGAIVSAIVLGILNMLLQDVASVRMIIYALALVLVMIFRPGGLLGTWELSLSRFFKKSKKEEQN

SEQ ID NO: 2793 - protein, 292 aa, Streptococcus pneumoniae
VNLMLQQLVNGLILGSVYALLALGYTMVYGIIKLINFAHGDIYMMGAFIGYFLINSFQMNFFVALIVAMLVTAILGVVIEFLAYRPLRHSTRIAVLITAIGVSFLLENGMVYLVGANTRAFPQAIQTVRYDLGPISLTNVQLMILAISLILMILLQVIVQKTKMGKAMRAVSVDSDAAQLMGINVNRTISFTFALGSALAGAAGVLIALYYNSLEPLMGVTPGLKSFVAAVLGGIGIIPGAALGGFVIGLLETFATAFGMSDFRDAIVYGILLLILIVRPAGILGKNVKEKV

SEQ ID NO: 2794 - protein, 386 aa, Streptococcus pneumoniae
MKKKFALSFVALASVALLAACGEVKSGAVNTAGNSVEEKTIKIGFNFEETGSLAAYGTAEQKGAQLAVDEINAAGGIDGKQIEVVDKDNKSETAEAASVTTNLVTQSKVSAVVGPATSGATAAAVANATKAGVPLISPSATQDGLTKGQDYLFIGTFQDSFQGKIISNYVSEKLNAKKVVLYTDNASDYAKGIAKSFRESYKGEIVADETFVAGDTDFQAALTKMKGKDFDAIVVPGYYNEAGKIVNQARGMGIDKPIVGGDGFNGEEFVQQATAEKASNIYFISGFSTTVEVSAKAKAFLDAYRAKYNEEPSTFAALAYDSVHLVANAAKGAKNSGEIKNNLAKTKDFEGVTGQTSFDADHNTVKTAYMMTMNNGKVEAAEVVKP

SEQ ID NO: 2795 - protein, 149 aa, Streptococcus pneumoniae
LISSTANWAPFCSAVPYAAKEPVSSKLNPILIVFSSTELPAVLTAPDFTSPQAARSATLASATNDRANFFFIFLSPYFLNSLLRIYRIIRKLSMFSLNFFDDNVFLSIKIAHKGCFQLLDMTNPNFFNKFFLAQASDQLLHFLSWNIEL

SEQ ID NO: 2796 - protein, 82 aa, Streptococcus pneumoniae
MFEKVNRSGLIIYLYYNRDAKKLQDYGDITYHSKKHRYLQLYVPTQEVEQLVGRLSKEKFIKKVRVCHIQELETPFVGNLYR

SEQ ID NO: 2797 - protein, 196 aa, Streptococcus pneumoniae
MIPVVIEQTSRGERSYDIYSRLLKDRIIMLTGPVEDNMANSVIAQLLFLDAQDSTKDIYLYVNTPGGSVSAGLAIVDTMNFIKADVQTIVMGMAASMGTVIASSGAKGKRFMLPNAEYMIHQPMGGTGGGTQQTDMAIAAEHLLKTRNTLEKILAENSGQSMEKVHADAERDNWMSAQETLEYGFIDEIMANNSLN

SEQ ID NO: 2798 - protein, 216 aa, Streptococcus pneumoniae
LKEGIPKMGKIEVINHPLIQHKLSILRRTDTSTKAFRELVDEIAMLMGYEVLRDLPLEDVEIETPITKTVQKQLAGKKLAIVPILRAGIGMVDGLLSLVPAAKVGHIGMYRDEETLQPVEYLVKLPEDIDQRQIFVVDPMLATGGSAILAVDSLKKRGASNIKFVCLVSAPEGVKALQEAHPDVEIFTAALDERLNEHGYIVPGLGDAGDRLFGTK

SEQ ID NO: 2799 - protein, 54 aa, Streptococcus pneumoniae
LEFLLSIYSSYYTKKRVKNLSKPFIFDNFYIRSASLRAVCTVSSGKWVNSVPFS

SEQ ID NO: 2800 - protein, 155 aa, Streptococcus pneumoniae
MTEKRLAWDEYFAAQALLIANRSTCKRAKVGAILVKDNKVISTGYNGSVSGTEHCIDHECLVIEGHCVRTLHAEVNAILQGAERGVPKGFTAYVTHFPCLNCTKQLLQVGCKRVVYINQYRMDDYAQYLYQEKGTELTHLPLETVQTALKEADLM

SEQ ID NO: 2801 - protein, 185 aa, Streptococcus pneumoniae
MSERRISEKSLENLRKSNQESNLLTREAIETALLQLLEKKELTKISISELVKRAGVSRAAFYRNYDSNEEILESVFKRTVHNIMEQLHHYDLKTDLYLVWVHLFREARKEARVIQLALDYHLEKIFVQAMQEFLGKYHGKSKGVSSYLHSFWSSAIVSVLLKWIKDGMKVPAEKIADLGLPFFKK

SEQ ID NO: 2802 - protein, 281 aa, Streptococcus pneumoniae
MTWKIIADSGCDYRQLPTPAINTTFVSVPLTIQVADQVFVDDASLDIDQMMETMYATAEASKSACPSPDDYLRAFEGAKNIFLVTITGTLSGSHNSAQLAKNIYLEDHPDTKIHVIDSLSAGGEVDLLVEKLNDLIDQGLSFEEVVEAITAYQEKTKLLFVLAKVDNLVKNGRLSKLIGTVVGLLNIRMVGKASETGTLELLQKARGSKKSVQAAYDELVKAGYAGGRIVMAQRNNEKCCQQLSERIRETFPQADIKILPTSGLCSFYAEDGGLLMGYEID

SEQ ID NO: 2803 - protein, 391 aa, Streptococcus pneumoniae
MKHFDTIVIGGGPAGMMATISSNFYGQKTLLIEKNRKLGKKLAGTGGGRCNVTNNGSLDNLLAGIPGNGRFLYSVFSQFDNHDIINFFTENGVKLKVEDHGRVFPASDKSRTIIEALEKKITELGGQVATQIEIVSVKKVDDQFVLKSADQTFTCEKLIVTTGGKSYPSTGSTGFGHEIARHFKHTITDLEAAESPLLTDFPHKALQGISLDDVTLSYGKHVITHDLLFTHFGLSGPAALRMSSFVKGGEVLSLDVLPQLSEKDLVTFLEENREKSLKNALKTLLPERLAEFFVQGYPEKVKQLTEKEREQLVQSIKELKIPVTGKMSLAKSFVTKGGVSLKEINPKTLESKLVPGLHFAGEVMDINAHTGGFNITSALCTGWVAGSLHYD

SEQ ID NO: 2804 - protein, 151 aa, Streptococcus pneumoniae
MNRREAVEFVNMCMIKNGDKVLVQDRVSPDWSGITFPGGHVERGESFVDAVIREVKEETGLIISKPQLCGIKNWYDDKDYRYVVLFYKTEHFTGELQSSDEGKVWWEDFENLSHLKLATDDMSDMLRVFLEEDLSEFFYYKNGDDWLYDLK

SEQ ID NO: 2805 - protein, 172 aa, Streptococcus pneumoniae
LPHLTRQLDYLTRERQHLDTLISTLQKTIQEQKGERKMTIEEKFTGFSYQDNQKYHQEAVEKYGQEVMGQALERQKGHEDEATAAFNQVFQTLAQNLQVGLPATATENQEQAAKLLQAIRTYGFDCSIEVFGHIGKGYVYNPEFKENIDKFGSGTAQYTSDAIAAYVQTNAE

SEQ ID NO: 2806 - protein, 489 aa, Streptococcus pneumoniae
LKMVFLTDLRKHDRIVKSINQTEGYLTTQVAFSYFEKGDQSLTMSEKSQWGSKLGFILASAGSVIGLGSVWKFPYMTAANGGGGFLLIFLISTILIDFPLLLAEFALGRSAGVSAIKTFGKLGKNNKYNFIGWIGAFALFILLSFYSVIGGWILVYLGIEFGKLFQLGGTGDYAQLFTSIISNPAIALGAQATFILLNIFIVSRGVQKGIERASKVMMPLLFIIFVVIIERSLSLPNAMEGVLYFLKPDFSKLTSAGLLYALRQSFFALSLGVTAMLTYASYLDKKTNLVQSRISIVAMNISVSIMAGLAIFQARSPFNIQSEGGPSLVFIVLPQLFDKMPFGTIFYVLFLFATVTSSVVMLEINVDNITNQDNSKRAKWSVILGILTFVFGIPSALSYGVMADVHIFGKAFFDAMDFLVSNLLMPFGALFLSLFTGYIFKKALAMEELHLDERAWKQGLFQVWLFLLRFVIPIIICGLHRPIYVIKRT

SEQ ID NO: 2807 - protein, 314 aa, Streptococcus pneumoniae
MSEPLFLQSVMQEKIWGGAKLRDEFGYDIPSEKIGEYWAISAHPNGVSKVANGRYEGTDLATLYAEHRELFGNRPEPVFPLLTKILDANDWLSVQVHPDDAYGLEHEGELGKTECWYIIAADEGSEIIYGHNAKSKEELRQQIEDKNWDALLTKVPVKAGDFFYVPSGTMHAIGAGILILETQQSSDTTYRVYDFDRKDDKGNLRELHLEKSIDVLNIGEPANSRPVTIKADDLRSTLLVSNDFFAVYKWEITGKVNFEKTADYSLLSVLAGQGQLTVDGKNYPIQKGRHFILPSDVESWTLEGQDLELIVSHP

SEQ ID NO: 2808 - protein, 133 aa, Streptococcus pneumoniae
MSLIAMVQASGRAHLFTIFIKSSPCFIRCKKEFNSNSFFAIMRGEKSDRRSTCQNHYFYNQLCKKKSGVEPSYVMSLATISQVKKSENIGPSQPIQMESLKLPMVVTREQILLLCMRNTVNYLAIVQNLYFHF

SEQ ID NO: 2809 - protein, 109 aa, Streptococcus pneumoniae
FSIIVENGLGAMDTPDENGYVADNYRITYLEAHIKAMRDAIYQDGVDLLGYTTWSCIDPVSAGTGEMNKRYGFIYVDRDNVGNGALKRSKKKSFYWYKDVIDSNGASIG

SEQ ID NO: 2810 - protein, 88 aa, Streptococcus pneumoniae; identical to SEQ ID NO: 2727

SEQ ID NO: 2811 - protein, 217 aa, Streptococcus pneumoniae
MVGEILCHVQNILGKQTLKPLSRLKIKSQFKKARKRFKYSRRFRKVRLMYQDEAGFSRISKLGSCWSPIGVDPHVHSHYIREFRYCYGAVDAYTGESFFLIAGRCNTEWMNAFLEELSQAYPDDYLLLVMDNAIWHKSSILKIPTNIGFAFIPPYTPEMNPIEQVWKEIRKRGFKNKAFRILEDVMNQLQDVIQGLEKEVIKSIVNRRWTRMLFESR

SEQ ID NO: 2812 - protein, 115 aa, Streptococcus pneumoniae
MNLNQLDIIVSNVPQVCADLEHILDKKADYADDGFAQFTIGSHCLMLSQNHLVPLENFQSGIIIHIEVEDVDQNYKRLNELGIKVLHGPTVTDWGTESLLVQGPAGLVLDFYRMK

SEQ ID NO: 2813 - protein, 591 aa, Streptococcus pneumoniae
MTQGKITASAAMLNVLKTWGVDTIYGIPSGTLSSLMDALAEDKDIRFLQVRHEETGALAAVMQAKFGGSIGVAVGSGGPGATHLINGVYDAAMDNTPFLAILGSRPVNELNMDAFQELNQNPMYNGIAVYNKRVAYAEQLPKVIDEACRAAISKKGPAVVEIPVNFGFQEIDENSYYGSGSYERSFIAPALNEVEIDKAVEILNNAERPVIYAGFGGVKAGEVITELSRKIKAPIITTGKNFEAFEWNYEGLTGSAYRVGWKPANEVVFEADTVLFLGSNFPFAEVYEAFKNTEKFIQVDIDPYKLGKRHALDASILGDAGQAAKAILDKVNPVESTPWWRANVKNNQNWRDYMNKLEGKTEGELQLYQVYNAINKHADQDAIYSIDVGNTTQTSTRHLHMTPKNMWRTSPLFATMGIALPGGIAAKKDNPDRQVWNIMGDGAFNMCYPDVITNVQYDLPVINLVFSNAEYGFIKNKYEDTNKHLFGVDFTNADYAKIAEAQGAVGFTVDRIEDIDAVVAEAVKLNKEGKTVVIDARITQHRPLPVEVLELDPKLHSEEAIKAFKEKYEAEELVPFRLFLEEEGLQSRAIK

SEQ ID NO: 2814 - protein, 66 aa, Streptococcus pneumoniae
VRKPFIEFYSIFSGLLSTMLSGIPIAAGVFSGVGLALNPELAGLAMAFSSVSVLTSSLLLNFSKID

SEQ ID NO: 2815 - protein, 732 aa, Streptococcus pneumoniae
VETMTEIVKASLENGIQKIRIRAEKGYHPAHIQLQKGIPAEITFHRATPSNCYKEILFEEEGILEPIGVDEEKVIRFTPQELGRHEFSCGMKMQKGSYIVVEKTRKSLSLLQRFWITSIFTVPLVILMIGMLTGSISHQVMHWGTFLATTPIMLVAGKPYIQSAWASFKKHNANMDTLVALGTLVAYFYSLVALFAGLPVYFESAGFILFFVLLGAVFEEKMRKNTSQAVEKLLDLQAKTAEVLSDDSYVQVPLEQVKVGDLIRVRPGEKIAVDGVVVEGVSSIDESMVTGESLPVDKTVGDTVIGSTINHSGTLVFRAEKVGSETVLAQIVDFVKKAQTSRAPIQDLTDKISGIFVPVVVILGIMTFWVWFVLLRDSVVVLGASFVSSLLYGVAVLIIACPCALGLATPTALMVGTGRSAKMGVLLKNGTVLQEIQKVQTLVFDKTGTLTEGKPVVTDIIGDEVEVFGLAASLEDASQHPLAEAIVKRASEAGLEFKTVENFQALHGKGVSGRINGKQVLLGNAKMLDGMDISNTYQDKLEELEKEAKTVVFLAVDNEIKGLLALQDIPKENAKLAISQLKKRGLRTVMLTGDNAGVACAIADQIGIEEVIAGVLPEEKAHEIHKLQQSGKVAFVGDGINDAPALSVADVGIAMGAGTDIAIESADLVLTTNNLLGVVRAFDMSKKTFHRILLNLFWAFIYNVVGNSDCSRSLFRCWTGSQPRIGRSSHGL

SEQ ID NO: 2816 - protein, 84 aa, Streptococcus pneumoniae
KVFLLISKARTTPKRLLVVNTKSADSMAISVPAPIAIPTSATLRAGASLIPSPTKATFPDCCSLWISWAFSSGKTPAMTSSIPI

SEQ ID NO: 2817 - protein, 60 aa, Streptococcus pneumoniae
MVEPMTVSPTVLSTGRLSPVTMDSSILETPSTTTPSTAIFSPGRTRIRSPTLTCSKGTWT

SEQ ID NO: 2818 - protein, 123 aa, Streptococcus pneumoniae
MLNSIVTIICIALIAFILFWFFKKPEKSGQKAQQKNGYQEIRVEVMGGYTPELIVLKKSVPARIVFDRKDPSPCLDQIVFPDFGVHANLPMGEEYVVEITPEQAGEFGFACGMNMMHGKMIVE

SEQ ID NO: 2819 - protein, 141 aa, Streptococcus pneumoniae
LTNVDFGGMVMQISDAEWQVMKIIWMQGEQTSTDLIRVLAERFDWSKSTIQTLLARLVEKECLTRKKEGKFFVYSALLTLDQSRDLLVQDIKDKVCSRRIRNLLADLIVECEFTQTDLEDLEAVISEKKSSAVTEVRCNCM

SEQ ID NO: 2820 - protein, 268 aa, Streptococcus pneumoniae
MTYLPVALTIAGTDPSGGAGIMADLKSFQARDVYGMAVVTSLVAQNTRGVQLIEHVSPQMLKAQLESVFSDIPPQAVKTGMLATTEIMEIIQPYLKKLDCPYVLDPVMVATSGDALIDSNARDYLKTNLLPLATIITPNLPEAEEIVGFSIHDPEDMQRAGRLILKEFGPQSVVIKGGHLKGGHLKGGAKDFLFTKNEQFVWESPRIQTCHTHGTGCTFAAVITAELAKGKSLYQAVDKAKAFITKAIQDAPQLGHGSGPVNHTTFKD

SEQ ID NO: 2821 - protein, 210 aa, Streptococcus pneumoniae
MNREALRLYLVTNRYQDSVESFLAKVETACRSGVTIVQLREKNLTTNQYYQLAKQVKEITDAYQVPLIIDDRLDVCLAVDAAGLHIGDDELPVSVARQVLGPEKILGVTAKTVKRALEAEKSGADYLGTGAIFPTTTKENAPITLISTLKTICQTVAIPIVAIGGLTSENIDQLMGTGIAGVAVVRDLMQAEDIEAKTQAFLTKLHDILS

SEQ ID NO: 2822 - protein, 268 aa, Streptococcus pneumoniae
MMQALTNPFPIGSSSLIHCMTNEISCEMLANGILALGCKPVMADDPREVLDFTKQSQALFINLGHLSAEKEKAIRMAALYANQSSLPMVVDAVGVTTSSIRKSLVKDLLDYRPTVLKGNMSEIRSLVGLKHHGVGVDASAKDQETEDLLQVLKDWCQTYPGMPFLVTGPKDLIVSENQVAVLENGCTELDWITGTGDLVGALTAVFLSQGKTGFEASCLAVSYLNIAAEKIVVQGMGLEEFRYQVLNQLSLLRRDENWLDTIKGEVYE

SEQ ID NO: 2823 - protein, 174 aa, Streptococcus pneumoniae
MRKHQLQVHKLTILSMMIALDVVLTPIFRIEGMAPMSSVVNILAGIMMGPVYALAMATVTAFIRMTTQGIPPLALTGATFGALLAGLFYKYGRKFYFSALGEIVGTGIIGSIVSYPVMVLFTGSAAKLSWFIYTPRFFGATLIGTAISFIAFRFLIKQEFFKKVQGYFFAERIE

SEQ ID NO: 2824 - protein, 230 aa, Streptococcus pneumoniae
MEFTDIAMELSKKAWQASFHHPFILQLQEGNLEPAIFRYYLIQDAYYLKAFSEIYHLLADKTSNQEMKRLLKQNAQGLVEGELFIRQQFFKEMEISDQEMEQHPIAPTCYHYISHIYRQFAEPNLAIAFASLLPCPWLYHDIGKSLNLKPSPNPLYQQWIETYITDELEQQIREEGALVNQLYRESDETDKQKMLDAFHISVHMEAKFWEMAYQHQTWKSDLQSLEKGEE

SEQ ID NO: 2825 - protein, 216 aa, Streptococcus pneumoniae
MVKVATQTPIISLFLLILSLETSFIPSIALNLSVVAFCILFMLYYRRFKMLAWMIILAILPSFANYWAVQLHGDASQAVMLGTRAFVTVCIGLVFVSSISLKELLLYLAQKGLSRSWSYALIVVFNSFPLIQQEIKSLKEACLLRGQELYFWSPLIYSKVLMTVFRWRHLYLRALSAHGYDEHAQLKNSYRTFYIPKKTKLIYLLFFLLLQTSLFL

SEQ ID NO: 2826 - protein, 461 aa, Streptococcus pneumoniae
MGLELRAIQSPIFSEPFDFTFHAQAFTLLVGSSGSGKSSLFQVIAQVSSLPYSGQVLIDGSEVSQLSIIARVQKVGILFQNPNHQFTMENLFEELIFTLENIGYHLQEIDSKIAEVVQQCRCEAILHRPIHHLSGGEKQKAALAVLFAMNPRVYLLDEPFASIDRKSRIEILEILKELALDGKTVILCDHDLSDYKAYIDHMVELRDGKLREVFQIPSYEMTQVASKEVASSPELFHMNRVTGELGNRPLFSIADFTFYQGISCILGDNGVGKSTLFRSILQFQKYKGRIAWKGTVLKKKKSLYRDLTGVVQEAEKQFIRVSLREELRLDGPDSERNQRIFQALRYFDLEQAVDKSPYQLSGGQQKILQLLTILTSKASVILLDEPFAGLDDRACHYFCKWIVEERNQGRSFLLISHRLDPLISVVDYWIEMTSQGLSHVKEVTITKPLTSQSSNTQGEVR

SEQ ID NO: 2827 - protein, 186 aa, Streptococcus pneumoniae
MLKKWQLKDVILLAFLSIFFGGVFVGSGYVYNILSLLLTPLGLQAFANEILFGLWCMAAPIAAIFVPRVGSATIGEVLAALAEVLYGSQFGLGALLSGLVQGLGSEFGFIVTKNRYESWLSLTANSIGVTLVSFVYEYIKLGYYAFSLPFVLSLLVVRFISVYFFCTILVRAIVKLYHQFATGGKA

SEQ ID NO: 2828 - protein, 74 aa, Streptococcus pneumoniae
NQIHFPNLEPSQTKELLDQIGYHKGLQQAQLALLQSLHFRLSEQRWQQWAQPYTRDRRGFHWQRPANQEVLRVD

SEQ ID NO: 2829 - protein, 68 aa, Streptococcus pneumoniae
LHSQRQQIFLLQKTNDLFDELAIQAESRHSFLKKENPTYLESKDRYLLFTHFPNSFFYIFCIRYCRND

SEQ ID NO: 2830 - protein, 209 aa, Streptococcus pneumoniae
MFHKELLKLYFICGTTTCQGKNLYTVVEEALKGGITLFQFREKGESALEGLEKLELAIQIKELCKKYNVPFIVNDDIDLAMEIDADGVHVGQDDIGVDEIRKLMPDKIIGLSIRNEEEFQQSKVEYVDYVGVGPVFDTQSKDDAGGAIGYEGLELMRKLLPQMPLVAIGGIQTKHIKDIIKTNVDGVSIISAISYAKNIEKTVREMSEQ

SEQ ID NO: 2831 - protein, 267 aa, Streptococcus pneumoniae
VKRKDFNMTSLKLLKEKAPLVICITNDVVKNFTANGLVALGVSPAMSEFPADLEDLLKYAGGLLINIGTLTDENWKLYQAALKIAEKYNVPAVLDPVACGAGEYRKKVADDLINNYKLAAIRGNAGEIASLVGIDVASKGVDSAGVDNIDEIALAANEKFNIPIVVTGEVDAIAVNGEVVTIHNGSAMMPKVIGTGCLLGAVVASFIGLEKGQELKSLETAMLVYNIAGEMAEKRPNGHLPGTFKVEFINALYEITDEDVKEFKRVK

SEQ ID NO: 2832 - protein, 136 aa, Streptococcus pneumoniae
LLIRSSATFFLYSPAPQATGSKTAGTLYFSAIFRAAWYNFQFSSVNVPMFINKPPAYFNKSSKSAGNSLMAGETPSATNPFAVKFFTTSLVIQMTNGAFSFNNFKLVILKSFLFTLYDLLISIYLYLSLRNFFHLR

SEQ ID NO: 2833 - protein, 81 aa, Streptococcus pneumoniae
LNDLYSMKIKEQTRKLTADCSKHCFEPVDKTDEVSSKHCFEVVDRTDEVSNHTYGKVKLTWFEEIFEEYYLIKFVNIMSLL

SEQ ID NO: 2834 - protein, 74 aa, Streptococcus pneumoniae
VWLLTSSVLSTTSKQCFELTSSVLSTGSKQCFEQSAVSFLVCSLIFIEYKSFNVNEKNFLTKDRDKSKSVDRIK

SEQ ID NO: 2835 - protein, 222 aa, Streptococcus pneumoniae
METQDYAFQPGLTVGELLKSSQKDWQAAINHRFVKELFAGTIENKVLKDYLIQDYHFFDAFLSMLGACVAHADKLESKLRFAKQLGFLEADEDGYFQKAFKELKVAENDYLEVTLHPVTKAFQDLMYSAVASSDYAHLLVMLVIAEGLYLDWGSKDLALPEVYIHSEWINLHRGPFFAEWVQFLVDELNRVGKNREDLTELQQRWNQAVALELAFFDIGYDV

SEQ ID NO: 2836 - protein, 378 aa, Streptococcus pneumoniae
MSYKTSNAEGHVDFINTYDLEPMAQQVIPKAAFGYIASGAEDTFTLRENIRAFNHKLIVPHTLCDVENPSTEIEFAGEKLSSPIIMAPVAAHKLANEQGEVATARGVHEFGSLYTTSSYSTVDLPEISEALQGTPHWFQFYFSKDDGINRHIMDRVKAEGYKAIVLTADATVGGNREVDKRNGFVFPVGMPIVEEYLPEGAGKSMDFVYKSAKQRLSPRDVEFIAEYSGLPVYVKGPQCREDVERSLAAGASGIWVTNHGGRQIDGGPAAFDSLQEVAEAVDRRVPIVFDSGVRRGQHVFKALASGADLVAIGRPVIYGLALGGSVGVRQVFEHLNAELKTVMQLSGAQTIEDVKHFKLRHNPYNPTFPVDPRDLKLY

SEQ ID NO: 2837 - protein, 496 aa, Streptococcus pneumoniae
MSTEHMEELNDQQIVRREKMAALREQGIDPFGKRFERTANSQELKDKYANLDKEQLHDKNETATIAGRLVTKRGKGKVGFAHLQDREGQIQIYVRKDAVGEENYEIFKKADLGDFLGVEGEVMRTDMGELSIKATHITHLSKALRPLPEKFHGLTDVETIYRKRYLDLISNRESFERFVTRSKIISEIRRYLDQKGFLEVETPVLHNEAGGAAARPFITHHNAQNIDMVLRIATELHLKRLIVGGMERVYEIGRIFRNEGMDATHNPEFTSIEVYQAYADFQDIMDLTEGIIQHAAKSVKGDGPVNYQGTEIKINEPFKRVHMVDAIREITGVDFWQDMTLEEAKAIAAEKKVPVEKHYTEVGHIINAFFEEFVEETLIQPTFVYGHPVAVSPLAKKNPEDQRFTDRFELFIMTKEYGNAFTELNDPIDQLSRFEAQAKAKELGDDEATGIDYDYIEALEYGMPPTGGLGIGIDRLCMLLTDTTTIRDVLLFPTMK

SEQ ID NO: 2838 - protein, 226 aa, Streptococcus pneumoniae
LDWSIVEQYLPLYQKAFFLTLHIAVWGILGSFLLGLIVSIIRHYRIPVLAQVATAYIELSRNTPLLIQLFFLYFGLPRIGIVLSSEVCATLGLVFLGGSYMAESFRSGLEAISQTQQEIGLAIGLTPLQVFRYVVLPQATAVALPSFSANVIFLIKETSVFSAVALADLMYVAKDLIGLYYETDIALAMLVVAYLIMLLPISLVFSWIERRTRHAGFGNPSTLSRK

SEQ ID NO: 2839 - protein, 126 aa, Streptococcus pneumoniae
MQDSGIQVLFQGNNLLRILQGLGVTIGISILSVLLSMMFGTVMGIIMTSHSRIIRFLTRLYLEFIRIMPQLVLLFIVYFGLARNFNINISGETSAIIIFTLWGTAEMGDLVRGAITSLPKHQFESG

SEQ ID NO: 2840 - protein, 95 aa, Streptococcus pneumoniae
LTNVQLYYHIIIPQVLRRLLPQAINLVTRMIKTTSLVVLIGVVEVTKVGQQIIDSNRLTIPTASFWIYGTILVLYFAVCYPISKLSTHLEKHWRN

SEQ ID NO: 2841 - protein, 70 aa, Streptococcus pneumoniae
MSETILEIKELKKSFGDNPILQGLSLEIKKGGSCCHPRGIWLWEKYPPSLPQRLRKYSRWRYSSGWSVYR

SEQ ID NO: 2842 - protein, 168 aa, Streptococcus pneumoniae
MVFQSYELFPHLDVLQNLILGPIKAQGRDKKEVTEEALQLLERVGLLDKQHSFARQLSGGQKQRVAIVRALLMHPEIILFDEVTASLDPEMVREVLELINDLTQEGRTMILVTHEMQFAQAITDRIIFLDQGKIAEEGTAQAFFTNPQTKRAQEFLNVFDFSQFGSYL

SEQ ID NO: 2843 - protein, 66 aa, Streptococcus pneumoniae
MAWANCISWVTKIMVRPSWVKSLISSSTSRTISGSSEAVTSSKRMISGCIRRARTIATRCFCPPDN

SEQ ID NO: 2844 - protein, 80 aa, Streptococcus pneumoniae
MKLFKPLLTVLALAFALIFITACSSGGNAGSSSGKTTAKARTIDEIKKSGELRIAVFGDKKPFGYVDNDGSYQGYATILN

SEQ ID NO: 2845 - protein, 184 aa, Streptococcus pneumoniae
LISNKVDITLANFTVTDERKKQVDFALPYMKVSLGVVSPKTGLITDVKQLEGKTLIVTKGTTAETYFEKNHPEIKLQKYDQYSDSYQALLDGRGDAFSTDNTEVLAWALENKGFEVGITSLGDPDTIAAAVQKGNQELLDFINKDIEKLGKENFFHKAYEKTLHPTYGDAAKADDLVVEGGKVD

SEQ ID NO: 2846 - protein, 215 aa, Streptococcus pneumoniae
MNEIITLKNIELKLKKTCVFQNLNFSCKQGEIIGITGANGSGKSVLFKLIAGLYSPSYGEVLINGENIVPERKIPANLGALIEEPGFINYYSGFKNLQYLASIRGVVGNQEINDTLKIVGLYEQKDQKVKTYSLGMRKKLGIAQAIMENPSILLLDEPMNALDKSSVENMRTLFRKLSSEKGTTILIASHSEEDIRILCDKVYAIEDKVCTLCSD

SEQ ID NO: 2847 - protein, 234 aa, Streptococcus pneumoniae
LKMGKLSSHIWRLNQIIYTKYFWGYVLFWILICLGLWYWLEGNDRLVIEILKGPNLSQNSFLFLSIWLLHWFIIHTFFLAVVYRRRASDFFLEVIRFSSIKLWIRYQIWTCFLYGLILIMVKVLVIQFMLQLPNWDIGVLFIVDFLNACVLVLFCFMLYALGANVQMNFACVSFFLLMIVFGGLFVGNRTNYLFYILNRGNGDIGRDLFLQLLFLVFLFKSIFYFTRQKRRFIE

SEQ ID NO: 2848 - protein, 67 aa, Streptococcus pneumoniae
QVYHFLLTNTIILNKSISKKEHNPKSTWYRLSDSTSICDYLTFPFSTFTLSSSFYEQENTFHGIYDR

SEQ ID NO: 2849 - protein, 268 aa, Streptococcus pneumoniae
LFGCLWYIFSTFRGLCIMKQFVQFYKKDFLAVLVYFILLLSCVLSSTVYLLRCRQYSIHPNVLEWILVLLQDMTTGVYCFPFTYILFFFYLMNNYFNRLECRIRLKSIKHFTSFSFKLAALSTGIWTAILFLLIFLIAFSNGFSFSLEIKEVDFLREFYGISIANNASFFIGFFFSYIAYYFFLSLLTISSFSWFKKSNMSLVFLFTFLFVESLFWIYQLNNGIIGLLPIFQYMVNSNPYALIYWPGITIYHKSHGMYFPVHRNWRRV

SEQ ID NO: 2850 - protein, 254 aa, Streptococcus pneumoniae
MEFFICNLVRVVQSPRFYMSLFLTLLCMSLGNFLAFNGIYKIEGLSIFFAASSIRGFSPISLVAALICTLPYSSQIIEDAESHFLTAQLCRISKKRYLAIVGSTAIISSFLVFFLPYLLLLGINLLVTPYQEIYIGDYSGALKELFDSNQFLYSLVTTLWYGVWGAVFSIFGLASALLVKKKLGAIFIPVAYMMVGGILWAILGLSYLEPVTTLALGYQKDISLSLVSGHLAFILFVSCLVVYGTFFLHSEDYV

SEQ ID NO: 2851 - protein, 116 aa, Streptococcus pneumoniae
LFLPTVLARQIGNYDLTLPRWGSDTTSELEKENASAGINNSDSTGGGKRLNTSIRSAYSGSDITPVYSLGSGSRIVMYYNGGGDNYIGSGTRLAMAPQFGNHVRIHTSGSWSPDSY

SEQ ID NO: 2852 - protein, 210 aa, Streptococcus pneumoniae
MTLAKDIASHLLKIQAVYLKPEEPFTWASGIKSPIYTDNRVTLAYPETRTLIENGFVEAIKEAFPEVEVIAGTATAGIPHGAIIADKMDLPFAYIRSKPKDHGAGNQIEGRVAQGQKMVVVEDLISTGGSVLEAVAAAKREGADVLGVVAIFSYQLPKADKNFADAGVKLVTLSNYSELIHLAQEEGYITPEGLDLLKRFKEDQENWQEG

SEQ ID NO: 2853 - protein, 233 aa, Streptococcus pneumoniae
MREHRPIIALDFPSFEAVKEFLALFPAEESLYLKVGMELYYAAGPEIVSYLKGLGHSVFLDLKLHDIPNTVKSAMKVLSQLGVDMTNVHAAGGVEMMKAAREGLGSQAKLIAVTQLTSTSEAQMQEFQNIQTSLQESVIYYAKKTAEAGLDGVVCSAQEVQVIKQATNPDFICLTPGIRPAGAAVGDQKRVMTPADAYQIGSDYIVVGRPITQAEDPVAAYHTIKDEWTQDWN

SEQ ID NO: 2854 - protein, 66 aa, Streptococcus pneumoniae
LPLWTALKVFYYSIISTSTCQVKTWSLKNYKRKSKPSDAMSAGSFGFDCSLPLVFSVLLLVFSQLP

SEQ ID NO: 2855 - protein, 399 aa, Streptococcus pneumoniae
MSKDKKNEDKEILEELKELSEWQKRNQEYLKKKAEEEAALAEEKEKERQARMGEESEKSEDKQDQESETDQEDSESAKEESEEKVASSEADKEKEEKEESESKEKEEQDKKLAKKATKEKPAKAKIPGIHILRAFTILFPSLLLLIVSAYLLSPYATMKDIRVEGTVQTTADDIRQASGIQDSDYTINLLLDKAKYEKQIKSNYWVESAQLVYQFPTKITIKVKEYDIVAYYISGENHYPILSSGQLETSSVSLNSLPETYLSVLFNDSEQIKVFVSELAQISPELKATIQKVELAPSKVTSDLIRLTMNDSDEVLVPLSEMSKKLPYYSKIKPQLSEPSVVDMEAGIYSYTVADKLIMEAEEKAKQEAKEAEKKQEEEQKKQEEESNRNQTTQRSSRR

SEQ ID NO: 2856 - protein, 147 aa, Streptococcus pneumoniae
VKARKIWIPGIFALAGFSFVAFLASFLSCSSFSLDSDSSFSSFSLSASEDATFSSDSSLADSESSWSVSLSWSCLSSDFSDSSPIRACLSFSFSSARAASSSAFFFRYSWFRFCHSDNSFNSSRISLSSFFLSFDIYFPYDKSFFNN

SEQ ID NO: 2857 - protein, 352 aa, Streptococcus pneumoniae
MKKIVFTGGGTVGHVTLNLLLMPKFIEDGWEVHYIGDKRGIEHQEILKSGLDVTFHSIATGKLRRYFSWQNMLDVFKVGWGIVQSLFIMLRLRPQTLFSKGGFVSVPPVIAARVSGVPVFIHESDLSMGLANKIAYKFATKMYSTFEQASSLSKVEHVGAVTKVSDQKNPEPDELVDIQSHFNHKLPTVLFVGGSAGARVFNQLVTDHKKELTERYNIINLTGDSSLNELSQNLFRVDYVTDLYQPLMELADIVVTRGGANTIFELLAIAKLHVIVPLGREASRGDQIENAAYFVKKGYAEDLQESDLTLDSLEEKLSHLLSHKEDYQAKMKASKELKSLADFYQLLKKDLS

SEQ ID NO: 2858 - protein, 450 aa, Streptococcus pneumoniae
MKVIDQFKNKKVLVLGLAKSGESAARLLDKLGAIVTVNDGKPFEDNPAAQSLLEEGIKVITGGHPLELLDEEFALMVKNPGIPYNNPMIEKALAKGIPVLTEVELAYLISEAPIIGITGSNGKTTTTTMIGEVLTAAGQHGLLSGNIGYPASQVAQTASDKDTLVMELSSFQLMGVQEFHPEIAVITNLMPTHIDYHGSFSEYVAAKWNIQNKMTAADFLVLNFNQDLAKDLTSKTEATVVPFSTLEKVDGAYLEDGQLYFRGEVVMAANEIGVPGSHNVENALATIAVAKLRGVDNQTIKETLSAFGGVKHRLQFVDDIKGVKFYNDSKSTNILATQKALSGFDNSKVVLIAGGLDRGNEFDELVPDIPGLKKMVILGQSAERVKRAADKAGVAYVEATDIADATRKAYEIATQGDVVLLSPANASWDMYANFEVRGDLFIDTVAELKE

SEQ ID NO: 2859 - protein, 213 aa, Streptococcus pneumoniae
MIELKNISKKFGSRQLFSDTNLHFEGGKIYALIGTSGCGKTTFLNMIGRLEPYDKGQIIYDGTSLKDIKPSVFFRDYLGYLFQDFGLIENQTVKENLNLGLVGKKLKEKEKISLMKQALNRVNLSYLDLKQPIFELSGGEAQRVALAKIILKDPPLILADEPTASLDPKNSEELLSILESLKNPNRTIIIATHNPLIWEQVDQVIRVTDLSHR

SEQ ID NO: 2860 - protein, 673 aa, Streptococcus pneumoniae
MKKLFILLSTFFLSFFLAWIIVLRAPQYLYASYDSVSLLRVKKDTQEPTREVFEQELENFANSEQSLIARRIVEPSKDGTTHFTYATYGQGTLPKEFQEASQESRERSDPLNSYLLLSGSLTKEKLADKLGDLGYKASADRKIPPYFLAFRILLNPLILISLAIFGLSFFALVIITRIKEMRAAGIKLFSGQTLLSIMGHSLSTDIKWLLLSALLSFLGGGVVLFSQGLFYPILLATYGFGISFYLLFLLAISILLMLLYLMSLSYKALVPVIKGRLPLKRLMILTLLCQLVAVFTVGYAVKTGLMSYQRLKELEISKQAWQDRADYYQISFGLGDRGKDTENQSKWYAFAKEAIEEEQALYVKDNLLHFANPQGKNEQGETLDTYSPDANTLYVSPSYLDKEKVVVDAETKQKLAHLQKGEFILLLPEHLRSREAELKKVFEERLSYYGKSGEEASAPLDYEMKAHVSYLSMGEKRFVYNNGENPVSTQYLTDPILVVFTPTSTGDSFISLSSWSINAGKQLFIKGYESGLELLKKAGIYEQVSYLKEGRSVYLTRYNEVQTETATLILGAIVGIASSLLLFYSVNLLYFEQFRRDILIKRISGLRFFETHAQYMVSQFASFVFGASLFILSSRDLVIGLLTLLVFLASAVLTLYRQAQKESRVSMTIMKGK

SEQ ID NO: 2861 - protein, 134 aa, Streptococcus pneumoniae
MLFLSHKKAVSIKERGGLILLHCCSRCDFFERKNKMKTKKHRLLALALISSFTLLGAASAAVQYPDGGVWTYGEGSGGGWAFSNYYHGKKYHYSSLVSRWNSHSDKGEAPAGKTSYAWIWTKWGEQVAFYCDYD

SEQ ID NO: 2862 - protein, 72 aa, Streptococcus pneumoniae
MQPVLTKYKIDAINEFYSSFSHSYYPSKRDDVIVQNNSNYCKIPSKKESQNSLFYLLLLFLTGMSVMSLTLK

SEQ ID NO: 2863 - protein, 84 aa, Streptococcus pneumoniae
MVYLVLGILLLLLYVFATPESIKGTVNIVAMVCILVALLILLVLSFLKIFQLPTEIFLAIAMLILAYFSVRDITLMPVKKSKRR

SEQ ID NO: 2864 - protein, 620 aa, Streptococcus pneumoniae
LNIIEEIMTKLREDIRNIAIIAHVDHGKTTLVDELLKQSETLDARTELAERAMDSNDIEKERGITILAKNTAVAYNGTRINIMDTPGHADFGGEVERIMKMVDGVVLVVDAYEGTMPQTRFVLKKALEQDLVPIVVVNKIDKPSARPAEVVDEVLELFIELGADDDQLDFPVVYASAINGTSSLSDDPADQEATMAPIFDTIIDHIPAPVDNSDEPLQFQVSLLDYNDFVGRIGIGRVFRGTVKVGDQVTLSKLDGTTKNFRVTKLFGFFGLERREIQEAKAGDLIAVSGMEDIFVGETITPTDAVEALPILHIDEPTLQMTFLVNNSPFAGKEGKWVTSRKVEERLQAELQTDVSLRVDPTDSPDKWTVSGRGELHLSILIETMRREGYELQVSRPEVIVKEIDGVKCEPFERVQIDTPEEYQGSVIQSLSERKGEMLDMISTGNGQTRLVFLVPARGLIGYSTEFLSMTRGYGIMNHTFDQYLPLIPGEIGGRHRGALVSIDAGKATTYSIMSIEERGTIFVNPGTEVYEGMIIGENSRENDLTVNITKAKQMTNVRSATKDQTAVIKTPRILTLEESLEFLNDDEYMEVTPESIRLRKQILNKAEREKANKKKKSAE

SEQ ID NO: 2865 - protein, 241 aa, Streptococcus pneumoniae
MRLDNLLAQEKISRKAMKQALLRGEILVDGCPARSLAQNIDTGLQELLFQDRIIQGYEHTYLMLHKPAGVVTANKDKELPTVMDLLPSDIQSDKLYAVGRLDRDTTGLLLLTDNGPLGFQLLHPQYHVDKTYQVQVNGLLTPDHIQTFQKGIVFLDGTICKPARLEILSASPSFSQASITISEGKFHQIKKMFLSVGVKVTSLKRIQFGDFTLNPDLAESNYRPLNQKELQIIKNYLEMSR

SEQ ID NO: 2866 - protein, 65 aa, Streptococcus pneumoniae
VGILSIILGLLFPIVGLILGIIGLVLAISYQKESQLDYKIEKILNILGIVISVVNWIVAIALIFR

SEQ ID NO: 2867 - protein, 126 aa, Streptococcus pneumoniae
MVTWILWALILAMLAWMGFNYLRIRRAAKIVDNEEFEALIRTGQLIDLRDPAEFHRKHILGARNIPSSQLKTSLAALRKDKPVLLYENQRAQRVTNAALYLKKQGFSEIYILSYGLDSWKGKVKTS

SEQ ID NO: 2868 - protein, 73 aa, Streptococcus pneumoniae
MKTFYDVQQFLKRFGIIVYMGKRLYDIELMKLELSRIYDAGLMDKLDYLEAEAVLRREHKVELDYIEKNGEKN

SEQ ID NO: 2869 - protein, 302 aa, Streptococcus pneumoniae
MRIQQLHYIIKIVETGSMNEAAKQLFITQPSLSNAVRDLENEMGIEIFIRNPKGITLTRDGMEFLSYARQVVEQTQLLEERYKNPVAHRELFSVSSQHYAFVVNAFVSLLKKSDMEKYELFLRETRTWEIIDDVKNFRSEVGVLFLNSYNRDVLTKMLDDNHLLAHHLFTAQPHIFVSKTNPLAKKDKVKLSDLENFPYLSYDQGTHNSFYFSEEILSQEHHKKSIVVSDRATLFNLLIGLDGYTIATGILNSNLNGDNIVSIPLDIDDPIELVYIQHEKTSLSKMGERFIDYLLEEVQFDS

SEQ ID NO: 2870 - protein, 251 aa, Streptococcus pneumoniae
MPTILITGASGGLAQEMVKLLPNDQLILLGRNKEKLAQLYGNYSHAELIEIDITDDSALEALVTDLYLRYGKIDVLINNAGYGIFEGFDQIADKDIHQMFEVNTFALMNLSRHLAARMKESSKGHIINIVSMAGLIATGKSSLYSATKFAAIGFSNALRLELMPYGVYVTTVNPGPIRTGFFDQADPDGTYLKSVDRFLLEADAVAKKIVKIIGKNKRELNLPILLNLAHKFYTLFPKLADKLAGETFNYK

SEQ ID NO: 2871 - protein, 309 aa, Streptococcus pneumoniae
MDIQFLGTGAGQPSKARNVSSLALKLLDEINEVWLFDCGEGTQNRILETTIRPRKVSKIFITHLHGDHIFGLPGFLSSRAFQANEEQTDLEIYGPQGIKSFVLTSLRVSGSRLPYRIHFHEFDQDSLGKILEIDKFTVYAEELDHTIFCVGYRVMQKDLEGTLDAEKLKAAGVPFGPLFGKIKNGQDLVLEDGTEIKAADYISAPRPGKIITILGDTRKTDASVRLAVNADVLVHESTYGKGDEKIARNHGHSTNMQAAQVAVEAGAKRLLLNHISARFLSKDISKLKKDAATIFENVHVVKDLEEVEI

SEQ ID NO: 2872 - protein, 207 aa, Streptococcus pneumoniae
MTDIKTLALKYGGYTSLDKVYLDQLLAGKTDQEQLTLITPPPSVVNAYFAELYQKKSPQAATDYFAELSQELNLYNTEPSFTLENKPFIRLNLSGKSFGFCYESDGLGRIFFENEEKISDDLLFEIAQIFPHQLVFEESGKIYMKPVEDEEVISLESLTALTDLERLADGRKRLKGYSQEDLLQEAAAFSGKRYFRSENRTAMLYID

SEQ ID NO: 2873 - protein, 412 aa, Streptococcus pneumoniae
MIETENKEERVLLIGVELQGMDSFDLSMEELASLAKTAGAVVVDSYRQKREKYDSKTFVGSGKLEEIALMVDAEEITTVIVNNRLTPRQNVNLEEVLGVKVIDRMQLILDIFAMRARSHEGKLQVHLAQFKYLLPRLVGQGIMLSRQAGGIGSRGPGESQLELNRRSVRNQITDIERQLKVVEKNRATVREKRLESSTFKIGLIGYTNAGKSTIMNILTSKTQYEADELFATLDATTKSIHLGGNLQVTLTDTVGFIQDLPTELVSSFKSTLEESKHVDLLVHVIDASNPYHEEHEKTVLSIMKDLDMEDIPHLTLYNKADLVEDFTPTQTPYTLISAKSEDSRENLQALLLDKIKEIFEAFTLRVPFSKSYKIHDLESVAILEERDYQEDGEVITGYISEKNKWRLEEFYD

SEQ ID NO: 2874 - protein, 311 aa, Streptococcus pneumoniae
LCYNNSNEKMGIFQGKKMKTKIIVIVGPTAVGKTALAIEVAKRFNGEVVSGDSQQVYRGLDIGTAKASPEEQAAVPHHLIDVREITESYSAFDFVSEAKMTIEGIHNRGKLAIIAGGTGLYIQSLLEGYHLGGETPHEEILAYRASLEPYSDEELAHLVEQAGLEIPQFNRRRAMRALEIAHFGQDLENQEILYEPLIICLDDERSQLYERINHRVDLMFEAGLLDEAKWLFDHSPNVQAAKGIGYKELFPYFRGEQTFEEARESLNQATRRFAKRQLTWFRNRMLVTFYHIGESGVQDRILSQIEESLDD

SEQ ID NO: 2875 - protein, 62 aa, Streptococcus pneumoniae
MKAAFCSSGSITFFLNAYSAHATAATVHATPVTRPLANPLAMSLPPLYSQSASLLKRSHFSD

SEQ ID NO: 2876 - protein, 65 aa, Streptococcus pneumoniae
PILNRFGKLVGWETFKIPTQVWFLNVPEGTIFLNIKAEDLRLVDYDPVKPQLKFALAFKRIEKRS

SEQ ID NO: 2877 - protein, 220 aa, Streptococcus pneumoniae
LENKIAPQLLWSRRLADGRHMCAQEWLTGKILTPYDMNRKQIVNILTRLHRSRRLMTQLSRLGYAMETPVDLLQSWQETAPDALRKNHFISEVMADLRQTIPGFREDHATIVHGDVRHSNWIETDSGLIYLVDWDSVRLTDRMFDVAHMLCHYISEHQWKEWLTYYGYKYNQTVLSKLYWYGQLSYLSQISKYYMNQDLENVNREIHGLRHFRDKYGKRR

SEQ ID NO: 2878 - protein, 211 aa, Streptococcus pneumoniae
MRVRNRKGATELLEANPQYVVLNPLEAKAKWRDLFGNDNPIHVEVGSGKGAFVSGMAKQNPDINYIGIDIQKSVLSYALDKVLEVGVPNIKLLWVDGSDLTDYFEDGEIDRLYLNFSDPWPKKRHEKRRLTYKTFLDTFKRILPENGEIHFKTDNRGLFEYSLVSFSQYGMKLNGVWLDLHASDFEGNVMTEYEQKFSNKGQVIYRVEAEF

SEQ ID NO: 2879 - protein, 88 aa, Streptococcus pneumoniae
VDIEYGKIGSDMILSIFVDKPEGITLNDTADLTEIISPCPRHHQARSLPRTIFPRNYQSRLGTSFENQGCRRWSGWKIHPCRTLPSHR

SEQ ID NO: 2880 - protein, 102 aa, Streptococcus pneumoniae
QKLSVPVLDTIKPDPFPEQYFLEITSPGLERPLKTKDAVAGAVGKYIHVGLYQAIDKQKVFEGTLLAFEEDELTMEYMDKTRKKTVRIPYSLVSKARLAVKL

SEQ ID NO: 2881 - protein, 378 aa, Streptococcus pneumoniae
MSKEMLEAFRILEEDKGIKKEDIIDAVVESLRSAYRRRYGQSDSVAIDFNEKTGDFTVYTVREVVDEVFDSRLEISLKDALAINSAYELGDKIKFEEAPAEFGRVAAQSAKQTIMEKMRKQTRAITYNTYKEHEQEIMSGTVERFDNRFIYVNLGSIEAQLSKQDQIPGEVFASHDRIEVYVYKVEDNPRGVNVFVSRSHPEMIKRLMEQEIPEVYDGTVEIMSVAREAGDRTKVAVRSHNPNVDAIGTIVGRGGANIKKITSKFHPARYDAKNDRMVPIEENIDVIEWVADPAEFIYNAIAPAEVDQVIFDENDSKRALVVVPDNKLSLAIGRRGQNVRLAAHLTGYRIDIKSASEFEAMEDAASVELEVENDTVEE

SEQ ID NO: 2882 - protein, 97 aa, Streptococcus pneumoniae
MKTRKIPLRKSVVSNEVIDKRDLLRIVKNKEGQVFIDPTGKANGRGAYIKLDNAEALEAKKKKVFNRSFSMEVEESFYDELIAYVDHKVKRRELGLE

SEQ ID NO: 2883 - protein, 99 aa, Streptococcus pneumoniae
LNKQKISNLLGLAQRAGRIISGEELVVKAIQDGKAKLVFLAHDAGPNLAKKIQDKSHYYQVEIVTVFSTLELSIAVGKSRKVLAVTDAGFTKKMRSLME

SEQ ID NO: 2884 - protein, 164 aa, Streptococcus pneumoniae
LPLFCLRRSACSLARASRSALKLRLCGFAATFSVFGATGSAGFASSLATAGLAGSDFSAFFSALTFGAAGFASTFGAAAGLKLAAIFAATASSTLDEWLFTSKPNSFARATTSLLSFPSSFAISYNLFLDKSCPPLLFHKRPHFLCKSSICYSQNLSRFPDCYA

SEQ ID NO: 2885 - protein, 930 aa, Streptococcus pneumoniae
LSKKRLYEIAKELGKESKEVVARAKELGLDVKSHSSSVEEAVAAKIAASFKPAAAPKVEAKPAAPKVSAEKKAEKSEPAKPAVAKEEAKPAEPVAPKTEKVAAKPQSRNFKAEREARAKEQAERRKQNKGNNRDQQQNGNRQKNDGRNGGKQGQSNRDNRRFNDQAKKQQGQQKRRNERRQQEDKRSNQVAPRIDFKARAAALKAEQNAEYARSSEERFKQYQAAKEALAQANKRKEPEEIFEEAAKLAEQAQQVQAVVEVVPEKKEPAVDTRRKKQARPDKNRDDYDHEEDGPRKQQKNRSSQNQVRNQKNSNWNNNKKNKKGNNKNNRNQTPKPVTERKFHELPTEFEYTDGMTVAEIAKRIKREPAEIVKKLFMMGVMATQNQSLDGETIELLMVDYGIEAKQKVEVDNADIERFFVEDGYLNEDELVERPPVVTIMGHVDHGKTTLLDTLRNSRVATGEAGGITQHIGAYQIVENGKKITFLDTPGHAAFTSMRARGASVTDITILVVAADDGVMPQTIEAINHSKAANVPIIVAINKIDKPGANPERVIGELAEHGVMSTAWGGDSEFVEISAKFNQNIEELLETVLLVAEIQELKADPTVRAIGTVIEARLDKGKGAVATLLVQQGTLNVQDPIVVGNTFGRVRAMTNDLGRRVKVAGPSTPVSITGLNEAPMAGDHFAVYEDEKSARAAGEERAKRALMKQRQATQRVSLENLFDTLKAGELKSVNVIIKADVQGSVEALSASLQKIDVEGVKVTIVHSAVGAINESDVTLAEASNAFIVGFNVRPTPQARQQAEADDVEIRLHSIIYKVIEEMEEAMKGMLDPEFEEKVIGEAVIRETFKVSKVGTIGGFMVINGKVARDSKVRVIRDGVVIYDGELASLKHYKDDVKEVTNGREGGLMIDGYNDIKMDDVIEAYVMEEIKR

SEQ ID NO: 2886 - protein, 81 aa, Streptococcus pneumoniae
LGFLVIRSKVTQNGVINLGNRQVTQHLNICDGHTLDTWITDFLLQNLIDFTLDFHAHTIRTEMICHDIPFSTLNQKLGQQT

SEQ ID NO: 2887 - protein, 116 aa, Streptococcus pneumoniae
MANHFRTDRVGMEIKREVNEILQKKVRDPRVQGVTITDVQMLGDLSVAKVYYTILSNLASDNQKAQIGLEKATGTIKRELGRNLKLYKIPDLTFVKDESIEYGNKIDEMLRNLDKN

SEQ ID NO: 2888 - protein, 259 aa, Streptococcus pneumoniae
MAEQDLAMQVLQQVVKLPVVKVDSSKFLVDKFSKELGPQDIPTLLEQGPTSLLSQEILDRVANACIRDNVLLASGTSVLAGLPGGLAMAITIPADVAQFYAFSLKLAQELGYIYGYEDLWVSREELSEDAQNTLLLYLGVMLGVNGTAALLRAGGITIAKQVMKTVPNKALTKTLWYPILKKVLKIFGVNLTKGGLAKGMGKFIPILGGIISGGLTFATMKPMGESLQKELSKLVNYSEVQYQEDVETIRKEAEIIEGE

SEQ ID NO: 2889 - protein, 83 aa, Streptococcus pneumoniae
VKFNIKKMLKQSEKRLKSSKESNMGLIKTLAKIYGNYFLTVQGVKVMKTIKKADHVVVGLGKLFIADKLMDTARWLIKPEERE

SEQ ID NO: 2890 - protein, 73 aa, Streptococcus pneumoniae
VGFLLVFCDLDYHLDKFKEPIQYLVKQQLNCKRNDHPKEFHNPNNRFDKKNSKKTKKISFSLLWLNEPPSRIH

SEQ ID NO: 2891 - protein, 64 aa, Streptococcus pneumoniae
LFENLFKPRQLHLAVYMLLTSSVLSTTSKRCFELTSSVLSTTSKHCFKQPAASFLVCSLIFIEY

SEQ ID NO: 2892 - protein, 77 aa, Streptococcus pneumoniae
MDNIIDVSIPVAEVVDKHPEVLEILVELGFKPLANPLMRNTVGRKVSLKQGSKLAGTPMDKIVRTLEANGYEVIGLD

SEQ ID NO: 2893 - protein, 444 aa, Streptococcus pneumoniae
MTDERIHVLRDILLELHNGASPESVQDRFDATFTGVSAIEISLMEHELMNSDSGVTFEDVMELCDVHANLFKNAIKGVEVSDTEHPGHPVRVFKEENLALRAALIRIRRLLDTYESMEDEEMLAEMRKGLVRQMGLVGQFDIHYQRKEELFFPIMERYGHDSPPKVMWGVDDQIRELFQTALTTAKSLPEVSISSVKEAFEAFATEFESMIFKEESILLMILLESFTQDDWLQIAEESDAYGYAIIRPSEKWVPERQIFIEEKIAEEPVQLDTAEGQVQQVIDTPEGHFTITFTPKEKEAVLDRHSQQAFGNGYLSVEQANLILNHLPMEITFVNKEDIFQYYNDNTPADEMIFKRTPSQVGRNVELCHPPKYLDKVKAIMKGLREGTKDKYEMWFKSESRGKFVHITYAAVHDENGEFQGVLEYVQDIQPYREIDTDYFRGLE

SEQ ID NO: 2894 - protein, 84 aa, Streptococcus pneumoniae
MSYEQEFMKEFEAWVNTQIMINDMAHKESQKVYEEDQDERAKDAMIRYESRLDAYQFLLGKFENFKVGKGFHDLPEGLFGERNY

SEQ ID NO: 2895 - protein, 131 aa, Streptococcus pneumoniae
MSKKLNRKKQLRNGLRRAGAFSSTVTKVVDETKKVVKRAEQSASAAGKAVSKKVEQAVEAPKEQAQKVANSVEDFAANLGGLPLDRAKTFYDEGIKSASDFKNWTEKELLALKGIGPATIKKLKENGIKFK

SEQ ID NO: 2896 - protein, 68 aa, Streptococcus pneumoniae
VDFSAPPLSVKCGIQNTSNGSIVARFFRKCKAQEKLLELDAIFFQFLDGSWADSFQGKEFFFSPVFEI

SEQ ID NO: 2897 - protein, 149 aa, Streptococcus pneumoniae
VIGVVARENAAEQIKQYQKFTVNISDETSMLAMEQAGFISHQEKLERLGVHYEISERTQISILDACPLVLDCRVDRIVEEDGICHIFAKILERLVAPEFLDEKGHFKNQLFAPTYFMGDGYQRVYRYLDKRVDMKGSFIKKARKKDGKN

SEQ ID NO: 2898 - protein, 185 aa, Streptococcus pneumoniae
MARTELSDKIETERLVLRVRTVADAEDIHAYASLPEVAYPAGFPPVKTLEDEIYYLEHILPERNQKENLPAGYGIVIKGTDKIAGSVDFNHRYGDDVLELGYTLHSDYWGRGYVPEAARALIDLAFKDLGLHKIELTCFGYNLQSKRVAEKLGFTLEARIRDRKDAQGNCCDDLRYALLKSEWEE

SEQ ID NO: 2899 - protein, 320 aa, Streptococcus pneumoniae
MSDVKEEVSSLSEKQLRQIDVEYAELNDSDIIERLAYLEINNNEKRIVISDIEPTKEIMSVSDQIFEIQKNFQKIKNMFELFISDVSDFLSIKNKLESKELEIEEADVNRFMIHLLSSGKLFVDFNENQIKQKYSKDSEEFDCIHGFASYQYDINFTYRFCHSLRNYSQHTDLPINEVKAVSPDDETVIIDFYIDLDYLLNSNFKWKKLKGELIKLNQETSKIDAIALVKEYFNALTELYGNYNKLFLKLNHNTLVDIKSKLESLKLKHSRYYISKISKYDLKYNPGNYTMSPLAAFAEIEEIYIELSKIGLVKIVNKSN

SEQ ID NO: 2900 - protein, 883 aa, Streptococcus pneumoniae
MSKELSSKYNPAEVEAGRYQKWLDADVFKPSGDQKAKPYSIVIPPPNVTGKLHLGHAWDTTLQDIIIRQKRMQGFDTLWLPGMDHAGIATQAKVEERLRGEGISRYDLGRESFLTKVWEWKDEYATTIKEQWGKMGLSVDYSRERFTLDEGLSKAVRKVFVDLYKKGWIYRGEFIINWDPAARTALSDIEVIHKDVEGAFYHMNYMLEDGSRALEVATTRPETMFGDVAVAVNPEDPRYKDLIGKNVILPIANKLIPIVGDEHADPEFGTGVVKITPAHDPNDFLVGQRHNLPQVNVMNDDGTMNELAFEFSGMDRFEARKAVVAKLEEIGALVKIEKRVHSVGHSERTGVVVEPRLSTQWFVKMDQLAKNAIANQDTEDKVEFYPPRFNDTFLQWMENVHDWVISRQLWWGHQIPAWYNADGEMYVGEEAPEGDGWTQDEDVLDTWFSSALWPFSTMGWPEVDSEDFKRYFPTSTLVTGYDIIFFWVSRMIFQSLEFTGRQPFQNVLIHGLIRDEEGRKMSKSLGNGIDPMDVIDKYGTDSLRWFLSNGSAPGQDVRFSYEKMDASWNFINKIWNISRYILMNNGGLTLDVAHDNVTKVATGEAGNVTDRWILHNLNETIAKVTENFDKFEFGVAGHILYNFIWEEFANWYVELTKEVLYSDNEDDKVITRSVLLYTLDKILRLLHPIMPFVTEEIFGQYAEGSIVTAAYPTVNPAFEDLAAHTGVESLKNLIRAVRNARAEVNVAPSKPITILVKTSDSDLEAFFNSNVNYIKRFTNPEHLEIASTIPAPELAMSSVITGAEIYLPLADLLNVEEELARLDKELAKWQKELDMVGKKLSNERFVANAKPEVVQKERDKQADYQAKYDATVARIDEMKKLVK

SEQ ID NO: 2901 - protein, 251 aa, Streptococcus pneumoniae
MSKHPHYELLNLIGYGLAKFDKLFIKEFQCSSKSEFYRYVVSLGIAETTGVVKNRMDLFDPYFDNNRKGWWQKAEVYRFRKDLIDMMFGNEDVHSYAEIVKMLLASEGKKTGITIVEKPIVRTKFKRLQETGMEAENYFILHFDKEEKFQGGQLTDARLYGDGYDFQVDVQEYSYLAEVKGIRKSKGRVRLTAKEFEKVKEFQSDFILSLVTNLDDIPKLVLIDNPLKHFEFKKNIIKNEIIEYRSVEDLY

SEQ ID NO: 2902 - protein, 267 aa, Streptococcus pneumoniae
MQPTYNIDNPNLSYEAKRDLWRIGFGLQKVDNLVPSAYMESLAEKQSRGELTYEQVYEDATAYHHTIDASTEEADLVSLRIVELLSRRGFSFSPATLLAIHKELFQDIFEPSIPVGQFRQTNITKNEPVLNGESVVYSDYSMIQMTLDYDFNQEKQVAYATLTQADVVKQIQHFISGIWQIHPFREGNTRTVTVFLIQYLREFGFDIDNTPFQQHSKYFRDALVLDNAKILQRRSEFLTAFFENLLLGGQNDLSSEKMYLDLDLDFS

SEQ ID NO: 2903 - protein, 94 aa, Streptococcus pneumoniae
PRLAIPTRFLSSVPKSKGIQASMSRKGNSQDNGMMESFFGILKSEMFYGYEKTFKSLNQLEQAIVDYIDYYNNKRIKVKLKGLSLVQYRTKSFG

SEQ ID NO: 2904 - protein, 101 aa, Streptococcus pneumoniae
MEKCYTDVTEFAIPASTQKLYLSPVLDGFNSEIIAYNLSTSPNLEQVQTMLEQAFTEKYYENTILHSDQGWQYRHDSYHRFLRVREFKHLCHARETAKTTV

SEQ ID NO: 2905 - protein, 90 aa, Streptococcus pneumoniae
MTEFSLDLLLKAIKLARSTYYYHLKQLDKPDKDQELKAEIQSIFIEHKGNYAYRCIHLELRNRGYLVNHKRVQGLMKVLNLQAKMRQKRK

SEQ ID NO: 2906 - protein, 91 aa, Streptococcus pneumoniae
VYMNYTPKVRQKKSNFWGVFIMKLTYDDKVQIYELRKQGYSLEKLSNKFGINNSNIRYMIKLIDRYGIEFVKKGKNRYYSPDLKQEMINKV

SEQ ID NO: 2907 - protein, 421 aa, Streptococcus pneumoniae
MAVFVSLDGIVVEVLDVFSSFNGDSEFFLCKRLKDKSQFVMERSQFEEMFQLQSSRLTTQEKLQLFTSVFAGRYDVYAKSFINDQGKIQYFPSYDCGWKQLLPEKRSFQTLTDSVLKSHFRGETAIGIFPMHLDDSCHFLVLDFDEGDWKEAGLTIRRIARERQMEAHLEISRSGHGLHIWFFFEEAIPSREARLFGKKLIELAMQESMQLSFDSFDRMFPNQDVLPKGGFGNLIALPFQGEAYHQVRTVFVDEHFQPYGDQWRYLQGIQKISTAKVALLIQEELGKQELDKELKVVLSNMIQLKKSSVTPKTLFFLKNMASFSNPEFYLKQAMRQPTYQIPERMYLFGESDYYLWLPRGLLYPLQDKFKQVVVEDRRKVQRSIRVAFKGELTLEQELALSDMNSKENGLLHAGQVLERAF

SEQ ID NO: 2908 - protein, 398 aa, Streptococcus pneumoniae
MIQSLFKLENSQSLLDEYEMMIVDECHHISALMFEKVVAQLRGKYLYGLTATPERKNGHEPIVFQRIGEILHTADKRETDFKRQLQLRFTSFGHLEIEKTKASNFIQLSDWIATDSARNQLILKDILAQVAEGRNILGLVNRIQQIDVFEKLLKEKEVDDCYIISGKTKVRERTSLLETLEQLDKGFVLLSTGKYIGEDFDLPQLDTLILAAPFSWKNNLIQYAGRIHRNYKDKSLVRIFDYVDIHVPYLEKMFQKRQVAYRKMDYRVIEGEEKQFVYVDSRYEKVLREDLAGERQECLLILPYVHQTKLMNFLKEFRISQIEICIPETVANKAWLDQLKSQKIKVSFTQSKIVTPILLVNKTIVWYGAMPLLGKVDEMTILRLESASIVSELVAGLR

SEQ ID NO: 2909 - protein, 97 aa, Streptococcus pneumoniae
IISSKLLPNVILPRLIIFSVMYTNSKGTLINISVKRVILSLFLRKKLFSISIGFTLSPVFLPKAIPLPKRRISISFLLCAITALWFSIRFMIIKFPF

SEQ ID NO: 2910 - protein, 279 aa, Streptococcus pneumoniae
MIIKRILNHNAVIAQSKKDIDILLFGRGIAFGRKTGDKVNPIDIEKSFFLKNRDNMTRFTEMFINVPLELVYITEKIINLGKITLGNNFDEIIYINLTDHISSSIERYKEGIIISNPLRWEISKYYKEEFELGKRALQIIKKELGIELPIDEAAFIALHFVNANLENNFQESYKITEIIMGIEKIIQDFYCTEFNQDSIDYYRFITHIKLFAHRLVENTTYCDDDDEDLLALMKNKYPREYECGEQVAMFIQTEYNYLLTSSELVYLMAHIRRLTKNLD

SEQ ID NO: 2911 - protein, 612 aa, Streptococcus pneumoniae
MSYKDTVQKILDVIGGEKNVNRVTHCVTRLRLELKDENLVNDDDVKKIPGVIGIMKKNGQYQIILGNDVANYYKEFVKLGNFESDSVVQGHKGNILERIIEYIAGSMTPIIPAMLGGGMLKVLVIILPMLGILQSDSQTIAFLTFFGDAPYYFLPLLLAYSASQKLKVTSTLAMSVAGVLLHPNFVQMVQSGNPLSLFGAPVTPASYGSSVVPILIMVWLMKYIEKMIAKLTPAVTKSFLQPTLVLLVSSCIALVVVGPIGVIVGEGLSNLVGQMYGVAGWLTLAILGAIMPFIVMTGMHWAFAPIFLAASIATPDVLILPAMLGSNLAQGAASMAVALKSKNNNTKQIAFAAGFSALLAGITEPALYGVTLKYKKPLYAAMIGGGLAGLFAGLTSVKAYLFAVPSLIALPQFIYSDVPSNIVNALIVAVISVVITFVLAYIFGIDEEESSSNLEVKAGVSNKKMIFSPISGEIIPLSDVQDKTFSDKLIGDGVAIIPSEGKVYAPFDGKITNIFPTKHAIGLKSDEGVELLIHIGLDTVELKGQGFISHVEEGDRVFKNQLIFEMDLNLIKTKGYETVTPVIVTNTNDFLDVLVLPNNQTIEHSKELLVIL

SEQ ID NO: 2912 - protein, 471 aa, Streptococcus pneumoniae
MTIFPDDFLWGGAVAANQVEGAYNEDGKGLSVQDVLPKGGLGEATENPTEDNLKLIGIDFYHKYKEDISLFSEMGFNVFRTSIAWSRIFPKGDEEEPNEAGLKYYDELFDELHAHGIEPLVTLSHYETPLYLARKYHGWVDRRMIHFYEKFARTVLERYKDKVKYWLTFNEVNSVLELPFTSGGIDIPKENLSKQELYQAIHHELVASSLVTKIAREINSEFKVGCMVLAMPAYPMTPNPKDVWATHEYENLNYLFSDVHVRGYYPNYAKRYFKENDINIEFAAEDAELLKNYTVDFLSFSYYMSVTQSAIPTQYNSGEGNIIGGLVNPYLESSEWGWQIDPIGLRIILNRYYDRYQIPLFIVENGLGAKDQLIKDELNNLTVQDDYRIQYMKEHLLQVAEALQDGVEIMGYTSWGCIDCVSMSTAQLSKRYGLIYVDRNDDGNGTFNRYKKMSFTWYKGVIESNGESLFK

SEQ ID NO: 2913 - protein, 348 aa, Streptococcus pneumoniae
MSTIEEQLKALREETLASLKQITAGNEKEMQDLRVSVLGKKGSLTEILKGMKDVSAEMRPIIGKHVNEARDVLTAAFEETAKLLEEKKVAAQLASESIDVTLPGRPVATGHRHVLTQTSEEIEDIFIGMGYQVVDGFEVEQDYYNFERMNLPKDHPARDMQDTFYITEEILLRTHTSPVQARAMDAHDFSKGPLKMISPGRVFRRDTDDATHSHQFHQIEGLVVGKNISMADLQGTLQLIVQKMFGEERQIRLRPSYFPFTEPSVEVDVSCFKCGGEGCNICKKTGWIEIMGAGMVHPRVLEMSGIDATVYSGFAFGLGQERVAMLRYGINDIRGFYQGDVRFSEQFK

SEQ ID NO: 2914 - protein, 330 aa, Streptococcus pneumoniae
LVESTDIVDSITEHSYTLLSKTKGKARVYSRIDTTHFKDTWVNHTGPHNFDPTCFLTYITAFSTTLEARNIHLNRWLCEWEVRWTQTNLTLFTKHFLDNQLKRSLKISHRDIFPNYQAFDLVELVTVGRIVRIATEDTPWRDHLQRTFRKIMGIHSTRLNWRRVGTEQDFFSDIESILHITSWVVFWKVHTFKVIVVLLHFKTIHDLITHTDEDIFDFFTGLCQNVTVTSRNWTTWKRHIDTLASQLSRDFLFFQELSCFFKSSSQDITSFIDVFPDDWTHLSRNIFHPFEDFSERTLFTKDRDTQILHLFFISSSNLLQASQRFFAKRF

SEQ ID NO: 2915 - protein, 169 aa, Streptococcus pneumoniae
MIIKVEMADVEVLAKIAKQTFRETFAYDNTEEQLQEYFEEAYSLKTLSTELGNPDSETYFIMHEEEIAGFLKVNWGSAQTERELEDAFEIQRLYVLQKFQGFGLGKQLFEFALELATKNSFSWAWLGVWEHNTKAQAFYNRYGFEKFSQHHFMVGQKVDTDWLLRKKLR

SEQ ID NO: 2916 - protein, 800 aa, Streptococcus pneumoniae
MLISYKWLKELVDIDVPSQELAEKMSTTGIEVEGVESPAAGLSKIVVGEVLSCEDVPETHLHVCQVNVGEEERQIVCGAPNVRAGIKVMVALPGARIADNYKIKKGKIRGLESLGMICSLGELGISDSVVPKEFADGIQILPEDAVPGEEVFSYLDLDDEIIELSITPNRADALSMCGVAHEVAAIYDKAVNFKEFTLTETNEAAADALSVSIETDKAPYYAARILDNVTIAPSPQWLQNLLMNEGIRPINNVVDVTNYILLYFGQPMHAFDLDNFEGTDIRVREARAGEKLVTLDGEERDLDVNDLVITVADKPVALAGVMGGQATEISEKSSRVVLEAAVFNGKSIRKTSGRLNLRSESSSRFEKGINVATVNEALDAAASLIAELAGATVRKGIVSAGELDTSDVEVSSTLADVNRVLGTELSYADVEDVFRRLGFGLSGNADSFTVRVPRRRWDITIEADLFEEIARIYGYDRLPTSLPKDDGTAGELTATQKLRRQVRTIAEGAGLTEIITYTLTTPEKAVEFTAQPSNLTELMWPMTVDRSVLRQNMISGILDTVAYNVARKNKNLALYEIGKVFEQTGNPKEELPNEINSFAFALTGLVAEKDFQTAAVPVDFFYAKGILEALFTRLGLQVTYTATSEIASLHPGRTAVISLGDQVLGFLGQVHPVTAKAYDIPETYVAELNLSAIEAALQPATPFVEITKFPAVSRDVALLLKAEVTHQEVVDAIQAAGVKRLTDIKLFDVFSGEKLGLGMKSMAYSLTFQNPEDSLTDEEVARYMEKIQASLEEKVNAEVR

SEQ ID NO: 2917 - protein, 295 aa, Streptococcus pneumoniae
LAQIYAFPLATATMAAILSFLFFFLSFYKKNKQIRFYSGILLLLSLILLLFGTDKTLSSASNKTKTLKLVTWNVANQIEAQHIERIFSHFDADMAIFPELATNIRGEQENQRIKLLFHQVGLSMANYDIFTSPPTNSGIAPVTVIVKKSYGFYTEAKTFHTTRFGTIVLHSRKQNIPDIIALHTAPPLPGLMEIWKQDLNIIHNQLASKYPKAIIAGDFNATMRHGALAKISSHRDALNALPPFERGTWNSQSPKLFNATIDHILLPKNHYYVKDLDIVSFQNSDHRCIFTEITF

SEQ ID NO: 2918 - protein, 148 aa, Streptococcus pneumoniae
MLRLEDGKKEGKSNREIASLLGKAPQTIHTEIKYGTVRKCLGKGRFKEVYSADYAQQSYENNRKHSVKRSSLTKELKEKILHYHNQKFLPEMMVMAKGVNVGISTIYYWIHHGKLGLSKQDLLYPRKGKSVKKQVSPNFKPADQSIES

SEQ ID NO: 2919 - protein, 88 aa, Streptococcus pneumoniae
LEGCLSELFSKEEILESDMRVAIMSELIEARNKQGISQKKLEEVSGVSQPVIARMETGKTSPQLDTVLKVLASLGKTLAVVPLEQGKS

SEQ ID NO: 2920 - protein, 98 aa, Streptococcus pneumoniae
FETIYLFRTKEKDLKQTSQILCIACFIALFQLDGSNALLVILISDYGLLLEKTITDSSQLFPCSSGTTASVFPRLARTFKTVSNCGLVLPVSILAITG

SEQ ID NO: 2921 - protein, 749 aa, Streptococcus pneumoniae
MSTTIVGFPRLGEFRELKFTTEKYFRKEISEEELLAAAKDLRAKHWNIVKEKGITEIPSNDFSHYDNFLDAAFLFNVVPASVQNLDLSDLERYFALGRGYQGEKGDVRALPMKKWFNTNYHYIVPKFEKDTQVKLAGHKIFDEFQEAKEIGLNTRPVLVGPFTFLQLSDFEEGVKADDFVDSLVAAYQEVFAKLAELGATCIQLDEAALVKDLTAEEKALFLNLYNKLLADKKGLEVLLQTYFGDVRDVYADLVNLPVDAIGFDFVEGKKTLELVKGGFPADKTLYAGIVNGKNIWRNNYEKSLAVLEQIPAENIVLTSSCSLLHVPFTTANEEFEPALLNHFAFAVEKLDEIRDLDAIRNGQGSEALAANKELFATERVGENAELRARIAGLTDTDYTRLPAFAEREAIQEEAFKLPALPTTTIGSFPQTKEVRAKRLAYRKGELSQKEYDAFLAETIDEWIKWQEDIDFDVLVHGEFERNDMVEYFGQNLSGYLFSKNGWVQSYGMRGVKPPIIWGDVTRLNPITVKWSSYAQSRTNKPVKGMLTGPVTILNWSFPREDISIKDSTLQIALAIKDEVLDLEAAGVKIIQIDEAALREKLPLRRSDWYEDYLDWAIPAFRLVHSTVAPDTQIHTHMCYSEFTDIIPAIDNMDADVISFEASRSNLEILDELKAKNFQTEVGPGVYDIHSPRVPNEGEIDNTIEAILAKVPSKKVWINPDCGLKTRGIPETKESLIRLVEAAKAAREKL

SEQ ID NO: 2922 - protein, 288 aa, Streptococcus pneumoniae
MSRQTPSLSFEVFPPNPAVGNGNIISALQDMQELAPHFISVTASNNKFNIKETTVRLADFIQNDLAIPTIAHLPAIYLTKDKVAETIADLDKVGVQKILALRGDIIPDVEPQKDFRYATDLIEFIKEQTPHFDIIGACYPEGHPDSPNQISDIQNLKKKVDAGCSSLVTQLFFDNERFYDFQDKCILAGIDVPIHAGIMPILNRNQALRLLKTCENIHLPRKFKAILDKYEHDPESLRAAGLAYAVDQIVDLVTQDVAGVHLYTMNNADTAKYIHQATHALFNHQSLG

SEQ ID NO: 2923 - protein, 89 aa, Streptococcus pneumoniae
VLGSLSFFLRNETKIQLLKMLSRQATQRKIGNRTTERLLLGRFIFFHRVVGVFSFQDTSLERFNIKVSKPFTLIAIGRLAKCFTNSLVK

SEQ ID NO: 2924 - protein, 737 aa, Streptococcus pneumoniae
MAKQVFQTTFAGRELIVETGQVAKQANGSVVVRYGESTVLTAAVMSKKMATGDFFPLQVNYEEKMYAAGKFPGGFMKREGRPSTDATLTARLIDRPIRPMFAEGFRNEVQVINTVLSYDENASAPMAAMFGSSLALSISDIPFDGPIAGVQVGYVDGQIIINPSQEQAEQSLLELTVAGTKHAVNMVESGAKELSEEIMLEALLKGHEAVKELIAFQEEIVAAVGKEKAEVELLHVDAELQAEIIAAYNSDLQKAVQVEEKLAREAATQVVKDQVTAVYEEKYADHEEFDRIMRDVAEILEQMEHAEVRRLITEDKVRPDGRKVDEIRPLDAVVDFLPRVHGSGLFTRGQTQALSVLTLAPMGETQIIDGLDPEYKKRFMHHYNFPQYSVGETGRYGAPGRREIGHGALGERALAQVLPSLEEFPYAIRLVAEVLESNGSSSQASICAGTLALMAGGVPIKAPVAGIAMGLISDGNNYTVLTDIQGLEDHFGDMDFKVAGTRDGITALQMDIKIQGITAEILTEALAQAKKARFEILDVIEATIPEVRLELAPTAPKIDTIKIDVDKIKIVIGKGGETIDKIIAETGVKIDIDEEGNVSIYSSDQDAINRAKEIIAGLVREAKVDEVYRAKVVRIEKFGAFVNLFDKTDALVHISEMAWTRTNRVEDLVEIGDEVDVKVIKIDEKGRIDASMKALLPRPPKPEHDEKGEKSERPHRPRHHKDHKPKKEFTETPKDSE

SEQ ID NO: 2925 - protein, 205 aa, Streptococcus pneumoniae
MGWWRETIDIVKENDPAARTTLEVLLTYPGVKALAAHRLSHFLWKYDFKLLARMHSQFWRFWTQIEIHPGAQIDSGVFIDHGSGLVIGETAIVEKGVLLYHGVTLGGTGKDCGKRHPTVRKGALISAHAQVIGPVEIGENAKVGAAAVVVADVPSDVTVVGIPAKIVRLHGKKDEPVIHEVEEKREYYVNKLEQAKDASHRSSGL

SEQ ID NO: 2926 - protein, 294 aa, Streptococcus pneumoniae
MIQARNKLSQEELSEAKKVINCCQNYDGTYRDPYLSNMLNFDPNMPAFFLYYEKGELVGLLTVYADDQDVEVTILVHPGHRRQGIARALFTSFERETASFPIRSVTFQTERIFLENHPDFASNWGLIEDEETETWLGKDRRPYQLAKLSNLEVLLADSSYQEQISQLKFQAFSGEHESREVVDRYVAEALKDPESRLYILLKDGQVIGTCTVDLSSDTNYFYGLAISEPERGKGYGSYLAKSLVNQLIEQNDKEFQIAVEDSNVGAKRLYEKIGFVKQTQVVYLNEKGARDSEV

SEQ ID NO: 2927 - protein, 151 aa, Streptococcus pneumoniae
VGFFYTEIDIPLTLIGKAFLDQVFHKTDDVCHKLHYTRMASRRFHAQCRHILTKGSDVLIRNLLRCDAFFPGTVDNLIIHICKIGNIGNLIPTVLKIATNRIKSYRRTGVSHVNIVVHGWPTNIHLDLAVLNRDKFSQITRHGVIDFNHKS

SEQ ID NO: 2928 - protein, 447 aa, Streptococcus pneumoniae
MIKIYDTMSRDLREFVPIEDGKIKMYVCGPTVYNYIHVGNARSTVAFDTIRRYFEYRGYKVAYISNFTDVDDKIINRAREEGITPQEVADKYIAAFREDVTALGVKPATRHPRVVEFMADIIRFVEDLIEKGFAYESQGDVYFRVEKSHNYAKLANKTLEDLELGASGRTDEETARKENPVDFALWKSSKPGEISWDSPWGPGRPGWHIECSVMSTEILGDTIDIHGGGADLEFPHHTNEIAQSEAKTGKAFANYWMHNGFVNIDNVKMSKSLGNFITVHDALKTLDGQVLRFFFATQHYRKPINFTEKAVRDAETNLKYLKNTYEQPFTGNVDAQELQNFKDKFVAAMDEDFNAANGITVVFEMAKWINSGNYDASVKQALADMLEIFGIVFVEEVLDAEIEDLIQKRQEARANRDFATADQIRDQLVTQGIKLLDTKDGVRWTRD

SEQ ID NO: 2929 - protein, 128 aa, Streptococcus pneumoniae
VIDVNLINGIALAFEGDAVYSMYIRRHLILKGMTKPNKLHQEATKYVSAKAQARLIALMLEEQVLTEKEEEIYKRGRNTNSHTKAKNADVVTYRMSTGFEAVMGYLHMTENLERLESLVSWCIQKVEG

SEQ ID NO: 2930 - protein, 294 aa, Streptococcus pneumoniae
MRAKELQDWFPEARISDQPVEKEGYLTLPLASQQWILLEEAGLSEREKQLVALLTQQEQARSLNPWYSYLVEGKGQAPQVFKKIQLVYCHLSYFQQENLASWLDMMRTLFPNCQTVLQVGAQDYVFVLQQDKYTSVRDILSDTIEAVEYDFGLRLSIMLGQVWSQTGHQALSDLIKAERDLFKTWWRQGHQGVHTFSQLYLWSMGERLVDLKPIKECLHQMILDQDQIQEIILSLWENSAVLTKTAQQLYLHRNSLQYKIDKWEELTGLQLKELTDLTLCYQLILGSLSTIVGL

SEQ ID NO: 2931 - protein, 87 aa, Streptococcus pneumoniae
MGRVDRASVERVDRPDLVLSIDFRFFVNYSWFVKKLIFGEEDCYLLHFYVQSYSGLMLGKYTVTAKTFLEVALIYLIYLCKFYVILL

SEQ ID NO: 2932 - protein, 199 aa, Streptococcus pneumoniae
MQILCYFTITVVANPNNSGEVHLDVSIEDNQGGSGYNFSSVSSSSQTAKYEGAGYNNNSSLYITIDKTSDATALLKLKLNNVNNQPATEVPSSGITVKLNAKDNAGNWTSASNKKEVTVKIVSAKPTYPDKILVKNPDNIKDTEKNAIIEKLKEANKNHPAGAPTFAKGEGEHANDIVATYSDGTTYYVPLNDVTKYAR

SEQ ID NO: 2933 - protein, 51 aa, Streptococcus pneumoniae
LTQFTPHCLDRLFQSSALVSLLRPSITTYSSTGISTCCPSDTPFGLSLGPD

SEQ ID NO: 2934 - protein, 81 aa, Streptococcus pneumoniae
MWYRHSISNCSKAPWGLSVLSRVTCIFTGTKISPSLSLRQCPNHYAFRAGRNLPDKEFRYLRTVIVTAAVYWGFNSYLRLR

SEQ ID NO: 2935 - protein, 77 aa, Streptococcus pneumoniae
VVPYGRAIAQRIKATLGITGLSPPRVHIDGEVWHLDVGSSHPGAVVGPKGWAVRPLKRHASWVQNVVRQFGPYPSRA

SEQ ID NO: 2936 - protein, 71 aa, Streptococcus pneumoniae
CSGYHVALSRRRSRVRFPSGPFKVTQVILDSLAQLVEQLTFNQWVTGSSPVRVIYAGLAELADAPDLGSGA

SEQ ID NO: 2937 - protein, 62 aa, Streptococcus pneumoniae
LVEYLVWDQGVAGSNPVFPIHGGVAQLARASGSYPGGRGFDPLRRYNDLVGPLAQLVRALGS

SEQ ID NO: 2938 - protein, 311 aa, Streptococcus pneumoniae
MKSYQAVYQILSKETDYISGEKIAEKLSLSRTAIWKAIKRLEQEGIEIDSIKNRGYKLMNGDLILPEILEENLPIKVSFKPETKSTQLDAKEAIDLGHEANTLYLASYQTAGRGRFQRSFYSPQGGIYMTLHLKPNLPYDRLPSYTLLVAGAVYKAIKNLTLIDVDIKWVNDIYLNNHKIGGILTEAMTSVETGLVTDIIIGVGINFTIKDFPQELKEKAASLFKATAPITRNELIIEIWRAFFETPAEELLYLYKKQSFILGKEVTFTLEQKDYKGLAKDISENGKLLVQCDNGKEIWLNSGEISLNSWK

SEQ ID NO: 2939 - protein, 286 aa, Streptococcus pneumoniae
MLVFSEYQTGTIDLALSFYGYEECTPNYSFGPAIRDTYVLHYITKGQGKFYYKGKIVDLKEGDFFLLKPEELTFYQADSKEPWAYYWLGITGGKSPDYFALSQISDQSYLIQSETCHTQTTAKLISDIVRFAQITKSSELAQLHIMGQLHELMFHLGTIAPNQKKKNISSTHQLYLECKRLIDSHYPQSLTIQDLAKELSVHRSYLSSVFKEFNTLSPKEYLLYVRMHRARQLLENTQESIKVIAYSVGFSDPLHFSKAYKQYFNQTPSHTRKEYSQYQLVRKATL

SEQ ID NO: 2940 - protein, 720 aa, Streptococcus pneumoniae
MGVRIENNLFYVESKNLSLIIENRNGYLLLKHLGKTIKNYKGSNSVYERDHAFSGNPTATNRTFSLDTQRQIFGQHGLGDFRKPTIQVQHSVTEVTDFRFVEAKILKGQNGPQGLPSPHSMDDTETLVLMLEDSKAQLSLTLYYTTFNNDATIASYSKLDNNSNQEVVIHKDFSFMADFPAADYEIVTLQGAYAREKTVRRQQVEQGIFSISSNRGASGHAQTPALLLCEQGVTEDAGNVFAIQLMYSGNFEAFVQKNQLNEVRVAIGINPENFSWKLAPEEYFETPVALVTHSDQGLTGISHESQNFVLKHIILSEFSKKERPILINNWEATYFDFQREKLLELADEAKKVGIELFVLDDGWFGNRFDDNRALGDWVVNEEKLGGSLESLISAIHERGLQFGLWLEPEMISVDSDLYRQHPDWAIQVPDYEHTYSRNQLVLNLANPQVVEYLKSVLDQLLSYHEIDYIKWDMNRNITKLGNGLTYLETQMQSHQYMLGLYELVSYLTEKHSHILFESCSGGGGRNDLGMMRYFPQVWASDNTDAIARLPIQYGSSYLYPTISMGAHVSAVPNHQMGRTTPLETRGHVAMMGNLGYELDLTSLSDEEKAEIANQVNLYKELRPVVQLGQQYRLINPDTASNEAAVQFNYKNQTIVTYVRVLSVVETMETTLKLKDLDEEGLYELQENGEVYSGAELMYAGLTVILSQGDFLSKQYIFRRL

SEQ ID NO: 2941 - protein, 419 aa, Streptococcus pneumoniae
MKWYKKIGLLATTGLALVGLGACSNYGKSADGTVTIEYFNQKKEMTKTLEEITRDFEKENPKIKVKVVNVPNAGEVLKTRVLAGDVPDVVNIYPQSIELQEWAKAGVFEDLSNKDYLKRVKNGYAEKYAVNEKVYNVPFTANAYGIYYNKDKFEELGLKVPETWDEFEQLVKDIVAKGQTPFGIAGADAWTLNGYNQLAFATATGGGKEANQYLRYSQPNAIKLSDPIMKDDIKVMDILRINGSKQKNWEGAGYTDVIGAFARGDVLMTPNGSWAITAINEQKPNFKIGTFMIPGKEKGQSLTVGAGDLAWSISATTKHPKEANAFVEYMTRPEVMQKYYDVDGSPTAIEGVKQAGEDSPLAGMTEYAFTDRHLVWLQQYWTSEADFHTLTMNYVLTGDKQGMVNDLNAFFNPMKADVD

SEQ ID NO: 2942 - protein, 81 aa, Streptococcus pneumoniae
MTTKAHAQYFCNTFFIVSLLLIHIRFHRVKEGIQIIDHALFITGQDIVHGQGMEVCFTGPVLLQPDQVTIRKGIFGHTSKR

SEQ ID NO: 2943 - protein, 288 aa, Streptococcus pneumoniae
MKKVLQKYWAWAFVVIPLLLQAIFFYVPMFQGAFYSFTNWTGLTYNYKFVGLNNFKLLFMDPKFMNAIGFTAIITIAMVVGEIALGIFIARVLNSKIKGQTFFRAWFFFPAVLSGLTVALIFKQVFNYGLPAIGNALHIEFLQTSLLGTKWGAIFAAVFVLLWQGVAMPIIIFLAGLQSIPTEITEAARIDGATSKQVFWNIELPYLLPSVSIVFILALKGGLTAFDQVFAMTGGGPNNATTSLGLLVYNYAFKNNQFGYANAIAVILFFLIVVISIIQLRVSKKFEI

SEQ ID NO: 2944 - protein, 277 aa, Streptococcus pneumoniae
MKQDERKALIGKYILLILGSVLLLVPLLATLFSSFKPTKDIVDNFFGFPTNFTWDNFSRLLADGIGGYYWNSVVITVLSLLAVMIFIPMAAYSIARNMSKRKAFTIMYTLLILGIFVPFQVIMIPITVMMSKLGLANTFGLILLYLTYAIPQTLFLYVGYIKISIPESLDEAAEIDGANQFTTYFRIIFPMMKPMHATTMIINALWFWNDFMLPLLVLNRDSKMWTLPLFQYNYAGQYFNDYGPSFASYVVGIISITIVYLFFQRHIISGMSNGAVK

SEQ ID NO: 2945 - protein, 481 aa, Streptococcus pneumoniae
MMPIQNKTMLITYSDSLGNNLKDLYDNLEEHFRDAIGGVHLLPFFPSTGDRGFAPVDYDEVDSAFGDWEDVKRLGERYYLMFDFMINHISRQSKYYKDYQEKHEASEFKALFLNWDKFWPENRPTQSDVDLIYKRKDRAPKQEIVFEDGSVEHLWNTFGEEQIDLDVTKEVTMEFIRKTIQHLASNGCDLIRLDAFAYAVKKLDTNDFFVEPDIWDLLDKVRDIATEYGTEFLPEIHEHYSIQFKIADHDYYVYDFALPMVTLYTLYSSRTERLAKWLKMSPMKQFTTLDTHDGIGVVDVKDILTDEEIDYASNELYKVGANVKRKYSSAEYNNLDIYQINSTYYSALGDDEVKYFLARLIQAFAPGIPQVYYVGLLAGKNDLKLLEETKEGRNINRHYYSNEEIAKEVQRPVVKALLNLFSFRNRSEAFDLEGTTEIETPTAHSIVIKRQNKDKSVTAVAEIDLQNQTYRVIENGVEVTF

SEQ ID NO: 2946 - protein, 397 aa, Streptococcus pneumoniae
LKSIGFIEKLKGLSSKELILLGIILSIFLPFYLFVVVLCLYIISLIFTGDMKSILQKMGEHPMLLLFLSYSTVISILAQNWMGLVASVGMFLFTIFFLHYQSILSHKFFRLILQFVLFGSVLSAVFASLEHFQIVKKFNYAFLSPNMQVWHQNRAEVTFFNPNYYGIICCFCIMIAFYLFTTTKLNWLKVFCVIAGFVNLFGLNFTQNRTAFPAIIAGAIIYLFTTIKNWKAFWLSIGVFAIGLSFLFSSDLGVRMGTLDSSMEERISIWDAGMALFKQNPFWGEGPLTYMHSYPRIHAPYHEHAHSLYIDTILSYGIVGTILLVLSSVAPVRLMMDMSQESGKRPIIGLYLSFLTVVAVHGIFDLALFWIQSGFIFLLVMCSIPLEHRMLVSDMTD

SEQ ID NO: 2947 - protein, 133 aa, Streptococcus pneumoniae
ALGADESDDFEELHAASTPAANKTRPAVADTPIFLFSTPLVMGIMNGHPLFHLIPLKIKQIFRIFRLVGTNFSFFFEYMIQIVVRSVKDYSENRKFDAETLEFRKTYSKMKYGRNNVILEFKLNYNNIVEVSF

SEQ ID NO: 2948 - protein, 661 aa, Streptococcus pneumoniae
VENKKIGVSATAGLVLLAAGVLAACSSSKSSDSSAPKAYGYVYTADPETLDYLISSKNSTTVVTSNGIDGLFTNDNYGNLAPAVAEDWEVSKDGLTYTYKIRKGVKWFTSDGEEYAEVTAKDFVNGLKHAADKKSEAMYLAENSVKGLADYLSGTSTDFSTVGVKAVDDYTLQYTLNQPEPFWNSKLTYSIFWPLNEEFETSKGSDFAKPTDPTSLLYNGPFLLKGLTAKSSVEFVKNEQYWDKENVHLDTINLAYYDGSDQESLERNFTSGAYSYARLYPTSSNYSKVAEEYKDNIYYTQSGSGIAGLGVNIDRQSYNYTSKTTDSEKVATKKALLNKDFRQALNFALDRSAYSAQINGKDGAALAVRNLFVKPDFVSAGEKTFGDLVAAQLPAYGDEWKGVNLADGQDGLFNADKAKAEFAKAKKALEADGVQFPIHLDVPVDQASKNYISRIQSFKQSVETVLGVENVVVDIQQMTSDEFLNITYYAANASSEDWDVSGGVSWGPDYQDPSTYLDILKTTSSETTKTYLGFDNPNSPSVVQVGLKEYDKLVDEAARETSDLNVRYEKYAAAQAWLTDSSLFIPAMASSGAAPVLSRIVPFTGASAQTGSKGSDVYFKYLKLQDKVVTKEEYEKAREKWLKEKAESNEKAQKELASHVK

SEQ ID NO: 2949 - protein, 498 aa, Streptococcus pneumoniae
MKKYIFMRVLRSLVSIFLVTTLTYTIIYTLVPRKLIFKQDPNYNKIATTADKRDNYENTVFERMGYIEYYDTRELQEKASSMDSSVTVEANATNKAIYEKYINQLGHGWTLGEFTESGQFYATREIPIFERVFHFYANLIDIDHTNKIQDPENPDLKRYLRFENDPAIGWSLVGSGTKHKYLLYFNSQFPFVHQNFVNLNLGDSYPTYANTPVLQVITQGQGQTKTAQVQFPTGKKTSSVNIYSRTYKSPSQADSREVASYGKDDPYTATESNYQYPSMIVSSAITGLIGLVLAYALAVPLGSAMARFKNTWIDSLSTGTLTFLLALPTIALVYIVRLIGSSIALPDSFPILGAGDWRSYVLPAVILGLLGAPVTAIWIRRYMIDLQSQDFVRFARAKGLSEKEISNKHIFKNAMVPLVSGIPGAIIGVIGGATLTETVFAFPGMGKMLIDSVKASNNSMVVGLVFIFTCISIFSRLLGDIWMTIIDPRIKLTEKGGK

SEQ ID NO: 2950 - protein, 308 aa, Streptococcus pneumoniae
MSTIDKEKFQFVKRDDFASETIDAPAYSYWKSVFKQFMKKKSTVVMLGILVAIILISFIYPMFSKFDFNDVSKVNDFSVRYIKPNAEHWFGTDSNGKSLFDGVWFGARNSILISVIATVINLVIGVFVGGIWGISKSVDRVMMEVYNVISNIPPLLIVIVLTYSIGAGFWNLIFAMSVTTWIGIAFMIRVQILRYRDLEYNLASRTLGTPTLKIVAKNIMPQLVSVIVTTMTQMLPSFISYEAFLSFFGLGLPITVPSLGRLISDYSQNVTTNAYLFWIPLTTLVLVSLSLFVVGQNLADASDPRTHR

SEQ ID NO: 2951 - protein, 355 aa, Streptococcus pneumoniae
MTKEKNVILTARDIVVEFDVRDKVLTAIRGVSLELVEGEVLALVGESGSGKSVLTKTFTGMLEENGRIAQGSIDYRGQDLTALSSHKEWEQIRGAKIATIFQDPMTSLDPIKTIGSQITEVIVKHQGKTAKEAKELAIDYMNKVGIPDADRRFNEYPFQYSGGMRQRIVIAIALACRPDVLICDEPTTALDVTIQAQIIDLLKSLQNEYHFTTIFITHDLGVVASIADKVAVMYAGEIVEYGTVEEVFYDPRHPYTWSLLSSLPQLADDKGDLYSIPGTPPSLYTDLKGDAFALRSDYAMQIDFEQKAPQFSVSETHWAKTWLLHEDAPKVEKPAVIANLHDKIREKMGFAHLAD

SEQ ID NO: 2952 - protein, 112 aa, Streptococcus pneumoniae
MISPLLVSFRPMIARPIVVFPLPDSPTSEKVSPLLIKKLAFLTATNFLLPSPKEISKSLISTNFSDISFLLVSQMGKSHFFTDLIMEICNHSWFFYFWSILMKKPSFSPMCL

SEQ ID NO: 2953 - protein, 308 aa, Streptococcus pneumoniae
MSEKLVEIKDLEISFGEGSKKFVAVKNANFFINKGETFSLVGESGSGKTTIGRAIIGLNDTSNGDIIFDGQKINGKKSREQAAELIRRIQMIFQDPAASLNERATVDYIISEGLYNHRLFKDEEERKEKVQNIIREVGLLAEHLTRYPHEFSGGQRQRIGIARALVMQPDFVIADEPISALDVSVRAQVLNLLKKFQKELGLTYLFIAHDLSVVRFISDRIAVIYKGVIVEVAETEELFNNPIHPYTQALLSAVPIPDPILERKKVLKVYDPSQHDYETDKPSMVEIRPGHYVWANQTELARYQKGLN

SEQ ID NO: 2954 - protein, 418 aa, Streptococcus pneumoniae
MEQLHFITKLLDIKDPNIQILDIINKDTHKEIIAKLDYDAPSCPECGSQMKKYDFQKPSKIPYLETTGMPTRILLRKRRFKCYQCSKIAVAETSLVKKNHQIPRIINQKIAQKLIEKISMTDIAHQLSISTSTVIRKLNDFHFKHDFSCLPEIMSWDEYAFTKGKMSFIAQDFNNLNIITVLEGRTQAIIRNHFLKYDRAVRCRVKIITMDMFSPYYDLARQLFPCAKIVLDRFHIVQHLSRAMSRVRVQIMNQLDRKSHEYKAIKRYWKLIQQDSRKLSDKRFYRPTFRIHLTNKEILNKLLSYSEDLKHHYQLYQLLLFHFQNKEPEKFFGLIEDNLKQVHPLFQTVFKTFLKDKEKIVNALQLHYSNAKLEATNNLIKLIKRNAFGFRNFENFKKRIFIALNIKKERTKFVLSRA

SEQ ID NO: 2955 - protein, 95 aa, Streptococcus pneumoniae
MSFIAQNFEKLDIITVLEGRTQAVIRDHFLKYDRAVRCRVKIITMDMFSPYYDLAKQLRFQISRLRLKQSPRLFHSRMLKSFLIAFTLYNILAVL

SEQ ID NO: 2956 - protein, 172 aa, Streptococcus pneumoniae
MEQLHFITKLLDIKDPNIQILDIINKDTHKEIIAKLDYEAPSCPECGSQMKKYYFQKPSKIPYLETTGMPTRILLRKRRFKCYHCSKIMVAETSIVKKNHQIPRIINQKIAQKLIEKISMTDIAHQLSISTSTVIRKLNDFHFECNFRNLPKIMSWDVETVRGVTVSIGRWR

SEQ ID NO: 2957 - protein, 236 aa, Streptococcus pneumoniae
MKKYQQLFKQIQETIQNETYAVGDFLPSEHDLMEQYQVSRDTVRKALSLLQEEGLIKKIRGQGSQVVKEETVNFPVSNLTSYQELVKELGLRSKTNVVSLDKIIIDKKSSLITGFPEFRMVWKVVRQRVVDDLVSVLDTDYLDMELIPNLTRQIAEQSIYSYIENGLKLLIDYAQKEITIDHSSDRDKILMDIGKDPYVVSIKSKVYLQDGRQFQFTESRHKLEKFRFVDFAKRKK

SEQ ID NO: 2958 - protein, 655 aa, Streptococcus pneumoniae
MGKFEQEAKDLLQAIGGKENVTAVTHCATRMRFVLRDDKKANVKAIESIPAVKGTFTNAGQFQVIIGNDVPIFYNDFTAVSGIEGVSKEATKSAAKSNQNVVQGVMTTLAEIFTPIIPALIVGGLILGFRNVLEGVHWSMLDGKTITESSQFWAGVNHFLWLPGEAIFQFLPVGITWSVSRKMGTSQILGIVLGICLVSPQLLNAYAVASTPAADIAANWVWNFGYFTVNRIGYQAQVIPALLAGLSLSYLEIFWRKHIPEVISMIFVPFLSLIPALILAHTVLGPIGWTIGQGLSSVVLAGLTGPVKWLFGAIFGALYAPFVITGLHHMTNAIDTQLIADAGGTALWPMIALSNIAQGSAVFAYYFMHRHDECEAQVSLPATISAYLGVTEPALFGVNVKYIYPFVAGMTGSALAGMLSVTFNVTAASIGIGGLPGILSIQPQYMLPFAGTMLVAIVVPMLLTFFFRKAGLFTKIEGDTNLQAEFVAQEEAEFVSHEPVELTSVEIISPLTGQVKELSQATDPVFASGVMGQGLVIEPSQGELTSPVNGTVTVLFPTKHAIGIVSDEGVELLIHIGMDTVGLDGKGFESLVVQGDHVIVGQQLIRFDMDVIKAAGLVTETPVIITNQDAYTATITGTYPTTIQAGASLMVATRI

SEQ ID NO: 2959 - protein, 541 aa, Streptococcus pneumoniae
MTLDKGKVVYQIYPKSYKDTTENGIGDFRGIIEKIPYLAKLGVDMVWLNPFYPSPQRDNGYDISDYMAVDPLFGDMADFEEMVCVGKEHKIDFMLDMVLNHCSTEHEWFQKALAGDKYYQDFFFIQDQPTDWQSKFGGSAWAPFGDTGKYYLHLFDETQADLNWRNPNVRKELFKVVNFWRDKGVKGFRFDVINLIGKDEVSVDCPENEGKPAYTDKPIVHNYLRMMNQATFGSDDSFMTVGEMSSTTMENCVLYSSPDRQELSMTFNFHHLKVDYKDGQKWTLAPFDFEELKSLYHSWGKEMSDKDGWSALFWNNHDQPRALNRFVDIQNFRKEGATMLAASIHLSRGTPYIYMGEEIGMIDPDYDSMADYVDVESLNAYQMLLEEGKSQQEAFQIIQAKSRDNSRIPMQWDASENAGFSTGTPWLKAGKSYKYINVENEIQGPIFTFYQDLIRLRKEMPIISEGSYKPAFEDSKQVYAFERQFEDQKLLVLNNFYAKEVEIDLPAVYQNGQILISNYEDAEVSEKILLKPYQTLAIYVN

SEQ ID NO: 2960 - protein, 60 aa, Streptococcus pneumoniae
INTLRKSLQTVSVLSATSKRCFEQPVASFLVCSLIFIEYKLSKETSFSEKQGSFCCLFHP

SEQ ID NO: 2961 - protein, 83 aa, Streptococcus pneumoniae
MMDLLLAIVLIVLAFLGGALGGMYLVRKQIEKEFADNPRLNAEAVRTLLSANGQKPSEAKVQQVYHQIIRQQKAALANNKKKK

SEQ ID NO: 2962 - protein, 264 aa, Streptococcus pneumoniae
MDNRPIGFLDSGVGGLTVVRDVMRQLPHEEIVYIGDSARAPYGPRPAEQIREYTWQLVNFLLTKDVKMIVIACNTATAVVWEEIKAQLDIPVLGVILPGASAAIKSSQGGKIGVIGTPMTVQSDIYRQKIHDLDPDLQVESLACPKFAPLVESGALSTSVTKKVVYETLRPLVGKVDSLILGCTHYPLLRPIIQNVMGPKVQLIDSGAECVRDISVLLNYFEINRGRDAGPLHHRFYTTASSQSFAQIGEEWLEKEIHVEHVEL

SEQ ID NO: 2963 - protein, 296 aa, Streptococcus pneumoniae
RMAGKRDSCGACRIMTNKIYEYKDDQDWYVGSYSIFGGVNSLSDYKTDFPLFEFSKIFGDEEYGFPLSVTVLRYGSTYRLFSFVVDMLNQDMGRNLEVIQRHGALLLVENGQLLYVELPKEGVNVHDFFETSKVRETLLIATRNEGKTKEFRAIFDKLGYDVENLNDYPDLPEVAETGMTFEENARLKAETISQLTGKMVLADDSGLKVDVLGGLPGVWSARFAGVGATDRENNAKLLHELAMVFELKDRSAQFHTTLVVASPNKESLVLNTRPGQVILTLNLRVKMALAMIPSSL

SEQ ID NO: 2964 - protein, 73 aa, Streptococcus pneumoniae
GKFSVEHQTWSGYINFEPKGENGFGYDPLFLVGETGESSAELTLEEKNSQSHRALAVKKLLEVFPSWQSKPSL

SEQ ID NO: 2965 - protein, 173 aa, Streptococcus pneumoniae
MAKQTIIVMSDSHGDSLIVEEVRDRYVGKVDAVFHNGDSELRPDSPLWEGIRVVKGNMDFYAGYPERLVTELGSTKIIQTHGHLFDINFNFQKLDYWAQEEEAAICLYGHLHVPSAWMEGKILFLNPGSISQPRGTIRECLYARVEIDDSYFKVDFLTRDHEVYPGLSKEFSR

SEQ ID NO: 2966 - protein, 153 aa, Streptococcus pneumoniae
MIAKEFETFLLGQEETFLTPAKNLAVLIDTHNADHATLLLSQMTYTRVPVVTDEKQFVGTIGLRDIMAYQMEHDLSQEIMADTDIVHMTKTDVAVVSPDFTITEVLHKLVDESFLPVVDTEGIFQGIITRKSILKAVNALLHDFSKEYEIRCQ

SEQ ID NO: 2967 - protein, 246 aa, Streptococcus pneumoniae
MPMRDRISAFLEEKQGLSVNSKQSYKYDLEQFLDMVGERISETSLKIYQAQLANLKISAQKRKISACNQFLYFLYQKGEVDSFYRLELAKQAEKKTEKPEILYLDSFWQESDHPEGRLLALLILEMGLLPSEILAIKVADINLDFQVLRISKASQQRIVTIPTALLSELEPLMGQTYLFERGGKPYSRQWAFRQLESFVKEKGFPSLSAQVLREQFILRQIENKVDLYEIAKKLGLKTVLTLEKYR

SEQ ID NO: 2968 - protein, 242 aa, Streptococcus pneumoniae
MDIKLKDFEGPLDLLLHLVSKYQMDIYDVPITEVIEQYLAYVSTLQAMRLEVTGEYMVMASQLMLIKSRKLLPKVAEVTDLGDDLEQDLLSQIEEYRKFKLLGEHLEAKHQERAQYYSKAPTELIYEDAELVHDKTTIDLFLAFSNILAKKKEEFAQNHTTILRDEYKIEDMMIIVKESLIGRDQLRLQDLFKEAQNVQEVITLFLATLELIKTQELILVQEESFGDIYLMEKKEESQVPQS

SEQ ID NO: 2969 - protein, 189 aa, Streptococcus pneumoniae
MSTLAKIEALLFVAGEDGIRVRQLAELLSLPPTGIQQSLGKLAQKYEKDPDSSLALIETSGAYRLVTKPQFAEILKEYSKAPINQSLSRAALETLSIIAYKQPITRIEIDAIRGVNSSGALAKLQAFDLIKEDGKKEVLGRPNLYVTTDYFLDYMGINHLEELPVIDELEIQAQESQLFGERIEEDENQ

SEQ ID NO: 2970 - protein, 240 aa, Streptococcus pneumoniae
MRINKYIAHAGVASRRKAEELIKQGLVTVNGQVVRELATTIKSGDKVEVEGQPIYNEEKVYYLLNKPRGVISSVTDDKGRKTVVDLLPNVKERIYPVGRLDWDTSGVLILTNDGDFTDEMIHPRNEIDKVYVARVKGVANKDNLRPLTRGLEIDGKKTKPAVYEILKVDPVKNRSVVQLTIHEGRNHQVKKMFEAVGLQVDKLSRTRFGHLDLTGLRPGESRRLNKKEISQLHTMAVTKK

SEQ ID NO: 2971 - protein, 80 aa, Streptococcus pneumoniae
MKRILIAPVRFYQRFISPVFPPSCRFELTCSNYMIQAIEKHGFKGVLMGLARILRCHPWSKTGKDPVPDHFSLKRNQEGE

SEQ ID NO: 2972 - protein, 174 aa, Streptococcus pneumoniae
VAYFKAFCMSSIMSFVDSSPPPLRYQRSGVSWIILPFLAAGVSAIRAFSRTPLLLELSPPMARVRLMTKRMSGLISLTLSKLTSCPWRESSNVVSVGLNFKVWYKKEKRDLAPKAAIFPSLRRIARAFLSELSFLVATSWMLLSSLANSSLAFCVPVSPKALAKDSILALVEVQ

SEQ ID NO: 2973 - protein, 321 aa, Streptococcus pneumoniae
MKTSLKLYFTALVASFLLLLGACSTNSSTSQTETSSSAPTEVTIKSSLDEVKLSKVPEKIVTFDLGAADTIRALGFEKNIVGMPTKTVPTYLKDLVGTVKNVGFMKEPDLEAIAALEPDLIIASPRTQKFVDKFKEIAPTVLFQASKDDYWTSTKANIESLASAFGETGTQKAKEELAKLDKSIQEVATKNESSDKKALAILLNEGKMAAFGAKSRFSFLYQTLKFKPTDTTFEDSRHGQEVSFESVKEINPDILFVINRTLAIGGDNSSNNGVLENALIAETPAAKNGKIIQLTPDLWYLSGGGLESTKLMIEDIQKALK

SEQ ID NO: 2974 - protein, 250 aa, Streptococcus pneumoniae
VKLENIDKSIQKQDILQGISLEVSPQKLTAFIGPNGAGKSTLLSIMSRLTKKDQGVLSIKGREIESWNSQELAQELTILKQKINYQAKLTVEELVSFGRFPYSRGRLRSEDWEKIRETLNYLELTNLKDRYINSLSGGQLQRVFIAMVLAQDTDFILLDEPLNNLDIKQSVSMMQILRRLVEELGKTIIIVLHDINMASQYADEIVAFKDGQVFSKGSTDQIMQADLLSQLYEIPITLADINDKKICIYS

SEQ ID NO: 2975 - protein, 66 aa, Streptococcus pneumoniae
MLISWRTMIMVLPSSSTSRRRICIMLTLCLISRLLSGSSSKIKSVSWASTIAIKTRWSCPPDRLLM

SEQ ID NO: 2976 - protein, 318 aa, Streptococcus pneumoniae
MQTKSKHTKLFWILIILAIGACLLYFWPITHLSAFAWKLRSQKIIVYLLVAIATGISTISFQTLTENRFLTPSILGIESFYVLLQTLLLVFESKFLQLGKSPILEFLVLLLVQSLFFLALQGYLKTLMKQDLVFILLICLALRSLFRNISTFLQVLMDPNEYDKLQNSLFASFQHLNTSILAIGSLIILALTIFFFRKAVVLDVLHLQRETAQILGLDVEKEQKELLWGIVLLTSTATALVGPMAFFGFMLANLTYLIVKDYQHKLLFIVAILIGFISLTLGQALIERVFALEIRISMIIESVGGFLFFILLYRRARQ

SEQ ID NO: 2977 - protein, 319 aa, Streptococcus pneumoniae
MKLSHYLIGLLLLLVFLSISIGTSDFSWGKLFDFDQQTWLLFQESRLPRTISILLTASSMSMAGLLMQTITQNQFAAPSTVGTTEAAKLGMVLSLFVFPSASLTQKMLFAFVSSIVFTLFFLAFMTIFTVKERWMLPLIGIIYSGIIGSVTEVIAYRFNLVQSMTAWTQGSFSMIQTHQYEWLFLGLIILITVWKLSQTFTIMNLGKETSESLGISYSLLEKLALFLVALTTSVTMITVGGLPFLGVIVPNLVRKCYGDNLSQTKLMVALVGANLVLACDILSRVLIRPYELSVSLLLGIIGSLVFILLLWRGGRKDAD

SEQ ID NO: 2978 - protein, 135 aa, Streptococcus pneumoniae
MNQFLKVLSEVGIQKIMFFLSVLFYGNNCIDKPVIEDTVFDPVNPYAETKLMGERMIYWMANRYDWKYVIFRYFNVAGAEMDASNGLRVKNPTHIIPNINKTALGQNDSLKIFGDDYDTRDGSCIRDYIYVLDLA

SEQ ID NO: 2979 - protein, 80 aa, Streptococcus pneumoniae
MTKTILVTGGTSYIGSHTVKALLNAGYQVHVLDNLSTGNRAAVDSRASFKELDVYDASALKAYLKKNQIDAVFPFPVEIF

SEQ ID NO: 2980 - protein, 354 aa, Streptococcus pneumoniae
MTTLFSKIKEVTELAAVSGHEAPVRAYLREKLTPHVDEVVTDGLGGIFGIKHSEAVDAPRVLVASHMDEVGFMVSEIKPDGTFRVVEIGGWNPMVVSSQRFKLLTRDGHEIPVISGSVPPHLTRGKGGPTMPAIADIVFDGGFADKAEAESFGIRPGDTIVPDSSAILTANEKNIISKAWDNRYGVLMVSELAEALSGQKLGNELYLGSNVQEEVGLRGAHTSTTKFDPEVFLAVDCSPAGDVYGGQGKIGDGTLIRFYDPGHLLLPGMKDFLLTTAEEAGIKYQYYCGKGGTDAGAAHLKNGGVPSTTIGVCARYIHSHQTLYAMDDFLEAQAFLQALVKKLDRSTVDLIKHY

SEQ ID NO: 2981 - protein, 98 aa, Streptococcus pneumoniae
MVEPNLESLIKDLYNHARHDLSEDLVAALLETTKKLPTTNEQLQAVRLSGLVNRELLLNPKHPAPELLNLARFVKREEAKYRGTATSALMYEELFKML

SEQ ID NO: 2982 - protein, 62 aa, Streptococcus pneumoniae
KISINSFDFPNQFVHILFHSAIISPYPIFFVAPFKQPIPYRLTIPHFTPLPLQKFLHYYGLG

SEQ ID NO: 2983 - protein, 147 aa, Streptococcus pneumoniae
MKDSHLLAHHIRLLNGRIFQKLLSQDPEALYRGEQGKILAVLWNSETGCATATDIALATGLANNTLTTMIKKLEEQKLVIVSPCGKDKRKKYLVLTELGKSQKEVGHRVSQKLDTIFYKGFSEEEIHQFEGFQERILANLKEKGNEV

SEQ ID NO: 2984 - protein, 254 aa, Streptococcus pneumoniae
MSQQVKNAHNLYIHAIQDGRVAEAQAQSVGDTYIQHSTGVPDGKEGFAAFFADFFERHPERQIKIVRTIEDGNLVFVHVHQYLNGGEAQWVTTDTFREDENGCIVEHWDVIDYYRTPENDQLDQIFGDFEIKDLDKKAENKKLVRRFLTEIFQNGELEQWSDYVADDLIQHNHEIGQGSAAYKNYVAEYSVTFDFVFQLLGQGNYVVSYGQTQIDGVAYAQYDIFRLENGKIVEHWDNKEVMPKVEDLTNRGKF

SEQ ID NO: 2985 - protein, 242 aa, Streptococcus pneumoniae
MIEYKNVALRYTEKDVLRDVNLQIEDGEFMVLVGPSGSGKTTMLKMINRLLEPTDGNIYMDGKRIKDYDERELRLSTGYVLQAIALFPNLTVAENIALIPEMKGWSKEEITKKTEELLAKVGLPVAEYGHRLPSELSGGEQQRVGIVRAMIGQPKILLMDEPFSALDAISRKQLQVLTKELHKEFGMTTIFVTHDTDEALKLADRIAVLQDGEIRQVSNPETILKAPATDFVADLFGGSIHD

SEQ ID NO: 2986 - protein, 28 aa, Streptococcus pneumoniae
LLHPFISGMRAIFSATVRFGKRAIACKT

SEQ ID NO: 2987 - protein, 310 aa, Streptococcus pneumoniae
MTNLIATFQDRFGDWLTALSQHLQLSLLTLLLAILLAIPLAVYLRYHEKLADWVLQIAGIFQTIPSLALLGLFIPLMGIGTLPALTALVIYAIFPILQNTITGLKGIDPSLQEAGIAFGMTRWERLKKFEIPLAMPVIMSGIRTAAVLIIGTATLATLIGAGGLGSFILLGIDRNNASLILIGALSSAVLAIAFNFLLKVMEKAKLRTIFSGFALVALLLGLSYSPALLAQKEKENLIIAGKIGPEPEILANMYKLLIEENTSMTATVTPNFGTTSFLYEALKKGDIDIYPEFTGTVTEKFASTITQGES

SEQ ID NO: 2988 - protein, 209 aa, Streptococcus pneumoniae
LKSLLQPSPKVSHEPEQVYQVARDGIAKQDHLAYLKPMSYQNTYAVAVPKKIAQEYGLKTISDLKKVEGQLKAGFTLEFNDREDGNKGLQSMYGLNLNVATMQPALRYQAIQSGDIQITDAYSTDAELERYDLQVLEDDKQLFPPYQGAPLMKEALLKKHPELERVLNTLAGKITESQMSQLNYQVGVEGKSAKQVAKEFLQEQGLLKK

SEQ ID NO: 2989 - protein, 269 aa, Streptococcus pneumoniae
MMHTYLQKKIENIKTTLGEMSGGYRRMVAAMADLGFSGTMKAIWDDLFAHRSFAQWIYLLVLGSFPLWLELVYEHRIVDWIGMICSLTGIICVIFVSEGRASNYLFGLINSVIYLILALQKGFYGEVLTTLYFTVMQPIGLLVWIYQAQFKKEKQEFVARKLDGKGWTKYLSISVLWWLAFGFIYQSIGANRPYRDSITDATNGVGQILMTAVYREQWIFWAATNVFSIYLWWGESLQIQGKYLIYLINSLVGWYQWSKAAKQNTDLLN

SEQ ID NO: 2990 - protein, 178 aa, Streptococcus pneumoniae
MTNIDRRISKTKKAIYQAFIQLLNAKGYEATTVQDIIDLADVGRSTFYCHYESKELLLDQLCRYLFHHLFEREQAISTEDYLAHLFLHFHKNQDHITSLLFSKNDYFLRQLHKELEHHVYSVLADNLKEAHPNMPTSYLQHLVVSNFIETLTWWLKKGQDFTGQEVVQFYLDLLIPKN

SEQ ID NO: 2991 - protein, 299 aa, Streptococcus pneumoniae
MRNMKAKYAVWVAFFLNLTYAIVEFIAGGIFGSSAVLADSVHDLVDAIAIGISAFLETISNREEDNQYTLGYKRFSLLGALVTAVILVTGSVLVILENVTKILHPQPVNDEGILWLGIIAITINLLASLVVGKGKTKNESILNLHFLEDTLGWVAVILMAIVLRFTDWYILDPLLSLVISFFILSKALSRFWSTLKIFLDAVPEGLDIKQVKSGLERLDNVASLNQLNLWTMDALEKNAIVHVCLKEMEHMETCKESIRIFLKDCGFQNITIEIDADLETHQTHKRKVCDLERSYEHQH

SEQ ID NO: 2992 - protein, 117 aa, Streptococcus pneumoniae
VNIKSASDLLGISADTIRYYERVGLVPPITRTATGIRDFQDQDIEALEFIKCFRSAGVSVDSLVDYMSLYQKGDETREERLGILEEEKQKLEERLSQLQTALNRLNLKIKLYKEGKF

SEQ ID NO: 2993 - protein, 345 aa, Streptococcus pneumoniae
MKSAVYTKAGQVGLASIERPQIIEADDVIIRVVRACVCGSDLWRYRNPETKAGHKNSGHEAIGIVEEAGEAITTVKPGDFVIVPFTHGCGECDACLAGFDGSCDNHIGNNLGGDFQAEYIRFHYANWALVKIPGQPSDYTEGMLKSLLTLADVMPTGYHAARVANVQKGDKVVVIGDGAVGQCAVIAAKMRGASQIILMSRHEDRQKMAMESGATAVVAERGQEGITKVREILGGGADAALECVGTEAAIEQALGVLHNGGRMGFVGVPHYNNRALGSTFMQNISVAGGAASATTYDKQFLLKAVLDGDINPGRVFTSSYKLEDIDQAYKDMDERKTIKSMIVIE

SEQ ID NO: 2994 - protein, 335 aa, Streptococcus pneumoniae
MATLKDIAQLASVSIATVSRVLNRDQSLSVTEETRHRILTVAEELGYTKHLKTGESHKPKQKIAIIQWVSEQGELDDLYYYQIRLGIEKRAQELDYDILRYFNDHPFTLSEEVIGILCIGKFSRAQISAFEEYQKPLVFLDSDTLSLGHTCIITDFYTAMKQVVDYFLSQGMDRIGILTGLEETTDQEEIIEDKRLENFRNYSQAKGIYHDELVFQGRFTAQSGYDLMKEAIQSLGDQLPPAFFAASDSLAIGALRALQEAGISLPDRVSLISFNDTSLTKQVYPPLSSITVYTEEMGRAGMDILNKEVLHGRKIPSLTMLGTRLTLRESTLNQE

SEQ ID NO: 2995 - protein, 392 aa, Streptococcus pneumoniae
MTQHLTAETLRKDFLAVFGQEADQIFFSPGRINLIGEHTDYNGGHVFPAAISLGTYGAARKRDDQVLRFYSANFEDKGIIEVPLADLKFEKEHNWTNYPKGVLHFLQEAGHVIDKGFDFYVYGNIPNGAGLSSSASLELLTGVVAEHLFDLKLERLDLVKIGKQTENNFIGVNSGIMDQFAIGMGADQRAIYLDTNTLEYDLVPLDLKDNVVVIMNTNKRRELADSKYNERRAECEKAVEELQVALDIQTLGELDEWAVDQYSYLIKDENRLKRARHAVLENQRTLKAQAALQAGDLETFGRLMNASHVSLEHDYEVTGLELDTLVHTAWAQEGVLGARMTGAGFGGCAIALVQKDTVEAFKEAVGKHYEEVVGYAPSFYIAEVAGGTRVLD

SEQ ID NO: 2996 - protein, 493 aa, Streptococcus pneumoniae
VILVDKFVTHVISESSFEEMDRIYLTNRVLARVGEGVLEVETNLDKLIDLKDQLVEEAVRLEMIEDSQTAREILGTELMDLVTPYPSQVNRDFWEAYVHSPEQAIEDFYQLSQKNDYIKLKAIAKNIAYRVPSDYGELEITINLSKPEKDPKEIAVAKLVQASNYPQCQLCLENEGYHGRVNHPARSNHRIIRFEMVGQEWGFQYSPYAYFNEHCIFLDGQHRPMAISRQSFERLLAIVEQFPGYFAGSNADLPIVGGSILTHDHYQGGRHVFPMELAPLQKTFRFAGFEQVKAGIIKWPMSVLRLTSDSKEDLINLADKIFQEWRQYSDSSVQILAETDGTPHHTITPIARKRDGQFELDLVLRDNQTSAEHPDGIYHPHKDVQHIKKENIGLIEVMGLAILPPRLKEEVEQVASYLVGEAVTVADYHQEWADQLKSQHPDLTDKEKALAIVKDSVGAIFVRVLEDAGVYKQTEQGQTAFMRFVEQVGISLD

SEQ ID NO: 2997 - protein, 134 aa, Streptococcus pneumoniae
MKDFHFDAISAFENYEIEKMRDGHVVVTTKVVNSSLNYYGNAHGGYLFTLCDQISGLVVISLGLDGVTLQSSINYLKAGKLDDVLTIKGECVHQGRTTCVMDVDITNQEGRNVCKATFTMFVTGQRSEERRVSI

SEQ ID NO: 2998 - protein, 295 aa, Streptococcus pneumoniae
LCFNFYGIIKSMKIKEIKKVTLQPFTKWTGGKRQLLPVIRELIPKTYNRYFEPFVGGGALFFDLAPKDAVINDFNAELINCYQQIKDNPQELIEILKVHQEYNSKEYYLDLRSADRDERIDMMSEVQRAARILYMLRVNFNGLYRVNSKNQFNVPYGRYKNPKIVDEELISAISVYLNNNQLEIKVGDFEKAIVDVRTGDFVYFDPPYIPLSETSAFTSYTHEGFSFADQVRLRDAFKRLSDTGAYVMLSNSSSALVEELYKDFNIHYVEATRTNGAKSSSRGKISEIIVTNYEK

SEQ ID NO: 2999 - protein, 256 aa, Streptococcus pneumoniae
MTKPYYNKNKMILVHSDTFKFLSKMKPESMDMIFADPPYFLSNGGISNSGGQVVSVDKGDWDKISSFEEKHEFNRKWIRLAKEVLKPNGTVWISGSLHNIYSVGMALEQEGFKILNNITWQKTNPAPNLSCRYFTHSTETILWARKNDKKARHYYNYDLMKELNDGKQMKDVWTGSLTKKVEKWAGKHPTQKPEYLLERIILASTKEGDYILDPFVGSGTTGVVAKRLGRRFIGIDAEKEYLKIARKRLEAENETN

SEQ ID NO: 3000 - protein, 288 aa, Streptococcus pneumoniae
MKQTRNFDEWLSTMTDTVADWTYYTDFPKVYKNVSSIKVALNIMNSLIGSKNIQEDFLDLYQNYPEILKVVPLLIAKRLRDTIIVKDPIKDFYFDFSKRNYSIEEYTMFLEKSGIFDLLQNHLVSNLVDYVTGVEVGMDTNGRKNRTGDAMENIVQSYLEAEGYILGENLFKEIEQNEIEEIFSVDLSAITNDGNTVKRFDFVIKNEQVLYLIEVNFYSGSGSKLNETARSYKMIAEETKAIPNVEFMWITDGQGWYKAKNNLRETFDILPFLYNINDLEHNILKNLK

SEQ ID NO: 3001 - protein, 118 aa, Streptococcus pneumoniae
  UNSURE (10): Xaa at each above location is unknown.
RLATNLITQXVSWFSLDSFLKFGALAQIIPSPVLGGAMLVMFVFVSIQGMQILARVDFANNEHNFLIAAVSIAAGVGLNNSNLFVSMPTAFQMFFSNGIVVASLLAIVLNAVLNHKKK

SEQ ID NO: 3002 - protein, 282 aa, Streptococcus pneumoniae
MQTQEKHSQAAVLGLQHLLAMYSGSILVPIMIATALGYSAEQLTYLISTDIFMCGVATFLQLQLNKYFGIGLPVVLGVAFQSVAPLIMIGQSHGSGAMFGALIASGIYVVLVSGIFSKVANLFPSIVTGSVITTIGLTLIPVAIGNMGNNVPEPTGQSLLLSAITVLIILLINIFTKGFIKSISILIGLVVGTAIAASMGLVDFSPVAAAPVVHVPTPFYFGMPTFEISSIVMMCIIATVSMVESTGLFIWPCLISQRIQSTAPPAQRIPRRRFGLNFWGDF

SEQ ID NO: 3003 - protein, 193 aa, Streptococcus pneumoniae
MKLLEDRILKDGHILGDNILKVDSFLTHQVDFSLMREIGKVFAEKFAAAGITKVVTIEASGIAPAVFTAEALNVPMIFAKKAKNITMNEGILTAQVYSFTKQVTSTVSIAGKFLSPEDKVLIIDDFLANGQAAKGLIQIIEQAGATVQAIGIVIEKSFQDGRDLLEKAGYPVLSLARLDRFENGQVVFKEADL

SEQ ID NO: 3004 - protein, 57 aa, Streptococcus pneumoniae
MPFMMEKSSNTLRKSLQATSTSPYRRYMILTLSILSTTSKQCFEVVDSFLVCSLIFI

SEQ ID NO: 3005 - protein, 79 aa, Streptococcus pneumoniae
MLEEGTKDQLAELTYPFGRGVNLSFGIKDVPKLYQKVMEANYPIYRLLTKRKFRVSDPYIYPHKFAVLDPDGYFLRFSE

SEQ ID NO: 3006 - protein, 275 aa, Streptococcus pneumoniae
MKLISWNIDSLNAALTSDSARAKLSQEVLQTLVAENADIIAIQETKLSAKGPTKKHVEILEELFPGYENTWRSSQEPARKGYAGTMFLYKKELTPTISFPEIGAPSTMDLEGRIITLEFDAFFVTQVYTPNAGDGLKRLEERQVWDVKYAEYLAELDKEKPVLATGDYNVAHNEIDLANPASNRRSPGFTDEERAGFTNLLATGFTDTFRHVHGDVPERYTWWAQRSKTSKINNTGWRIDYWLTSNRIADKVTKSDMIDSGARQDHTPIVLEIDL

SEQ ID NO: 3007 - protein, 75 aa, Streptococcus pneumoniae
MKFYSYDYVLSQIGQQNGIMVGFGIVLLAVTVFFAFKAYHDKKGTEFRELVMISALALFSSAFGQHHDLSKQSSF

SEQ ID NO: 3008 - protein, 89 aa, Streptococcus pneumoniae
LVSITTYQNNQVSNNKFQTSLHFIEVVSKDLGVDKSEVYVNTSTNTDGALIKVGDRYYRALNGSEPDKYLLEKVELYKTDAIELVDVNK

SEQ ID NO: 3009 - protein, 176 aa, Streptococcus pneumoniae
MTLNYIEILIKLVLTLKWLNNNVHFVKRLIDGKPTLLIKNGNIDPEACRSVGLSASDVALKLRSQGIFQMKQVKRAVQEQNGQLIVVQMGDENPKYPVVTDGVIQVDVLESIGRSEEWLLDNLSKQGHDNVANIFIAEYDKGAVTVVTYEKEKPGVLYSSKISSNRVNVALPYVGY

SEQ ID NO: 3010 - protein, 78 aa, Streptococcus pneumoniae
WGLVLFENLFKPRQRRLAVCRLLTSSVLSTTSKQCFEQPAASFLVCSLIFIEYWPQVSICNQKGILCPLFKNFGGFSS

SEQ ID NO: 3011 - protein, 581 aa, Streptococcus pneumoniae
MSIIQKLWWFFKLEKRRYLVGIVALVLVSVLNLIPPMVMGRVIDAITSGQLTQQDLLLSLFYLLLAAFGMYYLRYVWRMYILGTSYCLGQIMRSRLFKHFTKMSSAFYQTYRTGDLMAHATNDINALTRLAGGGVMSAVDASITALVTLLTMLFSISWQMTLVAILPLPFMAYATSRLGRKTHKAFGESQAAFSELNNKVQESVSGIKVTKSFGYQADELKSFQAVNELTFQKNLQTMKYDSLFDPMVLLFVGSSYVLTLLVGSLVVQEGQITVGNLVTFISYLDMLVWPLMAIGFLFNTTQRGKVSYQRIENLLSQESPVQDPEFPLDGIENGRLEYAIDSFAFENEETLTDIHFSLAKGQTLGLVGQTGSGKTSLIKLLLREYDVDKGAIYLNGHDIRDYRLTDLRSLMGYVPQDQFLFATSILDNIRFGNPNLPLSAVEEATKLARVYQDIVDMPQGFDTLIGEKGVSLSGGQKQRLAMSRAMILDPDILILDDSLSAVDAKTEYAIIDNLKETRKDKTTIITAHRLSAVVHADLILVLQNGQIIERGRHEDLLALDGWYAQTYQSQQLEMKGEEDAE

SEQ ID NO: 3012 - protein, 293 aa, Streptococcus pneumoniae
MQNKQEQWTVLKRLMSYLKPYGLLTFLALSFLLATTVIKSVIPLVASHFIDQYLSNLNQLAVTVLLVYYGLYILQTVVQYVGNLLFARVSYSIVRDIRRDAFANMEKLGMSYFDKTPAGSIVSRLTNDTETISDMFSGILSSFISAVFIFLTTLYTMLVLDFRLTALVLLFLPLIFLLVNLYRKKSVKIIEKTRSLLSDINSKLAENIEGIRIIQAFNQEKRLQAEFDEINQEHLAYANRSVALDALFLRPAMSLLKLLGYAVLMTYFGYRGLSIGITAGTMYAFIQYINRPL

SEQ ID NO: 3013 - protein, 68 aa, Streptococcus pneumoniae
MLLSSTSTALFDPLIEVTQNFSTLQTSMVSAGRVFALIDESTYEPLQENGQAKVKEGNISFGTCVYLV

SEQ ID NO: 3014 - protein, 263 aa, Streptococcus pneumoniae
MRAPMSPFKKMGKPKSRRAISVLEHVCISYDGKHPILDDISFSVNKGETIAFVGHTGSGKSSIINVLMRFYEFQSGRVLLDDVDIRDFSQEELRKNIGLVLQEPFLYHGTIKSNIAMYQEISDEQVQAAAAFVDADSFIQELPQGYDSPVSERGSSFSTGQRQLFAFARTVASQPKILILDEATANIDSETESLVQASLAKMRQGRTTIAIAHRLSTIQDANCIYVLDKGRIIESGTHEELLTLGGTYHKMYSLQAGAMAYTL

SEQ ID NO: 3015 - protein, 231 aa, Streptococcus pneumoniae
MLKWEDLPVEMKSSEVESYYQLVSKRKGSLIFKRCLDWVLALVLTWVLTSPIFLILSIWIKLDSKGPVIYKQERVTQYNRRFKIWKFRTMVTDADKKGSLVTSANDSRITKVGNFIRRVRLDELPQLVNVLKGEMSFVGTRPEVPRYTEQYSPEMMATLLLQAGITSPASINYKDEDTIISQMTEKGLSVDQAYVEHVLPEKMRYNLAYLREFSFFGDIKIMFQTVFEVLK

SEQ ID NO: 3016 - protein, 408 aa, Streptococcus pneumoniae
MPNYNIPFSPPDITEAEIAEVADTLRSGWITTGPKTKELERRLSLYTQTPKTVCLNSATAALELILRVLEVGPGDEVIVPAMTYTASCSVITHVGATPVMVDIQADTFEMDYDLLEQAITEKTKVIIPVELAGIVCDYDRLFQVVEKKRDFFTASSKWQKAFNRIVIVSDSAHALGSTYKGQPSGSIADFTSFSFHAVKNFTTAEGGSATWKANPVIDDEEMYKEFQILSLHGQTKDALAKMQLGSWEYDIVTPAYKCNMTDIMASLGLVQLDRYPSLLQRRKDIVDRYDSGFAGSRIHPLAHKTETVESSRHLYITRVEGASLEERSLIIQELAKAGIASNVHYKPLPLLTAYKNLGFDMTNYPKAYAFFENEITLPLHTKLSDEEVDYIIETFKTVSEKVLTLSKK

SEQ ID NO: 3017 - protein, 62 aa, Streptococcus pneumoniae
GLFLLRERIFIGFSFLVGVPWFEIRCEQFGVAFRILTRHHLENLVSCSSFQFTLFFERREFP

SEQ ID NO: 3018 - protein, 88 aa, Streptococcus pneumoniae
EIYCSVLVSIRHMSDIKVNIPGECLYDKVFVLSFIIYNISINLNIVNGIFYIQAKKDSITFEWKAKEQTRKLAIDSSKPCFEVVDIVK

SEQ ID NO: 3019 - protein, 708 aa, Streptococcus pneumoniae
MKYFVPNKVFSIRKLKVGTCSVLLAISILESQGILSNKVVTSSSPMATKESSNAITNDLDNSPTVNQNRSAEMIASNSTTNGLDNSLSVNSISSNGTIRSNSQLDNRTVESTVTSTNENKSYKEDVISDRIIKKEFEDTALSVKDYGAVGDGIHDDRQAIQDAIDAAAQGLGGGNVYFPEGTYLVKEIVFLKSHTHLELNEKATILNGINIKNHPSIVFMTGLFTDDGAQVEWGPTEDISYSGGTIDMNGALNEEGTKAKNLPLINSSGAFAIGNSNNVTIKNVTFKDSYQGHAIQIAGSKNVLVDNSRFLGQALPKTMKDGQIISKESIQIEPLTRKGFPYALNDDGKKSENVTIQNSYFGKSDKSGELVTAIGTHYQTLSTQNPSNIKILNNHFDNMMYAGVRFTGFTDVLIKGNRFDKKVKGESVHYRESGAALVNAYSYKNTKDLLDLNKQVVIAENIFNIADPKTKAIRVAKDSAEYLGKVSDITVTKNVINNNSKETEQPNIELLRVSDNLVVSENSIFGGKEGIVIEDSKGKITVLNNQFYNLSGKYISFIKSNANGKEPVIRDSDGNFNIVTENGLYKIVTNNLSDKNEKEKNKEEKQYNSNNVIDSNQKNGEFNSSKDNRQMNDKIDNKQDNKTEEVNYKIVGDGRETENHINKSKEIVDVKQKLPKRGSYKIMELFLTVTGIGLLLTLKGLKYYGKDK

SEQ ID NO: 3020 - protein, 81 aa, Streptococcus pneumoniae
GDIVGSQNQYFWIIGGATDLYNSKEEIGYSVSEVVHILSESLSVNCKESKTLKQIFETALLEVKDEIGLNSYKLTEYSKMK

SEQ ID NO: 3021 - protein, 68 aa, Streptococcus pneumoniae
LLEIDLTVLIDLSYYYFILLYSVNLYEFKPISSLTSSKAVSNICLRVFDSLQLTDKLSDKICTTSETE

SEQ ID NO: 3022 - protein, 94 aa, Streptococcus pneumoniae
DKSIRTVKSISNNVLEVEVYYSSFNILYYRLPIFAKLSEKKLEYMMLGDCVMLVNEMEITDHRVDNLFEKGKNEIKDSCSRFSNRTYKSFRKSI

SEQ ID NO: 3023 - protein, 95 aa, Streptococcus pneumoniae
KIHVVDLAIGHIKALEKVSEKTDVYIYNLGSGEGTSVLQLVNTFESVNKIPIPYKIVPRRSGDVATCYANADKAYKELNWRTTKSIEDMCRDTWN

SEQ ID NO: 3024 - protein, 65 aa, Streptococcus pneumoniae
VFHIKTFFFIFDIGVIMFTLYNETVSFVKRCQTFFLIYLSLNMHFIKRLSNFSKIQHSYRQYHQL

SEQ ID NO: 3025 - protein, 219 aa, Streptococcus pneumoniae
MKNLTKIKFKENGEFNHFPGNTVVANLYTKQDLMEVVDIIQSRYRELPFIDKFTLTPRNSIHMTVIELLCHENRETEFWSSNLPLDTPLQEIHDYFAKQLEIFPLLDEEIHMRITEMGKQNILVEPADEASAKRLEEIRTYVSEKAGVCFPNHDRYQFHISIGYLRIPLTEEEEEEFTKVRAELTEILLEKIPTITVNRIDYTVFEDMRQFVPYHEKFK

SEQ ID NO: 3026 - protein, 355 aa, Streptococcus pneumoniae
MKKMKVWSTVLATGVALTTLAACSGGSNSTTASSSEEKADKSQELVIYSNSVSNGRGDWLTAKAKEAGFNIKMVDIAGAQLADRVIAEKNNAVADMVFGIGAVDSNKIRDQKLLVQYKPKWLDKIDQSLSDKDNYYNPVIVQPLVLIGAPDVKEMPKDWTELGSKYKGKYSIYGLQGGTGRAILASILVRYLDEKGDLGVSEKGWEVAKEYFANAYTLQKGESSVVKALDKESPIQYGMIWGSGALIGQKEQNVEFKVMTPEIGVPFVTEQTMVLSTSKKQALAKEFIDWFGQSEIQVEYSKKFGSIPANKDALKELPEDTKKFVDQVKPQNIDWEAVGKHLDEWVEKAELEYVK

SEQ ID NO: 3027 - protein, 336 aa, Streptococcus pneumoniae
MIKFDNIQIKYGDFVAIDNLNLDIHEGEFFTFLGPSGCGKSTTLRALVGFLDPSSGSIEVNGTDVTHLEPEKRGIGIVFQSYALFPTMTVFDNIAFGLKVKKVAPDVIKAKVSAVAAKIKISDQQLQRNVSELSGGQQQRVALARALVLEPKILCLDEPLSNLDAKLRVDLRKELKRLQKELGITTLYVTHDQEEALTLSDRIAVFNNGYIEQVGTPVEIYHNSQTEFVCDFIGDINVLTDETVHEVLLKNTSVFLEDKKGYIRLEKVRFNRETEQDFILKGTIIDVEFSGVTIHYTIKVSESQILNVTSIDSQAAIRSVGESVELFITPSDVLQF

SEQ ID NO: 3028 - protein, 563 aa, Streptococcus pneumoniae
MRHKLNLKDWLIRLGLIWFLVTFIIYPNFDLVVNVFVKGGEFSLDAVHRVLKSQRALQSIMNSFKLAFSLIITVNVVGILCVLFTEYFDIKGAKILKLGYMTSLIYGGVVLATGYKFVYGPYGLITKFLQNVIPSLDPNWFIGYGAVLFIMTFSGTANHTLFLTNTIRSVDYHTIEAARNMGAKPFTVFRKVVLPTLIPTLFALTIMVFLSGLSAVAAPMIVGGKEFQTINPMIITFAGMGNSRDLAALLAIILGIATTILLTIMNKIEKGGNYISISKTKAPLKKQKIASKPWNIIAHIVAYGLFTVFMLPLIFIVLYSFTDPVAIQTGNLTLSNFTLENYRLFFSNSAAFSPFLVSFIYSIIAATTATILAVVFARVVRKHKSRFDFLFEYGALLPWLLPSTLLAVSLLFTFNQPQFLVLNQILVGSLVILLIAYIVVKIPFSYRMVRAILFSVDDEMEDAARSMGASPFYTMMKVIIPFILPVVLSVIALNFNSLLTDFDLSVFLYHPLAQPLGITIRSAGDETATSNAQALVFVYTIVLMIISGTVLYFTQRPGRKVRK

SEQ ID NO: 3029 - protein, 236 aa, Streptococcus pneumoniae
MTATSLGLSNIEIVVRIVLSVVIGSIIGLERGSKSQPAGIRTYSIVCLAACLIMMTNEYVSYKFGTGDPTRLGAQVISGVGFLGAGTILITDKKKITGLTTAAGIWASAGIGLAIGVGFYEGALLVAISVWGVISMFQPLKKYLQNRSKMIELYIVVKSTEAYNRVLVYCAENGIRMTDSRTAFGDVNSDRIEYFDVPDKKIASFITLELSGRFEHLRLMEEIANIVGVIYVEEIS

SEQ ID NO: 3030 - protein, 102 aa, Streptococcus pneumoniae
LIQVYKFISFYDICEMVFAFHLPPDELITNVIFKEKINSMLKCYIDRLLYVFINPTHFTEKVNLQFYGSFFSYEFICREVGNILKNKGVKCNLNFFEGEEYL

SEQ ID NO: 3031 - protein, 333 aa, Streptococcus pneumoniae
MKNINGKKVTIYDIARLSGFSPKTVSRVINGGVNVKEETYQAIQKVIEELSYIPNAYAKNLTKKEAINILISVKKIDSFPLIWFHTLLDKVLRTCKEFGVNAIVEYFGEEDTISNSIISSTGSLVDGVIVFYESVDDIRIQYLKKNHMPFLVFGESQTSGVVYVSNNNFQATYDMMKAVTEEKFKNMWLLMGGESHVNKDRERGVRSFLNDKNYFMDLKVIYGLSTIDSVYSYAMQHLTSQNYPDIIFVSGDEKVQGLIRACYEKGILIPDDISIIGFDNIPISQYYTPALSTIAPNYVKLAKEMIEGVLAIIKGESVTSVEVSPKFVRRQSF

SEQ ID NO: 3032 - protein, 65 aa, Streptococcus pneumoniae
GGTALPTPSHGSIFCVWAFFYPSFALSFIRALSRFDELEFYLQLLPPTKSKQKGWTNTKKASNTQ

SEQ ID NO: 3033 - protein, 68 aa, Streptococcus pneumoniae
MKIKEQTRKLAAGCSKHCFEVADRTDEVSSKHCFEVADRTDEVSNHTYDKATLTRFEEIFEEYKGVPR

SEQ ID NO: 3034 - protein, 487 aa, Streptococcus pneumoniae
LRWHREFRPHASYFAWGFFIQSLRTRIRTEREITMERIIHGDVLSPILAYMRLKGQHKVILESIPRDKETARFSILAYNPVFEIKFENGVLYQNGQVIDRDPLDFLYEVIHKSQHHSELPFGGGAIGFVGYDMISLYEEIGQIPEDTIGTPDMHFFVYESYIVFDHKKEKIHVIEDALYSERSQEALEKSLNQVLEELRIPAPNEFEDLDLSPLDFKPHIAPHKFEGMVETARDLIRNGDMFQCVLSQRFSAEVTGNPFDFYRNLRVTNPSNYLYFYDFGDYQIIGASPESLVSVKNGIVTTNPIAGTRPRGATDEEDKALATDLLSDEKETAEHRMLVDLGRNDIGRISETASVQVTKYMEVELFRYVMHLTSVVKGRLLAELTAMDALKATLPAGTVSGAPKIRAMRRIYELETEKRGVYAGAIGYLSATGDMDLAIAIRTMILKNQRAYVQAGAGIVYDSIAQNEYQETINKAKSMTRIGELRP

SEQ ID NO: 3035 - protein, 66 aa, Streptococcus pneumoniae
MRPISLRPKSTNIRCSAVSFSSERRSVAKALSSSSVAPLGRVPAIGLVVTMPFLTETKLSGLAPMI

SEQ ID NO: 3036 - protein, 188 aa, Streptococcus pneumoniae
MILLIDNYDSFTYNLAQYIGNFAEVQVLRNDDSKLYEEAEKADGLVFSPGPGWPVDAGKMEDMIRDFAGKKPILGICLGHQAIAEVFGGKLGLAPKVMHGKQSNINFEAPSVLYQGIEDGRAVMRYHSILIEEMPEDFEVTARSTDDQAIMGIQHKNLPIYGFQYHPESIGTPDGLSSIRNFIEKVVK

SEQ ID NO: 3037 - protein, 334 aa, Streptococcus pneumoniae
MKEIIEKLAKFENLSGVEMTDVIERIVTGRVTEAQIASLLLALKMKGETPEERTAIAQVMRGHAQHIPTEIHDAMDNCGTGGDKSFSFNISTTAAFVLAGGGIHMAKHGNRSISSKSGSADVLEALGINLDLKPAELGKVFDKTGIVFLFAKNMHPAMKYIMPARLELGIPTIMNLTGPLIHPMALETQLLGISRPELLESTAQVLKNMGRKRAIVVAGPEGLDEAGLNGTTKIALLENGEISLSSFTPEDLGMEGYAMEDIRGGNAQENAEILLSVLKNEASPFLETTVLNAGLGFYANGKIDSIKEGVALARQVIARGKALEKLRLLQEYQK

SEQ ID NO: 3038 - protein, 255 aa, Streptococcus pneumoniae
MSQEFLARILEQKAREVEQMKLEQIQPLRQTYRLAEFLKNHQDCLQVIAEVKKASPSLGDINLDVDIVQQAQTYEENGAVMISVLTDEVFFKGHLDYLREISSQVEIPTLNKDFIIDEKQIIRARNAGATVILLIVAALSEERLKELYDYATELGLEVLVETHNLAELEVAHRLGAEIIGVNNRNLTTFEVDLQTSVDLAPYFEEGRYYISESAIFTGQDAERLAPYFNGILVGTALMQAENVAQRIKELQIDKG

SEQ ID NO: 3039 - protein, 209 aa, Streptococcus pneumoniae
MWPRESRSCRLTKVKICGLSTKEAVETAVSAGADYIGFVFAPSKRQVTLEEAAELAKLIPADVKKVGVFVSPSRVELLEAIDKVDLDLVQVHGQVADDLFENLPCASIQAVQVDGNGHVPNSQADYLLFDAPVAGSGQSFDWGQLDTTGLAQPFFIAGGLNEDNVVKAIQHFTPYAVDVSSGVETDGQKDHEKIRRFIERVKHGISGTK

SEQ ID NO: 3040 - protein, 407 aa, Streptococcus pneumoniae
MAYQEPNKDGFYGKFGGRFVPETLMTAVLELEKAYRESQADPSFQEELNQLLRQYVGRETPLYYAKNLTQHIGGAKIYLKREDLNHTGAHKINNALGQVWLAKRMGKKKIIAETGAGQHGVATATAAALFNMECTIYMGEEDVKRQALNVFRMELLGAKVEAVTDGSRVLKDAVNAALRSWVANIDDTHYILGSALGPHPFPEIVRDFQSVIGREAKQQYRDLTGQNLPDALVACVGGGSNAIGLFHPFVEDESVAMYGAEAAGLGVDTEHHAATLTKGRPGVLHGSLMDVLQDAHGQILEAFSISAGLDYPGIGPEHSHYHDIKRASYVPVTDEEALEGFQLLSRVEGIIPALESSHAIAFAVKLAKELGPEKSMIVCLSGRGDKDVVQVKDRLEADAAKKGEAHA

SEQ ID NO: 3041 - protein, 277 aa, Streptococcus pneumoniae
MWFKSKTAWKQMQQRREKLMPKTLTEKLNAIKATGKGIFVPYIMAGDHEKGLDGLAETIHFLEDLGVSAIEVGIPFSDPVADGPVIEEAGLRSLAHGTSTQALVETLKTIETEIPLVIMTYFNPLFQYGVENFVKDLADTAVKGLIIPDLPHEHANFVEPFLADTDIALIPLVSLTTGIERQKELIEGAEGFIYAVAINGVTGKSGNYRADLDKHLAQLHQVADIPVLTGFGVSSQADLERFNAVSDGVIVGSKIVKALHQGEPIQDFIRQAVAYQK

SEQ ID NO: 3042 - protein, 67 aa, Streptococcus pneumoniae
NQLKTEQIYWEIQITFLKYFRNRSVIFQIQFTIKLAFLLQKKKERLPFVPFLLLATCLIIFGKLLLV

SEQ ID NO: 3043 - protein, 243 aa, Streptococcus pneumoniae
MLNQDLFDSLEAQKIVDTLMKGQKDYVDERLEKRETMIVSNGYAWTRPNHIDTAFASADLFEYKLQLAGQTWGYLEFETNTEKYGKVLLIIKGKKRLTNQFPLVQKNKSGYLFEYAQMNTLYLNQHSSYKNDEDSHSFPIQMELVSDEMIQEIEQATKNSNIEKFMILTYEADSENNIISVDVVMPDARTGQLHLIQDLSEYIQSSSYHFEEAKYQDIPNFSELSETEDFEIIPRIEKQEGQK

SEQ ID NO: 3044 - protein, 383 aa, Streptococcus pneumoniae
MFNGRVLKELRLLNGLSRAELAQRINLTEQAIWQFESNETKPKLSTKMHLANQFHVDLTYFEQEEESIRFDSSVIAFRNADLATRKTIDIQTMYLHKVDSLIDYFESFVIIPNIIIHDLSNVVSESYHKGESIEELALYAREKLGISKDNHDLLYKLERSGIYIVERLINGQADAYSAWSKLGRPYIVLGTNKSSVRRNFDLAHELGHILLHKYKDMNEDGDRLEQEANYFASCFLLPKEEFLVKFEERVGKRVSNPDSYILLKSDLNVSIQALEYRAFKLGLLTPKQHSYFYRQIAQKGYKMIEPLDDQIFVKKPSKVKSILDVVLSNHLVSLATIMSKQSIRLQFISEIFSVEMKFFDQYQEDRRTDRFDNIIPLYKRNNL

SEQ ID NO: 3045 - protein, 219 aa, Streptococcus pneumoniae
MIDFYFFLVGSILASFLGLVIDRFPEQSIISSASHCDSCQTRLRPLDLIPILSQVFNRFRCRYCKVRYPVWYALFELVLGLLFLLYSWELLSLGQVVLITAGLTLGIYDFHHQEYPLLVWMTFHLILIASSGWNLVMVSFLALGILAHFIDIRMGAGDFLFLASCALVFSVTELLILIQFASATGILAFLLQKKKERLPFVPFLLLATCLIIFGKLLLV

SEQ ID NO: 3046 - protein, 148 aa, Streptococcus pneumoniae
MTIRFEEKVSIENAQFVCQWSNSLGKSFQEQWMGPRIPFLLTLQALEGVFSIFDEQEFVGLIQKIRLEDSNLHIGRFFINPQKQEQDLGSQALRKFVSLAFENEDIDSISLNVFEANQRAQNLYQKEGFEIVQMVEAPVRKYSRLKLE

SEQ ID NO: 3047 - protein, 103 aa, Streptococcus pneumoniae
KANSLEINVDCDYEPESAPQKGLYMNERYQCLKTKEYQALLSSKGRQIFAKRKIDMKSVFGQIKVCLGYKRCHLRGKRQVRIDMGFVLMANNLLKYNKRKRQN

SEQ ID NO: 3048 - protein, 67 aa, Streptococcus pneumoniae
MSVEEKLNQAKGSIKEGVGKAIGDEKMEKEGAAEKVVSKVKEVAEDAKDAVEGAVEGVKNMLSGDDK

SEQ ID NO: 3049 - protein, 202 aa, Streptococcus pneumoniae
MSNEKNTNTNVEKKDATVVAHEIKGELTYEDKVIQKIIGLSLENVSGLLGIDGGFFSNLKEKIVNSDDVTSGVNVEVGKTQVAVDLNVIVEYQKNVPALYSEIREIVSSEVAKMTDLEIVEINVNVVDIKTKEQHEADSVSLQDRVSDVAESTGEFTSEQFEKAKSGLGSGFSTVQEKVSEGVEAVKGAANGVVSHENTRVN

SEQ ID NO: 3050 - protein, 190 aa, Streptococcus pneumoniae
LYMSKAKKICFIIFCILILTIFLPVLIDYHQVSDLGIHLLSWRQNSVVEFYLARYVFWGTVVLSTLVLLSILVVMFYPKRYLEIQLETKNDTLKLKNSAIEGFVRSLVSDHRLIKNPTVHVNLRKNKCFVHVEGKILPSDNIADRCQIIQNEITNGLKQFFGIERQVKLEVAVKNYQPKPQNKKTVSRVK

SEQ ID NO: 3051 - protein, 512 aa, Streptococcus pneumoniae
LWYNCKRFNPIIYKERKIFMRDLLSKKSHRQLELLELLFEHKRWFHRSELAELLNCTERAVKDDLSHVKSAFPDLIFHSSTNGIRIINTDDSDIEMVYHHFFKHSTHFSILEFIFFNEGCQAESICKEFYISSSSLYRIISQINKVIKRQFQFEVSLTPVQIIGNERDIRYFFAQYFSEKYYFLEWPFENFSSEPLSQLLELVYKETSFPMNLSTHRMLKLLLVTNLYRIKFGHFMEVDKDSFNDQSLDFLMQAEGIEGVAQSFESEYNISLDEEVVCQLFVSYFQKMFFIDESLFMKCVKKDSYVEKSYHLLSDFIDQISVKYQIEMENKDNLIWHLHNTAHLYRQELFTEFILFDQKGNTIRNFQNIFPKFVSDIKKEISHYLETLEVCSSSMMVNHLSYTFITHTKHLVINLLQNQPKLKVLVMSNFDQYHAKFVAETLSYYCSNNFELEVWTELELSKESLEDSPYDIIISNFIIPPIENKRLIYSNNINTVSLIYLLNAMMFIRLDE

SEQ ID NO: 3052 - protein, 333 aa, Streptococcus pneumoniae
MVEQRKSITMKDVALEAGVSVGTVSRVINKEKGIKEVTLKKVEQAIKTLNYIPDYYARGMKKNRTETIAIIVPSIWHPFFSEFAMHVENEVYKRNNKLLLCSINGTNREQDYLEMLRHNKVDGVVAITYSPIEHYLTSGIPFVSIDRTYSDIAIPCVSSDNDAGGREAAKQLISKGCQHLAFVGGHNTTINETKRRRISFEKYVQEHKIPLSIFDLDETVTDYYGKLESFLEENSSIDGIFTINDFTALDVIEILEKNGKRIPHDVQIIGYDGIKMAGDRDYLLSTIEQPLEEMAKEAVRILFDIIDGKTVNLQTILPVKFVEGKTTKNENKS

SEQ ID NO: 3053 - protein, 314 aa, Streptococcus pneumoniae
MKRFKKEVAMNSKAKQVSLWERIKKQKLLLLMTVPGLVLTFIFKYIPMYGVLIAFKDYNPLKGILGSDWIGFSEFTKFISSPNFGILLANTLKLSIYGLLLGFLPPIILAIMLNQLLSEKVKKRIQLILYAPNFISVVVIVGMIFLFFSVGGPINNFLSMFGMKADFLTNPDFFRPLYIFSGIWQGMGWASTLYTATLVNVDPALVEAARLDGANIFQRIWHIDIPALKPIMVIQFVLAAGGIMNVGYEKAFLMQTSLNLPTSEIISTYVYKVGLVSGDYSYSTAVGLFNAVINVVLLVAVNQIVKRMNNGEGI

SEQ ID NO: 3054 - protein, 305 aa, Streptococcus pneumoniae
MVKEFKEGSMKNSIMDTKFDRRILLLNKIIIVFIVLMTLLPLLYIVVASFMDPKVLVSRGISFNPADWTVEGYQRVFSDQSILRGFINSLLYSFGFAALTVLLSVFTAYPLSKKDLVGRRWINYFLIVTMFFGGGLVPTYLLVKELGMLNTPWAIIVPGAVNVWNIILARAYFQGLPEELVEAAVIDGANDLQIFFKIMLPLAKPIMFVLFLYAFVGQWNSYFDAMIYIKDPNLEPLQLVLRKILIQSQPGQDMIGAQAAMNEMKRLAELIKYATIVISSLPLIVMYPFFQKYFDKGIMAGSLKG

SEQ ID NO: 3055 - protein, 538 aa, Streptococcus pneumoniae
MKFKTFSKSAVLLTASLAVLAACGSKNTASSPDYKLEGVTFPLQEKKTLKFMTASSPLSPKDPNEKLILQRLEKETGVHIDWTNYQSDFAEKRNLDISSGDLPDAIHNDGASDVDLMNWAKKGVIIPVEDLIDKYMPNLKKILDEKPEYKALMTAPDGHIYSFPWIEELGDGKESIHSVNDMAWINKDWLKKLGLEMPKTTDDLIKVLEAFKNGDPNGNGEADEIPFTFISGNGNEDFKFLFAAFGIGDNDDHLVVGNDGKVDFTADNDNYKEGVKFIRQLQEKGLIDKEAFEHDWNSYIAKGHDQKFGVYFTWDKNNVTGSNESYDVLPVLAGPSGQKHVARTNGMGFARDKMVITSVNKNLELTAKWIDAQYAPLQSVQNNWGTYGDDKQQNIFELDQASNSLKHLPLNGTAPAELRQKTEVGGPLAILDSYYGKVTTMPDDAKWRLDLIKEYYVPYMSNDNNYPRVFMTQEDLDKIAHIEADMNDYIYRKRAEWIVNGNIDTEWDDYKKELEKYGLSDYLAIKQKYYDQYQANKN

SEQ ID NO: 3056 - protein, 140 aa, Streptococcus pneumoniae
MFFRLILSINEMFIFCYKTIGFFYCVFLISHNQPLVFVCLVLVVVFLFNSEVIRKSVFFKFFLVIIPLSINIAIYNPFSTFTVDIVIHICLDMGNLVQIFLCHKDSWIVIVIAHVRNIIFFDKIQTPFGIIWHGCHFTIV

SEQ ID NO: 3057 - protein, 439 aa, Streptococcus pneumoniae
MGDKKYTVEKANRFIAENKHLVNTQYKPEEHFSAEIGWINDPNGFVYFRGEYHLFYQFYPYDSVWGPMHWGHAKSKDLVTWEHLPVALAPDQDYDRNGCFSGSAIVKDDRLWLMYTGHIEEKTGVRQVQNMAFSDDGIHFEKISQNPVVTGTDLPDELIAADFRDPKLFEKDGRYYSVVAVKHMDNVGCIVLLGSDNLVEWQFESIFLKGGEHQGFMWECPDYFELDGKDCLIMSPMRYQREGDSYHNINSSLLFTGKVDWREKRFIPESVQEIDHGQDFYAPQTLLDDQNRRILIAWMQTWGRTLPTHDQEHKWACAMTLPRILRLEDGKLRQFPVKKGQYQIQIDKDCHYHLGNDIDYLEFGYDSNAQQVYIDRSHLIQKILGEEEQDTSRRYVDIEAKELEVVLDKNSIEIFVNQGEASLTATYYLTVPAELSRID

SEQ ID NO: 3058 - protein, 423 aa, Streptococcus pneumoniae
MPDNLALRMRPKTIDQVIGQEHLVGPGKIIRRMVEANRLSSMILYGPPGIGKTSIASAIAGTTKYAFRTFNATVDSKKRLQEISEEAKFSGGLVLLLDEIHRLDKTKQDFLLPLLESGLVIMIGATTENPFFSVTPAIRSRVQIFELEPLSNQDVKEALQIALSNPERGFDFPIELDEDALDFIATSTNGDLRSAFNSLDLAVLSTPENDEGIRHITLDIMENSLQRSYITMDKDGDGHYDVLSALQKSIRGSDVDASLHYTARLIEAGDLPSLARRLTVIAYEDIGLANPEAQIHTVTALDAAQKIGFPEARILIANVVIDLALSPKSNSAYVAMDKALADLKTSGHLPIPRHLRDGHYSGSKELGNAQDYLYPHNYPGNWVKQDYLPEKIRNHHYFQAEDTGKYERALAQRKEAIDHLRKI

SEQ ID NO: 3059 - protein, 73 aa, Streptococcus pneumoniae
MEMMELPSQEILIFTKQIRHWILSDQVISGKRKLFFREDTPKEILDLYENIKSKLDFAYQEVYSNNGLKKYEK

SEQ ID NO: 3060 - protein, 59 aa, Streptococcus pneumoniae
LNLIFEEYQFVKIGDKKYRVRSVPMIHSTPPQSVLDRDTFTIDYTDDELLDKEAVFTTH

SEQ ID NO: 3061 - protein, 83 aa, Streptococcus pneumoniae
NNKYHSFTIRVTRVIMVLSGGKSAMPMTQKEMVKLLTAHGWIKTRGGKGSHIKMEKQGERPITILHGKLNKYTERGIRKQAGL

SEQ ID NO: 3062 - protein, 150 aa, Streptococcus pneumoniae
MLVTYPALFYYDDTDGTEATYFVHFPDFEYSATQGEGISEALAMGSEWLGITVADLIESDGEFPQPSDINSLSLIDNDPFKDDEDFVSTYDLDKSFISMVSVDVSEYLGSQEPIKKTLTIPKWADKLGREMGLNFSQTLTDAIADKKVQA

SEQ ID NO: 3063 - protein, 156 aa, Streptococcus pneumoniae
MATYGFLDILEEELDKNFPFDFEISWDKRNHAVEVSFLLEAQNAAGVEMVDEDGEVLSDDILFEEAVLFYNPAKSTVNEEDYLTVIPYLPKKGFSREFLAYFALFLKDTAEVGLDVLMDFLEDPEAEEFVMEWNQEVFEEGKVGLEEGEFYPYPRY

SEQ ID NO: 3064 - protein, 362 aa, Streptococcus pneumoniae
MKKIGTYLVYVLAVVFIMLAFACGTIAFAELGYSAVLAFTFGYAFALLSMYLIFILHELGHAFCGYLTGYRLVAFGLGHFILTKKSGRFHLSRTAILKNVGAQYIGLKEDESDQRIILMLSGGLMVHLGLILLAIVFGFLTRSWYFAGTWIFLNLSFFLNNILSVDITDGAKIWELLQHPENTKYAYLVLRHSAQTLLAPQEYDLKDFVQAVPEDARGSFADGVLGMQGEVSILEGKEEVAKQQFQALLERTTTPMMQTVAQLSLLHIALLEGDFEQAEQYASIRQVKSFLSLKLSNLQVIQAWYQFKVRKDVVQTHKAMKIARQKMDSSRMLRDEKRYYENLLAELEKEMLEGTEDGTRNF

SEQ ID NO: 3065 - protein, 344 aa, Streptococcus pneumoniae
MKKSDVLDLIKYHYEGRETEFRNQSIAIARNFNKHGDTQIAQYIMGLMSQSDRFMPQIENPSEYLTPAKLDIGPLPLPLSIMNDLKGIINAVNHHIGINKFLFVGSTGTGKTESVKQVARLIGKELLVVDFSHLVDSKLGQTVKNLATLFNEINNLPFKQNYIILFDEIDSIVLDRVNQNDLREMGRVTSAFLKELDRLSPEIVLIATTNLFENLDKAVTRRFDAIIDFDRYTDEDKVEVATIILNELLKQFKNVARDLKLFKKIINSANVIPNPGDLRNSIRTSLAFSDPSDPHDYQKRLLRSLHNGRNLSISKLSKLGFTVREIEILTGVSKSSVSRELSED

SEQ ID NO: 3066 - protein, 747 aa, Streptococcus pneumoniae
MNTLLTLRGKSFTQKSRNNGMGPITIPKKTIITLEHLKYLHFSLEETKTYWEKNNIIDGILISIYYNRIVAKSNRINGYFNVGGGNPFPNDTIVGAKFNDEKTKHIVTHYISRDALNKTITVLSKIIEVFEEHFDRAITCEMFSDSSTFASINFSEYGISKSKFQQYLRDSCFIENFGVEHTTVSDIQNSIVTFYDVHTDIFRLLNKLNIDISEANIMNQTTVLLDEKNIELLLSKAPYLVSMIVEDFSKLSVDDFSLDNNDLKINLPSPMNEPVVGVIDTLFDKRVYFNEWVEYHDFVSPDISKDSQDYKHGTAVTSLIVDGANLNPNLDDGCGNFRVRHFGVSLQSGFNSFTIIKQIKEIVSQNADIKVWNLSLGSNDEIRENFISAEGALLDEIQFENDVIFIIAGTNASVINGKRKRIGAPADSLNSIIVNSVDFNNQSVSYSREGIVLSFFVKPDVSYYGGGNGDFINVCEPLGLGRVAGTSFAAPFIARKMAYLIHIMGLSREEAKALLIDAAIPWNDKKTFTDLSLIGNGIVPIKMDDILSTPDDEIKFIVSDISRAYDTYNYDFPVPISSESYPYVAKATMCYFPNCSRKQGVDYTNTEMQLTFGRLKSDGIKSINKDNQHAEDSPGYVRENAARNIFRKWDNVKHIGESFTSRKRAKAILNPSNPQWGMSIKTIERLKSGDGQGVRFGVVVTLKELNGVNRIEDFIQQAELRGWLVNRLQVEAQVDLFNSLNEEIEFE

SEQ ID NO: 3067 - protein, 339 aa, Streptococcus pneumoniae
MNITYIVGNGLDLQYGLKTRYRDFYEFQNKVYISRTENEEKYSNFIYESLFSDKVNDYENWSDFELSIGKLTKDNDLISSSIEIKEKFIDDFSEVVDDLREYLRIQQEKNLEKGNAIDFISTLDNMRTSLPVINQPAIDKKYNENLYQHDIVNILTLNYTNVIDKLYNESAKSFSNQLRTNNYKFHIAPPIHAHGTVDICTVLGVSDETQISNSFDEEQKESLIKNLVLKNYRENMDVKNSDIIKNSDIIILYGVSLGETDGYIWNQIAEQSIRSSVPVIIYHYVPHFDAGNPTRVKRLYRNVEDKFIQNSGIDLELEKKLRDNLIVVIGKTIFNLMER

SEQ ID NO: 3068 - protein, 316 aa, Streptococcus pneumoniae
METWQELKVTVKREGEELVSNLLIELGAQGVAIEDSLDYVGNVDRFGEIFPEVEQQEEIVVTAYYPDTVDVTVVEADLQARISELTDFMDLGELKIGTTALAEEDWADNWKKYYEPARITHDLTIVPSWTDYEATAGEKIIKLDPGMAFGTGTHPTTKMSLFALEQVLRGGETVLDVGTGSGVLSIASSLLGAKEIFAYDLDDVAVRVAQENIELNPGMENIHVAAGDLLKGVEIEADVIVANILADILIHLTEDAYRLVKDEGYLIMSGIIKDKWDMVRQSAESAGFFLETHMVQGEWNTCVFKKTKDISGVIGG

SEQ ID NO: 3069 - protein, 247 aa, Streptococcus pneumoniae
MQQYFVKGSAISPVTIEDKETSKHMFQVMRLKEEDEVTLVFDDGIKRLARVLDMENRQFELVQELNDNVELPVQVTIASGFPKGDKLEFIAQKVTELGASQIWAFPADWSVAKWDGKKLGKKVEKLEKIALGAAEQSKRNIVPSIKLFEKKADFLAQLDQFDSIIVAYEESAKEGEAAALLQAVTGLETGAKLLFIFGPEGGLSPAEIESFEAKGAVLAGLGPRILRAETAPLYALSALSVLVELEK

SEQ ID NO: 3070 - protein, 598 aa, Streptococcus pneumoniae
MEQKHRSEFPEKELWDLTALYQDREDFLRAIEKAREDINQFSRDYKGNLHTFEDFEKAFAELEQIYIQMSHIGNYAFMPQTTDYSNDEFANIAQAGMEFETDASVALTFFDDALVVADEEVLDRLGELPHLTAAIRQAKIKKAHYLGADVEKALTNLGEVFYSPQDIYTKMRAGDFEMADFEAHGKTYKNSFVTYENFYQNHEDAEVREKSFRSFSEGLRKHQNTAAAAYLAQVKSEKLLADMKGYDSVFDYLLAEQEVDRVMFDRQIDLIMKDFAPVAQRYLKHVAKVNGLEKMTFADWKLDLDSALNPEVTIDDAYDLVMKSVEPLGQEYCQEVARYQEERWVDFAANSGKDSGGYAADPYRVHPYVLMSWTGRLSDVYTLIHEIGHSGQFIFSDNHQSYFNAHMSTYYVEAPSTFNELLLSDYLENQSNDPRQKRFALAHRLTDTYFHNFITHLLEAAFQRKVYTLIEEGETFGASKLNSIMKEVLTDFWGDAIEIDDDAALTWMRQAHYYMGLYSYTYSAGLVISTAGYLHLKNSETGAEDWLNLLKSGGSKTPLESAMIIGADISTDKPLRDTIQFLSDTVDQIIAYSAELGE

SEQ ID NO: 3071 - protein, 225 aa, Streptococcus pneumoniae
MEPDIFIITKLLSDPSRMHILDILMDGKAHTVNEIASFTKIKQHTVSYHLKLLTEAQVTTLQTYGRFHYYSLKSAAIAEMLEFLSFYSPQRDVKSYKQHIHKKELKVARTCYDHIAGELGISITNYLLQENLLSESEKDFQLTEAGKSYFQRKLHIDTDELKKKKRKFCPKCLDWSERKNHVGGALGNALLEFFSEKQLVIPAQTPRSLTITEKGKEFLEKEWGI

SEQ ID NO: 3072 - protein, 216 aa, Streptococcus pneumoniae
LGILGINGAGKTSTLKMIYSLTSISSGEIDILGQNIETNRRKSKSCLGIVGQEDMLDMTLNVYDNLFAHGLCYGISSVELRKRIDSLLDFVQLSKHAQKMVNQLSSGMRRRLVLARALINRPDIIILDEPTVGLDIQSRNIIWDKLLELKELGVSIIITSHYMNEIEYLTDRVLMLHQGTIKEEGTVEDLLIKYDADNLETLFLGLTGTEKEDLHV

SEQ ID NO: 3073 - protein, 254 aa, Streptococcus pneumoniae
MFKLSFQSIGHVVVRNYMSFRNLFKISIVPNLIDPLFYLLAMGFGVGAYLTHVNGMLYRDFVITGLIAATAMSAATAETTVNAFIQYKIEKTYDAMLMTPINTSDIVVGQAIWAGIRAVIFGGIFWLISMLITAHFHVLMLLIPLILFIVGYLFGVLGLIFTYLAPSREFLNYYNVLVIRPLYMFSDTFFPITSLPPILGDLTWFSPLYHATRMIRIIWGGEVTGLYLHLIWLIALALLITVLPMYMLHRRYYR

SEQ ID NO: 3074 - protein, 263 aa, Streptococcus pneumoniae
MYQDLLRKIAEEKPNYNQEEIQWLFDHLGNPSPEIRDDLIFTSFAKGIQEELFIQEQFHFIAEGVSSDVGLDKEIDKVGLPTLERSFRALVYANLLSADANQQSVFYQGLQSEIRDDLSNQGLHYLSKEKDTTGFSSQYGWVHSFAHGADLLTEVVCHPDFPKNRVHEVFDILGQLFKRMSIRFTDDEDWRLARVIYEPILQGKLEQEQVASWIKTVDFPIEEREDFSKFSNFRSCLVEVYVQLDQRNSLQDELKEAIQSFQY

SEQ ID NO: 3075 - protein, 209 aa, Streptococcus pneumoniae
LYSSGTGAVVFGNGLDGLGHLGIAFAFGLAIVVAAYSIGTVSGAHLNPAVSIAMFVNKRLSSSELVNYILGQVVGAFIASGAVFFLLANSGMSTASLGENALANGVTVFGGFLFEVIATFLFVLVIMTVTSESKGNGAIAGLVIGLSLMAMILVGLKITGLSVNPARSLAPAVLVGGAALQQVWIFILAPIAGGVLAALVAKNFLGTEE

SEQ ID NO: 3076 - protein, 59 aa, Streptococcus pneumoniae
LLKAVFEVVDKTDEVSLKHCFEVADRTDEVSNHTYDKVKLTWFEEIFEEYHTKKPCSSR

SEQ ID NO: 3077 - protein, 190 aa, Streptococcus pneumoniae
LRALNISHFGRSTVKRQSALVVFSGGQDSTTCLFWGMQHYETVEAVTFAYGQHHHLEIQIAREIAKEQGIRHHILDMSLLGQITAQPDFATIHISYIPDKLCVESKSLKLYLFSYRNHGDFHENCINTIGKDLVNLLDPRYLEVWGKFTPRGGISIDPYYNYGKQGTKYEGLAEQRLFQHDLYPEKIDNR

SEQ ID NO: 3078 - protein, 104 aa, Streptococcus pneumoniae
MAKAITDATFEQETKDGLVLVDFWATWCGPCRMQGPILDKLSEELSEDVLKIVKMDVDENPNTARAFGIMSIPTLLFKKDGQVVKQVAGVHTAEQIKAIIAELS

SEQ ID NO: 3079 - protein, 100 aa, Streptococcus pneumoniae
LRAQSFFLTFSFIRSKIKLALNKGVLNMIEITYIDASKNERTVTFESYEDFERSQQACLIGVADYYPVQKLTYKGHNLDYHGTYGDIFFYLMKQDLSQYN

SEQ ID NO: 3080 - protein, 66 aa, Streptococcus pneumoniae
LHLSPSAVSRMVARLEAKNCGLLSRMCCHQDRRSSFICLTNDGQKTLASLQKTVEESLEAGLDFLI

SEQ ID NO: 3081 - protein, 74 aa, Streptococcus pneumoniae
MDFLLYYDSKKKGDTMTYLEKWFDFNRRQKEIESLLEETIAQQSEQSLTLKEFYLLYYLDLAEEKSLRQIELAD

SEQ ID NO: 3082 - protein, 317 aa, Streptococcus pneumoniae
MSISQRTTKLILATCLACLLAYFLNLSSAVSAGIIALLSLSDTRRSTLKLARNRLFSMLLALAIGVLAFHLSGFHIWSLGLYLAFYVPLAYKMGWEIGITPSTVLVSHLLVQESTSPDLLVNEFLLFAIGTGFALLVNLYMPSREEEIQHYHTLVEEKLKDILQRFKYYLSRGDGRNRAQLVAELDTLLKEALRLVYLDHSDHLFHQTDYHIHYFEMRQRQSRILRNMAQQINTCHLAASESLILAQLFSKIAGQLSQTNPASDLLDEIERYLEVFRNRSLPKTREEFETRATLLQLLREAKTFIQVKVDFYQKYRQ

SEQ ID NO: 3083 - protein, 286 aa, Streptococcus pneumoniae
MIGTFAAALVAVLASFIVPIEITLNSANTEIAPPDGIGQVLSNLLLKLVDSPVNALLTANYIGILSWAVIFGIAMREASKNSKELLKTIADVTSKIVEWIINLAPFGILGLVFKTISDKGVGSLANYGILLVPLVTTMLFVAPVVNPLIAFFFMRRNPYPLVWNCLRVSGVTAFFTRSSATNIPVNMKLCHDLGLNPDTYSVSIPLGSTINMAGVAITINLLTLAAVNTLGIPVDFATAFVLSVVAAISACGASGIAGVPSFLSQLLVAFSVFLTILPYKLLGLVL

SEQ ID NO: 3084 - protein, 74 aa, Streptococcus pneumoniae
GKPCQAYLDWYALWGILGLTLPNLSGIGLLGDLFVGGLKAVAPILVFALVANALSQHQKGQDSNMKTVVFLYIL

SEQ ID NO: 3085 - protein, 139 aa, Streptococcus pneumoniae
MQKFIQAYIEKLDVTTIIENILTKVISLLLLLIVFYIAKKMLHTMVQRIVKPSLKMSRHDVGRQKTISRLLENVFNYTLYFFLLYCILSILGLPVSSLLAGAGIAGVPIGMGTKAFCLMSSMAFSSSLNVNWMWEMRSF

SEQ ID NO: 3086 - protein, 65 aa, Streptococcus pneumoniae
FAGWSWYCWGTDWYGNQGFLSDVINGFFILFERQLDVGDEVVLTNGTITVSGKGCQGGNSYDTAS

SEQ ID NO: 3087 - protein, 58 aa, Streptococcus pneumoniae
LSLTEISQLLAIFHAQTRPVILSNLWYNRGSLIRRKDGFRKAVGQWLYLDRPRPRKVE

SEQ ID NO: 3088 - protein, 302 aa, Streptococcus pneumoniae
MVLEKQLGNGCTWIDLDLGKLNKLEDLSEIYGLDKETIEYALDRNERAHMDYHRESGTVTFIYNVLDVKKDKAYYETFPMTFIVEHRRLITISNTKNAYVIEQMTRYLENHDTLSIYKFLFASLEIISNAYYPVIEQMDKSRDEVNDLLRQRTTKKNLFALSDLETGMVYLTAAAKQNRILLEHIQGHALYRSFDEIEREQFDDAMIEAHQLVSMTDLISQILQQLSASYNNILNNNLNDNLTTLTIISVLLAVLAVVTGFFGMNVPLPLTDEPHAWLYISLASAGLWIVLSLLLRKIAKKS

SEQ ID NO: 3089 - protein, 175 aa, Streptococcus pneumoniae
MAIENYIPDFAVEAVYDLTVPSLQAQGIKAVLVDLDNTLIAWNNPDGTPEMKQWLHDLRDAGIGIIVVSNNTKKRVQRAVEKFGIDYVYWALKPFTFGIDRAMKEFHYDKKEVVMVGDQLMTDIRAAHRAGIRSILVKPLVQHDSIKTQINRTRERRVMRKITEKYGPITYKKGI

SEQ ID NO: 3090 - protein, 368 aa, Streptococcus pneumoniae
MEEILCIGCGATIQTTDKAGLGFTPQSALEKGLETGEVYCQRCFRLRHYNEITDVQLTNDDFLKLLHEVGDSDALVVNVIDIFDFNGSVIPGLPRFVSGNDVLLVGNKKDILPKSVKSGKISQWLMKRAHEEGLRPVDVVLTSAQNKHAIKEVIDKIEHYRKGRDVYVVGVTNVGKSTLINAIIQEITGDQNVITTSRFPGTTLDKIEIPLDDGSYIYDTPGIIHRHQMAHYLTAKNLKYVSPKKEIKPKTYQLNPEQTLFLGGLGRFDFIAGEKQGFTAFFDNELKLHRSKLEGASAFYDKHLGTLLTPPNSKEKEDFPRLVQHVFTIKDKTDLVISGLGWIRVTGTAKVAVWAPEGVAVVTRKAII

SEQ ID NO: 3091 - protein, 103 aa, Streptococcus pneumoniae
MSLTSKQRAFLNSQAHTLKPIIQIGKNGLNDQIKTSVRQALDARELIKVTLLQNTDENIHEVAEILEEEIGVDTVQKIGRILILFKQSSKKENRKISKKVKEI

SEQ ID NO: 3092 - protein, 204 aa, Streptococcus pneumoniae
LTPFTKVELEPEIKEKKRKQVGILGGNFNPVHNAHLIVADQVRQQLGLDQVLLMPEYQPPHVDKKETIPEHHRLKMLELAIEGIDGLVIETIELERKGISYTYDTMKILTEKNPDTDYYFIIGADMVDYLPKWYRIDELVDMVQFVGVQRPRYKVGTSYPVIWVDVPLMDISSSMVRAFLAQGRKPNFLLPQPVLDYIEKEGLY

SEQ ID NO: 3093 - protein, 197 aa, Streptococcus pneumoniae
MSYQDYINCSREALLEKMAELLPEKRLTHCLGVERAAMELAQRFGVDVEKASLAGLLHDYAKKLSDQEFLDLIDRYQLDPDLKNWGNNVWHGMVGIYKIQEDLDLHDSEILRAIEVHTVGAGQMTDLDKVIYVADYIEHNRAFPGVDVAREIASLSLNKAVAYETARTVEYLAHQGFPIYPQTLETYNAFVHYLKED

SEQ ID NO: 3094 - protein, 166 aa, Streptococcus pneumoniae
MKTAFIIIDVQNVLVETGFQTKSLLEKISYLQNQARSKNIEIIYVQHIENSEAQTSEDWQLSALLNRKPAEKVFQKKYNSIFKETGLKEYLDKQGIEKLVLCGMQTEYCVDTSVKVAFEYGYQLIVPEGAVTTFDGDDIPAETINEFYEDIWEERFADVLDYKHIF

SEQ ID NO: 3095 - protein, 117 aa, Streptococcus pneumoniae
MNEKELLELVVKAADEKRAEDILALDVQDLTSVTDYFVITSSMNSRQLDAIAANIREKVAQAGFKGSHVEGDAAGGWVLLDLGAVVVHIFSEEMRAHYNLEKLWHEANSVDISEALA

SEQ ID NO: 3096 - protein, 246 aa, Streptococcus pneumoniae
MATYETFAAVYDAVMDDSLYDKWTNFSLRHLPKTKERKKLLELACGTGIQSVRFSQAGFDVTGLDLSADMLKIAEKRATSAKQKIAFIEGNMLNLSKAGKYDFVTCYSDSICYMQDEVEVGDVFKDVYNALNEEGVFIFDVHSTYQTDEVFPGYSYHENAEDFAMLWDTYEDEAPHSIVHELTFFIKEADGSFSRHDEVHEERTYEILTYDILLEQAGFKSFKLYADFEDKEPTETSTRWFFVAQK

SEQ ID NO: 3097 - protein, 187 aa, Streptococcus pneumoniae
MAIMKRIELRDNTCYGHANLLLLRHKKPTGASFCWLLILKVCIEFEGLKSSLFQQDIIGQDLIGPLLMYFIVATKGTVSLLDKESQLMHDGVRSFVLICIPKHGKIFRIFMVGIAREYFICLVGRVHVKDENSLFIQRIVHVLKDVPYFHLILHIADRVRITRDKIVFPCLGQIQHITFYKSNLLLG

SEQ ID NO: 3098 - protein, 365 aa, Streptococcus pneumoniae
MTITGIIAEFNPFHNGHKYLLDQAEGLKIVAMSGNFMQRGEPAIVDKWTRTQMALENGADLVVELPFLVSVQAADFFGQGAMDILDRLGIDSLVFGTEEVRDYQKIADLYTEKGAEMEKFVENLPDSLSYPQKTQAMWKEFAGLDFSGNTPNHVLALAYAKAVAGRNIKLHPIQRQGAGYHSVNKDVDFASATALRQHQKDQDFLERFMPSVALFEQASKVIWEDYFPLLRYQILSNPDLTTIYQVNQEMAVRIKEAIKTAQSVEELVELVTTKRYTKARVRRLLTYILVQARENVLPEAIHVLGFTEKGRQHLKSLKGQVNLVSRIGKEPWDAMTQKVDQIYQLGKPSIAEQNFGRVPIRIETN

SEQ ID NO: 3099 - protein, 62 aa, Streptococcus pneumoniae
PVLFIIPQNNKHKADSKIKIKVHILIFFIDFLSSVLGSLSFSKNFIFNLLSKISTIKKPTFQ

SEQ ID NO: 3100 - protein, 915 aa, Streptococcus pneumoniae
MEENYNLSITQIKNSIKENSLVLFVGAGISANSNLPTWGELIQSLKKELNIPEERTDSPLRIAQYYYDTFGKNQYTKKIEEIFFKKGLSKPNELHKLIEKIAPKHIITTNYDSLLESQFESGLLKYNVVAEDKDIPYTSSERYLIKMHGDFSKKNIVLKEDDYLDYHLNFPMISTLIQSLIMNHTLLFVGYSLSDSTFNSIFRMIQNTFKLDAKNAYFYTPEEPSMIIREYYKKQGIFIISNEENLGQETSEKQNKLYCRTKDFLEVLSENRSQDVNNADDLWNQLAFLDRLSFIDAKDFSRYSDLKKRALNWDDEYCWFGNDQLRFEIDGHEELRIMVSKKSLLNRFLDMEIGEPRDLKGNRFLSKAFKLYEEKQYSLAKAKFRELANIAFRQKDYFNFLVCEFNFQQIQIIDRYEKTPSYAEPLYDGELSELTEQILNSVTGDEKKIIEFFRDSILNFNFLYRKLETINELFDEIREEHESYRRGGWSANNHLFNAEFTVKNLYNFLKLNCLCVEHYKIYKSIINRYLEILLLSYDNSYVNPDSSIFDRTSSWLKNLDLDDVKLILPNIDFKVVNLYFRNYSFGKIKITEEAKDYLLNRITYLQERLEITEDENLRELKNMLIFLPLVDDIDIEKVIEILNNQTLYYNWSEEFRRIIKIVLDNMDVIDKDSLKSKIIGIVNKHLNEILEKNFSLYNSVYPLYSQLLEYCSTDQETAIIVLEKFNTDILRIKYKNDDIKNIIEYSDLICHLFKYFEKDIKDDILDTLKVYEESENIIYHKVIDLMSYNVYDFPQIQNKIYHYLIKRINDKRVEGVKTFPDPREKSVSDLYNLSRKGYFSDFEILKDIEEDIRGLYPEVDWTWFHDRSDDVIHRLLEHRTPNNIKTYFSKNEEDNKLINEYILKAFDEDKLILKK

SEQ ID NO: 3101 - protein, 537 aa, Streptococcus pneumoniae
MEIMSLAIAVFAVIIGLVIGYVSISAKMKSSQEAAELMLLNAEQEATNLRGQAEREADLLVNEAKRESKSLKKEALLEAKEEARKYREEVDAEFKSERQELKQIESRLTERATSLDRKDDNLTSKEQTLEQKEQSISDRAKNLDAREEQLEEVERQKEAELERIGALSQAEARDIILAQTEENLTREIASRIREAEQEVKERSDKMAKDILVQAMQRIAGEYVAESTNSTVHLPDDTMKGRIIGREGRNIRTFESLTGVDVIIDDTPEVVTLSGFDPIRREIARMTMEMLLKDGRIHPARIEELVEKNRQEIDNKIREYGEAAAYEIGAPNLHPDLMKIMGRLQFRTSYGQNVLRHSIEVAKLAGIMASELGENAALARRAGFLHDIGKAIDHEVEGSHVEIGMELARKYKEPPVVVNTIASHHGDVEAESVIAVIVAAADALSAARPGARSESLESYIKRLHDLEEIANGFEGVQTSFALQAGREIRIMVNPGKIKDDKVTILAHKVRKKIENNLDYPGNIKVTVIRELRAVDYAK

SEQ ID NO: 3102 - protein, 208 aa, Streptococcus pneumoniae
MADRGLLIVFSGPSGVGKGTVRREIFESSENQFQYSVSMTTRAQRPGEVDGVDYFFRTREEFEELIRQGQMLEYAEYVGNYYGTPLTYVNETLDKGIDVFLEIEVQGALQVKKKVPDAVFIFLTPPDLDELQDRLVGRGTDSAEVIVQRIEKAKEEIALMREYDYAIVNDQVPLAAERVKCVIEAEHFCVDRVIGHYQEMLPKSPTTR

SEQ ID NO: 3103 - protein, 104 aa, Streptococcus pneumoniae
MMLKPSIDTLLDKVPSKYSLVILEAKRAHELEAGAPATQGFKSEKSTLRALEEIESGNVTIHPDPEGKREAVRRRIEEEKRRKEEEEKKIKEQIAKEKEDGEKI

SEQ ID NO: 3104 - protein, 798 aa, Streptococcus pneumoniae
MALAKIIVDVPLMQTDQPYSYRIPEEFEGMLEVGMRVHVPFGKGNRLIQGIVLGLKSQSDGEEMEQDLKDIAEVLDFSPVLTPEQLWLAEELRKSVFSYKISILKAMLPGFLNSSYDKILYPLEGLSQEERVRLFGSEDSLAFSSLDLAKQAEMMRLTRKGLLGLEYQAVDQKKVKTQSWYEVDHAQLEGVEISTRAKKKLELRDYLLSHPESASLASLLESYSREQVNFFVDQGAVTIVQKEVQRSAAYFEGIEASRPLELNPEQRQARDAVVSSIGSSQPPFLLQGITGSGKTEVYLQIIQGALDKGKTAILLVPEISLTPQMTERFIARFGDKVAILHSGLSNGEKYDEWRKVERGDAQVVVGARSAIFAPLKNLGVMIIDEEHEAAYKQDSNPRYHAREVAILRAQYNQATLVLGSATPSLESRARAGKGVYQHLRLTQRANPLATIPEVQVIDFRDYIGQNETSNFTPPLLEAIQDRLVKKEQVVLMLNRRGYSSFVMCRECGTVDTCPNCDISLTLHMDTKTMNCHYCGFSKDIPQVCPNCKSHSIRYYGTGTQKAYDELAELFPQARILRMDVDTTRKKGSHQALLDQFGRGEADILLGTQMIAKGLDFPNVTLVGVLNADTALNLPDFRSSERTFQLLTQVAGRSGRAEKAGQVLIQSYNPQHYAIRFAKDQDYEGFYAYEMGIRRQLGYPPYYFTIGITLSHKKEEEVFKRAYEVMNILRSGLSETSPILGPTPKPIARTHNLYHYQILIKYRLEDELGPTLNQVLALTQERENSELRLSIDHEPQQFL

SEQ ID NO: 3105 - protein, 311 aa, Streptococcus pneumoniae
MTKLIFMGTPDFSATVLKGLLTDDRYEILAVVTQPDRAVGRKKVIQETPVKQAAKEAGLSIYQPEKLSGSPEMEELMKLGADGIVTAAFGQFLPSKLLDSMDFAVNVHASLLPRHRGGAPIHYALIQGDEEAGVTIMEMVKEMDAGDMIFRRSIPITDEDNVGTLFEKLALVGRDLLLDTLPAYIAGDIKPEPQDTSQVTFSPNIKPEEEKLDWDKTNRQLFNQIGGMNPGPVAHTFLKGDRFKIYEALPVEDQGNPGEILSIGKKELIVATAEGALSLKQVQPAGKPKMDIASFLNGVGRTLTVGERFGD

SEQ ID NO: 3106 - protein, 175 aa, Streptococcus pneumoniae
LVTKVETARSLALAVLEDVFVNQAYSNIALNKHLKGSQLSAADKGLVTELVYGTVARKLTLEWYLSHFIEDRDQLDSWLYVLLLMSAYQLRYLDKIPDHAVVNEAVELAKLRKKGSEKLVNAVLRRILREGWPDIASIKRKNKRDSIAYSLPVWLVTKLKEEYGEERAKAIFESL

SEQ ID NO: 3107 - protein, 138 aa, Streptococcus pneumoniae
LKACSLRNKASIRVTDLSRKEEIQALLEANDSLLATTRLVKEQGHFAGHNLFADGAITIQDESSQLVAPTLDLQGDERVLDPVRLQVENSPYSLLSYDRSGYCSGLVRPQVGFNSRKCPTSGSCRSGSNSKIGCQKGA

SEQ ID NO: 3108 - protein, 232 aa, Streptococcus pneumoniae
QPLVWLRSKGILQGIICLRMEPLPSKTSPVSWLLRRLIYKVMSECLILCGSRWKTAHIASYLTTGQVTALDLYDHKLDLIQENAQRLGVADRVQTQKLDARKVHEFFDQDSFDKILVDAPCSGIGLLRRKPDIKYNKETADFASLQEIQLEILGSVCQILGKGGIITYSTCTIVSEENFQVVKAFLESHPEFEQVKLEHECKDIMKDGCILITPELYGSDGFFISQFRKISD

SEQ ID NO: 3109 - protein, 246 aa, Streptococcus pneumoniae
MEISLLTDVGQKRTNNQDYVNHYVNRAGRTMIILADGMGGHRAGNIASEMAVTDLGVAWVDTQIDTVNEVREWFAHYLEIENQKIHQLGQDEAYRGMGTTLEVLAIIDNQAIYAHIGDSRIGLIRGEEYHQLTSDHSLVNELLKAGQLTPEEAEAHPQKNIITQSIGQKDEIQPDFGTVILESGDYLLLNSDGLTNMISGSEIRDIVTSDIPLADKTETLVRFANNAGGLDNITVALVSMNEEDEE

SEQ ID NO: 3110 - protein, 659 aa, Streptococcus pneumoniae
MIQIGKIFAGRYRIVKQIGRGGMADVYLAKDLILDGEEVAVKVLRTNYQTDPIAVARFQREARAMADLDHPHIVRITDIGEEDGQQYLAMEYVAGLDLKRYIKEHYPLSNEEAVRIMGQILLAMRLAHTRGIVHRDLKPQNILLTPDGTAKVTDFGIAVAFAETSLTQTNSMLGSVHYLSPEQARGSKATVQSDIYAMGIIFYEMLTGHIPYDGDSAVTIALQHFQKPLPSVIAENPSVPQALENVIIKATAKKLTNRYRSVSEMYVDLSSSLSYNRRNESKLIFDETSKADTKTLPKVSQSTLTSIPKVQAQTEHKSIKNPSQAVTEETYQPQAPKKHRFKMRYLILLASLVLVAASLIWILSRTPATIAIPDVAGQTVAEAKATLKKANFEIGEEKTEASEKVEEGRIIRTDPGAGTGRKEGTKINLVVSSGKQSFQISNYVGRKSSDVIAELKEKKVPDNLIKIEEEESNESEAGTVLKQSLPEGTTYDLSKATQIVLTVAKKATTIQLGNYIGRNSTEVISELKQKKVPENLIKIEEEESSESEPGTIMKQSPGAGTTYDVSKPTQIVLTVAKKVTSVAMPSYIGSSLEFTKNNLIQIVGIKEANIEVVEVTTAPAGSVEGMVVEQSPRAGEKVDLNKTRVKISIYKPKTTSATP

SEQ ID NO: 3111 - protein, 67 aa, Streptococcus pneumoniae
MEESKELNAVIDVIMLAGTILLKSGSEIHRVEDTMIRIAIRRGLWIAMSLPCLPLSFSLLKIPIFRA

SEQ ID NO: 3112 - protein, 73 aa, Streptococcus pneumoniae
KWLRNPSCRRYHDSNRDSQGIVDCNVLAMPAAIFFSIENTNISRMKRVTSSSYNIEKSLRCEPDFSSASWGAD

SEQ ID NO: 3113 - protein, 169 aa, Streptococcus pneumoniae
VNQISRQLVGGQIDLETAFKQLTALQAQPLPYTKLQVTLAATFSAPFFSVMFSGNIYDALGAGVATLFGFAFSLYVEKFIRIPFVTAFAGAFVFGIIAQFWARYTGFPSTADLIIAGAVMPFVPGIALTNAVRDIMTNHINSGMSKMFESLLITLALGAGTSVALVLMN

SEQ ID NO: 3114 - protein, 111 aa, Streptococcus pneumoniae
MTVWLIYLLLKEPTNVIVATFIAAIIGSCVSQILSILYKTPAVVFILAILAPLVPGYLSYRTTAFFVTGDYNKALASGLLVVMLALVISIGMASGSVILRLYHYIKTHRVS

SEQ ID NO: 3115 - protein, 66 aa, Streptococcus pneumoniae
VREYRTYEEIAADFGIHESNLLRRSQWVEVTLVQSGVTISKTHLSAENTVIVDATEVKINRPKKIN

SEQ ID NO: 3116 - protein, 129 aa, Streptococcus pneumoniae
MEPQAIVTSQERIVSLNIAVNYCHDMKLFKMSRRNIGQAGKILADSGYQGPMKIYPQAQTPRKSSNLKPLIAEDKAYNHALSKERSKVENIFAKVKTFKMFSTTYRNHRKRFGLRMNLIVGIINHELGF

SEQ ID NO: 3117 - protein, 95 aa, Streptococcus pneumoniae
LSVSLLTLLFIPVMVSSSGSEFQSGWQEHQLIAEKVSKTLDKTFDKDVREIPTSQFYQKFVDEMGRTYSGNLILQELITVNGAYKATYIGELSSN

SEQ ID NO: 3118 - protein, 390 aa, Streptococcus pneumoniae
MTIGIDKIGFATSQYVLKLQDLAEARGIDPEKLSKGLLLKELSIAPLTEDIVTLAASASDSILTEQERQEVDMVIVATESGIDQSKAAAVFVHGLLGIQPFARSFEIKEACYGATAALHYAKLHVENSPESKVLVIASDIAKYGIETPGEPTQGAGSVAMLITQNPRMMAFNNDNVAQTRDIMDFWRPNYSTTPHVNGVYSTQQYLDSLKTTWLEYQKRYQLTLDDFAAVCFHLPYPKLALKGLKKIMDKSLPQEKKDLLQKHFDQSILYSQKVGNIYTGSLFLGLLSLLENTDSLKAGDKIALYSYGSGAVAEFFSGELVEGYEAYLDKDRLNKLNQRTALSVADYEKVFFEEVNLDETNSAQFAGYENQDFALVEILDHQRRYSKVEK

SEQ ID NO: 3119 - protein, 424 aa, Streptococcus pneumoniae
MKISWNGFSKKSYQERLELLKAQALLSPERQASLEKDEQMSVTVADQLSENVVGTFSLPYSLVPEVLVNGQEYTVPYVTEEPSVVAAASYASKIIKRAGGFTAQVHQRQMIGQVALYQIANPKLAQEKIASKKAELLELANQAYPSIVKRGGGARDLHVEQIKGEPDFLVVYIHVDTQEAMGANMLNTMLEALKPVLEELSQGQSLMGILSNYATDSLVTASCRIAFRYLSRQKDQGREIAEKIALASQFAQADPYRAATHNKGIFNGIDAILIATGNDWRAIEAGAHAFASRDGRYQGLSCWTLDLEREELVGEMTLPMPVATKGGSIGLNPRVALSHDLLGNPSARELAQIIVSIGLAQNFAALKALVSTGIQQGHMKLQAKSLALLAGASESEVAPLVERLISDKTFNLETAQRYLENLRS

SEQ ID NO: 3120 - protein, 321 aa, Streptococcus pneumoniae
MVAKLTDVAKLAGVSPTTVSRVINKKGYLSEKTIQKVNEAMRELGYKPNNLARSLQGKSAKLIGLIFPNISNVFYAELIDKLEHQLFKNGYKTIICNSEHDSEKEREYIEMLEANQVDGIISGSHNLGIEDYNRVTAPIISFDRNLSPDIPVVSSDNYAGGVLAAQTLVKTGAQSIIMITGNDNSNSPTGLRHAGFASVLPKAPIINVSSDFSPVRKEMEIKNILTREKPDAIFASDDLTAILVIKIAQELGISVPKELKVIGYDGTYFIENYYPQLATIKQPLEEIACLTIDLLLQKIEGKEVATTGYFLPVTLLPGKSI

SEQ ID NO: 3121 - protein, 484 aa, Streptococcus pneumoniae
MEWTTERRYRLYQDWTQEEIQHIKENMAQSPWHTHYHVEPKTGLLNDPNGFSYFDGKWILFYQNFPFGAAHGLKSWAQLESDDLVHFRETGVKVLPDTPLDSHGAYSGSAMQFGDNLFLFYTGNVRDENWIRHPYQIGALMDKEGKITKIDKILIDQPADSTDHFRDPQIFNFQGQYYAIVGGQDLEKKGFVRLYKAVNNDYTNWQAVGDLDFANDRTAYMMECPNLVFVEEQPVLLYCPQGLDKKVLDYDNIFPNMYKIGASFDPKNAKMVDVSQLQNMDYGFEAYATQAFNAPDGRALAVSWLGLPDVSYPSDRFDHQGTFSLVKELTIKDDKLYQYPVAAIKDLRASEEAFSNRFQTKNTYELELNLEANSQSEIVLLADKEGKGLSINFDLVNGQVTVDRSQAGEQYAQEFGTTRSCPIENQATTATIFIDNSVFEIFINKGEKVFSGRVFPHADQNGILIKSGNPTGTYYELDYGRKTN

SEQ ID NO: 3122 - protein, 76 aa, Streptococcus pneumoniae
LAQHGNEYAMEIVPYFPLYVEFLLASNLDKVCNDAQLSIPFIPPKILSLLIVTVFDKKCKPFILKKRKNCQTIIMK

SEQ ID NO: 3123 - protein, 65 aa, Streptococcus pneumoniae
MQAFYIKKEKKLSNDYHEINTGNQSNFYENVKDNEIKYFLTKVSNLFFKEFLMKQSKTINLKLAH

SEQ ID NO: 3124 - protein, 627 aa, Streptococcus pneumoniae
MNNQEIAKKVIDALGGRENVNSVAHCATRLRVMVKDEEKINKEVIENLEKVQGAFFNSGQYQIIFGTGTVNKMYDEVVVLGLPTSSKDDMKAEVAKQGNWFQRAIRTFGDVFVPIIPVIVATGLFMGVRGLFNALEMPLPGDFATYTQILTDTAFIILPGLVVWSTFRVFGGNPAVGIVLGMMLVSGSLPNAWAVAQGGEVTAMNFFGFIPVVGLQGSVLPAFIIGVVGAKFEKAVRKVVPDVIDLLVTPFVTLLVMSILGLFVIGPVFHVVENYILIATKAILSIPFGLGGFLIGGVHQLIVVSGVHHIFNLLEVQLLAADHANPFNAIITAAMTAQGAATVAVGVKTKNPKLKTLAFPAALSAFLGITEPAIFGVNLRFRKPFFLSLIAGAIGGGLASILGLAGTGNGITIIPGTMLYVGNGQLPQYLLMVAVSFALGFALTYMFGYEDEVDATAAAKQAEVAEEKEEVAPAALQNETLVTPIVGDVVALADVNDPVFSSGAMGQGIAVKPSQGVVYAPADAEVSIAFPTGHAFGLKTRNGAEVLIHVGIDTVSMNGDGFEAKVAQGNKVKAGDVLGTFDSNKIAAAGLDDTTMVIVTNTADYASVAPVATGSVAKGDAVIEVKI

SEQ ID NO: 3125 - protein, 295 aa, Streptococcus pneumoniae
MTKLYGSLEAGGTKFVCAVGDENFNVVEKTQFPTTTPIETIDKTIEFFSKFDNLSGLAVGSFGPIDIDKNSKTYGFITTTPKPNWANVDLLGAFRRALNVPMYFTTDVNSSAYGEMVARNNAGGRIENLVYYTIGTGIGAGVIQRGEFIGGVGHPEMGHYYVARHPMDIEKEFKGVCPFHKGCLEGYAAGPSLEARTGVRGENIELNNPVWDVQAYYIAQAAVNATVTFRPDVIVFGGGVMAQQHMLDRVREKFTSLLNGYLPVPDVRDYIVTPAVAGNGSATLGNFVLAKEVSK

SEQ ID NO: 3126 - protein, 70 aa, Streptococcus pneumoniae
VSKHLPEKVNNIGQTVGINHEGKGFGQNDDGHVALETHLGQGSQHTEKVSWANGPNHHKNKEAVKTIALI

SEQ ID NO: 3127 - protein, 199 aa, Streptococcus pneumoniae
MKAVSPLLQRVINISSIVGGVGSLIFCIWAYQAGILQSKETLSAFIQQAGIWGPPLFIFLQILQTVVPIIPGALTSVAGVFIYGHIIGTIYNYIGIVIGCAIIFYLVRLYGAAFVQSVVSKRTYDKYIGWLDKGNRFDRFFIFMMIWPISPADFLCMLAALTKMSFKRYMTIIILTKPFTLVVYTYGLTYIIDFFWQML

SEQ ID NO: 3128 - protein, 74 aa, Streptococcus pneumoniae
FQSIISIMHTTIGSNKNHNKFIHRWLPQGTKKTTTKEVAFIEKWINNYPKKCLNYKSPREDFWMTNLNLKFSNN

SEQ ID NO: 3129 - protein, 83 aa, Streptococcus pneumoniae
LSIFRRLLLCKIWPGALLYSMKIKEQTRKLAVDCSKYSFEVADKTDEVSSKHCFEVVDRTDEVSNYIYGKAKLTWFEEIFEEY

SEQ ID NO: 3130 - protein, 75 aa, Streptococcus pneumoniae
LLTSSVLSTTSKQCFELTSSVLSATSKLYFEQSTASFLVCSLIFIEYKSAPGHILHSNSLLKMDKKHCKGYQKGV

SEQ ID NO: 3131 - protein, 297 aa, Streptococcus pneumoniae
MLEVRSLEKSFGSKQVLFGIDFQARPGRILGLVGKNGAGKTTIFHSILKFLEYQGEIGLDGQDIRQETYARIGYLPEERSLMPKLTVLEQVRYLATLKGMDAKEVKEKLPQWMKRLEVKGKLTDKIKSLSKGNQQKIQLIITLIHEPDLIILDEPFSGLDPVNTELLKQVIFQEKERGATIIFSDHVMTNVEELCDDILMIRDGRVVLHGPVQDVRNQYGKTRLFVSSERSKEELENLPHVKQVSLTKQGSWKLILEDESAGRELFPILTQGQYIATFDQQAPTIDEIFKLESGVEV

SEQ ID NO: 3132 - protein, 399 aa, Streptococcus pneumoniae
MRNMWVVIKETYLRHVKSWSFFFMVISPFLFLGISVGIGHIQGSSMAKNNKVAVVTTVPSVAEGLKNVNGVNFDYKDEASAKEAIKEEKLKGYLTIDQEDSVLKAVYHGETSLENGIKFEVTGTLNELQNQLNRSTASLSQEQEKRLAQTIQFTEKIDEAKENKKFIQTIAAGALGFFLYMILITYAGVTAQEVASEKGTKIMEVVFSSIRASHYFYARMMALFLVILTHIGIYVVGGLAAVLLFKDLPFLAQSGILVHLGDAISLNTLLFILISLFMYVVLAAFLGSMASRPEDSGKALSPLMILIMGGFFGVTALGAAGDNLLLKIGSYIPFISTFFMPFRTINDYAGGAEAWISLAITVIFAVVATGFIGRMYASLVLQTDDLGIWKTFKRALSYK

SEQ ID NO: 3133 - protein, 55 aa, Streptococcus pneumoniae
LFYEYVTYLGKNYLKQINLISQDVVGSEIKDSYEYEFFNNGYTCSHIEMVIESYQ

SEQ ID NO: 3134 - protein, 282 aa, Streptococcus pneumoniae
MIFATSQVNPLTNSSVRNLRPKQRRLFMFWNLVHYEFKNVNKWYLALYAAVLVLSALIGIQTQGFKNLPYQESQATMLLFLATVFGGLMLTLAISTIFLIIKRFKGSVYDRQGYLTLTLPVSEHHIITAKLIGAFIWSLISTAVLALSAVIILALTAPEWIPLSYVITFVETHLPQIFLTGISFLLNTISGILCIYLAISIGQLFNEYRTALAVAAYIGIQIVIGFIELFFNLSSNFYVNSLVGLNDHFYMGAGIAIVKELIFIAIFYLGTYYILRNKVNLL

SEQ ID NO: 3135 - protein, 240 aa, Streptococcus pneumoniae
VIILKEFKPMSLLAFENVSKSYGATPALENVSLDIPAGKIVGLLGPNGSGKTTLIKLINGLLQPDQGRVLINDMDPSPATKAVVAYLPDTTYLNEQMKVKEALTYFKTFYKDFNLERAHHLLADLGIDENSRLKKLSKGNKEKVQLILVMSRDARLYVLDEPIGGVDPAARAYILNTIINNYSPTSTVLISTHLISDIEPILDEIVFLKDGKVVRQGNVDDIRYESGESIDQLFRQEFKA

SEQ ID NO: 3136 - protein, 69 aa, Streptococcus pneumoniae
SGCKRPLISLIRVVFPEPFGPRRPTIFPAGMSRETFSRAGVAPYDLDTFSNASNDIGLNSFNIITDYAW

SEQ ID NO: 3137 - protein, 121 aa, Streptococcus pneumoniae
MSWTFDNKKPIYLQIMEKIKLQIVSHTLEPNQQLPTVRELASEAGVNPNTIQRALSDLEREGFVYSKRTTGRFVTKDKELIAQSRKQLSEEELEHFVSSMTHFGYEKEELPGVVSDYIKGV

SEQ ID NO: 3138 - protein, 157 aa, Streptococcus pneumoniae
MRCPKCGATKSSVIDSRQAEEGNTIRRRRECDECQHRFTTYERVEERTLVVVKKDGTREQFSRDKIFNGIIRSAQKRPVSSDEINMVVNRIEQKLRGRNENEIQSEDIGSLVMEELAELDEITYVRFASVYRSFKDVSELESLLQQITQSSKKKKER

SEQ ID NO: 3139 - protein, 389 aa, Streptococcus pneumoniae
MKPIDRFSYLKNNRVSQDTSSLVQCYLPIIGQEALSLYLYTISFWDNGRKEYLFSSILNHLNFGMDRLIKSLKILSAFNLLTLYQKGDVYQLALHAPLSSQDFLGHPVYRRLLEKKIGDVAVEDLKVESADGEEIPVSLNQVFPELAELGSQEYLGLKKKVANDFDLDHFRQLMARDGLRFADEQSDVLNLFAIAEEKKWTWFETYQLAKSTAVSQVISTKRMREKIAQKPVSSDFSLKEAIIIKEAKSKTALQFLAEIKQTRKGTITQTERELLQQMAGLGLLDEVINIILLLTFNKVDSANINEKYAMKVANDYAYQKIHSAEEAVLRIRERGQKAKTQKQNQTAPAKTNIPKWSNPEYKNTSSAEELEEMERQTLELLAKLDNGGD

SEQ ID NO: 3140 - protein, 298 aa, Streptococcus pneumoniae
MESVGDVLKRQPSRFHYQDLVQKIMKDPDVAAFVQQESLNQDELNRSISKFNQYITERDKFLRGDTDYIAKGYKPILVMNHGYADVSYEETPELIAAEKEAAIKKRLNLINFPSSLKNVSFLDVYRDDVQRLTVLKRMIEFVNDYPNNLKGLYLYGDFGVGKSFMVAALAHDLSEKRGVSSTLLHYPSFVIDVKNAISDGNVKTLVDEIKLSEVLILDDIGAEQSTTWVRDEILQVILQYRMQENLPTFFTSNFNFEDLEKHFAKGKNGNDETWEARRVMERIRYLAEETRLEGVNRR

SEQ ID NO: 3141 - protein, 237 aa, Streptococcus pneumoniae
MTETIKLMKAHTSVRRFKEQVLPQEDLTEILTAAQMASSWKNFQSYSVIVVRSQEKKDALYELVPQEAIRQSAVFLLFVGDLNRAEKGARLHTDTFQPQGVEGLLISSVDAALAGQNALLAAESLGYGGVIIGLVRYKSEEVAELFNLPDYTYSVFGMALGVPNQTHDVKPRLPLDNVVFEEEYQEQSTEAIQAYDRVQADYAGARATTSWSQRLAEQFGQAEPSSTRKNLKQKKLL

SEQ ID NO: 3142 - protein, 436 aa, Streptococcus pneumoniae
MALPTIAIVGRPNVGKSTLFNRIAGERISIVEDVEGVTRDRIYATGEWLNRSFSMIDTGGIDDVDAPFMEQIKHQAEIAMEEADVIVFVVSGKEGITDADEYVARKLYKTHKPVILAVNKVDNPEMRNDIYDFYALGLGEPLPISSVHGIGTGDVLDAIVENLPNEYEEENPDVIKFSLIGRPNVGKSSLINAILGEDRVIASPVAGTTRDAIDTHFTDTDGQEFTMIDTAGMRKSGKVYENTEKYSVMRAMRAIDRSDVVLMVINAEEGIREYDKRIAGFAHEAGKGMIIVVNKWDTLEKDNHTMKNWEEDIREQFQYLPYAPIIFVSALTKQRLHKLPGMIKQISESQNTRIPSAVLNDVIMDAIAINPTPTDKGKRLKIFYATQVATKPPTFVIFVNEEELMHFSYLRFLENQIRKAFVFEGTPIHLIARKRK

SEQ ID NO: 3143 - protein, 114 aa, Streptococcus pneumoniae
MSVMEHLFKFLLLAPYFYFDNWIEKANRNSKFFPIFYYFYWIYIPFYSLFSLAWTVVSVLFFNTVLRNVTDIKLWGIWFLFILLAIGMNWLTYSCFKEMFRLRQELGKSKGGRH

SEQ ID NO: 3144 - protein, 117 aa, Streptococcus pneumoniae
VMEHLFKMIILLPCFYFFSWIDKDNRESKFFPIFYYFYWIYITLYALFSLAWTVFSVLFFNIVLRNLTDIKLWGIWLLLLLIAFASDWLDYICFKKMLDLRRELGKSKGVHKGRCRN

SEQ ID NO: 3145 - protein, 63 aa, Streptococcus pneumoniae
LIRSHSITIYYNKMMRVITNYRFEKSLISFSSILTNASSLVSRNKVIPLSIKSELCCSIPKRT

SEQ ID NO: 3146 - protein, 283 aa, Streptococcus pneumoniae
MRWDYGQIFKEIRKSKGLTQQDVCGQVIHRTTLTNIEHGKVIPSFENMVFLLEQIDMSLAEFKYICNEYHPSKRRDIIVESQNPSTFQDTRKMVELTEKCQKYLKTHHDVPIQNIYRHTKIVTELRTKGFKNNHVLKDLSEEIWDYLEPMDTWYISDLKLLGTILFFFPSENLPLLIDRIMKTIEKYKYFRETKVFLSSFLANLSTVYFQHHLFKECETITLQLLVLAEELKIYDILGFSQVRLGILQHNSDLIDKGITLLRLTKEEALVKILEKEINDFSNL

SEQ ID NO: 3147 - protein, 130 aa, Streptococcus pneumoniae
MKTKKLLKMVIPVLMISAVGTTFVEANQIGAFSNFVITTSYKRTGYLTKENEGAEYIMNLNPCRNLHPMTVKHRIVNSNGEARSGESLTTCGTRSTHGNWATVGYVYAADMARQNWWDLSAAISGSWSPN

SEQ ID NO: 3148 - protein, 263 aa, Streptococcus pneumoniae
MKIPLLTFARHKFVYVLLTLLFLALVYRDVLMTYFFFDIHAPDLAKFDGQAIKNDLLKSALDFRILQFNLGFYQSFIIPIIIVLLGFQYIELKNKVLRLSIGREVSYQGLKRKLTLQVASIPCLIYLVTVLIIAIITYFLGTFSPLGWNSLFSDGSGLQRLLDGEIKSYLFFTCVLLIGIFINAIYFLQIVDYVGNVTRSAITYLMFLWLGSMLLYSALPYYMVPMTSLMQASYGDVSLMKLFTPYILYIVPYMVLEKYEDNV

SEQ ID NO: 3149 - protein, 225 aa, Streptococcus pneumoniae
LSLIWCLKNMKIMFKNFNNILLKRKIVLLLRIVLMMILINYLLSTAVQKQDAVIFFKRELISIFSYNDYSEANLEIPKLLLNLSLFMVGWLSVILLESDLADHYHHLIRYQSSSFFDYTRKRLVVISKFFTQDLLVWFLGLLPLGIHFKTVALFFLLAQLMMLYLLLSYLIALISAGAGFSFFLYFLAFVGQEWMMDHIVTVYLLLLSLLVMLIVSRLEEKFKKG

SEQ ID NO: 3150 - protein, 210 aa, Streptococcus pneumoniae
MKLEIINGQKIYGKRPILNQLNLVFQSGKIYGLKGDNGSGKTVLLKVLAGYIKLDKGKVLQDGKVYGIKNHYIQDAGILIEKVEFLSHLSLRENLELLRYFSSKVTEKRIAYWIQYYDLQEFEDVEYRHLSLGTKQKMALIQAFISSPSILFLDEPMNALDEKSVRLTKQVILSYLKKENGLVILTSHISEDISDLCTDVLVVENGHIQM

SEQ ID NO: 3151 - protein, 95 aa, Streptococcus pneumoniae
MAHLKSFITRYSKVYIGLVLLIWLSFFFIPWDKPLLGIRIDIFIIQKILLAFGILSILMALLSKKVSLFVFELICCLSLWINLFITFAILPIFGN

SEQ ID NO: 3152 - protein, 837 aa, Streptococcus pneumoniae
MANILKTIIENDKGEIRRLEKMADKVFKYEDQMAALTDDQLKAKTVEFKERYQNGESLDSLLYEAFAVVREGAKRVLGLFPYKVQVMGGIVLHHGDVPEMRTGEGKTLTATMPVYLNALSGKGVHVVTVNEYLSERDATEMGELYSWLGLSVGINLATKSPMEKKEAYECDITYSTNSEIGFDYLRDNMVVRAENMVQRPLNYALVDEVDSILIDEARTPLIVSGANAVETSQLYHMADHYVKSLNKDDYIIDVQSKTIGLSDSGIDRAESYFKLENLYDIENVALTHFIDNALRANYIMLLDIDYVVSEEQEILIVDQFTGRTMEGRRYSDGLHQAIEAKEGVPIQDETKTSASITYQNLFRMYKKLSGMTGTGKTEEEEFREIYNIRVIPIPTNRPVQRIDHSDLLYASIESKFKAVVEDVKARYQKGQPVLVGTVAVETSDYISKKLVAAGVPHEVLNAKNHYREAQIIMNAGQRGAVTIATNMAGRGTDIKLGEGVRELGGLCVIGTERHESRRIDNQLRGRSGRQGDPGESQFYLSLEDDLMKRFGSERLKGIFERLNMSEEAIESRMLTRQVEAAQKRVEGNNYDTRKQVLQYDDVMREQREIIYTQRYDVITADRDLAPEIQAMIKRTIGRVVDGHARAKQDEKLEAILNFAKYNLLPEDSITMEDLSGLSDKAIKEELFQRALKVYDSQVSKLRDEEAVKEFQKVLILRVVDNKWTDHIDALDQLRNAVGLRGYAQNNPVVEYQAEGFRMFNDMIGSIEFDVTRLMMKAQIHEQERPQAERHISTTATRNIAAHQASMPEDLDLSQIGRNELCPCGSGKKFKNCHGKRQ

SEQ ID NO: 3153 - protein, 343 aa, Streptococcus pneumoniae
MVFTAKSSKINIEEVRALSKLEGQALERKSQRDQELEAIIRGEDQRILLVIGPCSSDNEEAVLEYAKRLAVLQEEVADRIFMVMRVYTAKPRTNGDGYKGLIHQPNATEAPSLINGIKAVRHLHYRVITETGMTTADEMLYPENLPLVDDLISYMAVGARSVEDQQHRFVASGAGFSTGFKNPTSGNLNVMFNGIYAAQNKQSFLFLGKEVETTGNPLSHAILRGALNEYGKNIPNYYYDNLIDTIAQYEKMGLENPFIIIDTNHDNSGKQYIEQIRIVRQTLINRAWNEKIKQFVRGFMIESYLEDGRQNEPEVFGKSITDPCLGWDNTEALVREIYKTLGE

SEQ ID NO: 3154 - protein, 214 aa, Streptococcus pneumoniae
MAFIEKGQEIDMEVIKAETQLSAEALRLKESRDRELADIISGEDDRILLVIGPCSSDNEEAVLEYARRLSALQKKVADKIFMVMRVYTAKPRTNGDGYKGLVHQPDTSKAPSLINGLQAVRQLHYRVITETGLTTADEMLYPSNLILVDDLVSYHAVGARSVEDQEHRFVASGIDAPVGMKNPTSGNLGVMFNAIYAAQNKQTSFIMGRKLEHQ

SEQ ID NO: 3155 - protein, 110 aa, Streptococcus pneumoniae
  UNSURE (52): Xaa at each above location is unknown.
VLCLTPSMLLKTSKLPLSWAGSWNISNSVAHVIFRGAFNEYANYIPNYYYEXLLQAIERYETMGLEILLSSLTRTMMTQASNIWSRFELFARPCRIVIGMRKLKRRFEDL

SEQ ID NO: 3156 - protein, 88 aa, Streptococcus pneumoniae
NPFILINTNHDDSGKQYMEQIRIVRQTLQNRDWNEKIKKTVRGFMIESYLADGRQNQPEVFGCSITDPCLGWENTEALVEEIYVTLTK

SEQ ID NO: 3157 - protein, 120 aa, Streptococcus pneumoniae
MIVGHGIDIEELASIESAVTRHEGFAKRVLTAQEMERFTSLKGRRQIEYLAGRWSAKEAFSKAMGTGISKLGFQDLEVLNNERGAPYFSQAPFSGKIWLSISHTDQFVTASVILEENHES

SEQ ID NO: 3158 - protein, 367 aa, Streptococcus pneumoniae
MKASPHRPTKVLIHLGAIRQNIQQMGAHIPQGTLKWAVVKANAYGHGAVAVAKAIQDDVDGFCVSNIDEAIELRQAGLSKPILILGVSEIEAVALAKEYDFTLTVAGLEWIQALLDKEVDLTGLTVHLKIDSGMGRIGFREASEVEQAQDLLQQHGVRVEGIFTHFATADEESDDYFNAQLERFKTILASMKEVPELVHASNSATTLWHVETIFNAVRMGDAMYGLNPSGAVLDLPYDLIPALTLESALVHVKTVPAGACMGYGATYQADSEQVIATVPIGYADGWTRDMQNFSVLVDGQACPIVGRVSMDQITIRLPKLYPLGTKVTLIGSNGDKEITATQVATYRVTINYEVVCLLSDRIPREYY

SEQ ID NO: 3159 - protein, 671 aa, Streptococcus pneumoniae
MNLHQPLHVLPGVGPKSAEKYAKLGIENLQDLLLYFPFRYEDFKTKQVLELEDGEKAVLSGQVVTPASVQYYGFKRNRLRFSLKQGEVVFAVNFFNQPYLADKIELGATLAVFGKWDRAKASLNGMKVLAQVEDDLQPVYRLAQGISQASLVKVIKTAFDQGLDLLIEENLPQSLLDKYKLMSRCQAVRAMHFPKDLAEYKQALRRIKFEELFYFQMQLQMLKSENRVQGSGLVLNWSQEKVTAVKVSLPFALTQAQEKSLQEILTDMKSDHHMNRLLQGDVGSGKTVVAGLAMFAAVTAGYQAALMVPTEILAEQHFESLQNLFPNLKLALLTGSLKAAEKREVLETIAKGEADLIIGTHALIQDGVEYARLGLIIIDEQHRFGVGQRRILREKGDNPDVLMMTATPIPRTLAITAFGDMDVSIIDQMPAGRKPIVTRWIKHEQLPQVLTWLEGEIQKGSQAYVISPLIEESEALDLKNAIALSEELTTHFAGKAEVALLHGRMKSDEKDQIMQDFKERKTDILVSTTVIEVGVNVPNATVMIIMDADRFGLSQLHQLRGRVGRGDKQSYAVLVANPKTDSGKDRMRIMTETTNGFVLAEEDLKMRGSGEIFGTRQSGLPEFQVADIIEDFPILEEARKVASYISSIETWQEDPEWRMIALHLEKKEHLD

SEQ ID NO: 3160 - protein, 88 aa, Streptococcus pneumoniae
LILFENLFKPRQRRLTVYMLLTSSVLSATSKRCFELTSSVSSTTSKPCFELTSSVSSTTSKQCFEQPAVSFLVCSLIFIEYKFSLEKA

SEQ ID NO: 3161 - protein, 67 aa, Streptococcus pneumoniae
MKIKEQTRKLTAGCSKHCFEVVDETDEVSSKHGFEVVDETDEVSSKHRFEVADRTDEVSNIYTVRRR

SEQ ID NO: 3162 - protein, 326 aa, Streptococcus pneumoniae
MKNPALLEEIKTYRGRDEVPEDFDAFWDGEVKNVSTLPSYHLEERDFHIPQVKCYELTFEGSKEGKVYARIVLPKSEEKVPLIFHFHGYMGRGWDWADMLGFTVAGYGVVSMDVRGQSGYSQDGLRSPLGNTVKGHIIRGAMEGRDHLFYKDVYLDIYQLVEIVASLSQVDEKRLSSYGASQGGALALVAAALNPRIQKTVAIYPFLSDFRRVIEIGNTSEAYDELFRYFKFHDPFHETEEEIMATLAYIDVKNLAHRIQGEVKMITGLDDDVCYPITQFAIYNRLTCDKTYRIMPEYAHEAMNVFVNDQVYNWLCGSEIPFKYLK

SEQ ID NO: 3163 - protein, 205 aa, Streptococcus pneumoniae
VLILFKNLFKPRQLRLAVYMLLTSSVLSATSKRCFELTSSVLSATSKRCFELTSSVLSATSKRCFELTSSVLSATSKRCFELTSSVLSATSKRCFELTSSVLSATSKRCFELTSSVLSATSKRCFELTSSVLSATSKRCFELTSSVLSATSKRCFELTSSVLSATSKRCFELTSSVLSATSKRCFEHHATSFLVCSLIFIEYKNR

SEQ ID NO: 3164 - protein, 167 aa, Streptococcus pneumoniae
VADRTDEVSSKHRFEVADRTDEVSSKHRFEVADRTDEVSSKHRFEVADRTDEVSSKHRFEVADRTDEVSSKHRFEVADRTDEVSSKHRFEVADRTDEVSSKHRFEVADRTDEVSSKHRFEVADRTDEVSSKHRFEVADRTDEVSSKHRFEVADRTDEVSNIYTARRS

SEQ ID NO: 3165 - protein, 75 aa, Streptococcus pneumoniae
MIFKAFKTKKQRKRQVELLLTVFFDSFLIDLFLHLFGIVPFKLDKILIVSLIIFPIISTSIYAYEKLFEKVFDKD

SEQ ID NO: 3166 - protein, 937 aa, Streptococcus pneumoniae
MIVGAVVFGTSPVLAQEGASEQPLANETQLSGESSTLTDTEKSQPSSETELSGNKQEQERKDKQEEKIPRDYYARDLENVETVIEKEDVETNASNGQRVDLSSELDKLKKLENATVHMEFKPDAKAPAFYNLFSVSSATKKDEYFTMAVYNNTATLEGRGSDGKQFYGNYNDAPLKVKPGQWNSVTFTVEKPTPELPKGRVRLYVNGVLSRTSLKSGNFIKDMPDVTHVQIGATKRANNTVWGSNLQIRNLTVYNRALTPEEVQKRSQLFKRSDLEKKLPEGAVLTEKTDIFESGRNGKPNKDGIKSYRIPALLKTDKGTLIAGADERRLHSSDWGDIGMVIRRSEDNGKTWGDRVTITNLRDNPKASDPSIGSPVNIDMVLVQDPETKRIFSIYDMFPEGKGIFGMSSQKEEAYKKIDGKTYQILYREGEKGAYTIRENGTVYTPDGKATDYRVVVDPVKPAYSDKGDLYKGDQLLGNIYFTTNKTSPFRIAKDSYLWMSYSDDDGKTWSAPQDITPMVKADWMKFLGVGPGTGIVLRNGPHKGRILIPVYTTNNVSHLDGSQSSRVIYSDDHGKTWHAGEAVNDNRQVDGQKIHSSTMNNKRAQNTESTVVQLNNGDVKLFMRGLTGDLQVATSKDGGVTWEKDIKRYPQVKDVYVQMSAIHTMHEGKEYIILSNAGGPKRENGMVHLARVEENGELTWLKHNPIQKGEFAYNSLQELGNGEYGILYEHTEKGQNAYTLSFRKFNWEFLSKNLISPTEAKVKRTREMGKGVIGLEFDSEVLVNKAPTLQLANGKTATFLTQYDSKTLLFAVDKEDIGQEIIGIAKGSIESMHNLPVNLAGARVPGGVNGSKAAVHEVPEFTGGVNGTEPAVHEIAEYKGSDSLVTLTTKEDYTYKAPLAQQALPETGNKESDLLASLGLTAFFLGLFTLGKKREQ

SEQ ID NO: 3167 - protein, 71 aa, Streptococcus pneumoniae
FDFPDRVVHILFQSTIFYRTDYSESSFRPLMISYQLECHQKKIAGLKTCYLLLFLQNQMFRILLLLFSLFP

SEQ ID NO: 3168 - protein, 150 aa, Streptococcus pneumoniae
MIITKISRLGTYVGVNPHFATLIDFLEKTGLENLTEGSIAIDGNRLFGNCFTYLADGQAGAFFETHQKYLDIHLVLENEEAMAVTSPENVSVTQEYDEEKDIELYTGKVEQLVHLRAGECLITFPEDLHQPKVRINDEPVKKVVFKVAIS

SEQ ID NO: 3169 - protein, 445 aa, Streptococcus pneumoniae
MKKMRKFLCLAGIALAAVALVACSGKKEATTSTEPPTELSGEITMWHSFTQGPRLESIQKSADAFMQKHPKTKIKIETFSWNDFYTKWTTGLANGNVPDISTALPNQVMEMVNSDALVPLNDSIKRIGQDKFNETALNEAKIGDDYYSVPLYSHAQVMWVRTDLLKEHNIEVPKTWDQLYEASKKLKEAGVYGLSVPFGTNDLMATRFLNFYVRSGGGSLLTKDLKADLTSQLAQDGIKYWVKLYKEISPQDSLNFNVLQQATLFYQGKTAFDFNSGFHIGGINANSPQLIDSIDAYPIPKIKESDKDQGIETSNIPMVVWKNSKHPEVAKAFLEALYNEEDYVKFLDSTPVGMLPTIKGISDSAAYKENETRKKFKHAEEVITEAVKKGTAIGYENGPSVQAGMLTNQHIIEQMFQDIITNGTDPMKAAKEAEKQLNDLFEAVQ

SEQ ID NO: 3170 - protein, 294 aa, Streptococcus pneumoniae
MVKERNLTRWIFVLPAMIIVGLLFVYPFFSSIFYSFTNKHLIMPNYKFVGLANYKAVLSDPNFFNAFFNSIKWTVFSLVGQVLVGFVLALALHRVRHFKKLYRTLLIVPWAFPTIVIAFSWQWILNGVYGYLPNLIVKLGLMEHTPAFLTDSTWAFLCLVFINIWFGAPMIMVNVLSALQTVPEEQFEAAKIDGASSWQVFKFIVFPHIKVVVGLLVVLRTVWIFNNFDIIYLITGGGPANATTTLPIFAYNLGWGTKLLGRASAVTVLLFIFLVAICFIYFAIISKWEKEGRK

SEQ ID NO: 3171 - protein, 277 aa, Streptococcus pneumoniae
MKKKSSIYLDILSHVLLVGATIVAIFPLVWIIISSVKGKGELTQYPTRFWPEQFTLDYFTHVINDLHFIDNIRNSLIIALATTLIAIIISAMAAYGIVRFFPKLGAIMSRLLVITYIFPPILLAIPYSIAIAKVGLTNSLFGLMMVYLSFSVPYAVWLLVGFFQTVPIGIEEAARIDGANKFVTFYKVVLPIVAPGIVATAIYTFINAWNEFLYALILINNTGKMTVAVALRSLNGSEILDWGDMMAASVIVVLPSIIFFSIIQNKIASGLSEGSVK

SEQ ID NO: 3172 - protein, 253 aa, Streptococcus pneumoniae
MNKRGLYSKLGISVVGISLLMGVPTLIHANELNYGQLSISPIFQGGSYQLNNKSIDISPLLLDKLSGESQTVVMKFKADKPNSLQALFGLSNSKAGFKNNYFSIFMRDSGEIGVEIRDAQKGINYLFSRPASLWGKHKGQAVENTLVFVSDSKDKTYTMYVNGIEVFSETVDTFLPISNINGIDKATLGAVNREGKEHYLAKGSIGEISLFNKAISDQEVSNIPLSNPFQLIFQSGDSTQANYFRIPTLLKVL

SEQ ID NO: 3173 - protein, 125 aa, Streptococcus pneumoniae
VLYLLFTTNTRKGTEMQEHYTPKGKHLTIDNRRLIERWKNENKSNREIAGLLGKAPQTIHNEVKRGTTLQQVRKGLYKKVYSADYAQTVYQFNRKRSVKKLILTKEIREKILHYHKHISKNFRLK

SEQ ID NO: 3174 - protein, 210 aa, Streptococcus pneumoniae
MMVNKKQVKVGISTIYYWFHNGHLGLTKADMLYPRKRKGVKKQASPNFKPAGKSIEERPDVINLRLENGHYEIDTVLLTKIKNYCLLVLTDRRSRHQIIRLIPNKTAESVNQALTLLLGEHRILSITADNGSEFKRLSEVFPEEHIYYAHAYSSWERGSNENHNRLIRRWLPKGTKKTTPKEVAFIENWINNYPKKCLDYKSPSEFLLGG

SEQ ID NO: 3175 - protein, 466 aa, Streptococcus pneumoniae
VNFFWVANFNLKFGIPTLYTLSSGRVLSSIDARYGGTHDSKSKINIATSYSDDNGKTWSEPIFAMKFNDYEEQLVYWPRDNKLKNSQISGSASFIDSSIVEDKKSGKTILLADVMPAGIGNNNANKADSGFKEINGHYYLKLKKNGDNDFRYTVREKGVVYDETTNKPTNYTINDKYEVLEGGKSLTVEQYSVDFDSGSLRERHNGKQVPMNVFYKDSLFKVTPTNYIAMTTSQNRGESWEQFKLLPPFLGEKHNGTYLCPGQGLALKSSNRLIFATYTSGELTYLISDDSGQTWKKSSASIPFENATAEAQMVELRDGVIRTFFRTTTGKIAYMTSRDSGETWSKVSYIDGIQQTSYGTQVSAIKYSQLIDGKEAVILSTPNSRSGRKGGQLVVGLVNKEDDSIDWRYHYDIDLPSYGYAYSAITELPNHHIGVLFEKYDSWSRNELHLSNVVQYIDLEINDLTK

SEQ ID NO: 3176 - protein, 367 aa, Streptococcus pneumoniae
MVKYGVVGAGYFGAELARYMQKNDGAEITLLYDPDNAEAIAEELGAKVASSLDELVSSDEVDCVIVATPNNLHKEPVIKAAQHGKNVFCEKPIALSYQDCREMVDACKENNVTFMAGHIMNFFNGVHHAKELINQGVIGDVLYCHTARNGWEEQQPSVSWKKIREKSGGHLYHHIHELDCVQFLMGGMPETVTMTGGNVAHEGEHFGDEDDMIFVNMEFSNKRFALLEWGSAYRWGEHYVLIQGSKGAIRLDLFNCKGTLKLDGQESYFLIHESQEEDDDRTRIYHSTEMDGAIAYGKPGKRTPLWLSSVIDKEMRYLHEIMEGAPVSEEFAKLLTGEAALEAIATADACTQSMFEDRKVKLSEIVK

SEQ ID NO: 3177 - protein, 129 aa, Streptococcus pneumoniae
LNFQTIVAFTLGTIQSNHLDVQFCQFINFFHSSRDEGFLRWIITFDNPNDWKFSDFLNFLDIANTVCSDTDCSTLLSRFDQQGNHPSRFCIKRFMRKSLTRNDDSIFDLLNQGFFANLWHPLSSFSLFL

SEQ ID NO: 3178 - protein, 232 aa, Streptococcus pneumoniae
MPQISKEALIEQIKDGIIVSCQALPHEPLYTEAGGVIPLLVKAAEQGGAVGIRANSVRDIKEIKEVTKLPIIGIIKRDYPPQEPFITATMKEVDELAELDIEVIALDCTKRERYDGLEIQEFIRQVKEKYPNQLLMADTSIFEEGLAAVEAGIDFVGTTLSGYTSYSPKVDGPDFELIKKLCDAGVDVIAEGKIHTPEQAKQILEYGVRGIVVGGAITRPKEITERFVASLK

SEQ ID NO: 3179 - protein, 505 aa, Streptococcus pneumoniae
MFKVLQKVGKAFMLPIAILPAAGLLLGIGGALSNPTTIATYPILDNSIFQSIFQVMSSAGEVVFSNLSLLLCVGLCIGLAKRDKGTAALAGVTGYLVMTATIKALVKLFMAEGSAIDTGVIGALVVGIVAVYLHNRYNNIQLPSALGFFGGSRFVPIVTSFSSILIGFVFFVIWPPFQQLLVSTGGYISQAGPIGTFLYGFLMRLSGAVGLHHIIYPMFWYTELGGVETIAGQTVVGAQKIFFAQLADPAHSGLFTEGTRFFAGRFSTMMFGLPAACLAMYHSVPKNRRKKYAGLFFGVALTSFITGITEPIEFMFLFVSPVLYVVHAFLDGVSFFIADVLNISIGNTFSGGVIDFTLFGILQGNAKTNWVLQIPIGLIWSVLYYIIFRWFITQFNVLTPGRGEEVDSKEISESADSTSNTADYLKQDSLQIIRALGGSNNIEDVDACVTRLRVAVKEVNQVDKALLKQIGAVDVLEVKGGIQAIYGAKAILYKNSINEILGVDD

SEQ ID NO: 3180 - protein, 442 aa, Streptococcus pneumoniae
MKFRKLACTVLAGAAVLGLAACGNSGGSKDAAKSGGDGAKTEITWWAFPVFTQEKTGDGVGTYEKSIIEAFEKANPDIKVKLETIDFKSGPEKITTAIEAGTAPDVLFDAPGRIIQYGKNGKLAELNDLFTDEFVKDVNNENIVQASKAGDKAYMYPISSAPFYMAMNKKMLEDAGVANLVKEGWTTDDFEKVLKALKDKGYTPGSLFSSGQGGDQGTRAFISNLYSGSVTDEKVSKYTTDDPKFVKGLEKATSWIKDNLINNGSQFDGGADIQNFANGQTSYTILWAPAQNGIQAKLLEASKVEVVEVPFPSDEGKPALEYLVNGFAVFNNKDDKKVAASKKFIQFIADDKEWGPKDVVRTGAFPVRTSFGKLYEDKRMETISGWTQYYSPYYNTIDGFAEMRTLWFPMLQSVSNGDEKPADALKAFTEKANETIKKAMKQ

SEQ ID NO: 3181 - protein, 295 aa, Streptococcus pneumoniae
VKVNKIRMRETVISYAFLAPVLFFFVIFVLAPMVMGFITSFFNYSMTRFEFVGLDNYIRMFKDPVFTKSLINTVILVIGSVPVVVLFSLFVASQTYHQNVIARSFYRFVFFLPVVTGSVAVTVVWKWIYDPLSGILNFVLKSSHIISQNISWLGDKNWALMAIMIILLTTSVGQPIILYIAAMGNIDNSLVEAARVDGATEFQVFWKIKWPSLLPTTLYIAIITTINSFQCFALIQLLTSGGPNYSTSTLMYYLYEKAFQLTEYGYANTIGVFLAVMIAIVSFVQFKVLGNDVEY

SEQ ID NO: 3182 - protein, 279 aa, Streptococcus pneumoniae
MQSTEKKPLTAFTVISTIILLLLTVLFIFPFYWILTGAFKSQPDTIVIPPQWFPKMPTMENFQQLMVQNPALQWMWNSVFISLVTMFLVCATSSLAGYVLAKKRFYGQRILFAIFIAAMALPKQVVLVPLVRIVNFMGIHDTLWAVILPLIGWPFGVFLMKQFSENIPTELLESAKIDGCGEIRTFWSVAFPIVKPGFAALAIFTFINTWNDYFMQLVMLTSRNNLTISLGVATMQAEMATNYGLIMAGAALAAVPIVTVFLVFQKSFTQGITMGAVKG

SEQ ID NO: 3183 - protein, 150 aa, Streptococcus pneumoniae
MIFDDLKNITFYKGIHPNLDKAIDYLYQHRKDSFELGKYDIDGDKVFLVVQENVLNQAENDQFEYHKNYADLHLLVEGHEYSSYGSRIKDEAVAFDEASDIGFVHCHEHYPLLLGYHNFAIFFPGEPHQPNGYAGMEEKVRKYLFKILID

SEQ ID NO: 3184 - protein, 117 aa, Streptococcus pneumoniae
LVSSCQSVYATRASFLDGQGITVDEMAWIIRGIVNALIGRYIKLGTYAAKYGISMARSILNRAAATAAARVGLLTKIFGWILRIAVLAADVYGNFANNIAVAWDAHDKIPNNGRINF

SEQ ID NO: 3185 - protein, 65 aa, Streptococcus pneumoniae
LLGILSCASQATAILLAKLPYTSAASTAIRKIHPKILVNNPTLAAAVAAALFKIERAILIPYLAA

SEQ ID NO: 3186 - protein, 214 aa, Streptococcus pneumoniae
MAQKGVSLIKAAFDTDNFLMRFSEKVLDIVTANLLFVVSCLPIVTIGVAKISLYETMFEVKKSRRVPVFKIYLRSFKQNLKLGLQLGLMELGIVFLTLSDLYLFWGQTALPFQLLKAICLGILIFLTIVMLASYPIAARYDLSWKEILQKGLMLASFNFPWFFLMLAILVLIVMVLYLSAFSLLLGGSVFLLFGFGLLVFIQTGLMEKIFAKYQ

SEQ ID NO: 3187 - protein, 220 aa, Streptococcus pneumoniae
MSDLKKYEGVIPAFYACYDDQGEVSPERTRALVQYFIDKGVQGLYVNGSSGECIYQSVEDRKLILEEVMAVAKGKLTIIAHVACNNTKDSMELARHAESLGVDAIATIPPIYFRLPEYSVAKYWNDISSAAPNTDYVIYNIPQLAGVALTPSLYTEMLKNPRVIGVKNSSMPVQDIQTFVSLGGEDHIVFNGPDEQFLGRRLMGARVVSVVLMVLCQNSS

SEQ ID NO: 3188 - protein, 99 aa, Streptococcus pneumoniae
GGIGGTYGAMPELFLKLNQLIADKDLKTARELQYAINAIIGKLTSAHGNMYGVIKEVLKINEVLNIGSVRSPLTPVTEEDRPVVEAAAALIRETKERFL

SEQ ID NO: 3189 - protein, 294 aa, Streptococcus pneumoniae
MTYYVAIDIGGTNIKYGLVDQEGQLLESHEMPTEAHKGGPHILQKTKDIVASYLEKGPVAGVAISSAGMVDPDKGEIFYAGPQIPNYAGTQFKKEIEESFTIPCEIENDVNCAGLAEAVSGSGKGASVTLCLTIGTGIGGCLIMDRKVFHGFSNSACEVGYMHMQDGAFQDLASTTALVKYVAEAHGEDVDQWNGRRIFKEATEGNKICMEGIDRMVDYLGKGLANICYVANPEVVILGGGIMGQEAILKPKIRTALKEALVPSLAEKTRLEFAHHQNTAGMLGAYYHFKTKQS

SEQ ID NO: 3190 - protein, 283 aa, Streptococcus pneumoniae
MDKPDIATIIDSHFEEMTDLEQEIARYFLQAETITDDLSSQQVTQKLHISQAALTRFAKKCGFTGYREFIFQYQHQAENQANQVSKHSPLTKRVLRSYSNMREQTQDLIDEIQLERIAQLIEDAERIYFFGTGSSGLVAREMKLRFMRLGVVCEALTDQDGFAWTTSIMDENCLVLGFSLSGSTPSILDSLLDAKEMGAKTVLFTSVPNKDSQTYTETVLVATHSQPSYIQRISAQLPMLFFIDLIYAYFLEINRESKEKIFNSYWENKKLNGYRRQKRVRKS

SEQ ID NO: 3191 - protein, 680 aa, Streptococcus pneumoniae
MRKFNSHSIPIRLNLLFSIVILLFMTIIGRLLYMQVLNKDFYEKKLASASQTKITSSSARGEIYDASGKPLVENTLKQVVSFTRSNKMTATDLKETAKKLLTYVSISSPNLTERQLADYYLADPEIYKKTVEALPSEKRLDSDGNRLSESELYNNAVDSVQTSQLNYTEDEKKEIYLFSQLNAVGNFATGTIATDPLNDSQVAVIASISKEMPGISISTSWDRKVLETSLSSIVGSVSSEKAGLPAEEAEAYLKKGYSLNDRVGTSYLEKQYEETLQGKRSVKEIHLDKYGNMESVDTIEEGSKGNNIKLTIDLAFQDSVDALLKSYFNSELENGGAKYSEGVYAVALNPKTGAVLSMSGIKHDLKTGELTPDSLGTVTNVFVPGSVVKAATISSGWENGVLSGNQTLTDQSIVFQGSAPINSWYTQAYGSFPITAVQALEYSSNTYMVQTALGLMGQTYQPNMFVGTSNLESAMEKLRSTFGEYGLGTATGIDLPDESTGFVPKEYSFANYITNAFGQFDNYTPMQLAQYVATIANNGVRVAPRIVEGIYGNNDKGGLGDLIQQLQPTEMNKVNISDSDMSILHQGFYQVAHGTSGLTTGRAFSNGALVSISGKTGTAESYVADGQQATNTNAVAYAPSDNPQIAVAVVFPHNTNLTNGVGPSIARDIINLYQKYHPMN

SEQ ID NO: 3192 - protein, 119 aa, Streptococcus pneumoniae
LGNGNQCLCSRFGCQGGDHQLRLGKWSLVRKPDLDRPVHCLPRFSSHQFLVYSGLRFIPYHSGPSSGVFIKYLYGPNSLRSYGANLSTQYVCRHQQSRVCYGETAFNLWRIWLGYCDRN

SEQ ID NO: 3193 - protein, 170 aa, Streptococcus pneumoniae
LTVILSYQVSGLRRLRVWPFIRLGCLLMMSMNLQKISFSAKRELTYCSICGRLTDDDPCSICTDPTRDQTTILVLEDSRDVAAMENIQEYHGLYHVLHGLISPMNGISPDDINLKSLMTRLMDSEVSEVIVATNATADGEATSMYLSRLLKPAGIKVTRLDTRSRCGSGH

SEQ ID NO: 3194 - protein, 347 aa, Streptococcus pneumoniae
MKQTIILLYGGRSAEREVSVLSAESVMRAVNYDRFTVKTFFISQSGDFIKTQEFSHAPGQEDRLMTNETIDWDKKVAPSAIYEEGAVVFPVLHGPMGEDGSVQGFLEVLKMPYVGCNILSSSLAMDKITTKRVLESAGIAQVPYVAIVEGDDVTAKIAEVEEKLAYPVFTKPSNMGSSVGISKSENQEELRQALKLAFRYDSRVLVEQGVNAREIEVGLLGNYDVKSTLPGEVVKDVAFYDYDAKYIDNKITMDIPAKISDDVVAVMRQNAETAFRAIGGLGLSRCDFFYTDKGEIFLNELNTMPGFTQWSMYPLLWDNMGISYPELIERLVDLAKESFDKREAHLI

SEQ ID NO: 3195 - protein, 457 aa, Streptococcus pneumoniae
MKLTIHEIAQVVGAKNDISIFEDTQLEKAEFDSRLIGTGDLFVPLKGARDGHDFIKTAFENGAAVTLSEKEVSNHPYILVDDVLTAFQSLASYYLEKTTVDVFAVTGSNGKTTTKDMLAHLLSTRYKTYKTQGNYNNEIGLPYTVLHMPEGTEKLVLEMGQDHLGDIHLLSELARPKTAIVTLVGEAHLAFFKDRSEIAKGKMQIADGMASGSLLLAPADPIVEDYLPTDKKVVRFGQGAELEITDLVERKDSLTFKANFLEQALDLPVTGKYNATNAMIASYVALQEGVSEEQIHQAFQGLELTRNRTEWKKAANGADILSDVYNANPTAMKLILETFSAIPANEGGKKIAVLADMKELGDQSIQLHNQMILSLSPDVLDTVIFYGEDIAELAQLASQMFPIGHVYYFKKTEDQDQFEDLVKQVKESLSANDQILLKGSNSMNLAMLVESLENETK

SEQ ID NO: 3196 - protein, 448 aa, Streptococcus pneumoniae
MNSLPNHHFQNKSFYQLSFDGGHLTQYGGLIFFQELFSQLKLKERISKYLVTNDQRRYCRYSDSDILVQFLFQLLTGYGTDYACKELSADAYFPKLLEGGQLASQPTLSRFLSRTDEETVHSLRCLNLELVEFFLQFHQLNQLIVDIDSTHFTTYGKQEGVAYNAHYRAHGYHPLYAFEGKTGYCFNAQLRPGNRYCSEEADSFITPVLERFNQLLFRMDSGFATPKLYDLIEKTGQYYLIKLKKNTVLSRLGDLSLPCPQDEDLTILPHSAYSETLYQAGSWSHKRRVCQFSERKEGNLFYDVISLVTNMTSGTSQDQFQLYRGRGQAENFIKEMKEGFFGDKTDSSTLIKNEVRMMMSCIAYNLYLFFKHLAGGDFQTLTIKRFRHLFLHVVGKCVRTGRKQLLKLSSLYAYSELFSALYSRIRKVNLNLPVPYEPPRRKASLMMH

SEQ ID NO: 3197 - protein, 191 aa, Streptococcus pneumoniae
MIALTDTGLTFTKDPFDCERYEDLRSLLSEMLNQGSDLDAEEVAEVLKPTSAYATPLMDVRAWIVEDEKICLVRGQGEDSWALPGGFGEVGYSPTENILKEIEEETGFKAKVERLLAVFDTNRFQLQSKQYAKFVFECKLLDGQFQENQEIADLQFFAIDQLPNLSEKRITKEQIEILWQVYQGQREQYLD

SEQ ID NO: 3198 - protein, 198 aa, Streptococcus pneumoniae
MNLWDIFFTTQATEPPKFDLFWYVSLFTLLALTFYTAHRYREKKVYQRFFQILQTVQLILLYGWYWVNHMPLSESLPFYHCRMAMFVVLLLPGQSKYKQYFALLGTFGTLAAFVYPVPDAYPFPHITILSFIFGHLALLGNSLVYLLRQYNARLLDVKGIFLMTFALNALIFVVNLVTGGDYGFLTTRPLVGGTRSSS

SEQ ID NO: 3199 - protein, 86 aa, Streptococcus pneumoniae
MPAFSSAWEMADLIAVAAVSISTIIPSFTPLLLALLTPITFNSPFLCSATSTLTELVPISRPVKKPSLAITSLPLYLPSFALRIIP

SEQ ID NO: 3200 - protein, 457 aa, Streptococcus pneumoniae
MAREGFFTGLDIGTSSVKVLVAEQRNGELNVIGVSNAKSKGVKDGIIVDIDTAATAIKSAISQAEEKAGISIKSVNVGLPGNLLQVEPTQGMIPVTSDTKEITDQDVENVVKSALTKSMTPDREVITFIPEEFIVDGFQGIRDPRGMMGVRLEMRGLLYTGPRTILHNLRKTVERAGVQVENVIISPLAMVQSVLNEGEREFGATVIDMGAGQTTVATIRNQELQFTHILQEGGDYVTKDISKVLKTSRKLAEGLKLNYGEAYPPLASKETFQVEVIGEVEAVEVTEAYLSEIISARIKHILEQIKQELDRRRLLDLPGGIVLIGGNAILPGMVELAQEVFGVRVKLYVPNQVGIRNPAFAHVISLSEFAGQLTEVNLLAQGAIKGENDLSHQPISFGGMLQKTAQFVQSTPVQPAPAPEVEPVAPTEPMADFQQASQNKPKLADRFRGLIGSMFDE

SEQ ID NO: 3201 - protein, 419 aa, Streptococcus pneumoniae
MTFSFDTAAAQGAVIKVIGVGGGGGNAINRMVDEGVTGVEFIAANTDVQALSSTKAETVIQLGPKLTRGLGAGGQPEVGRKAAEESEETLTEAISGADMVFITAGMGGGSGTGAAPVIARIAKDLGALTVGVVTRPFGFEGSKRGQFAVEGINQLREHVDTLLIISNNNLLEIVDKKTPLLEALSEADNVLRQGVQGITDLITNPGLINLDFADVKTVMANKGNALMGIGIGSGEERVVEAARKAIYSPLLETTIDGAEDVIVNVTGGLDLTLIEAEEASQIVNQAAGQGVNIWLGTSIDESMRDEIRVTVVATGVRQDRVEKVVAPQARSATNYRETVKPAHSHGFDRHFDMAETAELPKQNPRRLEPTQASAFGDWDLRRESIVRTTDSVVSPVERFEAPISQDEDELDTPPFFKNR

SEQ ID NO: 3202 - protein, 78 aa, Streptococcus pneumoniae
LIPSTANCPRLLPSKPKGRVTTPTVSAPKSLAIRAITGAAPVPEPPPIPAVMKTISAPLIASVSVSSLSSAALRPTSG

SEQ ID NO: 3203 - protein, 223 aa, Streptococcus pneumoniae
MNVKENTELVFREVAEASLSANRESGSVSVIAVTKYVDVPTAEALLPLGVHHIGENRVDKFLEKYEALKDRDVTWHLIGTLQRRKVKDVIQYVDYFHALDSVKLAGEIQKRSDRVIKCFLQVNISKEESKHGFSREELLEILPELAGLDKIEYVGLMTMAPFEASSEQLKEIFKAAQDLQREIQEKQIPNIPMTELSMGMSRDYKEAIQFGSTFVRIGTSFFK

SEQ ID NO: 3204 - protein, 179 aa, Streptococcus pneumoniae
MSLKDRFDRFIDYFTEDEDSSLPYEKRDEPVFTSVNSSQEPALPMNQPSQSAGTKENNITRLHARQQELANQSQRATDKVIIDVRYPRKYEDATEIVDLLAGNESILIDFQYMTEVQARRCLDYLDGACHVLAGNLKKVASTMYLLTPVNVIVNVEDIRLPDEDQQGEFGFDMKRNRVR

SEQ ID NO: 3205 - protein, 87 aa, Streptococcus pneumoniae
MIFLIRMIYNAVDIYSLILIAFAVMSWFPGAYESSLGRWIVALVKPVLAPLQRLPLQIAGLDLSVWVAIVLVRFLGENLVRFLAMIG

SEQ ID NO: 3206 - protein, 261 aa, Streptococcus pneumoniae
MNKGIYQHFSIEDRPFLDKGMEWIKKVEDSYAPFLTPFINPHQEKLLKILAKTYGLACSSSGEFVSSEYVRVLLYPDYFQPEFSDFEISLQEIVYSNKFEHLTHAKILGTVINQLGIERKLFGDILVDEERAQIMINQQFLLLFQDGLKKIGRIPVSLEERPFTEKIDKLEQYRELDLSVSSFRLDVLLSNVLKLSRNQANQLIEKKLVQVNYHVVDKSDYTVQVGDLISVRKFGRLRLLQDKGQTKKEKKKITVQLLLSK

SEQ ID NO: 3207 - protein, 262 aa, Streptococcus pneumoniae
MPITSLEIKDKTFGTRFRGFDPEEVDEFLDIVVRDYEDLVRANHDKNLRIKSLEERLSYFDEIKDSLSQSVLIAQDTAERVKQAAHERSNNIIHQAEQDAQRLLEEAKYKANEILRQATDNAKKVAVETEELKNKSRVFHQRLKSTIESQLAIVESSDWEDILRPTATYLQTSDEAFKEVVSEVLGEPIPAPIEEEPIDMTRQFSQAEMAELQARIEVADKELSEFEAQIKQEVEAPTPVVSPQVEEEPLLIQLAQCMKNQK

SEQ ID NO: 3208 - protein, 930 aa, Streptococcus pneumoniae
MKLKDTLNLGKTEFPMRAGLPTKEPVWQKEWEDAKLYQRRQELNQGKPHFTLHDGPPYANGNIHVGHAMNKISKDIIVRSKSMSGFYAPFIPGWDTHGLPIEQVLSKQGVKRKEMDLVEYLKLCREYALSQVDKQREDFKRLGVSGDWENPYVTLTPDYEAAQIRVFGEMANKGYIYRGAKPVYWSWSSESALAEAEIEYHDLVSTSLYYANKVKDGKGVLDTDTYIVVWTTTPFTITASRGLTVGADIDYVLVQPAGEARKFVVAAELLTSLSEKFGWADVQVLETYRGQELNHIVTEHPWDTAVEELVILGDHVTTDSGTGIVHTAPGFGEDDYNVGIANNLEVAVTVDERGIMMKNAGPEFEGQFYEKVVPTVIEKLGNLLLAQEEISHSYPFDWRTKKPIIWRAVPQWFASVSKFRQEILDEIEKVKFHSEWGKVRLYNMIRDRGDWVISRQRAWGVPLPIFYAEDGTAIMVAETIEHVAQLFEEHGSSIWWERDAKDLLPEGFTHPGSPNGEFKKETDIMDVWFDSGSSWNGVVVNRPELTYPADLYLEGSDQYRGWFNSSLITSVANHGVAPYKQILSQGFALDGKGEKMSKSLGNTIAPSDVEKQFGAEILRLWVTSVDSSNDVRISMDILSQVSETYRKIRNTLRFLIANTSDFNPAQDTVAYDELRSVDKYMTIRFNQLVKTIRDAYADFEFLTIYKALVNFINVDLSAFYLDFAKDVVYIEGAKSLERRQMQTVFYDILVKITKLLTPILPHTAEEIWSYLEFETEDFVQLSELPEAQTFANQEEILDTWAAFMDFRGQAQKALEEARNAKVIGKSLEAHLTVYPNEVVKTLLEAVNSNVAQLLIVSDLTIAEGPAPEAALSFEDVAFTVERAAGEVCDRCRRIDPTTAERSYQAVICDHCASIVEENFADAVAEGFEEK

SEQ ID NO: 3209 - protein, 61 aa, Streptococcus pneumoniae
MKLKTLALISGIVGLVGGILLLIGPFVLLGTTVNTAATTLNGGATAGAFSGVACTLECLED

SEQ ID NO: 3210 - protein, 86 aa, Streptococcus pneumoniae
MEELLQGLFQVLPVLLNALKIENLVLGIIAIVYYKGDKRVGAAPSVLMIVSGGVSLIPFLGWVGGILAIIGGSLFLATLKKFKSEE

SEQ ID NO: 3211 - protein, 62 aa, Streptococcus pneumoniae
MENNDSFTKLKESTQKLFDAQKKRLNNEDRIETTKNNVIAKHCQTVLSFLVLTSFFVKNCVK

SEQ ID NO: 3212 - protein, 71 aa, Streptococcus pneumoniae
LCSIQTHRGEQKPILPLDGFSFKFSEVSPRLSILFYTIFHKKASQNQKGKDCLTMFGNHIVFGCFYSIFII

SEQ ID NO: 3213 - protein, 230 aa, Streptococcus pneumoniae
MVKLVFARHGESEWNKANLFTGWADVDLSEKGTQQAIDAGKLIKEAGIEFDQAYTSVLKRAIKTTNLALEASDQLWVPVEKSWRLNERHYGGLTGKNKAEAAEQFGDEQVHIWRRSYDVLPPNMDRDDEHSAHTDRRYASLDDSVIPDAENLKVTLERALPFWEDKIAPAFKDGKNVFVGAHGNSIRALVKHIKGLSDDEIMDVEIPNFPPLVFEFDEKLNVVSEYYLGK

SEQ ID NO: 3214 - protein, 803 aa, Streptococcus pneumoniae
MIRNKKQDYVLAYKQPASTTYMGWEEEALPIGNGSLGAKVFGLIGSERIQFNEKSLWSGGPLPDSSDYQGGNLQDQYVFLAEIRQALEKRDYNLAKELAEQHLIGPKTSQYGTYLSFGDIHIEFSQQGTTLSQVTDYQRQLNISKALATTSYVYKGTRFEREAFASFPDDLLVQCFTKEGLETLDFTIELSLTCDLASDGKYEQEKSDYKECKLDITDSHILMKGRVKDNDLRFASYLAWETDGDIRVWSDRVQISGASYANLFLAAKTDFAQNPASNYRKKLDLEQQVIDLVDTAKEKGYTQLKSRHIEDYQALFQRVQLDLEADVDASTTDDLLKNYKPQEGQALEELFFQYGRYLLISSSRDCPDALPANLQGVWNAVDNPPWNSDYHLNVNLQMNYWPAYVTNLLETVFPVINYVDDLRVYGRLAAVKYAGIVSQKGEENGWLVHTQATPFGWTAPGWDYYWGWSPAANAWMMQTVYEAYSFYRDQDYLREKIYPMLRETVRFWNAFLHKDQQAQRWVSSPSYSPEHGPISIGNTYDQSLIWQLFHDFIQAAQELGLDEDLLTEVKEKSDLLNPLQITQSGRIREWYEEEEQYFQNEKVEAQHRHASHLVGLYPGNLFSYKGQEYIEAARASLNDRGDGGTGWSKANKINLWARLGDGNRAHKLLAEQLKTSTLQNLWCSHPPFQIDGNFGATSGMAEMLLQSHAAYLVPLAALPDAWSTGSVSGLMARGHFEVSMSWEDKKLLQLTILSRSGGDLRVSYPDIEKSVIKMNQEKIKAKCMGKDCISVATAEGDLVQFYF

SEQ ID NO: 3215 - protein, 236 aa, Streptococcus pneumoniae
VDLMAYIEMKHCYKRYQVGDTEIVANRDVNFEIEKGELVIILGASGAGKSTVLNLLGGMDTNDEGEIWIDGVNIADYSSHQRTNYRRNDVGFVFQFYNLVSNLTAKENVELASEIVTDALNPDQVLTDVGLAHRLNNFPAQLSGGEQQRVSIARAVAKNPKILLCDEPTGALDYQTGKQVLKILQDMSRQKGATVIIVTHNGALAPIADRVIHMHDASVKDVVLNQHPQDIDSLEY

SEQ ID NO: 3216 - protein, 924 aa, Streptococcus pneumoniae
MPVSRMWCSTSILRILTVWSTSMIKRKTYWKDLIQSFTGSKGRFLSILILMMLGSLALVGLKVTSPNMEATANAYLTTAQTLDLAVMSNYGLDQADQEELKQTEGAEVEFGYLTDVTMDNGQDAIRLYSKPERISTFQLRKGRLPQSDKEIALATHLQDQYSVGQEISFKEKEEGHSSLKDHTYTITGFVDSAEILSQRDMGYAGSGSGTLAAYGVILPSQFDQKVYNIARLKYQDLAGLNAFSSAYEEKSKQHQEELEQILSDNGKVRLQLLKKEGQESLDKGQETLDKAQTNLQEGKRRLAAAQARIQAQESQLALFPQVQREQASAQLTQAKQELGKEEAKLKQAEQNLAQEKEKLEKHQQVLDDLAEPRYQVYNRQTMPGGQGYLMYSNASSSIRAVGNIFPVVLYAVAAMVTFTTMTRFVDEERTHAGIFKALGYRSKDIIAKFLLYGLVAGTVGTALGSILGHYLLASVISSVITKGMVVGETQIQFYWTYSLLAFVLSLLASVLSAYLVAWRELHDEAAQLLLPKPPVKGAKILLERIGFIWRRLSFTHKVTARNIFRYKQRMLMTIFGVAGSVALLFAGLGIQSSVAGVPSKQFQQIQQYQMLVSENPSATNQDKVELAEVLKGQEILAYQKIYSKTLDKDFKGKAGLQNITLMMIEKEDLTPFIHLQHHQQELTLKDGIVITAKLAQLAGVKVGQTLEIEGKELKVAAITENYVGHFIYMSQASYEQLYGQLPQANTYLVSLRDTSATSIESQAGLLMNQSAVSSVVQNASAIRLFDSIASSLNQTMTILVIVSVLLAIVILYNLTNINVAERIRELSTIKVLGFHNNEVTLYIYRETIVLSLVGIVLGLIAGFYLHQFLIQMISPATILFYPQVGWEVYVIPVAAVSFILTLLGFFVNYYLRKVDMLEALKSVE

SEQ ID NO: 3217 - protein, 172 aa, Streptococcus pneumoniae
MEEKRLEYPMVTFLGNPVSFTGKQLQVGDKALDFSLTTTDLSKKSLADFDGKKKVLSVVPSIDTGICSTQTRRFNEELAGLDNTVVLTVSMDLPFAQKRWCGAEGLDNAIMLSDYFDHSFGRDYALLINEWHLLARAVFVLDTDNTIHYVEYVDNINSEPNFEAAIAAAKAL

SEQ ID NO: 3218 - protein, 309 aa, Streptococcus pneumoniae
MKKLGTLLVLFLSAIILVACASGKKATTSGQKLKVVATNSIIADITKNIAGDKIDLHSIVPIGQDPHEYEPLPEDVKKTSEADLIFYNGINLETGGNAWFTKLVENAKKTENKDYFAVSDGVDVIYLEGQNEKGKEDPHAWLNLENGIIFAKNIAKQLSAKDPNNKEFYEKNLKEYTDKLDKLDKESKDKFNKIPAEKKLIVTSEGAFKYFSKAYGVPSAYIWEINTEEEGTPEQIKTLVEKLRQTKVPSLFVESSVDDRPMKTVSQDTNIPIYAQIFTDSIAEQGKEGDSYYSMMKYNLDKIAEGLAK

SEQ ID NO: 3219 - protein, 282 aa, Streptococcus pneumoniae
MIAEFIDGLQKFHFLQNALITAIVVGIVAGAVGCFIILRGMSLMGDAISHAVLPGVALSFILGLDFFIGAIVFGLLAAIIITYIKGNSIIKSDTAIGITFSSFLALGIILIGVAKSSTDLFHILFGNILAVQDTDMFITMGVGAAILLLIWIFFKQLLITSFDELLAKAMGMPVNFYHYLLMVLLTLVSVTAMQSVGTILIVAMLITPAATAYLYANSLKSMIFLSSTFGATASVLGLFIGYSFNVAAGSSIVLTAASFFLISFFIAPKQRYLKLKNKHLLK

SEQ ID NO: 3220 - protein, 251 aa, Streptococcus pneumoniae
MYIKRQEEYKFMIRIENLSVSYKETLALKDISLVLHGPTITGIIGPNGAGKSTLLKGMLGIIPHQGQAFLDDKEVKKSLHRIAYVEQKINIDYNFPIKVKECVSLGLFPSIPLFRSLKAKHWKKVQEALEIVGLADYAERQISQLSGGQFQRVLIARCLVQEADYILLDEPFAGIDSVSEEIIMNTLRDLKKAGKTVLIVHHDLSKIPHYFDQVLLVNREVIAFGPTKETFTETNLKEAYGNQLFFNGGDL

SEQ ID NO: 3221 - protein, 650 aa, Streptococcus pneumoniae
LHSLVIFVKINANTNESENKMTRYQDDFYDAINGEWQQTAEIPADKSQTGGFVDLDQEIEDLMLATTDKWLAGEEVPEDAILENFVKYHRLVRDFDKREADGITPVLPLLKEFQELETFADFTAKLAEFELAGKPNFLPFGVSPDFMDARINVLWASAPSTILPDTTYYAEEHPQREELLTLWKESSANLLKAYDFSDEEIEDLLEKRLELDRRVAAVVLSNEESSEYAKLYHPYSYEDFKKFAPALPLDDFFKAVIGQLPDKVIVDEERFWQAAEQFYSEEAWSLLKATLILSVVNLSTSYLTEDIRVLSGAYSRTLSGVPEAKDKVKAAYHLAQEPFKQALGLWYAREKFSPEAKADVEKKVATMIDVYKERLLKNDWLTPETCKQAIVKLNVIKPYIGYPEELPARYKDKVVNETASLFENALAFARVEIKHSWSKWNQPVNYKEWGMPAHMVNAYYNPQKNLIVFPAAILQAPFYDLHQSSSANYGGIGAVIAHEISHAFDTNGASFDENGSLKDWWTESDYAAFKEKTQKVIDQFDGQDSYGATINGKLTVSENVADLGGIAAALEAAKREADFSAEEFFYNFGRIWRMKGRPEFMKLLASVDVHAPAKLRVNVQVPNFDDFFTTYDVKEGDGMWRSPEERVIIW

SEQ ID NO: 3222 - protein, 209 aa, Streptococcus pneumoniae
MKIHKTVNPVAYENTYYLEGEKHLIVVDPGSHWEAIRQTIEKINKPICAILLTHAHYDHIMSLDLVRETFGNPPVYIAESEASWLYTPVDNLSGLPRHDDMADVVTKPAEHTFVFHEEYQLEEFRFKVLPTPGHSIGGVSLVFPDAHLVLTGDALFRETIGRTDLPTGSMEQLLHSIQTQLFTLPNYDVYPGHGPATTIAHEKAFNPFF

SEQ ID NO: 3223 - protein, 66 aa, Streptococcus pneumoniae
MDFHTSSNLKECTNTLRKSLQTASTLSATSKQCFEQPAASFLVCSLIFIEYKLSIAQLGRIGKDLK

SEQ ID NO: 3224 - protein, 80 aa, Streptococcus pneumoniae
LARFEEIFEEYKNPQDTFFYPLVYKENTYEKTAISIFALLMLGVCCLFLFSQQSYKKLVQYYANDQNLPSRITYSEYSDK

SEQ ID NO: 3225 - protein, 740 aa, Streptococcus pneumoniae
MPKEVNLTGEEVVALTKEYLTEEDVHFVHKALVYAVECHSGQYRKSGEPYIIHPIQVAGILAKLKLDAVTVACGFLHDVVEDTDATLDDLEREFGPDVRVIVDGVTKLGKVEYKSIEEQLAENHRKMLMAMSEDIRVILVKLSDRLHNMRTLKHLRKDKQERISKETMEIYAPLAHRLGISSVKWELEDLSFRYLNPTEFYKITHMMKEKRREREALVDEVVTKLEEYTTERHLKGKIYGRPKHIYSIFRKMQDKRKRFEEIYDLIAIRCILDTQSDVYAMLGYVHEFWKPMPGRFKDYIANRKANGYQSIHTTVYGPKGPIEFQIRTKEMHEVAEYGVAAHWAYKKGIKGQVNSKESAIGMNWIKEMMELQDQADDAKEFVDSVKENYLAEEIYVFTPDGAVRSLPKDSGPIDFAYEIHTKVGEKATGAKVNGRMVPLTTKLKTGDQVEIIANPNSFGPSRDWLNMVKTSKARNKIRQFFKNQDKELSVNKGREMLMAQFQENGYVANKFMDKRHMDQVLQKTSYKTEDSLFAAIGFGEIGAITVFNRLTEKERREEERAKAKAEAEELVKGGEVKVENKETLKVKHEGGVVIEGASGLLVRIAKCCNPVPGDDIVGYITKGRGVAIHRVDCMNLRAQENYEQRLLDVEWEDQYSSSNKEYLAHIDIYGLNRTGLLNDVLQVLSNTTKNISTVNAQPTKDMKFANIHVSFGIANLSTLTTVVDKIKSVPEVYSVKRTNG

SEQ ID NO: 3226 - protein, 80 aa, Streptococcus pneumoniae
LPLYTFLISPVSRNPVLSHLVHFLGSNLEFNRPFWSINSRMDRLITIGLAVGNIVFEATWHRFPKFMHVTKHGINITLGI

SEQ ID NO: 3227 - protein, 147 aa, Streptococcus pneumoniae
MKIIIQRVKKAQVSIEGQIQGKINQGLLLLVGVGPEDQEEDLDYAVRKLVNMRIFSDAEGKMNLSVKDIEGEILSISQFTLFADTKKGNRPAFTGAAKPDMASDFYDAFNQKLAQEVPVQTGIFGADMQVELVNNGPVTIILDTKKR

SEQ ID NO: 3228 - protein, 75 aa, Streptococcus pneumoniae
LYSQIRPRFWRFALQILLWDSLMILSLVSLSDIPLFLQGTLLILGHLIPSYRICQSLKRDFPQAYQEPISFWSIL

SEQ ID NO: 3229 - protein, 140 aa, Streptococcus pneumoniae
VLVMKKLYRIHFIAIAVIDLLLFAFFIIRLETSFEWLLLSDLIFFLTQGLLLFLLIVRLKHQFAEIYPQINKKIRFYYLGVLTIDFLFFVLLAFISSQRFSSLMPIITACHSTFYYMTADYLRENYPDFYDKHISLWECL

SEQ ID NO: 3230 - protein, 235 aa, Streptococcus pneumoniae
MKKSLKIFATSKWFDLFGVALVVGIAIASGYLNSRLDKFVDWGPWTALVPFGLISVTNVGISMLSTRFTGKLSKWGNYFSIVNTILSGAIDYILGNKAAIITYPVTFLIYTFAIKKWKASQEGRPNQMSQKQVKLAVIIISIIAFLFAFVTNYIGYEGKMNLLAYVTTIAFALSLIANALNALKLTTQWGFWLIYNFVQLTKAGIQGNFANIGKYIFYILNAIGALFVWNDEEVR

SEQ ID NO: 3231 - protein, 139 aa, Streptococcus pneumoniae
LIEVFLIHHLDYTSDQIHEEADVLEHTVSDLFVERLDKLLGFPKTCPHGGTIPAKGELLVEINNLPLADIKEAGAYRLTRVHDSFDILHYLDKHSLHIGDQLQVKQFDGFSNTFTILSNDEDLQVNMDIAKQLYVEKIN

SEQ ID NO: 3232 - protein, 79 aa, Streptococcus pneumoniae
MTPNKEDYLKCIYEIGIDLHKITNKEIAARMQVSPPAVTEMIKRMKSENLILKDKECGYLLTDLGLKLVSELYRKHTLD

SEQ ID NO: 3233 - protein, 280 aa, Streptococcus pneumoniae
MTKIALLSDIHGNTTALEAVLADAQQLGVDEYWLLGDILMPGTGRRRILDLLDQLPITARVLGNWEDSLWHGVRKELDSTRPSQRYLLRQCQYVLEEISLEEIEVLHNQPLQIHRQFGDLTVGISHHLPDKNWGRELIHTGKQEEFDRLVTHPPCDIAVYGHIHQQLLRYGTGGQLIVNPGSIGQPFFLDAQLRKDLRAQYMILEFDDKGLVDMDFRRVDYDVAAELQLAKDLRLPYFEVYYESLVNGIHHTHHQEFLRELAQKEGCDRELDDWLKSGND

SEQ ID NO: 3234 - protein, 64 aa, Streptococcus pneumoniae
LEFASSSPFYEATLPLLFFFYYYTLFSCNVNRYHFSTSRLTPGRSPLSEPILSKIPDDEYGGSH

SEQ ID NO: 3235 - protein, 104 aa, Streptococcus pneumoniae
MQIPSRFTIATHMLIIIALEGKESKVTSDFLAASVGVNPVIIRKILSQLKKAELISVARGTGGTEIVKDLKDISLLDVYQGGSNVLVRQVNSSVSMTIRIQIAL

SEQ ID NO: 3236 - protein, 72 aa, Streptococcus pneumoniae
SFRCLSRRVECLGKTGQLFSFHDNPNPNCPVGAHIHDVLDQKLERIQLTMEAELGQTSLEKVVADAESQMKD

SEQ ID NO: 3237 - protein, 100 aa, Streptococcus pneumoniae
MYLVIGIVLAFIVSFWKDNRSLWNPVLFLLSLISSYFYLSYLFYKNGYENVQLAFYVFAFVLLPFLLFLSGIFLIYNGVILLKREGRSKPHYLSMLFDFY

SEQ ID NO: 3238 - protein, 357 aa, Streptococcus pneumoniae
MANIFDYLKDVAYDSYYDLPLNELDILTLIEITYLSFDNLVSTLPQRLLDLAPQVPRDPTMLTSKNRLQLLDELAQHKRFKNCKLSHFINDIDPELQKQFAAMTYRVSLDTYLIVFRGTDDSIIGWKEDFHLTYMKEIPAQKHALRYLKNFFAHHPKQKVILAGHSKGGNLAIYAASQIEQSLQNQITAVYTFDAPGLHQELTQTAGYQRIMDRSKIFIPQGSIIGMMLEIPAHQIIVQSTALGGIAQHDTFSWQIEDKHFVQLDKTNSDSQQVDTTFKEWVATVPDEELQLYFDLFFGTILEAGISSINDLASLKALEYIHHLFVQAQSLTPEERETLGRLTQLLIDTRYQAWKNR

SEQ ID NO: 3239 - protein, 225 aa, Streptococcus pneumoniae
MHKILLIEDDQVIRQQVGKMLSEWGFEVVLVEDFMKVLSLFVQSEPHLVLMDIGLPLFNGYHWCQEIRKISKVPIMFLSSRDQAMDIVMAINMGADDFVTKPFDQQVLLAKVQGLLRRSYEFGRDESLLEYAGVILNTKSMDLHYQGQVLNLTKNEFQILRVLFEHAGNIVARDDLMRELWNSDFFIDDNTLSVNVARLRKKLEEQGLVGFIETKKGIGYGLKHA

SEQ ID NO: 3240 - protein, 324 aa, Streptococcus pneumoniae
MLDWKQFFLAYLRSRSRLFIYLLSLAFLVLLFQFLFASLGIYFLYFFFLCCFVTILFFTWDILVETQVYRQELLYGEREAKSPLEIALAEKLEAREMELYQQRSKAERKLTDLLDYYTLWVHQIKTPIAASQLLVAEVVDRQLKQQLEQEIFKIDSYTNLVLQYLRLESFHDDLLLKQVQIEDLVKEIIRKYALFFIQKGLNVNLHDLDKEIVTDKKWLLVVIEQIISNSLKYTKEGGLEIYMDDQELCIKDTGIGIKNSDVLRVFERGFSGYNGRLTQQSSGLGLYLSKKISEELGHQIRIESEVGKGTTVRIQFAQVNLVLE

SEQ ID NO: 3241 - protein, 660 aa, Streptococcus pneumoniae
MLRNYEIIKKENIMINITFPDGAVREFESGVTTFEIAQSISNSLAKKALAGKFNGKLIDTTRAITEDGSIEIVTPDHEDALPILRHSAAHLFAQAARRLFPDIHLGVGPAIEDGFYYDTDNTAGQISNEDLPRIEEEMQKIVKENFPSIREEVTKDEAREIFKNDPYKLELIEEHSEDEGGLTIYRQGEYVDLCRGPHVPSTGRIQIFHLLHVAGAYWRGNSDNAMMQRIYGTAWFDKKDLKNYLQMREEAKERDHRKLGKELDLFMISQEVGQGLPFWLPNGATIRRELERYIVNKELASGYQHVYTPPLASVELYKTSGHWDHYQEDMFPTMDMGDGEEFVLRPMNCPHHIQVFKHHVHSYRELPIRIAEIGMMHRYEKSGALTGLQRVREMSLNDGHLFVTPEQIQEEFQRALQLIIDVYEDFNLTDYRFRLSLRDPQDTHKYFDNDEMWENAQTMLRAALDEMGVDYFEAEGEAAFYGPKLDIQIKTALGKEETLSTIQLDFLLPERFDLKYIGADGEDHRPVMIHRGVISTMERFTAILIENYKGAFPTWLAPHQVTLIPVSNEKHVDYAWEVAKKLRDRGVRADVDERNEKMQFKIRASQTSKIPYQLIVGDKEMEDETVNVRRYGQKETQTVSVDNFVQAILADIANKSRVEK

SEQ ID NO: 3242 - protein, 129 aa, Streptococcus pneumoniae
MKVEPRCDVLSRMSHFFIRILIMELQELVERSWAIRQAYHELEVKHHDSKWTVEEDLLALSNDIGNFQRLVMTKQGRYYDETPYTLEQKLSENIWWLLELSQRLDIDILTEMENFLSDKEKQLNVRTWK

SEQ ID NO: 3243 - protein, 96 aa, Streptococcus pneumoniae
ACRIAQLRSTNSCNSIISILIKKCDILERTSQRGSTFIYVPQKRGTPLIGSNVATVLCFHKKLKSSISLDFLCVSSNHALSSRKGLSDLSLWIIIA

SEQ ID NO: 3244 - protein, 69 aa, Streptococcus pneumoniae
VIIMRRFYSHLPYYLVILFFYWPLYELFLLVVSDPLTLKELYINNLLFFTPLVILIISLLYSYRFRFSL

SEQ ID NO: 3245 - protein, 209 aa, Streptococcus pneumoniae
MKLAVIAANGQAGKAIVEEAVKRGHEVTAIVRSENKSQAESIIKKDLFELTKDDLTGFDAVISAFGAYTPDTLPLHSKSIELFNQLLAGTQTRFLVVGGAGSLYIDETKTTRLLDTSDFPEEFKSLAKDQADELDLLRTKNNLNWTFVSPAVDFIPDGEKTGNYILAGEIFTTNEKGISQISYADYAIGLVDELEKGHHIKERISLLEK

SEQ ID NO: 3246 - protein, 89 aa, Streptococcus pneumoniae
MAISKEKKNEIIAQYARHEGDTGSVEVQVAVLTWEINHLNEHIKQHKKDHATYRGLMKKIGRRRNLLAYLRKNDVNRYRELINSLGLRR

SEQ ID NO: 3247 - protein, 74 aa, Streptococcus pneumoniae
SINDLSSKNHDAKGVKNPYENREMTQCSMSTRSFIFFTRILARAQISSLTSEGFFIEVLSVTILETTKTSNGIS

SEQ ID NO: 3248 - protein, 158 aa, Streptococcus pneumoniae
MGQTIISAIGVYISTSIDYLIILIILFAQLSQNKQKWHIYAGQYLGTGLLVGASLVAAYVVNFVPEEWMVGLLGLIPIYLGIRFAIVGEDAEEEEEEIIERLEQSKANQLFWTVTLLTIASGGDNLGIYIPYFASLDWSQTLVALLVFVIGIIIFCEN

SEQ ID NO: 3249 - protein, 249 aa, Streptococcus pneumoniae
MFYTYLRGLVVLLLWSINGNAHYHNTDKIPNQDENYILVAPHRTWWDPVYMAFATKPKQFIFMAKKELFTNRIFGWWIRMCGAFPIDRENPSASAIKYPINVLKKSDRSLIMFPSGSRHSNDVKGGAALIAKMAKVRIMPVTYTGPMTLKGLISRERVDMNFGNPIDISDIKKMNDEGIETVANRIQTEFQRLDEETKQWHNDKKPNPLWWFIRIPALILAIILAILTIIFSFIASFIWNPDKKREELA

SEQ ID NO: 3250 - protein, 778 aa, Streptococcus pneumoniae
MDKNKIMGLTQREVKERQAEGLVNDFTASASTSTWQIVKRNVFTLFNALNLAIALALAFVQAWSNLVFFAVICFNAFSGIVTELRAKHMVDKLNLMTKEKVKTIRDGQEVALNPEELVLGDVIRLSAGEQIPSDALVLEGFAEVNEAMLTGESDLVQKEVDGLLLSGSFLASGSVLSQVHHVGADNYAAKLMLEAKTVKPINSRIMKSLDKLAGFTGKIIIPFGLALLLEALLLKGLPLKSSVVNSSTALLGMLPKGIALLTITSLLTAVIKLGLKKVLVQEMYSVETLARVDMLCLDKTGTITQGKMQVEAVLPLTETYGEEAIASILTSYMAHSEDKNPTAQAIRQRFVGDVAYPMISNLPFSSDRKWGAMELEGLGTVFLGAPEMLLDSEVPEAREALERGSRVLVLALSQEKLDHHKPQKPSDIQALALLEILDPIREGAAETLDYLRSQEVGLKIISGDNPVTVSSIAQKAGFADYHSYVDCSKITDEELMAMAEETAIFGRVSPHQKKLIIQTLKKAGHTTAMTGDGVNDILALREADCSIVMAEGDPATRQIANLVLLNSDFNDVPEILFEGRRVVNNIAHIAPIFLIKTIYSFLLAVICIASALLGRSEWILIFPFIPIQITMIDQFVEGFPPFVLTFERNIKPVEQNFLRKSMLRALPSALMVVFSVLFVKMFGASQGWSELEISTLLYYLLGSIGFLSVFRACMPFTLWRVLLIVWSVGGFLATALFPRIQKLLEISTLTEQTLPVYGVMMLVFTVIFILTSRYQAKK

SEQ ID NO: 3251 - protein, 76 aa, Streptococcus pneumoniae
SLLSRKRSNNVSICSCFLDTIHLLYESIISLSKNNILRILSFAMDIFVFIKNMISNRTEPHYAKIILPFLHNIYFS

SEQ ID NO: 3252 - protein, 487 aa, Streptococcus pneumoniae
VSRKQEQMETLLLLLRDSKDYISAKVLGEKLNCSDKTVYRLVKGINKDCPVEAFILSEKGRGFKLNPRSSLVDVDGNFTEAFDPEVRREKLLERLLLTAPKPHSIYDLGEEFYVSESVVLKDRQILQESLAIYGLDLKMRQRKLFIDGDEAQIRSAILNLLPMFNQLDLEQITQNKVQPLDGELAHFCLGLLITLERELGVNIPYPYNINIFSHLYIFISRNRRSTSIHVVAPSKPTIVDEKIYSVCQKIIQEIEQYFRMKVDAVEIDYLYQYVVSSRLQKPFSSGKLPFSQRVLDVTHYYFSRMCMDNREIETTDPDFVDLASHISPLLRRLDNRVQIKNSLLSQILLTYPNLVKELTTISKEVSLVFGFASLSLDEIGFLVLYFARFQEKRARPLKTVVMCTSGVGTSELLRARLEKQFSELDIIDVVAYHQLDELINLYPDLDFIVTTVALQEPASVPFVLVSVFLTEGDKQRLQAKIQEINYE

SEQ ID NO: 3253 - protein, 142 aa, Streptococcus pneumoniae
MNNLSLVLMDISVQNRQEAYKELANQISLLVSEDTEKIEELLYYRERQGSIEVAKGVLLPHCEGNFQHHVLVITRLKSPIREWSKDIQCVDLIIGLAIAVSQDKSCIKTLMRRLADESFINQLKQLTKEELREIIYGNQRYS

SEQ ID NO: 3254 - protein, 150 aa, Streptococcus pneumoniae
YMEIKDILNVSLIQTDLQMQSKEEVFEALAQLLVETGYVSDRDQFIEGLYQREAEGQTGIGNYIAIPHSKSSAVEKAGVVIAINHNEIPWETIDGKGVKVIVLFAVGDDTEAAREHLKTLSLFARKLGNDEVVAKLVRAQTSDDVIAAFC

SEQ ID NO: 3255 - protein, 103 aa, Streptococcus pneumoniae
MKIVGVAACTVGIAHTYIAQEKLENAAKVAGHVIHVETQGTIGVENELSQEQIDAADVVILAVDVKISGMERFEGKKIIKVPTEVAVKSPNKLIAKAVEIVTK

SEQ ID NO: 3256 - protein, 368 aa, Streptococcus pneumoniae
KYLRRKYMLKHLNLKGHLLTAISYMIPIVCGAGFLVAIGLAMGGGVPDALVAGKFTIWDALATMGGKALGLLPVVIATGLSYSIAGKPGIAPGFVVGLIANSVGSGFIGGILGGYIAGFLVQAIIKKVKVPNWIKGLMPTLIIPFVASLVSSLIMIYIIGAPIAAFTNWLTSLLQSLGSASNGLMGAVIGVLSAVDFGGPLNKTVYAFVLTLQAEGVKEPLTALQLVNTATPVGFGLAYFIAKLLKKNIYTQEEIETLKSAVPMGIVNIVEGVIPIVMNNLVPGLIATGIGGAVGGAVSLTMGADSAVPFGGVLMLPTMTRPVAGICALLANIVVTGLVYAILRKPIKHTEPVMTVEEEIDLSDIEIL

SEQ ID NO: 3257 - protein, 231 aa, Streptococcus pneumoniae
MSRIEFSPSLMTMDLDKFKEQITFLNDKVASYHIDIMDGHFVPNITLSPWFIQEVQKISDTPLSVHLMVTDPTFWVDQVLDLQCEYICIHAEVLNGLAFRLIDKIHDAGLKAGVVLNPETPVSTIFPYIDLLDKVTIMTVDPGFAGQRFLESTLYKIQELRQLRVQNGYHYIIEMDGSSSRKTFKQIDVAGPDIYVIGRSGLFGLDDDIAKAWDICSRDYEEMTGKTMPIK

SEQ ID NO: 3258 - protein, 656 aa, Streptococcus pneumoniae
MSLQSVNAIRFLGVDAINKSNSGHPGIVMGAAPMAYSLFTKHLRITPEQPNWINRDRFILSAGHGSMLLYALLHLTGYKDVSMDEIKNFRQWGSKTPGHPEVTHTSGVDATSGPLGQGISTAVGFAQAERFLAAKYNKDGFPIFDHYTYVIAGDGDFMEGVSAEAASYAGHQALDKLIVLYDSNDICLDGETKDTFSENVRARYDAYGWHTVLVEDGTDLAAISTAIETAKFSGKPSLIEVKTVIGYGSPNKSGTNAVHGAPLGAEETGATRKFLGWDYDPFEVPEEVYSDFKTNVADRGQEAYDAWASLVSDYKVAYPEVASEIDAIVAGKSPVTITEKDFPVYENGFSQATRNSSQDAINTAAAVLPTFLGGSADLAHSNMTYIKADGLQDKYNPLNRNIQFGVREFAMGTILNGMALHGGLRVYGGTFFVFSDYVKAAIRLSAIQELPVTYVFTHDSIAVGEDGPTHEPVEHLAGLRSMPNLTVIRPADARETQAAWHHALTSTTTPTVIVLTRQNLVVEEGTDFGKVAKGAYVVYDTPGFDTIIIATGSEVNLAIKAAKELVLQGGKVRVVSMPSTELFDAQDATYKEDILPSKTRRRVAIEMAATQSWYKYVGLDGAVIGIDIFGASAPAQTVIDNYGFTVENIVAQVKSL

SEQ ID NO: 3259 - protein, 190 aa, Streptococcus pneumoniae; identical to SEQ ID NO: 2680

SEQ ID NO: 3260 - protein, 190 aa, Streptococcus pneumoniae; identical to SEQ ID NO: 2680

SEQ ID NO: 3261 - protein, 277 aa, Streptococcus pneumoniae
MTEFSLDLLLKAIKLARSTYYYHLKQLDKTDKDQELKAEIQSIFIEHKGNYAYHRIYLELRNRGYLVNHKRVQGLIKVLNLQAKMRQKRKYSSHKGDVGKKAENLIQGQFEGSKTMEKCYTDVTEFAIPASTQKLYLLPVLDGFNSEIIAYNLSTSPNLEQVQTMLEQAFTEKHYENTILHSDQGWQYQHDSYHRFLESKGIQASMSRKGNSPDNGMMESFFGILKSEMFYGYEKNFRSLENLEQAIVDYIDYYNNKRIKVKLKGLSLVQYRTKSFG

SEQ ID NO: 3262 - protein, 176 aa, Streptococcus pneumoniae
LLDEKRKNYVEDKRQNFPSLPNWKMDLFSEEEKRNYFQTTCEISSKDSAINKYKMEKIIKRSNKGNVYRAIRKSDGQKVIIKQSRPFVNYDAEGEWTALDDIKNEAHMLKKLADKSYTTNLTDEFYIVDDYFLVQEQVDGLNFEEFIRETEHSLNIREKTLYNIVNIVSDIHKLGI

SEQ ID NO: 3263 - protein, 138 aa, Streptococcus pneumoniae
MDLLEKECLKCDKNFQQGDIWNYYYLSDKVPAQGWKIHISSQIKDAVNIFKIVYKLSQLNNCSFKVVKNLEELKKINSPREMSPTANKFITLYPKSESEAKSMICNLTNRLSEFKAPKILSDYQCGMHSLVHYRYGAF

SEQ ID NO: 3264 - protein, 225 aa, Streptococcus pneumoniae
MISKRLELVASFVSQGAILLDVGSDHAYLPIELVERGQIKSAIAGEVVEGPYQSAVKNVEAHGLKEKIQVRLANGLAAFEETDQVSVITIAGMGGRLIARILEEGLGKLANVERLILQPNNREDDLRIWLQDHGFQIVAESILEEAGKFYEILVVEAGQMKLSASDVRFGPFLSKEVSPVFVQKWQKEAEKLEFALGQIPEKNLEERQVLVDKIQAIKEVLHVSK

SEQ ID NO: 3265 - protein, 265 aa, Streptococcus pneumoniae
MLASEVIQAYEAFCPQEFSMEGDSRGLQIGTLDKGIQRVMVALDIREETVAEAIEKGVDLIIVKHAPIFRPIKDLLASRPQNQIYIDLIKHDIAVYVSHTNIDIVENGLNDWFCQMLGIEETTYLQETGPERGIGRIGNIQPQTFWELAQQVKQVFDLDSLRMVHYQENDLQKPISRVAICGGSGQSFYKDALAKGADVYITGDIYYHTAQDMLSDGLLALDPGHYIEVLFVEKIAALLTQWKEKKGWELEILPSQASTNPFRHI

SEQ ID NO: 3266 - protein, 367 aa, Streptococcus pneumoniae
MKKVAIIGAGIVGATAAYYLSRESDLEVTVFDHEQGQATKAAAGIISPWFSKRRNKAWYKMARLGADFYVDLLADLEKSGQKIDFYQRSGVFLLKKDESKLEELYQLALQRREESPLIGQLAILDQASANELFPGLQGFDRLLYASGGARVDGQLLVTRLLEASHVKLVKEKVTLTLLSSGYQIGEEVFDQVILATGAWLGDMLEPLGYEVDVRPQKGQLRDYQLAQDMEAYPVVMPEGEWDLIPFAGGKLSLGATHENDMGFDLTVDEPLLQQMEEAALPHYPVLARATSRAERVGIRAYTSDFSPFFGQVPELAGVYAGSGLGSSGLTTGPIIGYHLAQLIQDKELTLDPLNYPIENYVKRVKSE

SEQ ID NO: 3267 - protein, 63 aa, Streptococcus pneumoniae
MKIKEQTRKLAAGYSKHCFEVVDRTDEVSSKHCFEVVDRTDEVSNHTHGKATLTWFELDFRRV

SEQ ID NO: 3268 - protein, 339 aa, Streptococcus pneumoniae
MQEKILVTGGAGFIGTHTVIELIQAGHQVVVVDNLVNSNRKSLEVVERITGVEIPFYEADIRDTDTLRDIFKQEEPTGVIHFAGLKAVGESTRIPLAYYDNNIAGTVSLLKAMEENNCKNIIFSSSATVYGDPHTVPILEDFPLSVTNPYGRTKLMLEEILTDIYKADSEWNVVLLRYFNPIGAHESGDLGENPNGIPNNLLPYVTQVAVGKLEQVQVFGDDYDTEDGTGVRDYIHVVDLAKGHVAALKKIQKGSGLNVYNLGTGKGYSVLEIIQNMEKAVGRPIPYRIVERRPGDIAACYSDPAKAKAELGWEAELDITQMCEDAWRWQSKHPNGFED

SEQ ID NO: 3269 - protein, 317 aa, Streptococcus pneumoniae
MMISIIVPCLNEEEVLPLFYQALEALLPDLETEIEYVFVDDGSSDGTLELLKAYREQNPAVHYISFSRNFGKEAALYAGLQYATGDLVVVMDADLQDPPSMLFEMKNVLDKNVDLDCVGTRRTSREGEPFFRSFCAVLFYRLMQKISPVALPSGVRDFRMMRRSVVDAILSLTESNRFSKGLFAWVGFKTHYLDYPNVERQAGKTSWSFRQLFFYSIEGIVNFSDFPLTIAFVAGLLSCFLSLLMTFFVVVRTLILGNPTSGWTSLMAVILFLGGIQLLTIGILGKYISKIYLETKKRPLYLIKEKSDDRLKKIEFI

SEQ ID NO: 3270 - protein, 221 aa, Streptococcus pneumoniae
MLSKEDYTEEIGLIKKQNYVEAELYPIVADIIKPTLKDSLSKRYVFGRQRRGLGQIYYGLSNFPDIVILDKTYENKSRKSIKIEEWKKLRGCVEVKNLNYSLITEEKIKSTISNSFEHITGEMEQLTGEMGQLIGDLLWYKKVIYTNGIEWRFLSLDDKEEIDNTIVEVVNKRIETEEAGNSFDWWKNIKDLSFNYTDICLSKDCRQEWNEFVKRVKEIEW

SEQ ID NO: 3271 - protein, 68 aa, Streptococcus pneumoniae
MKITLIPERCIACGLCQTYSDLFDYHDNGIVRFYDDPDQLEKEISPSQDVLEAVKNCPTRALIGNQEA

SEQ ID NO: 3272 - protein, 158 aa, Streptococcus pneumoniae
MAKEPWQEDIYDQEESRAGRRHRNHGGADRMANRILTILASIFFVIVVVMVIVLIYLSSGGSNRTAALKDFHDSDASVVQISSSSSSQPEQSSEPESTSSSSEEAANPEGTIKVLAGEGEAAIAARAGISIAQLEALNPGHMATGSWFANPGDVIKIK

SEQ ID NO: 3273 - protein, 223 aa, Streptococcus pneumoniae
MKTIQIAIDGPASSGKSTVAKIIAKDFGFTYLDTGAMYRAATYMALKNQLGVEEVEALLALLDQHPISFGRSETGDQLVFVGDVDITHPIRENEVTNHVSAIAAIPQVREKLVSLQQEIAQQGGIVMDGRDIGTVVLPQAELKIFLVASVDERAERRYKENIAKGIETDLETLKKEIAARDYKDSHRETSPLKQAEDAVYLDTTGLNIQEVVEKIKAEAEKRM

SEQ ID NO: 3274 - protein, 112 aa, Streptococcus pneumoniae
MNNLPNCPKCNSEYVYEDGALLVCPECAHEWNPAEVAEVEEGLVAIDANGNKLADGDIVTLIKDLKVKGAPKDLKQGTRVKNIRIVEGDHNIDCKIDGFGAMKLKSEFVRKI

SEQ ID NO: 3275 - protein, 209 aa, Streptococcus pneumoniae
MSKHYKLVFYSRIFLFLAAFTGVYLEITRHGGFGMLLYYTVLSNLLVTIFTLYLLKVMSRVGENWQRPSLLRLKGGVTMSIMITCVIYHFLLAPIATNFYTLENFLCHYIVPIWFLADTLFFDKQGQYKIWDPAVWTILPFLYMMFALFNGLVLKLNIPNAKDNPFPYFFLNVNKGWNVVFKWCLIIFVAYMVAGFIFYFIKQIKRKSS

SEQ ID NO: 3276 - protein, 75 aa, Streptococcus pneumoniae
VVSDYLCCLYGSRIYFLLYQANQEKVILILFENLFKPRQFPSATSKHCFEQPAASFLVCSLIFIEYKIQGIHFRI

SEQ ID NO: 3277 - protein, 383 aa, Streptococcus pneumoniae
MKQFLERASILALSLVLITSFSISSALPAMFDYYQGYSKEQIELLVSLPSFGIMMMLLLNGFLEKIFPERLQISLGLLILSLSGTAPFWYQAYPFVFGTRLLFGLGLGMINAKAISIISERYQGKRRIQMLGLRASAEVVGASIITLAVGQLLAFGWTAIFLAYSAGFLVLPLYLLFVPYGKSKKEVKKRAKEASRLTREMKGLIFTLAIEAAVVVCTNTAITIRIPSLMVERGLGDAQLSSFVLSIMQLIGIVAGVSFSFLISIFKEKLLLWSGITFGLGQIVIALSSSLWVVVAGSVLAGFAYSVVLTTVFQLVSERIPAKLLNQATSFAVLGCSFGAFTTPFVLGAIGLLTHNGMLVFSILGGWLIVISIFVMYLLQKRA

SEQ ID NO: 3278 - protein, 249 aa, Streptococcus pneumoniae
MTRYKATISYDGYAFDGFQRQPHARSVQEEIEKTLTRLNKGQTITVHGAGRTDSGVHALGQVIHFDLPYQMDEEKLRFALDTQSPEDIDVISIELVADDFHCRYAKHSKTYEFIVDRGRPKNPMRRHYATHFPYPLDVERMQIAIKKLEGTHDFTGFTASGTSVEDKVRTITEASLIVDETGQFLTFTFSGNGFLYKQIRNMVGTLLKIGNNRMPVEQIALILEKKDRQLAGPTAAPNGLYLKEIRYEE

SEQ ID NO: 3279 - protein, 257 aa, Streptococcus pneumoniae
MKNNRILALSGNDIFSGGGLSADLATYTLNGLHGFVAVTCLTALTEKGFEVFPTDDTIFQHELDSLRDVEFGGIKIGLLPTVSVAEKALDFIKQRPGVPVVLDPVLVCKETHDVAVSELCQELIRFFPYVSVITPNLPEAELLSGQEIKTLEDMKTAAQKLHDLGAPAVIIKGGNRLSQDKAVDVFYDGQTFTILENPVIQGQNAGAGCTFASSIASHLVKGDKFLPAVESSKAFVYRAIAQADQYGVRQYEANKNN

SEQ ID NO: 3280 - protein, 153 aa, Streptococcus pneumoniae
MKQTKTTKIALVSLLTALSVVLGYFLKFPTPTGILTLLDAGVFFAAFYFGSREGAVVGGLASFLIDLLSGYPQWMFFSLVNHGLQGFFAGFKGKSQWLGLILATIAMVGGYALGSTLMNGWAAALPEILPNFMQNMVGMIVGFILSQSIKKIK

SEQ ID NO: 3281 - protein, 190 aa, Streptococcus pneumoniae; identical to SEQ ID NO: 2680

SEQ ID NO: 3282 - protein, 90 aa, Streptococcus pneumoniae
MTEFSLVLLLKAIKLARSTYYYHLKQLDKTDKDQELKAEIQSIFIEHKGNYAYRCIHLELRNRAYLVNHKRVQGLIKVLNLQAKMRQKRK

SEQ ID NO: 3283 - protein, 197 aa, Streptococcus pneumoniae
KYSIYKLKCDRNENKGDVGKKAENLIQGQFEGSKAMEKCYTDVTEFAIPASTQKLYLSPVLDGFNSEIIAYNLSTSPNLEQVKSMLEQAFTEKHYENTILHSDQGWQYRHDSYHRFLESKGIQASMSRKGNSPDNGMMESFFGILKSEMFYGFEKSFQSLKQLEQAIIDYIDYYNNKRIKVKLKGLIPVQYRTKSFG

SEQ ID NO: 3284 - protein, 158 aa, Streptococcus pneumoniae
MKWTALPVRSSKKLVMVSTSTTVSGMVSVWMSMNSHLSWKETTWSSKKACASLLNQVSISLVKSVFVLKTAVLLPRMASTSLQAPAKICFILIKLYSPYAFLSKYLGAILLSFFCYYAKEIGCNNLTLSVWNDNEGALRFYQRQGMKPQETTMEMIID

SEQ ID NO: 3285 - protein, 360 aa, Streptococcus pneumoniae
MSKLQQILTYLESEKLDVAVVSDPVTINYLTDFYSDPHERQMFLFVLADQEPLLFVPALEVERASSTVSFPVVGYVDSENPWQKIKHALPQLDFKRVAVEFDNLILTKYHGLKTVFETAEFDNLTPRIQRMRLIKSADEVQKMMVAGLYADKAVHVGFDNISLDKTETDIIAQIDFAMKREGYEMSFDTMVLTGDNAANPHGIPAANKVENDALLLFDLGVLVNGYASDMTRTVAVGKPDQFKKDIYNLTLEAQQAALDFIKPGVTAHEVDRAAREVIEKAGYGEYFNHRLGHGIGMDVHEFPSIMEGNDMVIEEGMCFSVEPGIYIPGKVGVRIEDCGVVTKDGFDLFTSTSKDLLYFD

SEQ ID NO: 3286 - protein, 260 aa, Streptococcus pneumoniae
MVYTSLSSKDGNYPYQLNIAHLYGNLMNTYGDNGNILMLKYVAEKLGAHVTVDIVSLHDDFDENHYDIAFFGGGQDFEQSIIADDLPAKKESIDNYIQNDGVVLAICGGFQLLGQYYVEASGKRIEGLGVMGHYTLNQTNNRFIGDIKIHNEDFDETYYGFENHQGRTFLSDDQKPLGQVVYGNGNNEEKVGEGVHYKNVFGSYFHGPILSRNANLAYRLVTTALKKKYGQDIQLPAYEDILSQEIAEEYSDVKSKADFS

SEQ ID NO: 3287 - protein, 447 aa, Streptococcus pneumoniae
MNLKTTLGLLAGRSSHFVLSRLGRGSTLPGKVALQFDKDILQNLAKNYEIVVVTGTNGKTLTTALTVGILKEVYGQVLTNPSGANMITGIATTFLTAKSSKTGKNIAVLEIDEASLSRICDYIQPSLFVITNIFRDQMDRFGEIYTTYNMILDAIRKVPTATVLLNGDSPLFYKPTIPNPIEYFGFDLEKGPAQLAHYNTEGILCPDCQGILKYEHNTYANLGAYICEGCGCKRPDLDYRLTKLVELTNNRSRFVIDGQEYGIQIGGLYNIYNALAAVAIARFLGADSQLIKQGFDKSRAVFGRQETFHIGDKECTLVLIKNPVGATQAIEMIKLAPYPFSLSVLLNANYADGIDTSWIWDADFEQITDMDIPEINAGGVRHSEIARRLRVTGYPAEKITETSNLEQVLKTIENQDCKHAYILATYTAMLEFRELLASRQIVRKEMN

SEQ ID NO: 3288 - protein, 438 aa, Streptococcus pneumoniae
MLTYDLIVIGFGKAGKTLAGKLASAGKKVALVERSKAMYGGTCINIGCIPTKTLLVAAEKDLSFEEVIATKNTITGRLNGKNYTTVAGTGVNIFDAEAHFLSNKVIEIQAGDEKQELTAETIVINTGAVSNVLPIPGLATSKNVFDSTGIQSLDKLPEKLGVLGGGNIGLEFAGLYNKLGSKVTVLDALDTFLPRAEPSIAALAKQYLEEDGIELLQNIHTTEIKNDGDQVLVVTEDETYRFDALLYATGRKPNVEPLQLENTDIELTERGAIKVDKHCQTNVPGVFAVGDVNGGLQFTYISLDDFRVVYSYLAGDGSYTLEDRLNVPNTMFITPALSQVGLTESQAADLKLPYAVKEIPVAAMPRGHVNGDLRGAFKAVVNTETKEILGASIFSEGSQEIINIITVAMDNKIPYTYFTKQIFTHPTLAENLNDLFAI

SEQ ID NO: 3289 - protein, 290 aa, Streptococcus pneumoniae
MKSNRYIIALAGVILHLMLGSTYAWSVYRNPIIEKTGWDQASVAFAFSLAIFCLGLSAAFMGRLVEKFGPKVMGSLSAFLYAGGNILTGFAIDRQELWLLYLAYGILGGLGLGAGYITPVSTIIKWFPDKRGLATGLAIMGFGFASLLTSPIAQHLIAGVWIVETFYILGASYFIIMLLASQFIKRPNEQELAILSSSGKEKTASLTQGMAANQALKSNRFYMLWIIFFINIPCGLGLISAASPMAQEMAGLSTSHAAVMVGVLGIFNGFGRLLWASLSDYIGPPLTFNI

SEQ ID NO: 3290 - protein, 81 aa, Streptococcus pneumoniae
LIPAILSDILRTKELAALHGYILTAWTMAGLARPILLAETYKMAHSYTQTLFVFLILYSIALALSYYLGRSIKKESQKPLT

SEQ ID NO: 3291 - protein, 524 aa, Streptococcus pneumoniae
VKFNELNLSADLLAEIEKAGFVEASPIQEQTIPLALEGKDVIGQAQTGTGKTAAFGLPTLEKIRTEEATIQALVIAPTRELAVQSQEELFRFGRSKGVKVRSVYGGSSIEKQIKALKSGAHIVVGTPGRLLDLIKRKALKLQDIETLILDEADEMLNMGFLEDIEAIISRVPENRQTLLFSATMPDAIKRIGVQFMKAPEHVKIAAKELTTELVDQYYIRVKEQEKFDTMTRLMDVAQPELAIVFGRTKRRVDELTRGLKIRGFRAEGIHGDLDQNKRLRVLRDFKNGNLDVLVATDVAARGLDISGVTHVYNYDIPQDPESYVHRIGRTGRAGKSGQSITFVAPNEMGYLQIIENLTKKRMKGLKPASVEESFQSKKQVALKKIERDFADETIRANFEKFGKDARKLAAEFTPEELAMYILSLTVQDPDSLPEVEIAREKPLPFKPSGNGFGGKAKGGRGGRRGDDRRERDRRGNGRRDEFKKGSRGNDRFDKEKRYRKDNKKPRNTLSEKQTGFVIRNKGDK

SEQ ID NO: 3292 - protein, 262 aa, Streptococcus pneumoniae
MAHLLEKTRKITSILKRSEEQLQDELPYNAITRQLADIIHCNACIINSKGRLLGYFMRYKTNTDRVKQFFQTKIFPDDYVQGANMIYETEANLPVEHDMSIFPVESRDDFPDGLTTIAPIHVSGIRLGSLIIWRNDKKFEDEDLVLVEIASTVVGIQLLNFQREEDEKNIRRRTAVTMAVNTLSYSELRAVSAILGELNGNEGKLTASVIADRIGITRSVIVNALGKLEYAGIIESRSLGMKGTYLKVLISDIFEEVKKRDH

SEQ ID NO: 3293 - protein, 68 aa, Streptococcus pneumoniae
DFVADSGKLTAGAPAQAISDAISKVSLLAFEREDHIFFTIDAHEEIDCFHPESKLFPPHNLLGTSGRN

SEQ ID NO: 3294 - protein, 151 aa, Streptococcus pneumoniae
LLNEKIISSLQLMLMKKSIVSIRKVSYFLLIISLGRVDGIKMEIWGSFIKSNGSDSRVIWMDKRHYSAFSGTDLDIRLRERRVSTVILTGVLTDICVLHTAIDAYNLGYDIEIVKPAVASIWPENHQFALGHFKNTLGAKLVDENLNELSE

SEQ ID NO: 3295 - protein, 77 aa, Streptococcus pneumoniae
MVELNLKNIYKKYPNSEHYSVEDFNLNIKDKEFIVFVGPSGCGKSTTLRMIAGLEDITEGTASIDGVVVNDVAPKDQ

SEQ ID NO: 3296 - protein, 51 aa, Streptococcus pneumoniae
LTTTPSIDAVPSVMSSRPAIIRSVVDLPHPEGPTKTINSLSLMFKLKSSTE

SEQ ID NO: 3297 - protein, 284 aa, Streptococcus pneumoniae
LFIDNMAFGLKLRKYSKEDINKRVQEAAEILGLKEFLERKPADLSGGQRQRVAMGRAIVRDAKVFLMDEPLSNLDAKLRVSMRAEIAKIHRRIGATTIYVTHDQTEAMTLADRIVIMSATKNPAGTGTIGRVEQIGTPQEVYKNPVNKFVAGFIGSPAMNFINVKLVGSEIVSDGFRLKVPEGALKVLREKGYEGKELIFGIRPEDVNAEPAFLETFPDCVVKATISVSELLGSESHLYCQVGKDEFVAKVDARDYLQTGATVELGFDLNKAHFFDVETEKTIY

SEQ ID NO: 3298 - protein, 252 aa, Streptococcus pneumoniae
MSEAGHKFLAKLGKKRLRPGGKRATDWLIAEGGLSKEKRILEVACNRGTTAIELAQRFGCKITAVDMDAQALEVAKKSAGTAGVAHLISFERANAMKLPYQDASFDIVINEAMLTMQADQAKKKCVMEYLRVLKPGGLLLTHDVLLKEAKESIRQELSQAIHVNVGPLTQDGWEQVMIESGYCDVKVLTGEMTLMKLSGMIYDEGWLGTLKICVNACKKENRKQFLTMYKMFAKNKQKLGFIAMASYKSSKR

SEQ ID NO: 3299 - protein, 176 aa, Streptococcus pneumoniae
LKERKKMNLKDYIATIENYPKEGITFRDISPLMADGNAYSYAVREIVQYATDKKVDMIVGPEARGFIVGCPVAFELGIGFAPVRKPGKLPREVISADYEKEYGVDTLTMHADAIKPGQRVLIVDDLLATGGTVKATIEMIEKLGGVMAGCAFLVELDELNGREKIGDYDYKVLMHY

SEQ ID NO: 3300 - protein, 314 aa, Streptococcus pneumoniae
MPIRIDKKLPAVEILRTENIFVMDDQRAAHQDIRPLKILILNLMPQKMVTETQLLRHLANTPLQLDIDFLYMESHRSKTTRSEHMETFYKTFPEVKDEYFDGMIITGAPVEHLPFEEVDYWEEFRQMLEWSKTHVYSTLHICWGAQAGLYLRYGVEKYQMDSKLSGIYPQDTLKEGHLLFRGFDDSYVSPHSRHTEISKEEVLNKTNLEILSEGPQVGVSILASRDLREIYSFGHLEYDRDTLAKEYFRDRDAGFDPHIPENYFKDDDVNQVTCLCWSSSAALFFSNWVNHAVYQETPFDWRKIEDDASAYGYL

SEQ ID NO: 3301 - protein, 225 aa, Streptococcus pneumoniae
MTYLDAFKSGTLVLPSALLLHFKELFPSSDDFLVWQFFYLQNTTGLEEMSPSQIAERIGKEISDVNQSISNLTERGLLQYRTIELNGEIELLFDASLALERLDDLFGAVHSSSDQLTPQNQLKDLVETFQQELGRLLTPFEIEDLTKTLKEDGTSADLIKEALREAVLNGKPNWKYIQAILRNWRHEGIKSVAQIEAKRAEREASNPQLTQVSADFRNAMDLWKD

SEQ ID NO: 3302 - protein, 124 aa, Streptococcus pneumoniae
LFIFQLPAINGLRDISHTSFFNLFSIYSITIIHSLQILLGFQAYLHGLILPEIHGISEICRYLCQLRIACFSFCSLGLNLSHTLDSFMAPVSQNRLNVLPVWFSIQNSFTKSLLNQVSTGSIFL

SEQ ID NO: 3303 - protein, 252 aa, Streptococcus pneumoniae
MSRKPFIAGNWKMNKNPEEAKAFVEAVASKLPSSDLVEAGIAAPALDLTTVLAVAKGSNLKVAAQNCYFENAGAFTGETSPQVLKEIGTDYVVIGHSERRDYFHETDEDINKKAKAIFANGMLPIICCGESLETYEAGKAAEFVGAQVSAALAGLTAEQVAASVIAYEPIWAIGTGKSASQDDAQKMCKVVRDVVAADFGQEVADKVRVQYGGSVKPENVASYMACPDVDGALVGGASLEAESFLALLDFVK

SEQ ID NO: 3304 - protein, 501 aa, Streptococcus pneumoniae
MSVTFFIGEQRLKTKIGLASICLLGLATSHVAANETEVAKTSQDTTTASSSSEQNQSSNKTQTSAEVQTNAAAHWDGDYYVKDDGSKAQSEWIFDNYYKAWFYINSDGRYSQNEWHENYYLKSGGYMAQNEWIYDSNYKSWFYLKSDGAYAHQEWQLIGNKWYYFKKWGYMAKSQWQGSYFLNGQGAMMQNEWLYDPAYSAYFYLKSDGTYANQEWQKVGGKWYYFKKWGYMARNEWQGNYYLTGSGAMATDEVIMDGARYIFAASGELKEKKDLNVGWVHRDGKRYFFNNREEQVGTEHAKKIIDISEHNGRINDWKKVIDENEVDGVIVRLGYSGKEDKELAHNIKELNRLGIPYGVYLYTYAENETDAENDAKQTIELIKKYNMNLSYPIYYDVENWEYVNKSKRAPSDTDTWVKIINKYMDTMKQAGYQNVYVYSYRSLLQTRLKHPDILKHVNWVAAYTNALEWENPYYSGEKGWQYTSSEYMKGIQGRVDVSVWY

SEQ ID NO: 3305 - protein, 172 aa, Streptococcus pneumoniae
MVELKKEAVKDVTSLTKAAPVALAKTKEVLNQAVADLYVAHVALHQVHWYMHGRGFLVWHPKMDEYMEALDGQLDEISERLITLGGSPFSTLTEFLQNSEIEEEAGEYRNVEESLERVLVIYRYLSELFQKGLDVTDEEGDDVTNGIFAGAKTETDKTIWMLAAELGQAPGL

SEQ ID NO: 3306 - protein, 212 aa, Streptococcus pneumoniae
MNVSDNHFIKVRFKSLKNLLPTDNVEILFLSLIPVKNRLDVLKSSNPIYLFFRITRQNQGFPFWKQATPHPIKGHTPHQDSMIQSCFFKVLQFCWQMPRQTIFLTNHTLFILGPNSYDFLSHASILFTDSTILSKNSKKDWFGIAYKIEKICKKFPTDLSMFPYFLQTRCLSKFGCKHPNCFICFSFSACKDTVCHIVTFFISDIQTFLEKF

SEQ ID NO: 3307 - protein, 168 aa, Streptococcus pneumoniae
MTKKIVAIWAQDEEGVIGKENRLPWHLPAELQHFKETTLNHAILMGRVTFDGMGRRLLPKRETLILTRNPEEKIDGVATFQDVQSVLDWYQAQEKNLYIIGGKQIFQAFEPYLDEVIVTHIHARVEGDTYFPEELDLSLFETVSSKFYAKDEKNPYDFTIQYRKRKEV

SEQ ID NO: 3308 - protein, 68 aa, Streptococcus pneumoniae
FYHPIPQEKGSLMERSLFGLFTAFLCFICFLAGAQAFRKKRYGLSILLWLNAFTNLVNSIHAFYMTLF

SEQ ID NO: 3309 - protein, 410 aa, Streptococcus pneumoniae
MSTNRKNDMMVYCSFCGKNQEEVQKIIAGNNAFICNECVELAQEIIREELVEEVLADLSEVPKPIELLHILNHYVIGQDRAKRALAVAVYNHYKRINFHDTREESEDVDLQKSNILMIGPTGSGKTFLAQTLAKSLNVPFAIADATALTEAGYVGEDVENILLKLLQVADFNIERAERGIIYVDEIDKIAKKSENVSITRDVSGEGVQQALLKIIEGTVASVPPQGGRKHPQQEMIQVDTKNILFIVGGAFDGIEEIVKQRLGEKVIGFGQNNKAIDENSSYMQEIIAEDIQKFGIIPELIGRLPVFAALEQLTVDDLVRILKEPRNALVKQYQTLLSYDDVELEFDDEALQEIANKAIERKTGARGLRSIIEETMLDVMFEVPSQENVKLVRITKETVDGTDKPILETA

SEQ ID NO: 3310 - protein, 195 aa, Streptococcus pneumoniae
MELNTHNAEILLSAANKSHYPQDELPEIALAGRSNVGKSSFINTMLNRKNLARTSGKPGKTQLLNFFNIDDKMRFVDVPGYGYARVSKKEREKWGCMIEEYLTTRENLRAVVSLVDLRHDPSADDVQMYEFLKYYEIPVIIVATKADKIPRGKWNKHESAIKKKLNFDPSDDFILFSSVSKAGMDEAWDAILEKL

SEQ ID NO: 3311 - protein, 126 aa, Streptococcus pneumoniae
MAKTIHTDKAPKAIGPYVQGKIVGNLLFASGQVPLSPETGEIVGENIQEQTEQVLKNIGAILAEAGTDFDHVVKTTCFLSDMNDFVPFNEVYQTAFKEEFPARSAVEVARLPRDVKVEIEVIAEIG

SEQ ID NO: 3312 - protein, 296 aa, Streptococcus pneumoniae
MTKKQLHLVIVTGMSGAGKTVAIQSFEDLGYFTIDNMPPALLPKFLQLVEIKEDNPKLALVVDMRSRSFFSEIQAVLDELENQDGLDFKILFLDAADKELVARYKETRRSHPLAADGRILDGIKLERELLAPLKNMSQNVVDTTELTPRELRKTLAEQFSDQEQAQSFRIEVMSFGFKYGIPIDADLVFDVRFLPNPYYLPELRNQTGVDEPVYDYVMNHPESEDFYQHLLALIEPILPSYQKEGKSVLTIAMGCTGGQHRSVAFAKRLVQDLSKNWSVNEGHRDKDRRKETVNRS

SEQ ID NO: 3313 - protein, 325 aa, Streptococcus pneumoniae
MRKPKITVIGGGTGIPVILKSLREKDVEIAAIVTVADDGGSSGELRKNMQQLTPPGDLRNVLVAMSDMPKFYEKVFQYRFSEDAGAFAGHPLGNLIIAGLSEMQGSTYNAMQLLSKFFHTTGKIYPSSDHPLTLHAVFQDGTEVAGESHIVDHRGIIDNVYVTNALNDDTPLASRRVVQTILESDMIVLGPGSLFTSILPNIVIKEIGRALLETKAEIAYVCNIMTQRGETEHFTDSDHVEVLHRHLGRPFIDTVLVNIEKVPQEYMNSNRFDEYLVQVEHDFVGLCKQVSRVISSNFLRLENGGAFHDGDLIVDELMRIIQVKK

SEQ ID NO: 3314 - protein, 303 aa, Streptococcus pneumoniae
MSFTVAVKEEILGQHHLSWHELSAIIKMSGSIGLSTSGLTLSVVTENAKLARHLYESFLHFYEIKSEIRHHQRSNLRKNRVYTVFTDEKVQDLLSDLHLADSFFGLETGIDEAILSDEEAGRAYLCGAFLANGSIRDPESGKYQLEISSVYLDHAQGIASLLQQFLLDAKVLERKKGAVTYLQRAEDIMDFLIVIGAMQARDDFERVKILRETRNDLNRANNAETANIARTVSASMKTINNISKIKDIMGLENLPVDLQEVAQLRIQHPDYSIQQLADSLSTPLTKSGVNHRLRKINKIADEL

SEQ ID NO: 3315 - protein, 322 aa, Streptococcus pneumoniae
MSQLYDITIVGGGPVGLFAAFYAHLRQAKVQIIDSLPQLGGQPAILYPEKEILDVPGFPNLTGEELTNRLIEQLNGFDTPIHLNETVLEIDKQEEEFAITTSKGSHLTKTVIIAMGGGAFKPRPLELEGVEGYENIHYHVSNIQQYAGKKVTILGGGDSAVDWALAFEKIAPTTLVHRRDNFRALEHSVQALQESSVTIKTPFAPSQLLGNGKTLDKLEITKVKSDETETIDLDHLFVNYGFKSSVGNLKNWGLDLNRHKIIVNSKQESSQAGIYAIGDCCYYDGKIDLIATGLGEAPTAVNNAINYIDPEQKVQPKHSTSL

SEQ ID NO: 3316 - protein, 271 aa, Streptococcus pneumoniae
LFASPWTIAINLIDILIVAYILYHFTKGIAGTKIMILVRGVLVFILAQILANMIGLTTIYWLFNQIITYGVIAAVVIFSPEIRTGLERLGRATDFFSNAPISAEEQMIRAFVKSVEYMSPRKIGALVAIQRVRTLQEYISTGIPLDAKISAELLINIFIPNTPLHDGAVIIKEERIAVTSAYLPLTKNTGISKEFGTRHRAAIGLSEVSDALTFVVSEETGGISITYNGRFKHNLTLDEFETELREILLPKEEVGLSFKERWLGGWKHEKK

SEQ ID NO: 3317 - protein, 259 aa, Streptococcus pneumoniae
MKKNSLYIISSLFFACVLFVYATATNFQNSTSARQVKTETYTNTVTNVPIDIRYNSDKYFISGFASEVSVVLTGANRLSLASEMQESTRKFKVTADLTDAGVGTIEVPLSIEDLPNGLTAVATPQKITVKIGKKAQKDKVKIVPEIDPSQIDSRVQIENVMVSDKEVSITSDQETLDRIDKIIAVLPTSERITGNYSGSVPLQAIDRNGVVLPAVITPFDTIMKVTTKPVAPSSSTSNSSTSSSSETSSSTKATSSKTN

SEQ ID NO: 3318 - protein, 63 aa, Streptococcus pneumoniae
FVFELVAFVDEDVSDELLVLEFDVLELGATGFVVTFIIVSNGVITAGKTTPLRSIACKGTEPL

SEQ ID NO: 3319 - protein, 450 aa, Streptococcus pneumoniae
MGKYFGTDGVRGEANLELTPELAFKLGRFGGYVLSQHETEAPKVFVGRDTRISGEMLESALVAGLLSVGIHVYKLGVLATPAVAYLVETEGASAGVMISASHNPALDNGIKFFGGDGFKLDDEKEAEIEALLDAEEDTLPRPSAEGLGILVDYPEGLRKYEGYRVSTGTPLDGMKVALDTANGAASTSARQIFADLGAQLTVIGETPDGLNINLNVGSTHPEALQEVVKESGSAIGLAFDGDSDRLIAVDENGDIVDGDKIMYIIGKYLSEKGQLAQNTIVTTVMSNLGFHKALNREGINKAVTAVGDRYVVEEMRKSGYNLGGEQSGHVILMDYNTTGDGQLSAVQLTKIMKETGKSLSELAAEVTIYPQKLVNIRVENVMKEKAMEVPAIKAIIEKMEEEMAGNGRILVRPSGTEPLLRVMAEAPTTEEVDYYVDTITDVVRAEIGID

SEQ ID NO: 3320 - protein, 120 aa, Streptococcus pneumoniae
VNKNLLVSIILMRVYFEWENENGAPETKVDVNFQLLQHDQENQVTSLIVILSFMIVFDKFVISGTISQVNHIDGRIVNEPSELNQEEVETLARPCLNMLNRLTYEVTEIALDLPGINLEF

SEQ ID NO: 3321 - protein, 282 aa, Streptococcus pneumoniae
MKLAVFTDSSAYLSEETLQREDLFVLDIPVNIDGEEYVEGINLSAEEFYQKMAQASELPKTSQPSIAKLDEILTSLKEQGYTHALGLFLSSGISGFYQNIQYMVDDYEGLTIAFPDTLITSAPLGIMVESVFNWRDQGDDFASIQDKLAIQISRTSAFIMVDDLDHLVKGGRLSNGAAILGNLLSIKPILYFNDQGVIEVYEKVRTEKKATKRLIEIIKETTASGQYRVIVIHGNAPEKAEELRQHLLDFGLGSDVSLATFGSVIGTHLGAGSIALGYIPVI

SEQ ID NO: 3322 - protein, 255 aa, Streptococcus pneumoniae
MSIRVIIAGFKGKMGQAACQMVLTDPDLDLVAVLDPFESESEWQGIPVFKDKADLAGFEADVWVDFTTPAVAYENTRFALENGFAPVVGTTGFTSEEIAELKEFSRAQDLGGLIAPNFALGAVLLMQFATQAAKYFPNVEIIELHHDKKKDAPSGTAIKTAELMAEVRESIQQGAADEEELIAGARGADFDGMRIHSVRLPGLVAHQEVIFGNQGEGLTLRHDSYDRISFMTGVNLGIKEVVKRHELVYGLEHLL

SEQ ID NO: 3323 - protein, 399 aa, Streptococcus pneumoniae
MRLTQMPSEFQKALPVLEKIKEAGFEAYFVGGSVRDALLHSPIHDVDIATSSYPEETKQIFPRTADIGIEHGTVLVLDGDEEYEVTTFRTEDVYVDYRRPSAVSFVRSLEEDLKRRDFTVNAFALDETGEIVDLFHGLEDLEKQVLRAVGVASERFNEDALRIMRGFRFQASLGFALEPETFKAMKTLTPLLEKISVERTFVEFDKLLLAPFWRRGLASMIESQAYDYLPDMASSQDKLNRLFDLETDFTFESSEQAWAALLWALEIENAQSFLKSWKTSRQFAKQVQDLLIILALRENGELSKRDCYRFDIDLLLQAENLRQAQGKEVNPQAITEKYQSLTIHDKKEIQINGGILIKEYGYQPGPDLGEILTEIEFAIVDGELENNREAIHAYLREKK

SEQ ID NO: 3324 - protein, 623 aa, Streptococcus pneumoniae
MSDFIVEKLSKSVGDKTVFRDISFIIHDLDRIGLIGVNGTGKTTLLDVLSGVSGFDGDVSPFSAKNDYQIGYLTQDPDFDDRKTVLDTVLSSELKEIQLIREYELIMLDYSEDKQARLERVMAEMDSLQAWEIESQVKTVLSKLGIQDLSTPVGELSGGLRRRVQLAQVLLGNHDLLLLDEPTNHLDIAIIEWLTLFLKNSKKTVLFITHDRYFLDALSTRIFELDRAGLTEYQGNYQDYVRLKAEQDERDAALLHKKEQLYKQELAWMRRQPQARATKQQARINRFHDLKKEVSGSSAETDLTMNFETSRIGKKVIEFQAVSFAYENKPILQNFNLLVQAKDRIGIVGDNGVGKSTLLNLIAGSLEPTAGQVVIGETVRIAYFSQQIEGLDESKRVINYLQEVAEEVKTSGGSTTSIAELLEQFLFPRSTHGTLIEKLSGGEKKRLYLLKLLLEKPNVLLLDEPTNDLDIATLTVLENFLQGFAGPVLTVSHDRYFLDKVATKILAFEDGKIRPFFGHYTDYLDEKAFETDMANQVQKAEKEKVVKVREDKKRMTYQEKQEWASIEGDIETLEKRIAAIEEEMQANGSDFGKLATLQKELDEKNEALLEKYERYEYLSEFDS

SEQ ID NO: 3325 - protein, 143 aa, Streptococcus pneumoniae
LHFDFRIVLTIKFTEILIAFVFFKECFIFLIQFFLESSQLTKVRAVSLHFLFNSSDTFFQGFNITFNTCPLLLFLVGHAFLVFSNLDHFFLFGLLHLIGHICFKSFFIKIVGVMTKERTNLAILKSENLGRYLIQEIAVVTDC

SEQ ID NO: 3326 - protein, 393 aa, Streptococcus pneumoniae
MKHLSKSKLAERGAIISISTYLILSAAKLAAGHLLHSSSLVADGFNNVSDIIGNVALLIGIRMARQPADRDHRFGHWKIEDLASLITSIIMFYVGFDVLRDTIQKILSREETVIDPLGATLGIISAAIMFVVYLYNTRLSKKSNSKALKAAAKDNLSDAVTSLGTAIAILASSFNYPIVDKLVAIIITFFILKTAYDIFIESSFSLSDGFDDRLLEDYQKAIMEIPKISKVKSQRGRTYGSNIYLDITLEMNPDLSVFESHEIADQVESMLEERFGVFDTDVHIEPAPIPEDEILDNVYKKLLMREQLIDQGNQLEELLTDDFVYIRQDGEQMDKEAYKTKKELNSAIKDIQITSISQKTKLICYELDGIIHTSIWRRHETWQNIFHQETKKE

SEQ ID NO: 3327 - protein, 898 aa, Streptococcus pneumoniae
MSKEQKRQAFYTQSPEEVLQAVDATEQGLSSSEAEKRLAEFGHNELEEGEKRSILVKFIEQFKDLMIIILVAAAILSVVTSGGEDIADAIIILAVVIINAAFGVYQEGKAEEAIEALKSMSSPVARVLRDGHMAEIDSKELVPGDIVALEAGDVVPADLRLLEANSLKIEEAALTGESVPVEKDLSVELATDAGIGDRVNMAFQNSNVTYGRGMGVVVNTGMYTEVGHIAGMLQDADETDTPLKQNLNNLSKVLTYAILVIALVTFVVGVFIQGKNPLGELLTSVALAVAAIPEGLPAIVTIVLSLGTQVLAKRHSIVRKLPAVETLGSTEIIASDKTGTLTMNKMTVEKVFYDAVLHDSADDIELGLEMPLLRSVVLANDTKIDVEGNLIGDPTETAFIQYALDKGYDVKGFLEKYPRVAELPFDSDRKLMSTVHPLPDGRFLVAVKGAPDQLLKRCLLRDKAGDIAPIDEKVTNLIHTNNSEMAHQALRVLAGAYKIIDSIPENLTSEELENDLIFTGLIGMIDPERPEAAEAVRVAKEAGIRPIMITGDHQDTAEAIAKRLGIIDANDTEDHVLTGAELNELSDEDFEKVVGQYSVYARVSPEHKVRIVKAWQKQGKVVAMTGDGVNDAPALKTADIGIGMGITGTEVSKGASDMILADDNFATIIVAVEEGRKVFSNIQKTIQYLLSANTAEVLTIFLSTLFGWDVLQPVHLLWINLVTDTFPAIALGVEPAEPGVMNHKPRGRKASFFSGGVLSSIIYQGVLQAALVMSVYGLAIAYPVHVGDNHAIHADALTMAFATLGLIQLFHAYNVKSVYQSILTVGPFKSKTFNWSILVSFILLMATIVVEPLEGIFHVTKLDLSQWGIVMAGSFSMIIIVEIVKFIQRKLGFDKNAI

SEQ ID NO: 3328 - protein, 96 aa, Streptococcus pneumoniae
MLTRSPIPASVASSTDKSFSTGTDSPVKAASSILRELASSKRRSAGTTSPASRATISPGTNSLESISAMCPSRRTRATGLDMDLRASIASSAFPSW

SEQ ID NO: 3329 - protein, 82 aa, Streptococcus pneumoniae
IFEKTLRPSSTATIIVAKLSSARIISEAPLETSVPVIPIPIPMSAVFRAGASLTPSPVMATTLPCFCQALTIRTLCSGDTRA

SEQ ID NO: 3330 - protein, 263 aa, Streptococcus pneumoniae
MSAYQLPTVWQDEASNQGAFTGLNRPTVGARFEQNLPKGEQAFQLYSLGTPNGVKVTILLEELLEAGFKEAAYDLYKIAIMDGDQFGSDFVKLNPNSKIPALLDQSGTEDVRVFESAHILLYLAEKFGAFLPSNPVEKVEVLNWLFWQAGAAPFLGGGFGHFFNYAPEKLEYPINRFTMEVKRQLDLLDKELAQKPYIAGNDYTIADIAIWSWYGQLVQGNLYQGSAKFLDASSYQNLVKWAEKIANRPAVKRGLEVTYTEIK

SEQ ID NO: 3331 - protein, 151 aa, Streptococcus pneumoniae
YSKKQEECEEVEKKIVKDILFLSQVSQPASQEDLYLARDLQDTLLANHDTCVGLAANMIGVQKRVIIFNLGLVPVVMFNPVLLSFEGSYEAEEGCLSLVGVRSTKRYETTRLAYRDSKWQEQTISLTGFPAQIFQHELDHLEGPIIFEESQ

SEQ ID NO: 3332 - protein, 531 aa, Streptococcus pneumoniae
MKRIVFELIFIATTWYIFLPPLNLTSWEFLFFLCGHLLVVAILFGFGKGINLVKTVHVRHGKAEAALNLEGFKINRLGKILLASIGGILLLAALVSLVTSSMFQAKNYANVVTVTEKDFTEFPRSDTSKVPILDRSTAEKIGDRYLGSLTDKVSQYVAADTYTQLTIDGKPYRVTPLEYADPIKWFNNQAKGIGEYIKVDMVTGNADLVDLKTPIKYSDSEYFNRDVKRHLRLKYPTKIFKTPSFEVDDEGNPFYVATVYQKQFGLAVPRPASVIILDATNGETKEYSLSDVPEWVDRIYPAEETIEQINYNGKYKDGFLNAMISKKNVTQTTKGYNYLSIGNDIYLYTGVTSANADESNLGFILENMRTGEITKYSLASATEESARESAEGAVQEKSYKATFPILINLNDKPLYIMGLKDNAGLVKEYALVDAVEYQNVIVATTVEEMLSKYANKNDLEIDNATTESINGVVADLKSAVIKGDTVYFFKVDGKIYKVKASVSDDLPYLENGKTFEGQVGKDNYLKTFKLR

SEQ ID NO: 3333 - protein, 59 aa, Streptococcus pneumoniae
MEDKEMGFYLMVASMLLGLLALKIGFSQFKEKKDKFLSILTSLAGTRLVLVAVWLGWPK

SEQ ID NO: 3334 - protein, 242 aa, Streptococcus pneumoniae
MKILIPTAKEMNTDLPSIEAISLTPESQAVLDALALYSASQLESFYKVSAEKAAEEFQKYPSFEKADYSPYPALILFDGLMYRNIKRDKLTEAEQDYLENHVFITSALYGVVPALSPMAPHRLDFLMKLKVAGKTLKSHWKAVYDEALKMEEVIFSLLSSEFETVFSKEIRAKMVTFNFMEDRERSLKIHSTISKKARGAFLTALIENQVQTVGEARRLNFAGFVYREDLSQPQGLVFVKEV

SEQ ID NO: 3335 - protein, 209 aa, Streptococcus pneumoniae
LQVVLLWCNIFYNNEKILVNLRKRRHIMSKKVLFIVGSLRQGSFNHQMALEAEKALAGKAEVSYLDYSALPLFSQDLEVPTHPAVAAAREAVLAADAIWIFSPVYNFSIPGTVKNLLDWLSRALDLSDTRGASALQDKFVTVSSVANAGHDQLFAIYKDLLPFIRTQGVGDFTAARVNDSAWADGKLVLEETVLNSLEKQAQDLIEAIK

SEQ ID NO: 3336 - protein, 162 aa, Streptococcus pneumoniae
VKKRQNKAKNNLLWQYGLGMTILFVVISASFLYMVSLSMKPYQTAKSEGEKLAQQYAGLEQADQVDLYNGLESYYSVLGRNKQQEALAVLIGKDDHKIYVYQLNQGVSQEKAETVSKEKGAGEIDKIIFGRYQDKPIWEVKSGSDFYLVDFETGALVNKEGL

SEQ ID NO: 3337 - protein, 395 aa, Streptococcus pneumoniae
MKLSNRVLEMEESVTLAAGARAKALKAEGRDILSLTLGEPDFTTPKNIQDAAIASIRDGRASFYTVTSGLPELKAVVNSYFERFYGYSVAPNQVTVAAGAKYSLYTFFMAVVNPGDEVIIPTPYWVSYGDQVKMAEGVPVFVSAKEDNHFKVTVEQLEAARTDKTKVLVLNSPSNPTGMIYTREELLAIGNWAVENDILILADDIYGRLVYNGHEFTPISSLSEAIRKQTVVINGVSKTYAMTGWRIGYAVGEADIIAAMSKIAGQTTSNPSAVAQYAAVEALSGEQDTVESMRQAFEKRLNTIYPLLAEVPGFEVVKPQGAFYLFPNVKKAMEMKGYTDVTDFTTAILEEAEVALVTGAGFGAPENVRLSYATDLDTLKEAVERLKAFMGSEND

SEQ ID NO: 3338 - protein, 123 aa, Streptococcus pneumoniae
VRMIDHFEIKVKDLQISEGFYRSFLAPLDYKLAFKTSSLISFLSPNSPHPGGDFWLTQGTQDPVHFAFLAENKEEVQACYEAGIEAGGRDNGVPGYRSEHPIYYAAFMIDLDGNNIEVVCHKE

SEQ ID NO: 3339 - protein, 447 aa, Streptococcus pneumoniae
MTKRVTIIDVKDYVGQEVTIGAWVANKSGKGKIAFLQLRDGTAFFQGVAFKPNFVEKFGEEVGLEKFDVIKRLSQETSVYVTGIVKEDERSKFGYELDITDIEVIGESQDYPITPKEHGTDFLMDNRHLWLRSRKQVAVLQIRNAIIYATYEFFDKNGFMKFDSPILSGNAAEDSTELFETDYFGTPAYLSQSGQLYLEAGAMALGRVFDFGPVFRAEKSKTRRHLTEFWMMDAEYSYLTHDESLDLQEAYVKALLQGVLDRAPQALETLERDTELLKRYIAEPFKRITYDQAIDLLQEHENDEDADYEHLEHGDDFGSPHETWISNHFGVPTFVMNYPAAIKAFYMKPVPGNPERVLCADLLAPEGYGEIIGGSMREEDYDALVAKMDELGMDRTEYEFYLDLRKYGTVPHGGFGIGIERMVTFAAGTKHIREAIPFPRMLHRIKP

SEQ ID NO: 3340 - protein, 128 aa, Streptococcus pneumoniae
MGVFLFLWFDTVQHTWEWNSFTDMFCSCCEGYHTFDTDTKSSVWNCTVFTKVKVEFIFCTIHAKFIHLSDKGIVIFLTHRPTDNFSIAFWSKQVCTKHALWISRNWFHVEGLDGCWIVHDKCWHTKVV

SEQ ID NO: 3341 - protein, 96 aa, Streptococcus pneumoniae
MAKYEILYIIRPNIEEEAKNALVARFDSILTDNGATVVESKTWEKRRLAYEIQDFREGLYHIVNVEANDDAALKEFDRLSKINADILRHMIVKIDA

SEQ ID NO: 3342 - protein, 156 aa, Streptococcus pneumoniae
MINNVVLVGRMTRDAELRYTPSNVAVATFTLAVNRTFKSQNGEREADFINVVMWRQQAENLANWAKKGSLIGVTGRIQTRSYDNQQGQRVYVTEVVAENFQMLESRSVREGHTGGAYSAPTANYSAPTNSVPDFSRNENPFGATNPLDISDDDLPF

SEQ ID NO: 3343 - protein, 86 aa, Streptococcus pneumoniae
TYKGEKTWLNNVVADSNAVKKLITSQQTKLNMLITKILSFLAVSFQNVGKSFPRRVTGTSAKNQRKVTTAIKRARVMALMPFVNED

SEQ ID NO: 3344 - protein, 111 aa, Streptococcus pneumoniae
SRQIPYFQKVYHFYFNFLDEKKDIFMKKLHRAFNVFSCFQTRKKGATEPNSLSHFKACEKRPVGVLIRFLVFKLMKKRPNRVFSLIFVYERHQSHYASAFDSCCYFTLVFS

SEQ ID NO: 3345 - protein, 466 aa, Streptococcus pneumoniae
MDAKLRYKAKKIKIVFFDIDDTLRNSKTGFIPTTIPTVFKQLREKGILTGIASGRGIFGVVPEIRDLKPDFFVTLNGAYIEDKKGQVIYQHQIEKSYVEEYISWAKQEGIEYGLVGSHDAKLSTRTDMMSEAINPIYPDLDVDPDFHEKEDIYQMWTFEDKGDDLHLPDSLSDKLRMVRWHQHSSDIVPISGSKATGVEKVVEHLGLKPEKVMVFGDGLNDLELFDYAGISVAMGISHDKIKEKADYITKTLEEDGIFDALEVFGMVEKELHFPQVDIETVEGPLATIKTNHGDLRIKLFPEHAPKTVANFVSLSKDGYYDGVIFHRIIKDFMIQGGDPTGTGMGGESIYGESFEDEFSEELYNIRGALSMANAGPNTNGSQFFIVQNQHLPYSKKEITRGGWPEPIAEIYANQGGTPHLDRRHTVFGQLADEASYAVLDVIAAVETGAMDKPVEDVVIETIEIED

SEQ ID NO: 3346 - protein, 83 aa, Streptococcus pneumoniae
MKIGDKLKGRITGIQPYGAFVELETGDTGLIHISEIRTGFIENIHETLKVDEEVQVQVVDLDEFTGESQSFYPHFGGRKVPVS

SEQ ID NO: 3347 - protein, 86 aa, Streptococcus pneumoniae
MEEEQLLKSGERINQLFSTDIKIIQNREVFSYSVDSVLLSRFPRFPKKGLIVDFCAGNGAVGLFASTRTQAQILSVEISGAFGGYG

SEQ ID NO: 3348 - protein, 66 aa, Streptococcus pneumoniae
LWISVLGMEQWGFLLALVLKHRYCLLRFQERLADMAERSVRLNGLEEQMQVICDDLKNMPAHIQGK

SEQ ID NO: 3349 - protein, 128 aa, Streptococcus pneumoniae
LCNPPYFKVNPYSNLNESEHYLLARHEITTNLEEICRSAQSILKSNGRLAMVHRPDRLLDILDTLKRHNLAPKRLQFVYPKREKEANMLLIEAIKDGSTSGFKVLPPLIVHNDDGSYTPEIEEIYYGS

SEQ ID NO: 3350 - protein, 92 aa, Streptococcus pneumoniae
MDHKAYMYVLECRDGSYYIGYTTDMRRRLAIHNSGKGAKYTRARLPVKLIYAQGFASKEEAMSAEALLKRKKRPQKEEFLSENQDRNLLRLF

SEQ ID NO: 3351 - protein, 59 aa, Streptococcus pneumoniae
LTDHNEFQQSVSDIAEVEVYGVVDHHRVLTLKLQAHFTCVWSQLDQRLQSFTVCSKNMV

SEQ ID NO: 3352 - protein, 221 aa, Streptococcus pneumoniae
SRSLRCCRPPPCANFETASPLYMRLEPVGSASSIVYRMFKEHGVAVPKEIAGLMLSGLISDTLLLKSPTTHPTDKIIAPELAELAGVNLEEYGLAMLKAGTNLASKSAEELIDIDAKTFELNGNNVRVAQVNTVDIAEVLERQAEIEAAMQAANESNGYSDFVLMITDIVNSNSEILALGANMDKVEAAFNFKLENNHAFLAGAVSRKKQVVPQLTESFNT

SEQ ID NO: 3353 - protein, 170 aa, Streptococcus pneumoniae
MLENGDLIFVRDGSDMGQAIQTSTGNYSHVAIYLDGMIYHASGQAGVVCQEPADFFESNHLYDLYVYPEMDIQSVKERACRHLGAPYNASFYPDAAGFYCSQYIAEILPIFETIPMKFGDGEQEISDFWREYYIELGLPVPLNQAGTNPSQLAASPLLQCKERNLHDSDF

SEQ ID NO: 3354 - protein, 104 aa, Streptococcus pneumoniae
LIRYLDQYEDVILREIKAQFPDVAVDKLMEEYIKAGLILRENKRYYLNFPTLESLDSLELDQEIFVREASPVYQALLEQSFETELRNQINAAILVERRTLRALK

SEQ ID NO: 3355 - protein, 94 aa, Streptococcus pneumoniae
MTLSNYFYKVKQQYPLTEKQQELYDILGDVNPEYALKYMTAFLLKFLKKDQLMQKCRDIFVDSLVVLGYIVQNEDRKYELAIDFDKERLTFYLA

SEQ ID NO: 3356 - protein, 64 aa, Streptococcus pneumoniae
MSLENKLEQATGAVKEGFGKVTGDSKTELEGAVEKTVAKAKDVVEDAKGAVEGAVEGLKNVFTK

SEQ ID NO: 3357 - protein, 503 aa, Streptococcus pneumoniae
MIKIEPVLDILKKDGLFREIIDQGHYHYNYSKVIFDSISYDSRKVTEDTLFFAKGAAFKKEYLLSAITQGLAWYVAEKDYEVDIPVIIVNDIKKAMSLIAMEFYGNPQEKLKLLAFTGTKGKTTATYFAYNILSQGHRPAMLSTMNTTLDGETFFKSALTTPESIDLFDMMNQAVKMTVPTSSWKSPVKPIHDESGCENDRTHLIMEVSSQAYLVHRVYGLTFDVGVFLNITPDHIGPIEHPSFEDYFYHKRLLMENSRAVIINSDMDHFSVLKEQVEDQDHDFYGSQFDNQIENSKAFSFSATGKLAGDYDIQLIGNFNQENAVAAGLACLRLGASLEDIKKGIAATRVPGRMEVLTQKNGAKVFIDYAHNGDSLKKLINVVETHQTGKIALVLGSTGNKGESRRKDFGLLLNQHPEIQVFLTADDPNYEDPMAIADEISSYINHPVEKIADRQEAIKAAMAITNHELDAVIIAGKGADCYQIIQGKKESYPGDTAVAENYL

SEQ ID NO: 3358 - protein, 191 aa, Streptococcus pneumoniae
MIKIEPVLDILKKDGLFREIIDQGHYHYNYSKVIFDSISYDSRKVTEDTLFFAKGAAFKKEYLLSAITQGLAWYVAEKDYEVDIPVIIVNDIKKAMSLIAMEFYGNPQEKLKLLAFTGTKGKTTATYFAYNILSQGHRPAMLSTMNTTLDGETFFKSALTTPESIDLFDMMNQAVKMTVPTSSWKSPVKPI

SEQ ID NO: 3359 - protein, 540 aa, Streptococcus pneumoniae
MSHENNHQQAQMLRGTALLTASNFISRLLGAVYIIPWYIWMGAYAAKANGLFTMGYTIYAWFLLVSTAGIPVAVAKQVAKYNTMREEEHSFALIRSFLGFMTGLGLVFALVLYVFAPWLADLSGVGKDLIPIMQSLAWGVLIFPSMSVIRGFFQGMNNLKPYAMSQIAEQVIRVIWMLLATFIIMKLGSGDYLAAVTQSTFAAFVGMVASFAVLIYFLAQESSLKRVFETGDKINSKRLLVDTIKEAIPFILTGSAIQIFQILDQLTFINSMSWFTNYSNEDLVVMFSYFSANPNKITMILISVGVSIGSVGLPLLTENYVKGDLKAASRLVQDSLTLLFMFLLPATVGVVMVGEPLYTVFYGKPDSLALGLFVFAVLQSIILGLYMVLSPMLQAMFRNRKAVLYFIYGSIAKLVLQLPTIALFHSYGPLISTTIALIIPNVLMYRDICKVTGVKRKVILKRTILISLLTLVMFLLIGTIQWLLGFFFQPSGRLWSFFYVALVGAMGGGLYMVMSLRTYLLDKVIGKAQADRLRAKFKLS

SEQ ID NO: 3360 - protein, 652 aa, Streptococcus pneumoniae
MKKSKSKYLTLAGLVLGTGVLLSACGNSSTASKTYNYVYSSDPSSLNYLAENRAATSDIVANLVDGLLENDQYGNIIPSLAEDWTVSQDGLTYTYKLRKDAKWFTSEGEEYAPVTAQDFVTGLQYAADKKSEALYLVQDSVAGLDDYITGKTSDFSTVGVKALDDQTVQYTLVKPELYWNSKTLATILFPVNADFLKSKGDDFGKADPSSILYNGPFLMKALVSKSAIEYKKNPNYWDAKNVFVDDVKLTYYDGSDQESLERNFTAGAYTTARLFPNSSSYEGIKEKYKNNIIYSMQNSTSYFFNFNLDRKSYNYTSKTSDIEKKSTQEAVLNKNFRQAINFAFDRTSYGAQSEGKEGATKILRNLVVPPNFVSIKGKDFGEVVASKMVNYGKEWQGINFADGQDPYYNPEKAKAKFAEAKKELEAKGVQFPIHLDKTVEVTDKVGIQGVSSIKQSIESVLGSDNVVIDIQQLTSDEFDSSGYFAQTAAQKDYDLYHGGWGPDYQDPSTYLDIFNTNSGGVLQNLGLEPGEANDKAKAVGLDVYTQMLEEANKEQDPAKRYEKYADIQAWLIDSSLVLPSVSRGGTPSLRRTVPFAAAYGLTGTKGVESYKYLKVQDKIVTTDEYAKAREKWLKEKEESNKKAQEELAKHVK

SEQ ID NO: 3361 - protein, 184 aa, Streptococcus pneumoniae
GVFMKLKLLRVDTKVIMGSFLLVLSSLLALLLPLILKGLIDGSSIENIGSKVFQSFLIFIGQALFSSIGYYLFSQSGEKKIAKIRKKVIEGLIYAEKSFFDKSQSGELTSAIVNDMSVIREFLITTFPNIILSLVMVLGSIVVLFSLDWNLSLLLFITLPCMMFIILPLSNISEKYSRRLQEEI

SEQ ID NO: 3362 - protein, 179 aa, Streptococcus pneumoniae
LTEKIQEHELIKTNQAEKSVQDVLDNCIERVQNNSLKSDRVTSFETPFALLFIFATIAVMLTYGGYRVSAGYISVGTLVSFLIYLFQLLNPISNIANFVTVYSRSKGSSVALDNLLAVPKEKFEGGKSVSGQGLNFNHVYFGYDENRPVLKDITCSIFKGQKLLLLDHLDQENQRLCVC

SEQ ID NO: 3363 - protein, 181 aa, Streptococcus pneumoniae
MEQSSIYDFNLKEWRSKIAWVSQNNAVLSGSIRDNLCLGLNRLVTDDELMKVLDLVSLGDEIRSMKEGLDTEVGERGRFLSGGQSQRLQIARTYLKDAEILIFDEATANLDADSEYAIISSLYSVLKEKTVVIIAHSLSTVKDVDCIFFLEEGKITGSGTHKELLENHERYARFVQEQMIE

SEQ ID NO: 3364 - protein, 364 aa, Streptococcus pneumoniae
MSKELHINTILAQAGIKSDEATGALVTPLHFSTTYQHPEFGRSTGFDYTRTKNPTRSKAEEVLATIESADYALATSSGMSAIVLAFSGFPVGSKVLAVRDLYGGSFRWFNQVEQEGRFHFTYANTEEELIAELEKDVDVLYIETPTNPLMLEFDIEKLAKLAHAKGAKVVVDNTFYSPIYQRPIEDGADIVLHSATKYLAGHNDVLAGVVVTNSLELYEKLFYNLNTTGAVLSPFDSYQLLRGLKTLSLRMERSTANAQEVVAFLKDSPAVKEVLYTGRGGMISFKVADETRIPHILNSLKVFSFAESLGGVESLITYPTTQTHADIPAEVRHSYGLTDDLLRLSIGIEDARDLIADLRQALEG

SEQ ID NO: 3365 - protein, 388 aa, Streptococcus pneumoniae
MGKYDFTSLPNRLGHHTYKWKETETDSEVLPAWIADMDFVVLPEIRQAVQTYADQLVYGYTYASEDLIKEVQKWEATQYGYNFDKEALVFIEGVVPAISTAIQTFTKEGEAVLINTPVYPPFARSVKLNNRRLITNSLVEKDGLFEIDFDQLEKDLVEEEVKLYILCNPHNPGGRVWEKEVLEKIGQLCQKHGVLLVSDEIHQDLTLFGHKHQSFNTINPAFKNFAIVLSSATKTFNIAGTKNSYAVIENPKLRLAFQKRLLANNQHEISGLGYLATEAAYRYGKDWLEELKQVFEDHINYVVDLFGKETKIKVMKPQGTYLIWLDFSAYDLTDETLQELLRNEAKVILNRGLDFGEEGSLHARINIAMPKSLLQEVCQRIVATFAKR

SEQ ID NO: 3366 - protein, 1032 aa, Streptococcus pneumoniae
MAKLIPGKIRIEGVALYETGKVDIIKEKNNRLYARVAEEELRYSLEDDLVFCACDFFQKRGYCVHLAALEHFLKNDERGQEILWSLEEGHEEKEAVETKVTLGGKFLDRILSPKSECAYELSAVGQVEAGTNHILWTLRIGQINSQKYYVIRDIPLFLRIVEQRKSYMIGKIYEESLSWEAFDDASQELLTFLHGLTEEGLVSDLFCQNQGRHLFFPLTFFEQGVNLLMALPHFQFDHQVDSYQTLLFQDMHADANLFAFTVTEYSDYFEMEISESPRVNVFYQGAVLFHKGQVYFLTDQQMRLLKEIKALPVGQQGKKYLQFDSSDRDKLASCLTLFIQMGTVSAPERLQIKTFAPSFYFDREEDNRIRLEIQFDYGNRQVSSRQELEELPFSSDADLEERIFQVCLAAGFEADFQSWRQALKAESVYHFFHDIIPVFEKLGHVDLSDKLEELYSLASPQVQIASKGGLLEIQFDFQDIAQEEIDQAMQALVANQDFYIDSSNQVYFFDEETKKIRQNLQELGQFELKDGTLQARKSLAYSLAHLFEGRDRVSFSQEFQNLAQDLTHPEDFPRQATQVQADLRDYQEKGIGWLQMLHHYGFGGILADDMGLGKTLQTIAFLTSQVTKESRVLILAPSGLIYNWADEFQKFAPQLDVAVVHGLKASREEILAESHQIYVTSYATFRQDSEFYQGMAFYFLFLDEAQVMKNAQTKIAQTLRQFVVPSVFALSGTPIENHLGELWSIFQIVMPGLLPSKKEFMKLPAERVAQFIKPFVMRRKKEEVLTELPDLIEVVYKNELEDQQKAIYLAQLQQMRDHLAQVSEQEFQRSRVEILSGLMRLRQICDTPALFMEDYQGASGKLDSLRDLLVQVADGRHRVLIFSQFKGMLEKIEQELPDLGLTSFKITGSTPAKERQDMTKAFNQGERDAFLISLKAGGVGLNLTGADTVILVDLWWNPAVEAQAIGRAHRMGQEETVEVYRLVTKGTIEEKIQELQEQKKHLVSQVLDGTESRGSLTLAEIREILGISEANT

SEQ ID NO: 3367 - protein, 205 aa, Streptococcus pneumoniae
MKQERFPLVSDDEVMLTEMPVMNLYDESDLISNIKGEYRDKNYLEWAPITEEKPVKPIEKQVEKPKKAPLGVKKEGKSYAEVAREEARADLKKKRSANYLTQDFSLARRHSQPSLVRQGNQPTAPFQKENPGEFVKYSQKLTQSHYILAEEVHSIPTKNEEVSAPAPKKNNYDFLKKSQIYNKKSKQTEQERRVAQELNLTRMTE

SEQ ID NO: 3368 - protein, 444 aa, Streptococcus pneumoniae
MSKTYHFIGIKGSGMSALALMLHQMGHKVQGSDVEKYYFTQRGLEQAGITILPFDEKNLDGDMEIIAGNAFRPDNNVEIAYADQNGISYKRYHEFLGSFMRDFVSMGVAGAHGKTSTTGMLSHVLSHITDTSFLIGDGTGRGSANAKYFVFESDEYERHFMPYHPEYSIITNIDFDHPDYFTSLEDVFNAFNDYAKQITKGLFVYGEDAELRKITSDAPIYYYGFEAEGNDFVASDLLRSTTGSTFTVHFRGQNLGQFHIPTFGRHNIMNATAVIGLLYTAGFDLNLVREHLKTFAGVKRRFTEKIVNDTVIIDDFAHHPTEIIATLDAARQKYPSKEIVAVFQPHTFTRTIALLDDFAHALNQADAVYLAQIYGSAREVDHGDVKVEDLANKINKKHQVITVENVSPLLDHDNAVYVFMGAGDIQTYEYSFERLLSNLTSNVQ

SEQ ID NO: 3369 - protein, 154 aa, Streptococcus pneumoniae
MEIPIKIIQASKSDLPEIGALQTSSFPAEKQQLSHILEESIRKCADTFLLARDENQLLGYILSSPQSDNPQCLKVHSLVIESDHQRQGLGTLLLAALKEVAVELDYKGIRLESPDELLSYFEMNGFVDEEATLLYATSQGYSMIWFNPFYLEEQ

SEQ ID NO: 3370 - protein, 118 aa, Streptococcus pneumoniae
MKIRQARLEDLDRIVELEFENFSVEEAIPPSVFEAHLREIQTSFLVAEKEGRIMGYIEGPVGLHRHLQDQSFTEEIKDSRHEPGGYISVTWLSIAKEAQGLGLGQKLLTALKEVALEE

SEQ ID NO: 3371 - protein, 70 aa, Streptococcus pneumoniae
VRKGIIICFFGTFKIKNNGIIHKEEKLLSEKSRKKEKLSFKEQILRDLEKVKGYDEVLKEDKAVGSHSCK

SEQ ID NO: 3372 - protein, 501 aa, Streptococcus pneumoniae
MADSLSPVEKIMRKAPTVPTHPSQGVPASPADEIQRETPGVPSHPSQDVPSSPAEESGSRPGPGPVRLKKLEREYNETPTRVAVSYTTAEKKAEQAGPETPTPATETVDIIRDTSRRSRREGAKPVKPKKEKKSHVKAFVISFLVFLALLSAGGYFGYQYVLDSLLPIDANSKKYVTVGIPEGSNVQEIGTTLEKAGLVKHGLIFSFYAKYKNYTDLKAGYYNLQKSMSTEDLLKELQKGGTDEPQEPVLATLTIPEGYTLDQIAQTVGQLQGDFKESLTAEAFLAKVQDETFISQAVAKYPTLLESLPVKDSGARYRLEGYLFPATYSIKESTTIESLIDEMLAAMDKNLSPYYSTIKSKNLTVNELLTIASLVEKEGAKTEDRKLIAGVFYNRLNRDMPLQSNIAILYAQGKLGQNISLAEDVAIDTNIDSPYNVYKNVGLMPGPVDSPSLDAIESSINQTKSDNLYFVADVTEGKVYYANNQEDHDRNVAEHVNSKLN

SEQ ID NO: 3373 - protein, 160 aa, Streptococcus pneumoniae
MAEKTYPMTLEEKEKLEKELEELKLVRRPEVVERIKIARSYGDLSENSEYEAAKDEQAFVEGQISSLETKIRYAEIVNSDAVAQDEVAIGKTVTIQEIGEDEEEVYIIVGSAGADAFAGKVSNESPIGQALIGKKTGDTATIETPVGSYDVKILKVEKTA

SEQ ID NO: 3374 - protein, 60 aa, Streptococcus pneumoniae
VLHSLLFPFCYSSKISSNHVSVALPYVWLLTSSVSSTTSKQCFEQPAASFLVFSLIFIEY

SEQ ID NO: 3375 - protein, 162 aa, Streptococcus pneumoniae
LISKTLLEIRLNSLIDLRMFYFISLYFRLENKESHKSQEIGNLIRVYNRSKREEAESEPLNLYVEDEKGNLLAGLIAETFGNWLELEIEYLFVKEELRGQGIGSKLLQQAESEAKNRNCCFAFVNTYQFQAPDFYQKHGYKEVFSLQDYLYIRQRYYYQKNL

SEQ ID NO: 3376 - protein, 65 aa, Streptococcus pneumoniae
LIPNFGATIILSSISSRKTQFLGYNWYLSIVTHIHQSTSILMCEPLFVLYLHTHLTDSFGNNIFA

SEQ ID NO: 3377 - protein, 69 aa, Streptococcus pneumoniae
PRNCVFLDDIEDNIIVAPKLGIKTYQVKKRSDVVDILNNLFKLKTLYLLIRDSPLGFCVAFIKFTGKTC

SEQ ID NO: 3378 - protein, 147 aa, Streptococcus pneumoniae
VLYLLFNHKHKKGTEMQDNYTTKGKHLTIDSRRLIERWKKEGKSNREIASLLGKAPQTIHTKIKRRTVRKCLGKGRFKEVYSADYAQQSYENNRKHSVKRSSVTKELKEKILHYHNQKFLPEMMVMAKGVNVGISTIYYWIHHGKLG

SEQ ID NO: 3379 - protein, 163 aa, Streptococcus pneumoniae
LENGHYEIDTVLLTRAKNYCLLVLTDRKSRHQIIRLIPNKSAEVVNQALKLILNNTRFFPSGQIMDRNSIACLMYFLRSTIYYAHPYASWERGTNENHNRLIRRWLPKGTKKMTPKEVAFIEKWINNYPKKCLDYKSPREDFWMANLNLKFSKMEIIFIKRFQ

SEQ ID NO: 3380 - protein, 66 aa, Streptococcus pneumoniae
MNLTFLGLCIACMGVSVGEGLLMNGLFKSVARQPDMLSEFRSLMFLGVAFIEGTFFVTLVFSFIIK

SEQ ID NO: 3381 - protein, 238 aa, Streptococcus pneumoniae
MEESINPIISIGPVIFNLTMLAMTLLIVGVIFVFIYWASRNMTLKPKGKQNVLEYVYDFVIGFTEPNIGSRYMKDYSLFFLCLFLFMVIANNLGLMTKLQTIDGTNWWSSPTANLPYDLTLSFLVILLTHIESVRRRGFKKSIKSFMSPVFVIPMNILEEFTNFLSLALRIFGNIFAGEVMTSLLLLLSHQAIYWYPVAFGANLAWTAFSVFISCIQAYVFTLLTSVYLGNKINIEEE

SEQ ID NO: 3382 - protein, 164 aa, Streptococcus pneumoniae
MHVTVGELIGNFILITGSFILLLVLIKKFAWSNITGIFEERAEKIASDIDRAEEARQKAEVLAQKREDELAGSRKEAKTIIENAKETAEQSKANILADAKLEAGHLKEKANQEIAQNKVEALQSVKGEVADLTISLAGKIISQNLDSHAHKALIDQYIDQLGEA

SEQ ID NO: 3383 - protein, 178 aa, Streptococcus pneumoniae
MDKKTVKVIEKYSMPFVQLVLEKGEEDRIFSDLTQIKQVVEKTGLPSFLKQVAVDESDKEKTIAFFQDSVSPLLQNFIQVLAYNHRANLFYDVLVDCLNRLEKETNRFEVTITSAHPLTDEQKTRLLPLIEKKMSLKVRSVKEQIDESLIGGFVIFANHKTIDVSIKQQLKVVKENLK

SEQ ID NO: 3384 - protein, 501 aa, Streptococcus pneumoniae
LAINAQEISALIKQQIENFKPNFDVTETGVVTYIGDGIARAHGLENAMSGELLNFENGSYGMAQNLESTDVGIIILGDFTDIREGDTIRRTGKIMEVPVGESLIGRVVDPLGRPVDGLGEIHTDKTRPVEAPAPGVMQRKSVSEPLQTGLKAIDALVPIGRGQRELIIGDRQTGKTTIAIDTILNQKDQDMICIYVAIGQKESTVRTQVETLRQYGALDYTIVVTASASQPSPLLFLAPYAGVAMAEEFMYQGKHVLIVYDDLSKQAVAYRELSLLLRRPPGREAFPGDVFYLHSRLLERSAKVSDELGGGSITALPFIETQAGDISAYIATNVISITDGQIFLGDGLFNAGIRPAIDAGSSVSRVGGSAQIKAMKKVAGTLRIDLASYRELEAFTKFGSDLDAATQAKLNRGRRTVEVLKQPVHKPLPVEKQVTILYALTHGFLDTVPVDDIVRFEEEFHAFFDAQHPEILETIRDTKDLPEEAVLDAAITEFLNQSSFQ

SEQ ID NO: 3385 - protein, 292 aa, Streptococcus pneumoniae
MAVSLNDIKTKIASTKNTSQITNAMQMVSAAKLGRSEEAARNFQVYAQKVRKLLTDILHGNGAGASTNPMLISRSVKKTGYIVITSDRGLVGGYNSSILKAVMELKEEYHPDGKGFEMICIGGMGADFFKARGIQPLYELRGLADQPSFDQVRKIISKTVEMYQNELFDELYVCYNHHVNTLTSQMRVEQMLPIVDLDPNEADEEYSLTFELETSREEILEQLLPQFAESMIYGAIIDAKTAENAAGMTAMQTATDNAKKVINDLTIQYNRARQAAITQEITEIVAGASALE

SEQ ID NO: 3386 - protein, 468 aa, Streptococcus pneumoniae
MSSGKIAQVIGPVVDVLFAAGEKLPEINNALVVYKNDERKTKIVLEVALELGDGMVRTIAMESTDGLTRGMEVLDTGRPISVPVGKETLGRVFNVLGDTIDLEAPFTEDAERQPIHKKAPTFDELSTSSEILETGIKVIDLLAPYLKGGKVGLFGGAGVGKTVLIQELIHNIAQEHGGISVFAGVGERTREGNDLYWEMKESGVIEKTAMVFGQMNEPPGARMRVALTGLTIAEYFRDVEGQDVLLFIDNIFRFTQAGSEVSALLGRMPSAVGYQPTLATEMGQLQERITSTKKGSVTSIQAIYVPADDYTDPAPATAFAHLDSTTNLERKLVQLGIYPAVDPLASSSRALAPEIVGEEHYAVAAEVKRVLQRYHELQDIIAILGMDELSDEEKTLVARARRIQFFLSQNFNVAEQFTGQPGSYVPVAETVRGFKEILDGKYDHLPEDAFRGVGSIEDVIAKAEKMGF

SEQ ID NO: 3387 - protein, 139 aa, Streptococcus pneumoniae
MAQLTVQIVTPDGLVYDHHASYVSVRTLDGEMGILPRHENMIAVLAVDEVKVKRIDDKDHVNWIAVNGGVIEIANDMITIVADSAERARDIDISRAERAKLRAERAIEEAQDKHLIDQERRAKIALQRAINRINVGNRL

SEQ ID NO: 3388 - protein, 250 aa, Streptococcus pneumoniae
MDRGYESYNLMAHFQEKGWLYIIRIRDGKQSMPSSFNLPNTECFDQKVSLKLSRKQTNQLKKLYRDFPNDYHFIPHNSIFDFLPETSRKQDPVTLYELLFRMVRLEVEKGKYETLVTNTDYSVQELKNLYASRWGIETSFRDLKYSIGLVNFHAKKKGGILQEIFARFTNFNFCRWVTSQVAIDSSHKKQRYKVCFSDAAYACRLFFNGSLSSLQLKNYLKKQLSIIRPNRKYSRKIKAQSVVDFIYRVT

SEQ ID NO: 3389 - protein, 64 aa, Streptococcus pneumoniae
LFFVTTVDGNLRGYPTTKVKICKASKDFLENPSLLFGVKIDQANTVFQVTKTSLYAPSTGVEIF

SEQ ID NO: 3390 - protein, 181 aa, Streptococcus pneumoniae
MIKQIKAHLNKSIQSIIGQKVEFVKQDEQAFTRKRRLSLETMIRTILGMGGKSLSKELLDARLTVSNSAFVQRRYQIKPEAFYALFKEFTAPIPLNTDFPIFAADGSDICIPRNPMDTETSIQTQTDVKSYNLIHINALYDLTTGVYRDVSIQDKHAQHERLALIQMMEASPFRESSCYHG

SEQ ID NO: 3391 - protein, 337 aa, Streptococcus pneumoniae
MKETVYFGTYTRRTSQGIYKADFDTETGQLSNLELFAAEPSPTYLAFDQHQHLYTVGSQDDKGGIAAYQTDGTVLNHVVEEGAPHCYVAVDEKRDLVYAANYHKGQVLVYKRQEDGSLLLSDMDQHSGQGPHENQASPHVHYTDLTPDHYLVTCDLGTDQVITYDLDQEGKLSKLYTYHSKPGAGSRHIIFHNHYKIAYLICELNSTIEVLIYDGVGEFERMQVISTLPEAYEGFNGTAAIHLSKDGKYLYASNRGHDSIAVYTILADGSLELLEIVPTHGQTPRDFDLTPDQKFLIVVHQDSDNATVFKRNCDNGRLAELSNDFHVPEAVCIRFAP

SEQ ID NO: 3392 - protein, 77 aa, Streptococcus pneumoniae
MTGNITTAKKSKTGENRKLILLKIKRFSPNNKVTKNTVIALLSKNHLKNQDRLKCFSFCSINTSFLLFSHYTIFETK

SEQ ID NO: 3393 - protein, 388 aa, Streptococcus pneumoniae
MEQKEKHFSLSWFFKWFLDNKAITVFLVTLLLGLNLFILSKISFLFSPVLDFLAVVMLPVILSGLLYYLLNPIVDWMEKHKVNRVIAITIVFVIIALFIIWGLAVAIPNLQRQVLTFARNVPVYLEDIDRIVNGLVAQHLPDDFRPQLEQVLTNFSSQATVLASKVSSQAVNWVSAFISGASQVIVALIIVPFMLFYLLRDGKGLRNYLTQFIPRKLKEPVGQVLSDVNQQLSNYVRGQVTVAIIVAVMFIIFFKIIGLRYAVTLGVTAGILNLVPYLGSFLAMLPALVLGLIAGPVMLLKVVIVFIVEQTIEGRFVSPLILGSQLNIHPINVLFVLLTSGSMFGIWGVLLGIPVYASAKVVISAIFEWYKVVSGLYELEGEEVKSEQ

SEQ ID NO: 3394 - protein, 409 aa, Streptococcus pneumoniae
VNNSQQMLQALEEQDLTKAEHYFAKALENDSSDLLYELATYLEGIGFYPQAKEIYLKIVEDFPEVHLNLAAIASEDGQIEEAFTYLEEIQADSDWYVSSLALKADLYQLEGLTDVAREKLLEALTYSEDSLLILGLAELDSELENYQAAIQAYAQLDNRSIYEQTGISTYQRIGFAYAQLGKFETATEFLEKALELEYDDLTAFELASLYFDQEEYQKATLYFKQLDTISPDFEGYEYGYSQALHKEHQVQEALRIAKQGLEKNPFETRLLLAASQFSYELHDASGAENYLLTAKEDAEDTEEILLRLATIYLEQERYEDILELQSEEPENLLTKWMIARSYQEMDDLDTAYEYYQELTGDLKDNPEFLEHYIYLLRELGHFEEAKVHAHTYLKLVPDDVQMQELFERL

SEQ ID NO: 3395 - protein, 213 aa, Streptococcus pneumoniae
MSYLFEILPSLLNGASTTVQVFALVLLFSIPLGVLIAFALQVHWKPLHYLINIYIWVMRGTPLLLQLIFIYYVLPSIGIRLDRLPAAIIAFVLNYAAYFAEIFRGGIDTIPRGQYEAAKVLKFSPFDRVRYIILPQVTKIVLPSVFNEVMSLVKDTSLVYALGISDLILASRTAANRDASLVPMFLAGAIYLILIGIVTIISKKVEKKYSYYR

SEQ ID NO: 3396 - protein, 209 aa, Streptococcus pneumoniae
MLELRNINKVFGDKQILSNFSLSIPEKQILAIVGPSGGGKTTLLRMLAGLETIDSGQIFYNGQPLELDELQKRNLLGFVFQDFQLFPHLSVLENLTLSPVKTMGMKQEEAEKKASGLLEQLGLGGHAEAYPFSLSGGQKQRVALARAMMIDPEIIGYDEPTSALDPELRLEVEKLILQNRELGMTQIVVTHDLQFAENIADVLLKVEPK

SEQ ID NO: 3397 - protein, 278 aa, Streptococcus pneumoniae
MKKWMLVLVSLMTALFLVACGKNSSETSGDNWSKYQSNKSITIGFDSTFVPMGFAQKDGSYAGFDIDLATAVFEKYGITVNWQPIDWDLKEAELTKGTIDLIWNGYSATDERREKVAFSNSYMKNEQVLVTKKSSGITTAKDMTGKTLGAQAGSSGYADFEANPEILKNIVANKEANQYQTFNEALIDLKNDRIDGLLIDRVYANYYLEAEGVLNDYNVFTVGLETEAFAVGARKEDTNLVKKINEAFSSLYKDGKFQEISQKWFGEDVATKEVKEGQ

SEQ ID NO: 3398 - protein, 115 aa, Streptococcus pneumoniae
MEQFLDNIKDLEVTTVVRAQEALDKKETATFFIGRKTCPYCRKFAGTLSGVVAETKAHIYFINSEEPSQLNDLQAFRSRYGIPTVPGFVHITDGQINVRCDSSMSAQEIKDFAGL

SEQ ID NO: 3399 - protein, 572 aa, Streptococcus pneumoniae
MSYQENYQKWVDFVELPDYLRQDLENMDEKTKEDAFYTNLEFGTAGMRGLVGAGTNRINIYVVRQATEGLARLIESKGGNEKERGVAIAYDSRHFSPEFAFESAAVLAKHGIKSYVFESLRPTPELSFAVRHLNCFAGIMVTASHNPAPFNGYKVYGEDGGQMPPHDADALTTYIRAIENPFAVEVADVETEKASGLIEVIGEAVDVEYLKEVKDVNINPALIEEFGKDMKIVYTPLHGTGEMLARRALAQAGFDSVQVVEAQATADPDFSTVTSPNPESQAAFALAEELGRQVGADVLVATDPDADRVGVEVLQKDGSYLNLSGNQIGAIMAKYILEAHKNAGTLPENAALCKSIVSTDLVTKIAESYGATMFNVLTGFKFIAEKIQEFEEKHNHTYMMGFEESFGYLIKPFVRDKDAIQAVLVVAELAAYYRSRGLTLADGIEEIYKEYGYYAEKTISVTLSGVDGAEQIKAIMAKFRNNAPKEWNATAITVVEDFKAQTATVADGTVTNLTTPPSDVLKYTLADGSWIAVRPSGTEPKIKFYIAVVGETNEESQAKIANIEAEINAFVK

SEQ ID NO: 3400 - protein, 108 aa, Streptococcus pneumoniae
MAYNTDFKQGALDSIKGGHRHVEAAKVFWCWRQNSLHVGKERREQRNLERKKRVVKKRKIPLEELKAFVEAHPDAFLREIAAHFDCAVPSVWAALKQIKVTLKKDDDL

SEQ ID NO: 3401 - protein, 99 aa, Streptococcus pneumoniae
MIYKKSMTSDFFVEWFKTQLLPALKTPHVIVMGNASFHPKNILDELCIQDKHFFLPLPPYSPDLNPIEQAWAILKKKVTDVLREVSTIFECLECFFKTR

SEQ ID NO: 3402 - protein, 94 aa, Streptococcus pneumoniae
EKTVYDQTIHRVAEIVQNEDLYKKGLNVELAHQQIKGFFEAEFKNRINGVLNTKIKNSTLNRVNKKTIHQSNKNSMINLKQKQRKMLKNKAILC

SEQ ID NO: 3403 - protein, 84 aa, Streptococcus pneumoniae
VLNVDQDFMSISKSNKSGSDWKKTFTVRTTNRLANDLNNVLKQADKDTPNTPTWLNSAASKAKDDDRAYKLLKTLIPGENYLSC

SEQ ID NO: 3404 - protein, 70 aa, Streptococcus pneumoniae
RLLYQEKITYHVKDNQLEVETDKYTYTAARNGSKEVGIQESDIAATLSADEYNSNRQTFEREYKYKSKCP

SEQ ID NO: 3405 - protein, 370 aa, Streptococcus pneumoniae
VPMNIILIAKLLRENTNTKANALNNGWARSGSEEFKKFSHFVGVDKGIVRTNVLTGKKLSDKIRKEVGSGDSKLGKGGYFSTGDVLLGKDVVSYTVQVFSENNERVGVNTQSHRVQYNLPILADFSVIQDTVEPSRTVVEKIIPKLNIPEEEKGKITEEIKKKKKTSELAELISENVKVRYVDEQGRLLSLKNDTGIGEKESDGTYITNKKQLIGTSYNVTDKKLSSMTTTDGKYYTFKEADTNSASLTGNIVSEGRTVTLVYRESEAPTTATVTANYYKEGSQEKLAESVIKADLAIGSEYTTESKTIEGKTTTEDKEDRVITRKTTYTLVATPANAYQKTVQQLTITTVRMLRKQWFPKQQPLLRRRL

SEQ ID NO: 3406 - protein, 173 aa, Streptococcus pneumoniae
VVPKTATSTETKTITRIIHYVDKVTNQNVKEDVVQPVTLSRTKTENKVTGVVTYGEWTTGNWDEVVSGKIDKYKDPDIPTVESQEVTSDSSDKEITVRYDRLSTPDKPTPDPGTPKTETPVNPDPEVPTYETGKREELPNTGTEANATLASAGIMTLLASLGLGFFKKKEDEK

SEQ ID NO: 3407 - protein, 289 aa, Streptococcus pneumoniae
MDFTWALKYATEFLGTAILIILGNGAVANVELKGTKGHQSGWIVIAVGYGMGVMIPALMFGNVSGNHINPAFTLGLAVSGLFPWAQVVPYIIAQVLGAIFGQALVVATYRPFYLKTENPNNILGTFSTISSIDHGTKESRYAATVNGLINEFVGSFVLFFAALGLTKNFFGAEVLQFMKQKAIEAGQTVDFSDLAIKAQVAPHTASGLSVAHLALGFLVMALVTSLGGPTGPALNPARDLGPRLLHAFLPKSVLGEHKGDSKWWYSWVPVVAPIAAAIAAVAVFKFLYL

SEQ ID NO: 3408 - protein, 398 aa, Streptococcus pneumoniae
MAKEKYDRSKPHVNIGTIGHVDHGKTTLTAAITTVLARRLPSSVNQPKDYASIDAAPEERERGITINTAHVEYETEKRHYAHIDAPGHADYVKNMITGAAQMDGAILVVASTDGPMPQTREHILLSRQVGVKHLIVFMNKVDLVDDEELLELVEMEIRDLLSEYDFPGDDLPVIQGSALKALEGDSKYEDIVMELMNTVDEYIPEPERDTDKPLLLPVEDVFSITGRGTVASGRIDRGIVKVNDEIEIVGIKEETQKAVVTGVEMFRKQLDEGLAGDNVGVLLRGVQRDEIERGQVIAKPGSINPHTKFKGEVYILTKEEGGRHTPFFNNYRPQFYFRTTDVTGSIELPAGTEMVMPGDNVTIDVELIHPIAVEQGTTFSIREGGRTVGSGMVTEIEA

SEQ ID NO: 3409 - protein, 127 aa, Streptococcus pneumoniae
VSSLIPTISISSLTLTIPRSIRPEATVPRPVIENTSSTGRSNGLSVSRSGSGIYSSTVFINSITMSSYLESPSRALSAEPWITGRSSPGKSYSDNRSRISISTNSSNSSSSTKSTLFMKTIRCLTPT

SEQ ID NO: 3410 - protein, 137 aa, Streptococcus pneumoniae
LKRFSKSIILDSNQKALYNSNMKSTKEEIQTIKTLLKDSRTAKYHKRLQIVLFRLMGKSYKEIIELLDCNQTTIWRNVKKYEEFGLDSLLQETRGGRNHAYMTVEEEKAFLARHLKATEAGEFVTIPYFRLISFLHT

SEQ ID NO: 3411 - protein, 61 aa, Streptococcus pneumoniae
LLQYLISGLYRSYTRDAFYQLLKRHGWRNIMPRPEHPKKADAQTIVASKNKISIQEEKKAL

SEQ ID NO: 3412 - protein, 217 aa, Streptococcus pneumoniae
MVGEILCHVQNILRKQTLKPLSRLKIKSQFKKKRKRFKTSRRFHKVRSMYQDEAGFGRISKLGSCWSPIGVGPHVHSHYIREFRYCYGAVDAHTGESFFLRAGGCNTEWMNAFLEELSQAYPDDYLLLVMDNAIWHKSSTLKIPTNIGFAFIPPYTPEINPVEQVWKEIRKRGFKNKAFRTLEDVMNQLQDIIQGLEKEVIKPIVNRRWTRMLFESR

SEQ ID NO: 3413 - protein, 360 aa, Streptococcus pneumoniae
MKTKLPTEWQELSDQLGFQEFTPIQTQLFDPLLTGENLLGVSQTGTGKTLAYLLPSLLRLQKKKAQQLLILAPNTELAGQIFDVCKTWAEAIGLTAQLFLSGSSQKRQIERLKKGPEILIGTPGRIFELIKLKKIKMMNVETIILDEFDQLLDDSQIHFVEKITHYAPRDHQLVYMSATTKFDQEKIVPNTRTIDLSNQKLDNIQHFYMQVDQRHRVDILRKLAHVEDFRGLVFFNSLSDLGNAEEKLQYRDILAVSLASDVNVKFRKVILEKFKDNQLTLLLATDLLARGIDIDSLECVVNFDIPRDSETYTHRAGRTGRMGKEGYVITLVTHPEEIKKLKKFASIREIVLKNQELYIK

SEQ ID NO: 3414 - protein, 353 aa, Streptococcus pneumoniae
LKFSPLCWIVPSIYVIMKEGFKIGKGVFMLKLGVIGTGAISHHFIEAAHTSGEYQLVAIYSRKLETAATFASRYQNIQLFDQLEVFFKSSFDLVYIASPNSLHFAQAKAALSAGKHVILEKPAVTQPQEWFDLIQTAEKNNCFIFEAARNYHEKAFTTIKNFLADKQVLGADFNYAKYSSKMPDLLTGQTPNVFSDRFAGGALMDLGIYPLYAAVRLFGKANDATYHAQQLDNSIDLNGDGILFYPDYQVHIKAGKNITSNLPCEIYTTDGTLTLNTIEHIRSAIFTDHQGNQVQLPIQQTHHTMTEEVAAFAHMIQQPDLNLYQTWLDDAGSVHELLYTMRQTAGIRFEAEK

SEQ ID NO: 3415 - protein, 61 aa, Streptococcus pneumoniae
ESSFSSFYYSTFLNLGLLDSMLLSIYSEKKAFLQKKANSLFEIFSSLLDSPVYLCYNERRI

SEQ ID NO: 3416 - protein, 125 aa, Streptococcus pneumoniae
MICQFIRDMLDLPAKNVTILEGSNIHVLPSMPYSAQDFYTSIDVLAELDNGIQVIIEIQVHHQNFFINRLWAYLCSQVNQNLEKIRQREGDTHQSYKQIAPVYAIAIVDSNYFSDDLAFHSFIVK

SEQ ID NO: 3417 - protein, 480 aa, Streptococcus pneumoniae
LPNCIIEIIAQICYDINMNKSRLGRGRHGKTRHVLLALIGILAISICLLGGFIAFKIYQQKSFEQKIESLKKEKDDQLSEGNQKEHFRQGQAEVIAYYPLQGEKVISSVRELINQDVKDKLESKDNLVFYYTEQEESGLKGVVNRNVTKQIYDLVAFKVEETEKTSLGKVHLTEDGQPFTLDQLFSDASKAKEQLIKELTSFIEDKKIEQDQSEQIVKNFSDQDLSAWNFDYKDSQIILYPSPVVENLEEIALPVSAFFDVIQSSYLLEKDAALYQSYFDKKYQKVVALTFDDGPNPATTPQVLETLAKYDIKATFFVLGKNVSGNEDLVKRIKSEGHVVGNHSWSHPILSQLSLDEAKKQITDTEDVLTKVLGSSSKLMRPPYGAITDDIRNSLDLSFIMWDVDSLDWKSKNEASILTEIQHQVANGSIVLMHDIHSPTVNALPRVIEYLKNQGYTFVTIPEMLNTRLKAHELYYSRDE

SEQ ID NO: 3418 - protein, 255 aa, Streptococcus pneumoniae
MNTYQLNNGVEIPVLGFGTFKAKDGEEAYRAVLEALKAGYRHIDTAAIYQNEESVGQAIKDSGVPREEMFVTTKLWNSQQTYEQTRQALEKSIEKLGLDYLDLYLIHWPNPKPLRENDAWKTRNAEVWRAMEDLYQEGKIRAIGVSNFLPHHLDALLETATIVPAVNQVRLAPGVYQDQFVAYCREKGILLEAWGPFGQGELFDSKQVQEIAANHGKSIAQIALAWSLAARDFYHFQNLSQPLVFKLILIALELN

SEQ ID NO: 3419 - protein, 76 aa, Streptococcus pneumoniae
QASARNRSKSRKIDCSDSLGLELGSKGFLPLPKSVTTSRIQANLDCFGIELSHEERETLKTIAVQSGAPRVDDVDF

SEQ ID NO: 3420 - protein, 253 aa, Streptococcus pneumoniae
VDNLYLVKDDSQLAAFRDFVVRNTEKLKDYQSFLKNELAVCDLPQAVIWSSFNAATQIIRESAVPAYTNNRRMVMTPDLAVWKELYLYQLMDYECSQQTQAIESHYHSLSENFLLQIVGHELAHWSEYFLDDFDGYDSYIWFEEGMVEYISRKYFLTEEEFQAEKICNQSLVELFQKKYGWHSLNDFGSSTYDKNYASIFYEYWRSFLTIDKLVENLGSVQAVFDSYHLWANTDKTLPLLNWFVQQKLIEKEI

SEQ ID NO: 3421 - protein, 305 aa, Streptococcus pneumoniae
MSKKLTFQEIILTLQQFWNDQGCMLMQAYDNEKGAGTMSPYTFLRAIGPEPWNAAYVEPSRRPADGRYGENPNRLYQHHQFQVVMKPSPSNIQELYLESLEKLGINPLEHDIRFVEDNWENPSTGSAGLGWEVWLDGMEITQFTYFQQVGGLATGPVTAEVTYGLERLASYIQEVDSVYDIEWANGVKYGEIFIQPEYEHSKYSFEISDQEMLLENFDKFEKEAGRALEEGLVHPAYDYVLKCSHTFNLLDARGAVSVTERAGYIARIRNLARVVAKTFVAERKRLGYPLLDEETRVKLLAEDAE

SEQ ID NO: 3422 - protein, 678 aa, Streptococcus pneumoniae
MTKNLLVELGLEELPAYVVTPSEKQLGEKMAAFLKENRLSFEAIQTFSTPRRLAVRVTGLSDKQSDLTEDFKGPAKKIALDSDGNFTKAAQGFVRGKGLTVEDIEFREIKGEEYVYVTKEEVGQSVEAIVPGVVDVLKSLTFPVSMHWAGNSFEYIRPVHTLTVLLDEQEFDLDFLDIKGSRVSRGHRFLGKETKIQSALSYEEDLRKQFVIADPCEREQMIVDQIKEIEAKHGVRIEIDADLLNEVLNLVEYPTAFMGSFDAKYLEVPEEVLVTSMKEHQRYFVVRDQDGKLLPNFISVRNGNAERLKNVIKGNEKVLVARLEDGEFFWREDQKLVISDLVEKLNNVTFHEKIGSLREHMIRTGQITVLLAEKAGLSVDETVDLARAAAIYKFDLLTGMVGEFDELQGIMGEKYTLLAGETPAVAAAIREHYMPTSAEGELPESKVGAVLAIADKLDTILSFFSVGLIPSGSNDPYALRRATQGVVRILDAFGWHIAMDELIDSLYALKFDSLTYENKAEVMDFIKARVDKMMGSTPKDIKEAVLAGSNFVVADMLEAASALVEVSKEEDFKPSVESLSRAFNLAEKAEGVATVDSALFENDQEKALAEAVETLVLSGPASQQLKQLFALSPVIDAFFENTMVMAEDQAVRQNRLAILSQLTKKAAKFACFNQINTK

SEQ ID NO: 3423 - protein, 85 aa, Streptococcus pneumoniae
MDPKKIARINELAKKKKTEGLTPEEKVEQAKLREEYIEGYRRAVRHHIEGIKIVDEEGNDVTPEKLRQVQREKGLHGRSLDDPNS

SEQ ID NO: 3424 - protein, 414 aa, Streptococcus pneumoniae
MKFVGLVGSNYDQSYNRKLLEFIRRNFKFKFELEVLEIDEVPMFNQDEKWDESFQLRFLYNKITRADGVIIATPEHNHTISASLKSVLEWLSYEVHPFENKPVMIVGASYYDQGTSRAQVHLRKILDAPGVNAYTLPGNEFLLGKAKEAFDNNGNITNEGTVKFLETCLDNFVKYVGVVSKLKKPKPIESEDLDCGKPIATTITEVDPDDPEWVEKVAAITGAVSGDTYVKLDHGILTVNQIDMFLKAMPFELTYADDNNQFLYYNNAHQDPDTMFAKRVPPQSGSRMSTVHGSLPPARMKNVEWVIGTLRNGNQEYVRTIVPGSPAGVINTHNYQAMYYPDGSYAGINEIVFNFQPWLDWYLKETGQRLVGGSGPFAPAAGGHGDADATSGASDSGDVGGHGGDADATAGASY

SEQ ID NO: 3425 - protein, 78 aa, Streptococcus pneumoniae
MIDRSLIQQVQQISFFRSPILQIFPVKVFSIFAKQFLRIAQFLSNLHEDTEVIKDGIQFLDNIKVNQVATWVKCLKRV

SEQ ID NO: 3426 - protein, 201 aa, Streptococcus pneumoniae
MLKLIAIVGTNSKRSTNRQLLQYMQKHFADKAEIELVEIKAIPVFNKPADKQVPAEILEIAAKIEEADGVIIGTPEYDHSIPAVLMSALAWLSYGIYPLLNKPIMITGASYGTLGSSRAQLQLRQILNAPEIKANVLPDEFLLSHSLQAFNPSGDLVDLDVIKKLDAIFDDFRIFVKITEKLRNAQELLRKDAEDFDWENL

SEQ ID NO: 3427 - protein, 307 aa, Streptococcus pneumoniae
LTLRSHSERLMGTTITISLVDEQADIFLQKSFDLLKELEYRFNANSQESELMEINYQAGVSPVTVHPDLFELISLGLEHSLALSSHLNISIGPLIQTWRIGFSDAKVAQPQEIESVLPLINPHGIELDSSTSTVFLKQKGMKIDLGCLAKGYSADKVAQFLRKEGVTSALINLGGNILTIGKNQARGDNPWQIGIQDPANPRGNHLMTIPVVNKSVVTSGIYERHLTVDGQDYHHIFDSQTGYPVETELASLTIISDKSVDGEIWTTRLFGERPASILWQVESLEGIEVILIDKEGHLSCSSGIPTL

SEQ ID NO: 3428 - protein, 90 aa, Streptococcus pneumoniae
IYLTSIPFTVSVYKGGTIISAFFIKNNSPFILFSSLMNFMSIFLDFFQILFVKILTLWYSNNMKIKCKGFNLDNYLILQLIFYKRKELVA

SEQ ID NO: 3429 - protein, 459 aa, Streptococcus pneumoniae
MSKIVVVGANHAGTACINTMLDNFGNENEIVVFDQNSNISFLGCGMALWIGEQIDGAEGLFYSDKDKLEAKGAKVYMNSPVLSIDYDNKVVTAEVEGKEHKESYEKLIFATGSTPILPPIEGVEIVKGNREFKATLENVQFVKLYQNAEEVINKLSDKSQHLDRIAVVGGGYIGVELAEAFERLGKEVVLVDIVDTVLNGYYDKDFTQMMAKNLEDHNIRLALGQTVKAIEGDGKVERLITDKESFDVDMVILAVGFRPNTALADGKIELFRNGAFLVDKKQETSIPGVYAVGDCATVYDNARKDTSYIALASNAVRTGIVGAYNACGHELEGIGVQGSNGISIYGLHMVSTGLTLEKAKAAGYNATETGFNDLQKPEFMKHDNHEVAIKIVFDKDSREILGAQMVSHDIAISMGIHMFSLAIQEHVTIDKLALTDLFFLPHFNKPYNYITMAALTAEK

SEQ ID NO: 3430 - protein, 297 aa, Streptococcus pneumoniae
MMRIKQMTENRYELNKNLAQMLKGGVIMDVQNPEQARIAEAAGAAAVMALERIPADIRAAGGVSRMSDPKMIKEIQEAVSIPVMAKVRIGHFVEAQILEAIEIDYIDESEVLSPADDRFHVDKKEFQVPFVCGAKDLGEALRRIAEGASMIRTKGEPGTGDIVQAVRHMRMMNQEIRRIQNLREDELYVAAKDLQVPVELVQYVHEHGKLPVVNFAAGGVATPADAALMMQLGAEGVFVGSGIFKSGDPVKRASAIVKAVTNFRNPQILAQISEDLGEAMVGINENEIQILMAERGK

SEQ ID NO: 3431 - protein, 77 aa, Streptococcus pneumoniae
MPDSDLSHYWNTNRFLDFLNHLWVAHAGNSSSCTNISRNSFQGHHSCRTSSFCDTSLFRILHIHNNTTLEHLCQVFI

SEQ ID NO: 3432 - protein, 62 aa, Streptococcus pneumoniae
RTAWTISPVPGSPLVRIMEAPSAIRRKASPKSLAPQTKGTWNSFLSTWKRSSAGDRTSLSSI

SEQ ID NO: 3433 - protein, 51 aa, Streptococcus pneumoniae
MALARLTGSPDLKIPEPTKTPSAPNCIINAASAGVATPPAAKFTTGNFPCS

SEQ ID NO: 3434 - protein, 193 aa, Streptococcus pneumoniae
MKIGILALQGAFAEHAKVLDQLGVESVELRNLDDFQQDQSDLSGLILPGGESTTMGKLLRDQNMLLPIREAILSGLPVFGTCAGLILLAKEITSQKESHLGTMDMVVERNAYGRQLGSFYTEAECKGVGKIPMTFIRGPIISSVGEGVEILATVNNQIVAAQEKNMLVSSFHPELTDDVRLHQYFINMCKEKS

SEQ ID NO: 3435 - protein, 215 aa, Streptococcus pneumoniae
MNTSLKLSKQLSFGEEIANSVTHAVGAVIMLILLPISSIYSYEAHGFLSSIGVSIFVISLFLMFLSSTIYHSMAYGSTHKYVLRIIDHSMIYVAIAGSYTPVVLTLMNNWFGYLIIVIHWGTTIFGTLYKIFAINVNDKFSLALYLIMGWLVLAIIPAIINQTTPVFWSLMVTGGLCYTVGAGFYAKKKPYFHMIWHLFILAASVLQYIAIVYYM

SEQ ID NO: 3436 - protein, 150 aa, Streptococcus pneumoniae
LKMKTTFSYPKWAEIPNIDLYLDQVLLYVNQVCAPISPNKDKGLTASMVNNYVKNGYLTKPDKKKYQRQQIARLIAITTLKSVFSIQEIAQTLNTLQTQASSDQLYDAFVDYMNQGIDPANPIIQTSCQTVKLYHQTLDLIDHTQEEVIQ

SEQ ID NO: 3437 - protein, 164 aa, Streptococcus pneumoniae
MEIRLAFPNEVDAIMQVMEDAKKCLADAGSDQWQNGYPNADVIIDDIISGQAYVALEEGELLAYAAVTKSPEEAYEAIYEGNWQAGESEYLVFHRIAVAADVQGKGVAQTFLEGLIEGFDYLDFRSDTHAENKVMQHIFEKLGFKQVGKVPVDGERLAYQKLKK

SEQ ID NO: 3438 - protein, 176 aa, Streptococcus pneumoniae
MQKKYVKILYSSPIGILSLVADDHYLYGIWVQEQKHFERGLGDETIEEVVSHPILDPVIACLDDYFKGKPQDLSNLLLAPIGTNFEKRVWDYLQGIPYGQTVTYGQIAQDLQVASAQAIGGAVGRNPWSILVPCHRVLGAGKRLTGYAAGVEKKAWLLEHEGVDFKDRNNRRRSTC

SEQ ID NO: 3439 - protein, 118 aa, Streptococcus pneumoniae
MLEFIEYPKCSTCKKAKQELNQLGVDYKAVHIVEETPSQEVILNWLETSGFELKQFFNTSGIKYRELGLKDKVGSLSNQEAAELLASDGMLLKRPILVENGTVKQIGYRKSYEELGLK

SEQ ID NO: 3440 - protein, 125 aa, Streptococcus pneumoniae
MSCTKIGVPFKKLTKKACKGYKILTRLIFTMAKRSAKTKPKRAPPIVNIIVVGSCWTILGIPSKTERRLNSLPSGINCIKFWYQSDAKIVVTFIKTSSSDNDSFYHASAVNEIICYGQIQTLSTY

SEQ ID NO: 3441 - protein, 266 aa, Streptococcus pneumoniae
MNVTTILASDWYQNLMQLIPDGKLFSLRSVFDGIPRIVQQLPTTIMLTIGGALFGLVLALLFAIVKINRVKILYPLQAFFVSFLKGTPILVQLMLTYYGIPLALKALNQQWGTGLNINAIPAAAFAIVAFAFNEAAYASETIRAAILSVNPGEIEAARSLGMTRAQVYRRVIIPNAAVVATPTLINSLIGLTKGTSLAFSAGVVEVFAQAQILGGADYRYFERFISVALVYWVVNIGIESLGRFIERKMAISAPDTVQTDVKGDLR

SEQ ID NO: 3442 - protein, 247 aa, Streptococcus pneumoniae
MIKISNLSKSFSGQTVLDHLNLDIQKGEVVALIGSSGAGKSTFLRSLNYLETPDSGSIQIDGFSVDFSKITQEEILALRCKLSMVFQQFNLFERRTALDNVKEGLVVVKKLSDQEATKIAKEELAKVGLSDRENHYPRHLSGGQKQRVALARALAMKPDVLLLDEPTSALDPELVGEVEKSIADAAKSGQTMILVSHDMSFVAQVADKILFLDKGKIIESGTPDEIIHTPKEERTKEFFASYKRTYI

SEQ ID NO: 3443 - protein, 78 aa, Streptococcus pneumoniae
MREIMLLQLFSLYFESLILTTILVLIFLGIWIGLRAMSGVDKTAKARQAHLYDMIMIGVLVVPVLSFAVMSLILVFKA

SEQ ID NO: 3444 - protein, 73 aa, Streptococcus pneumoniae
IASSSIQGRSHPCRSSTDNNSIEHIDSFFLVVTIFILTLSCQSRKDYALKTRIKLITAKDNTGTTKTPIIIIS

SEQ ID NO: 3445 - protein, 265 aa, Streptococcus pneumoniae
MNNTSDIENYPGYANISGPELAEKMFEPLENLGVEHIYGYVENVEDHGDFKKVMTDDQTYETRTVIVATGSKHRPLGVPGEEELNSRGVSYCAVCDGAFFRDQDLLVVGGGDSAVEEALFLTRFAKTVTIVHRRDQLRAQKVLQDRAFANEKISFIWDSVVREIKGENRVESVVFENVKTGQVTEQVFGGVFIYVGLDPLSDFVKELNIQDQAGWIVTDNHMKTAVDGIFAVGDVRLKDLRQVTTAVGDGAIAGQEAYKFITEHS

SEQ ID NO: 3446 - protein, 253 aa, Streptococcus pneumoniae
LQDGVLCYNRDMKTNDIVYGVHAVTEALLANTGNKLYLQEDLRGKNVEKVKELATEKKVSISWTSKKSLSEMTEGAVHQGFVLRVSEFAYSELDYILAKTRQEENPLLLILDGLTDPHNLGSILRTADATNVSGVIIPKHRAVGVTPVVAKTATGAIEHVPIARVTNLNQTLYKLKDEGFWTFGTDMNGTPCHKWNTKGKIALIIGNEGKGISSNIKKQVDEMITIPMNGHVQSLNASVAAAILMYEVFRNRL

SEQ ID NO: 3447 - protein, 203 aa, Streptococcus pneumoniae
MSAIERITKAAHLIDMNDIIREGNPTLRAIAEEVTFPLSDQEIILGEKMMQFLKHSQDPVMAEKMGLRGGVGLAAPQLDISKRIIAVLVPNIVEEGETPQEAYDLEAIMYNPKIVSHSVQDAALGEGEGCLSVDRNVPGYVVRHARVTVDYFDKDGEKHRIKLKGYNSIVVQHEIDHINGIMFYDRINEKDPFAVKDGLLILE

SEQ ID NO: 3448 - protein, 83 aa, Streptococcus pneumoniae
VKEILICDIIKRKGLHKKVGRTKTTKKTKSKSGWFSFSFYEGLGKLFRSYRKWSNKGFVAILLLAVGLSMGLVLLFESFQGIP

SEQ ID NO: 3449 - protein, 160 aa, Streptococcus pneumoniae
VLDLAHNHILDSQIEGVISTADIIEKAGITPIGVYTHEPRDQAPLVIKEVNAIKVALLAYSYGFNGIEQYIFQEDYNRYLSDLNEDKIKAEVERAEKEADITIIMPQMGVEYRLEPTEEQKALYHKMIDWGADIIFGGHPHVVEPSETVEKDGDKKLIIY

SEQ ID NO: 3450 - protein, 125 aa, Streptococcus pneumoniae
MSFSCSDSCFSILLLDGDIHENTTFSPLSILFISHRFNPLIGNEVPHLIDNEFLISIFFNRFRWFNNVRMPSKDNIRSPIDHLVIKSFLFFSWFQSILNTHLRHDNGDICFLLCPFNFSLYLIFV

SEQ ID NO: 3451 - protein, 275 aa, Streptococcus pneumoniae
MMIKVIATDMDGTLLDARGQLDLPRLEKILDQLDQRGIRFVIATGNEIHRMRQLLSPLVDRVVLVVANGARIFENNELIQAQTWDDAIVNKALAHFKGRACQNQFVVTGMKGDFVKEGTIFTDLESFMTPEMIEKFYQRMQFVDELTSDLFGGVLKMSMVVGEERLSSVLEEINALFDGRVRAVSSGYGCIDILQAGIHKAWGLEELLKRWDLKSQEIMAFGDSENDVEMLEMAGIAYAMENADEKAKAVATALAPANSQGGVYQVLENWLEKGE

SEQ ID NO: 3452 - protein, 211 aa, Streptococcus pneumoniae
VVVQLLENWLLKEQEKIQTKYRHLNHISVVEPNILFIGDSIVEYYPLQELFGTSKTIVNRGIRGYQTGLLLENLDAHLYGGAVDKIFLLIGTNDIGKDVPVNEVLNNLEAIIQSVARDYPLTEIKLLSILPVNEGEKYQQAVYIRSNEKIQNWNQAYQELASAYMQVEFVPVFDCLTDQAGQLKKEYTTDGLHLSIAGYQALSKSLKDYLY

SEQ ID NO: 3453 - protein, 241 aa, Streptococcus pneumoniae
MNVNQIVRIIPTLKANNRKLNETFYIETLGMKALLEESAFLSLGDQTGLEKLVLEEAPSMRTRKVEGRKKLARLIVKVENPLEIEGILSKTDSIHRLYKGQNGYAFEIFSPEDDLILIHAEDDIASLVEVGEKPEFQTDLASISLSKFEISMELHLPTDIESFLESSEIGASLDFIPAQGQDLTVDNTVTWDLSMLKFLVNELDIASLRQKFESTEYFIPKSEKFFLCKDRNNVELWFEEV

SEQ ID NO: 3454 - protein, 311 aa, Streptococcus pneumoniae
MKWTKIIKKIEEQIEAGIYPGASFAYFKDNQWTEFYLGQSDPEHGLQTEAGLVYDLASVSKVVGVGTVCTFLWEIGQLDIDRLVIDFLPESDYPDITIRQLLTHATDLDPFIPNRDLLTAPELKEAMFHLNRRSQPAFLYSDVHFLLLGFILERIFNQDLDVILKDQVWKPWGMTETKFGPVELAVPTVRGVEAGIVHDPKARLLGRHAGSAGLFSTIKDLQIFLEHYLADDFARDLNQNFSPLDDKERSLAWNLEGDWLDHTGYTGTFIMWNRQKQEATIFLSNRTYEKDERAQWILDRNQVMNLIRKEE

SEQ ID NO: 3455 - protein, 298 aa, Streptococcus pneumoniae
MSNSLKGTLLTVVAGIAWGVSGTSGQYLMAHGISALVLTNLRLLIAGGILMILAYATAKDKILVFLKDRKSLLSLLIFALIGLFLNQFAYLSAIQETNAGTATVLQYVCPVGILIYSCIKDRVAPTLGEIVSIIFAIGGTFLIATHGQLDQLSMTPAGLFWGLFSALTYALYIILPIALIKKWGSSLVIGVGMVIAGLVALPFTGVLQANIPTSLDFLLAFAGIILIGTVFAYTAFLKGASLIGPVKSSLLASIEPISAVFFAFLIMNEQFYPIDFLGMAMILFAVTLISLKDLFLEK

SEQ ID NO: 3456 - protein, 232 aa, Streptococcus pneumoniae
MLPAYMKIHDQIKKDIDEHRWAIGERLPSERDLAEQFAVSRMTLRQAVSLLVEEGVLERRVGSGTFVSSTRVQEKMRGTTSFTEIVKSQGKVPSSQLISYKKTIPNEQEVAKLGIFPTDNIIRMERVRYADQVPLVYEVASIPEKFIKDFKKEEITSHFFQTLQKHGYRIGKSQQTIYARLAKEKIAHYLEVEKGHAILGLTQVSYLEDGTAFEYVKSQYVGERFEFYLENN

SEQ ID NO: 3457 - protein, 520 aa, Streptococcus pneumoniae
MSNISTDLQDVEKIIVLDYGSQYNQLISRRIREIGVFSELKSHKISAAEVREVNPVGIILSGGPNSVYEDGSFDIDPEIFELGIPILGICYGMQLLTHKLGGKVVPAGDAGNREYGQSTLTHTPSALFESTPDEQTVLMSHGDAVTEIPADFVRTGTSADCPYAAIENPDKHIYGIQFHPEVRHSVYGNDILRNFALNICKAKGDWSMDNFIDMQIKKIRETVGDKRVLLGLSGGVDSSVVGVLLQKAIGDQLICIFVDHGLLRKGEADQVMDMLGGKFGLNIVKADAAKRFLDKLAGVSDPEQKRKIIGNEFVYVFDDEASKLKDVKFLAQGTLYTDVIESGTDTAQTIKSHHNVGGLPEDMQFELIEPLNTLYKDEVRALGTELGMPDHIVWRQPFPGPGLAIRVMGEITEEKLETVRESDAILREEIAKAGLDRDIWQYFTVNTGVRSVGVMGDGRTYDYTIAIRAITSIDGMTADFAKIPWEVLQKISVRIVNEVDHVNRIVYDITSKPPATVEWE

SEQ ID NO: 3458 - protein, 61 aa, Streptococcus pneumoniae
MPQPIVPVEIPQSRLFDSKKRNDILLKIRIGKLEVSFFQSLNLEMVEQLLDKVLLYDNSSI

SEQ ID NO: 3459 - protein, 95 aa, Streptococcus pneumoniae
MTIHLSSLGQVYLVCGKTDMRQGIDSLAYLVKTHFELDPFSGQVFLFCGGRKDRFKALYWDGQGFWLLYKRFENGRLTWLSTEKDVKALAPEQVD

SEQ ID NO: 3460 - protein, 64 aa, Streptococcus pneumoniae
LKIIQQQSATIDSLTNELALLREQVAYLTQKLYGKSSEKSVCPSGQLNLFEEESPSEEDGDVPS

SEQ ID NO: 3461 - protein, 129 aa, Streptococcus pneumoniae
MENPLRKVFAPLDNSTFLRKSLHLRKMEMFPVETEEITYKRKKSKGKRQALLAQFDSEEVHHQVEERICPDCQGDLKEIGGSLQGQELVFIPAQLKRIDHIQHAYKCQACSDKNPSDKIVKAPIPKAPL

SEQ ID NO: 3462 - protein, 142 aa, Streptococcus pneumoniae
LVLISLAHSFGSVSIIAHTIHQKFNLKVPNYRQEEDWARMGLPITRKEISNWHIKASQYYLESLYNLLREKLLEQPLLHADETSYRVLESDSHLTYYWTFLSGKAENQAITLYHHDQRRSGLVVQEFLGDYSGYVHCDMLRQ

SEQ ID NO: 3463 - protein, 149 aa, Streptococcus pneumoniae
LVNCEPLEAYRQLEEAALVGCWAHVRRKFFEATPKQADKSSLGAKGLAYCDQLFSLERDWEALPADERLQKRQEELQPLIEDFFAWCRRQSVLAGSKLGRAIEYSLKYEETFKTILKDGHLVLSNNLAECAIKSLVMGRSKRVQWTLLA

SEQ ID NO: 3464 - protein, 77 aa, Streptococcus pneumoniae
PKLSLKKRGWLFSQSFEGAKARAIIMSLLETAKRHQLNSEKYLSYLLECLPNEETLVNKEVLEAYLPWTKVVQEKCK

SEQ ID NO: 3465 - protein, 454 aa, Streptococcus pneumoniae
MVEIKNLSLDYGEEHILDDISLSIAEGECVLFTGKSGNGKSSLINSINGLAVRYDNAKTKGEIIIDGKNIKNLELYQISMLVSTVFQNPKTYFFNVNTTLELLFYLENIGLAREEMDRRLKDILEIFPIKNLLNRNIFNLSGGEKQILCIAASYIAGTKIIVMDEPSSNLDIKSISVLAKMLKILKEKGISIIVAEHRIYYLMDIVDRVFLIDKGKLKKTYTRSEFLKLDKNELNALSLRDKELSKLKVPYLKEGGEYQIKNLSYKFTDDECLSLKDISFKLGKIYGIIGSNGRGKSTLLRCLIGLEKKSKEEIYFKGEKLSKKERLKNSSLVMQDVNHQLFTDEVFNELRLGVKNFDEEKAKIILKDLCLDEFIERHPMSLSGGQKQRLAIASVMCKNSPFVFFDEPSSGMDYSNMIKISELINKYKTMDKIIFIVSHDIEFLNEVADEIFEL

SEQ ID NO: 3466 - protein, 73 aa, Streptococcus pneumoniae
SIPLEGSSKKTNGEFLHITDAIASLCFCPPDKLIGCLSINSSRHKSFKMIFAFSSSKFFTPNLSSLNTSSVNN

SEQ ID NO: 3467 - protein, 231 aa, Streptococcus pneumoniae
MPTFSSNAPFNPNPISKILVVFITGLTVMHSINIRFELAIVCLIGILLYLNGYKKTLFKWIILCGILYSLPNFMVLSELNPIVKMFLSIPIVIRMFILPFMAASFMIKTSDVGAIISSMDKLKISKNVSIPIAVMFRFFPSFKEEKKNIKMAMRVRGINFKNPVKYLEYVSVPLLIISSNISDDIAKAAETKAIENPIAKTRYIRVKIQLIDFVYVLAVAGLIVGGLIWLK

SEQ ID NO: 3468 - protein, 194 aa, Streptococcus pneumoniae
MDNKKLKVKDLVSIGVFGVIYFAFMFGVGMMGLIPILFLIYPTVLAIVAGTVVMLFMAKVQKPWALFIFGMISPLVMFAAGHTYVVVVLSLIVMIIAELIRKIGNYNSFKYNMLSYAIFSTWICSSLMQMLLAKEKYMEWSLMTMGKDYVDVLEKLITYPHMALVALGAFLGGILGAYIGKALLKKHFEKAGIV

SEQ ID NO: 3469 - protein, 581 aa, Streptococcus pneumoniae
LRMNGGFQMKEFYKKRFALTDGGARNLSKATLASFFVYCINMLPAILLMIFAQEVLENMGKSNGFYIVFSVLILIAMYILLSIEYDKLYNTTYQESADLRIRTAENLSKLPLSYFSKHDISDISQTIMADIEGIEHAMSHSIPKVGGMVLFFPLISVMMLAGNVKMGLAVIIPSILSFIFIPLSKKYQVNGQNRYYDVLRKNSESFQENIEMQMEIKAYNLSKDIKDDLYKKMEDSEKVHLKAEVTTILTLSISSIFSFISLAVVIFVGVNLIINKEINSLYLIGYLLAAMKIKDSLDASKEGLMEIFYLSPKIERLKEIQNQDLQEGDDYSLKKFDIDLKDVEFAYNKDEKVLNGVSFKAKQGEVTALVGASGCGKTTILKLISRLYDYDKGQILIDGKDIKEISTESLFDKVSIVFQDVVLFNQSVMENIRIGKQDASDEEVKRAAKLANCTDFIEKMDKGFDTVIGENGAELSGGERQRLSIARAFLKDAPILILDEITASLDVNNEKKIQESLNNLVKDKTVVIISHRMKSIENADKIVVLQNGRVESEGKHEELLQKSKIYKNLIEKTKMAEEFIY

SEQ ID NO: 3470 - protein, 586 aa, Streptococcus pneumoniae
MLMKIYKKLFAYVQDKKYLGVLAIIFSAISAALTVYGYYLIYKFLDKLIINSNLSGAESIALKSVITLTSGAIFYFVSGMFSHILGFRLETNLRKRGIDGLEKASFRFFDLNPSGQIRKIIDDNAAQTHQVVAHMIPDSSQAIITPVLVLALGFIVSIRVGIILLALTIIGGLILGAMMGEQEFMKIYQESLSKLSAETVEYVRGMQVVKIFKANVESFKSFYKAIKDYSKYAYDYSLSCKRPYVLYQWLFFGLIAILIIPIVYFMTSLASAKVILLELIMILFLSGVLFVSFMRMMWYSMYISQGNYAVDTLEALYEDMQKDKLVHGNVNNFKNYNIEFENVSFAYNDKAVIENLSFNLEEGKSYALVGSSGSGKSTVAKLISGFYNVNKGSIKIGGIAISEYSDEALIKAISFVFQDSKLFKKSIYDNVALANKDATKDDVMRALKLAGCDLILDKFPERENTIIGSKGVYLSGGEKQRIAIARAILKDSKIIIMDEASASIDPDNEFELQKAFKNLMKDKTVIMIAHRLSTIKDLDEIIVMDSGKIIERGSDKELMSKDTRYKSLQEMFNIANEWRVSNERVL

SEQ ID NO: 3471 - protein, 158 aa, Streptococcus pneumoniae
ILNCKMDAPAADFFFKAKANEWISIVIDTYLNRKKYKIEIDDDKALEDVARFLDDHFATNVNQGTLEKISKMSGTKLKNLFKEKYCQSITEYTQRKRMNVAETLLLNTELPIKEIAESVGYSSASKFSIYYKRYKGKLPSEVRNLACKHHNFKCDYCD

SEQ ID NO: 3472 - protein, 68 aa, Streptococcus pneumoniae
SSKNLATSSSALSSSISILYFFLFKYVSITILIHSFAFALKKKSAAGASILQFNISIATLSKAFVSII

SEQ ID NO: 3473 - protein, 396 aa, Streptococcus pneumoniae
MTVLKGDNLEILKTIESSSIDLIYMDPPFFTQKTQKLSNNKNIMYSFEDTWTSIEDYKEFLSVRLEECKRVLKNSGSIFVHCDKIANHHIRLILDNIFGADMFQSEIIWNYKRWSNSKKGLLNNHQNIYFYSKSKDFKFNTIFTEYSSTTNIDQILVERKRDGNSKTIYKVDNNGNYILAKEKNGVPLSDVWNIPFLNPKAKERVGYPTQKPILLLEQIIKIATDKNDIVLDPFCGSGTTLVASKILNRNYMGIDLSEEAINITQQRLENVIKTSSNLLNKGIEAYRTKTEEEENILKLLQAKIVQRNKGIDGFLPKHFQKKPIPIKIQKNNECLNESISLLQNAINSKKLDFGVVIKTHSDNLLFDFDTIPENIIVVDHFELTIEKWLSKSQQLL

SEQ ID NO: 3474 - protein, 62 aa, Streptococcus pneumoniae
MFYYPNRTQAIKIQQTLETLYNGIGGKYYGDSAWEHLRAVTGIDLLSILTDIANKKTGVKSK

SEQ ID NO: 3475 - protein, 60 aa, Streptococcus pneumoniae
MANDNKSHYLIYRVLGISFEEGENIDLYQNKGRFLYKYAGSFLEEAAVLSFNEKFGTENT

SEQ ID NO: 3476 - protein, 70 aa, Streptococcus pneumoniae
MNRDVANKLNNIFGKMRNSNITRTFRNNQYLKRKKLKEFIKPCYNRYSYNFIYNKRIEMTELERKNRKIS

SEQ ID NO: 3477 - protein, 428 aa, Streptococcus pneumoniae
MTKTLKRPEVLSPAGTLEKLKVAVQYGADAVFIGGQAYGLRSRAGNFTFEQMEEGVQFAAKYGAKVYVAANMVMHEGNEAGAGEWFRKLRDIGIAAVIVSDPALIMIAATEAPGLEIHLSTQASATNYETLEFWKELGLTRVVLAREVSMEELAEIRKRTDVEIEAFVHGAMCISYSGRCTLSNHMSMRDANRGGCSQSCRWKYDLYDMPFGKERKSLQGEIPEEFSMSAVDMSMIDHIPDMIENGVDSLKIEGRMKSIHYVSTVTNCYKAAVDAYLESPEKFEAIKQDLVDEMWKVAQRELATGFYYGIPSENEQLFGARRKIPEYKFVAEVVSYDDAVQTATIRQRNVINEGDQVEFYGPGFRHFETYIEDLHDAKGNKIDRAPNPMELLTIKVPQPVQSGDMVRALKEGLINFYKEDGTSVTVRA

SEQ ID NO: 3478 - protein, 242 aa, Streptococcus pneumoniae
SMRDANRGGCSQSCRWKYDLYDMPFGKERKSLQGEIPEEFSMSAVDMSMIDHIPDMIENGVDSLKIEGRMESIHYVLTVTNCYKAAVDAYLESPEKFEAIKQDLVDEMWKVAQRELATGFYYGTPSENEQLFGARRKIPEYKFVAEVVSYDDAAQTATIRQRNVINEGDQVEFYGPGFRHFETYIEDLHDAKGNKIDRAPNPMELLTIKVPQPVQSGDMVRALKEGLINLYKEDGTSVTVRA

SEQ ID NO: 3479 - protein, 240 aa, Streptococcus pneumoniae
LMKILVQNNQPTSGNIISSDNIGYLIEEPKLFLSKTGLENLKYLSNLYGVDYNQERFRSLIQELDLTQSINKKVKTYSLGTKQKLALLLTLVTKPDILILDEPTNGLDIESSQIVLAVLKKLALNENVGILISSHKLEDIEEICERVLFLESGLLTFQKVGKDSHNFLFEIAFSSATDRDIFITKQEFGDIVQEEGLRITMSGNIQSSELFKFFNENSIKVVDFETKKETLKDIYLNRSK

SEQ ID NO: 3480 - protein, 242 aa, Streptococcus pneumoniae
MKLNKLNFLKENIRNLYSSGVIYLSLLISFIPPILLTFFILKTQGTSLGIKHISNFYAMLGMLMAVIHANRVISRDFSHNTVSLFYNQQKNRMIYVLSNFLYAISVSIIYALNGIVLLVIVSKLGIPGDLGLDFIVAIVVNTILLVLFYFLLSYIFYLYKLKSGLVFGILVALLLFIPNILNTMMMNTSNDLFIKAIELLPFYSLPVFVASNTMSISQYLVLITTIILLYFFTLKKSKKYSF

SEQ ID NO: 3481 - protein, 79 aa, Streptococcus pneumoniae
MNIKIIRRTKVVKNLKLKLARVELDLTQGQLADAVGVTRQTIGLIEAGKYNPSLSLCQSICRCLGKTLDQLFWEEEDEK

SEQ ID NO: 3482 - protein, 162 aa, Streptococcus pneumoniae
MKNRFYYYQLLDEREEQLFNKAGSESFYICIALSLLSYIISVLAPSLFNSNMLLIVIIIGTFYFFNRARYLGVTYYSRFHFTILGCFFLTLAITALLMLQNYQFNIEIYQHNPLNFKYLSAWVITYVIYLPWVFIGNLGLKSYGEWAQKKFEQDMDELESGE

SEQ ID NO: 3483 - protein, 486 aa, Streptococcus pneumoniae
MYPDDSLTLHTDLYQINMMQVYFDQGIHNKKAVFEVYFRQQPFKNGYAVFAGLERIVNYLEDLRFSDSDIAYLESLGYHGAFLDYLRNFKLELTVRSAQEGDLVFANEPIVQVEGPLAQCQLVETALLNIVNYQTLVATKAARIRSVIEDEPLMEFGTRRAQEMDAAIWGTRAAVIGGANGTSNVRAGKLFDIPVLGTHAHALVQVYGNDYEAFKAYAATHKNCVFLVDTYDTLRIGVPAAIQVARELGDQINFMGVRIDSGDIAYISKKVRQQLDEAGFTEAKIYASNDLDENTILNLKMQKAKIDVWGVGTKLITAYDQPALGAVYKIVAIEDETGQMRNTIKLSNNAEKVSTPGKKQVWRITSREKGKSEGDYITYDGVDISDMTEIKMFHPTYTYIKKTVRNFDAVPLLVDIFKEGILVYNLPSLTDIQDYARKEFDKLWDEYKRVLNPQHYPVDLARDVWQDKMDLIDKMRKEALGEGEEE

SEQ ID NO: 3484 - protein, 274 aa, Streptococcus pneumoniae
MSLQETIIQELGVKPVIDAQEEIRRSIDFLKRYLKKHPFLKTFVLGISGGQDSTLAGRLAQLAMEELRAETGDDSYKFIAVRLPYGVQADEADAQKALAFIQPDVSLVVNIKESADAMTAAVEATGSPVSDFNKGNIKARCRMIAQYALAGSHSGAVIGTDHAAENITGFFTKFGDGGADILPLYRLNKRQGKQLLQKLGAEPALYEKIPTADLEEDKPGLADEVALGVTYAEIDDYLEGKTISPETQATIENWWHKGQHKRHLPITVFDDFWE

SEQ ID NO: 3485 - protein, 65 aa, Streptococcus pneumoniae
KAKQSAQKLKRPLKTGGTKANTNATYPSPYLMTFGSKKVRGTFLASCPEIKKQEKPPLEVFSLSS

SEQ ID NO: 3486 - protein, 183 aa, Streptococcus pneumoniae
MKSIGTQILQTERLILRRFVESDAEAMFQNWASSAENLTYVTWNPHPDVEITRNSIRNWVASYTNLNYYKWAICLKENPEQVIGDISIVKIDEADLSCEIGYVLGKAYWGHGMMTEALKAVLDFCFTQAGFQKVRARYASLNPASGRVMEKAGMSYLQTIVNGVERKGYLADLIYYGISREEC

SEQ ID NO: 3487 - protein, 249 aa, Streptococcus pneumoniae
TRKDFWFCGNRANFIFRRNLNTSFVHAADGIQYVRDDTRDKEEGIEYDDADNGDIIVKVATKPKVVTKKISSTRIRYEKDETKDRSENPVTIDGEDGYVTTTRTYDVNPETGHVTEQVTVDRKEATDTVIKVPAKSKVEEVFVPFATKYEADNDLSAGQEQEITLGKNGKTVTTITYDVDGKSGQVTESTLSQKEDSQTRVVKKGTKPQVLVQEIPIETEYLDGPTLDKSQEVEEVGEIGKLLLLQSIL

SEQ ID NO: 3488 - protein, 129 aa, Streptococcus pneumoniae
MVKRRIRRGTREPEKVVVPEQSSIPSYPVSVTSNQGTDVAVEPAKAVAPTTGWKQENGMWYFYNTDGSMATGWVQVNGSWYYLNSNGSMKVNQWFQVGGKWYYVNASGELAVNTSIDGYRVNDNGEWVR

SEQ ID NO: 3489 - protein, 346 aa, Streptococcus pneumoniae
MNKYMNTADFDFHLPEELIAQTPLEKRDASKLLIVNRETGEMQDKHFHSIIDMLEPGDALVMNDTRVLPARLYGQKVETGGHVELLLLKNTSGDEWEVLAKPAKRLKVGTRISFGDGRLSAVVTEELTHGGRIVRFEYQGIFLEVLESLGEMPLPPYIHEKLDDRERYQTVYAKESGSAAAPTAGLHFTKELLAEIQAKGVHLVYLTLHVGLGTFRPVSVDNLDEHEMHSEFYQLSEEAAATLRSVKENGGRVIAVGTTSIRTLETIGSKFDGQIQADSGWTNIFIKPGYEWKVVDAFSTNFHLPKSTLVMLVSAFAGRELVLDAYHHAIQEHYRFFSFGDAMFIY

SEQ ID NO: 3490 - protein, 235 aa, Streptococcus pneumoniae
MKVIKVENQVQGGKVAFEILKEKLANGAQTLGLATGSSPLEFYKEIVESDLDFSNLTSVNLDEYVGLDGDNPQSYRYFMQENLFNQKPFKESFLPRGVKDNAEAEVERYNQILADHPVDLQILGIGRNGHIGFNEPGTPFDSQTHLVELDQSTIEANARFFAKIEDVPTQAISMGIKNILDAKSIILFAYGESKAEAIAGTVSGPVTENLPASSLQNHPDVTIIADAEALSLLEK

SEQ ID NO: 3491 - protein, 66 aa, Streptococcus pneumoniae
LNLKGVKKMSKTVVRKNESLDDALRRFKRAVTKAGTLQETRKREFYEKPSVKRKRKSEVARKRKKF

SEQ ID NO: 3492 - protein, 312 aa, Streptococcus pneumoniae
MMSVLVKEVIEKLRLDIVYGEPELLEKEINTADITRPGLEMTGYFDYYTPERIQLLGMKEWSYLISMPSNSRYEVLKKMFLPETPAVIVARGLVVPEEMLKAARECKIAILTSRAATSRLSGELSSYLDSRLAERTSVHGVLMDIYGMGVLIQGDSGIGKSETGLELVKRGHRLVADDRVDIFAKDEITLWGEPAEILKHLIEIRGVGIIDVMSLYGASAVKDSSQVQLAVYLENYDTHKTFDRLGNNAEELEVSGVAIPRIRIPVKTGRNISVVIEAAAMNYRAKEMGFDATGWFDDRLPSLIARNEVQNA

SEQ ID NO: 3493 - protein, 191 aa, Streptococcus pneumoniae
YKSQNLERILPIWNGGLPIYGGLKTGALVLYIFAARKLINTWDFLDIAAPSVMIAQSLGRWGNFFNQEAYGATVDNLDYLPGFIRDQMYIEGSYHQPTFLYESLWNLLGFALILIFRRKWKSLRRGHITAFYLIWYGFGRMVIEGMRTDSLMFFGLRVSQWLSVVFIGLGIMIVIYQNRKKAPYYITEEEN

SEQ ID NO: 3494 - protein, 127 aa, Streptococcus pneumoniae
MLEVAYILVALAVIVFLVYLIITVQKLGRVIDETEKTIKTLTSDVDVTLHHTNELLAKVNVLADDINVKVATIDPLFSAVADLSLSVSDLNDHARVLSKKASSAGSKTLKTGASLSALRLASKFFKK

SEQ ID NO: 3495 - protein, 109 aa, Streptococcus pneumoniae
LPLSLVKNKARAAPETVPKRIEDNLPIRILLFYFLKNLLARRRADRLAPVLSVFEPADEAFLLKTRAWSLRSETDRDKSATALKSGSIVATLTLISSAKTLTLANNSLV

SEQ ID NO: 3496 - protein, 129 aa, Streptococcus pneumoniae
MGKLSSILLGTVSGAALALFLTSDKGKQVCSQAQDFLDDLREDPEYAKEQVCEKLTEVKEQATDFVLKTKEQVESGEITVDSILAQAKSYAFQATEASKNQLNNLKEQWQEKAEALDDSEEIVIDITEE

SEQ ID NO: 3497 - protein, 376 aa, Streptococcus pneumoniae
MQKKPTSAYVHIPFCTQICYYCDFSKVFIKNQPVDSYLEHLLEEFRSYDIEKLSTLYIGGGTPTALSAPQLEVLLNGLTKNLDLSVLEELTIEANPGDLDADKIAVLKNSAVNRVSLGVQTFDDKMLKKIGRSHLEKDIYENIDRLKLAGFDNISIDLIYALPGQTMEQVKENVAKAIGLDIPHMSLYSLILENHTVFMNRMRRGKLPLPKEELEAEMFEYIIAELERAGFEHYEISNFSKPGFESRHNLMYWDNAEYYGIGAGASGYVNGVRYKNHGPIRHYLSAVEEGNACITEDHLSQKEQMEEEMFLGLRKKSGVSMARFEEKFGQSFAGLYGEIVRDLVQQGLMQIEGDHVRMTKRGLFLGDTVAERFILE

SEQ ID NO: 3498 - protein, 165 aa, Streptococcus pneumoniae
MILLQNKSFCYSISQKETSLCHANVVTLNLHEALLNQISDNFSIKSSKRLSKFFLKSRHGNPGFLAESQEHFFFHLLLLTQVIFCNTSIAFLNRTEIMTNGTMIFIAYSIDITRCPCTNTIVFSIVPVHEIMTTFKAGFGEIRNLIMLKTRSLQLCNDVLKHLRF

SEQ ID NO: 3499 - protein, 245 aa, Streptococcus pneumoniae
MGLTYQMKMKIPFDMADMNGHIKLPDVILLSLQVSGMQSIELGVSDKAILEEYNLVWIIVEYDIEVFRLPRFAEEITIETEALSYNRLFCYRRFTIYNEAEQELIHMMATFVLMDRDSRKVHVVEPEIVAPYQSDFDKKLIRGPKYESLEEPISKDYHVRFYDLDMNGHVNNSKYLDWIFEVMGADFLTHYIPKKINLKYVKEVRPGGVITSAVERTGLESKHEITSDGVINAQAIITWQEIKKA

SEQ ID NO: 3500 - protein, 202 aa, Streptococcus pneumoniae
LAQNFNIDTPLSTVYTATLATIDYMNDLGLEKTVYVVGEAGLKEAIKAAGYVEDKEKPAYVVVGLDWQVDYEKFATATLAIQKGAHFIGTNPDLNIPTERGLLPGAGSLITLLEVATRVKPVYIGKPNAIIMDKAVEHLGLEREELIMVGDNYLTDIRAGIDNGIPTLLVTTGFTKAEEVAGLPIAPTHVVSSIAEWDFDEN

SEQ ID NO: 3501 - protein, 216 aa, Streptococcus pneumoniae
MWFLALRSGILMKTKLIFWGSMLFLLSLSILLTIYLAWIFYPMEIQWLNLTNRVYLKPETIQYNFHILMNYLTNPFSQVLQMPDFRSSAAGLHHFAVVKNLFHLVQLVALVTLPSFYVFVNRIVKKDFLSLYRKSLLALVVLPVMIGLGGVLIGFDQFFTLFHQILFVGDDTWLFDPAKDPVIMILPETFFLHAFLLFFALYENFFGYLCLKSRRK

SEQ ID NO: 3502 - protein, 107 aa, Streptococcus pneumoniae
LTQLDLVNSLLTMVLNDIYIYIYICKLKTSFLSLPTTFQTQIAKEVFIEGKKEEEGMKKEGLWQNHNNRILGWIKKPGIISHKENLMEKSKELVKTNQNSPKSNHYR

SEQ ID NO: 3503 - protein, 133 aa, Streptococcus pneumoniae
MITLFLSPSCTSCRKAKAWLEKHKVPFVEHNIMTSPLTRKELQHILSLTENGTDDIISTRSKIFQKLNIDVESISVSELLHLIEQYPSLLRRPIIIDAKRMQIGFNEDEIRAFLPRSYRKQELKEARMRAGIS

SEQ ID NO: 3504 - protein, 92 aa, Streptococcus pneumoniae
MNKQYSYPLDLSWSTEELVSVLSFFNDVEAAYEGKVEAKKLLDSYKGFKAVVPSKSEEKRLGREFETVSGYSLYRAVQAAKEKGEGKISLGK

SEQ ID NO: 3505 - protein, 282 aa, Streptococcus pneumoniae
LKRLVAIHFTEQFRLPKKKGKERFLLESKFEFAKELVKKAGQYILDHMQEDLRVETKSSPTDLVTRLDKEVQELLVGEILSRYPEDKICAEEGCLRASVQEGKVWVIDPIDGTNNFVAQQEDFAVMMAYFENGQGQFGLIYDVVKGDCYHGGGEFPVCLNDRSLAPFKTKPLGDFLIAGNSGMLETNEWGLADLSRSVLGVRVYGSAAISFAKILSGRLLTYLTYLQPWDYAAASILGESLGYRVVTLFGEAPDFQTRQPVMMVPLEMQEEIQSYIYERKRT

SEQ ID NO: 3506 - protein, 112 aa, Streptococcus pneumoniae
MQFPEGFVEKYKEILGDEARDFLASFEEEAVSAFRVNPLQEEQLSFSDAITQTPWGHYGKVSGTSPDHATGLVYPQETAAQMVAQVAQPSPGMKVLDWLLHRGANQLNWQPI

SEQ ID NO: 3507 - protein, 304 aa, Streptococcus pneumoniae
LVENMERFGATNVVVTNESADRLVKVFKGYFDLIVLDAPCSGEGMFRKQPDAMDYWSLDYPSQCASLQREILWEDAVTMLAEGGHLVYSTCTWAPEENEEIVNWLLEEYDFDLLPVEHINGMVAGIDLPETARMYPHQFKGEGQFVAHLQFKGNNPAPKFKASKSNLSREQVALWQEFAQNHLKVNLPGILQTFGDQLYLLPELLPDLGKLKIARNGLHLGTFKKKRFEPSFALGLALKPSQVEQSVEIGQEAFVKYAAGEIVQLAESLPNGWYQVLVKGNGLGFAKVTGNVLKNYFPKGLRFK

SEQ ID NO: 3508 - protein, 75 aa, Streptococcus pneumoniae
AILLFPNLLFSYVDKISCLSLPPLSPIIVISCLFFPFLMQGKLLSLDDNPKARKVSQTSLLSQTSLQLKGKDSIL

SEQ ID NO: 3509 - protein, 55 aa, Streptococcus pneumoniae
LRRNLVRIHASTHKELLKKFTVFIIIFEEKNSEKKKKACSVSYRFLADGLFSRLC

SEQ ID NO: 3510 - protein, 77 aa, Streptococcus pneumoniae
LTVFPTWIVPNSSAATSTKGCKAVEPTAVMDSPRSIQLAQPTKQAVSQKAIRDRASFFLFFTVFLLENNYEYCEFFK

SEQ ID NO: 3511 - protein, 292 aa, Streptococcus pneumoniae
VKKRKKLALSLIAFWLTACLVGCASWIDRGESITAVGSTALQPLVEVAADEFGTIHVGKTVNVQGGGSGTGLSQVQSGAVDIGNSDVFAEEKDGIDASALVDHKVAVRGLALIVNKEVDVDNLTTEQLRQIFIGEVTNWKEVGGKDLPISVINRAAGSGSRATFDTVIMEGQSAMQSQEQDSNGAVKSIVSKSPGAISYLSLTYIDDSVKSMKLNGYDLSPENISSNNWPLWSYEHMYTLGQPNELAAEFLNFVLSDETQEGIVKGLKYIPIKEMKVEKDAAGTVTVLEGRQ

SEQ ID NO: 3512 - protein, 305 aa, Streptococcus pneumoniae
MNQEELAKKMLLPSKNSRLEKLGKGLTFACLSLIVILVAMILVFVAQKGLSTFFVNGVNIFDFLLGGTWNPSSKEFGALPMILGSFIVTILSALIATPFAIGAAVFMTEVSPKGAKILQPAIELLVGIPSVVYGFIGLQVVVPFVRSVFGGTGFGILSGISVLFVMILPTVTFMTTDSLRAVPRYYREASFAMGATRWQTIWRVILKAARSGIFTAVVFGMARAFGEALAIQMVVGNSAVIPTSLTTPAATLTSILTMGIGNTVMGTVNNNVLWSLALVLLLMSLVFNSVIKLITKERGKKNYAR

SEQ ID NO: 3513 - protein, 294 aa, Streptococcus pneumoniae
MRAKKLDKLATAVLYTIASIIVTILASLILYILVRGLPHISWSFLTGRSSAFQAGGGIGIQLYNSFFLLVITLIISVPLSMGAGIYLAEYAKKGPVTNFVRTCIEILSSLPSVVVGLFGYLIFVVQFEYGFSIISGALALTVFNLPQMTRNVEDSLKHVHHTQREAGLALGISRWETVVHVVIPEALPGIVTGVVLASGRIFGEAAALIYTAGQSAPALDWSNWNILSVTSPISIFRQAETLAVHIWKVNSEGTIPDGTIVSAGSAAVLLIFILIFNFGARKFGSYLHKKLTAA

SEQ ID NO: 3514 - protein, 267 aa, Streptococcus pneumoniae
MSTYNWDEKHILTFPEEKVALSTKDVHVYYGKNESIKGIDMQFERNKITALIGPSGSGKSTYLRSLNRMNDTIDIAKVTGQILYRGIDVNRPEINVYEMRKHIGMVFQRPNPFAKSIYRNITFAHERAGVKDKQVLDEIVETSLRQAALWDQVKDDLHKSALTLSGGQQQRLCIARAISVKPDILLMDEPASALDPIATMQLEETMFELKKNFTIIIVTHNMQQAARASDYTGFFYLGDLIEYDKTATIFQNAKLQSTNDYVSGHFG

SEQ ID NO: 3515 - protein, 252 aa, Streptococcus pneumoniae
MTDAILQVSDLSVYYNKKKALNSVSLSFQPKEITALIGPSGSGKSTLLKSLNRMGDLNPEVTTTGSVVYNGHNIYSPRTDTVELRKEIGMVFQQPNPFPMTIYENVVYGLRINGIKDKQVLDEAVEKALQGASIWDEVKDRLYDSAIGLSGGQQQRVCVARVLATSPKIILLDEPTSALDPISAGKIEETLYGLKDKYTMLLVTRSMQQASRISDKTGFFLDGDLIEFNDTKQMFLDPQHKETEDYITGKFG

SEQ ID NO: 3516 - protein, 217 aa, Streptococcus pneumoniae
MLRSQFEEDLEKLHNQFYAMGQEVLSQINRTVRAFVTHDRDLAKEVIEDDAEVNEYEVKLEKKSFEMIALQQPVSQDLRTVLTVLKAVSDVERMGDHAVAIAQATIRMKGEERIPAVEEEIKKMGREVKSVVEAALDLYLNGSVDDAYRVASMDEQINHYFETIRDLATEEIKKNPEAIVTGRDYFQVISYLERIGDYAKNICEWVVYFETGKIVEL

SEQ ID NO: 3517 - protein, 271 aa, Streptococcus pneumoniae
MKSKKWIFVLCNFLASFFLVACQSGSNGSQSAVEAIKQKGKLVVATSPDYAPFEFQSLVDGKNQVVGADIDMAQAIADELGVKLEISSMSFDNVLTSLQTGKADLAVAGISATDERKEVFDFSIPYYENKISFLVRKADVEKYKDLTSLESANIAAQKGTVPESMVKEQLPKAQLTSLTNMGEAVNELQAGKVDAVHMDEPVALSYAAKNAGLAVATVSLKMKDGDANAVALRKNSDDLKEVVDKVIQKLKDEGIYQSYLEKAASLTEVEE

SEQ ID NO: 3518 - protein, 423 aa, Streptococcus pneumoniae
MKKQSKYKEVVSYLKNGIESGRFPTGSRLPSIRQLSLDFHCSKDTIQRALLELRHEQYLYAKPQSGYYVLEQGQHQDLEIEVTDEHASAYDDFRLCVNETLIGRENYLFNYYDNQEGLEDLRQSIHKLLFEQALYCKANQLVLTSGTQQALFILSQISFPRQAKEILVEQPTYHRMNRLLIAQGLDYQTIERGIDGIDLEELEGHFKTGKIKFFYTIPRFHYPLGHSYSEQDKRSILNLAAKYDVYIVEDDYLGDLDSKKGQTFHYLDTEEHVIYIKSFSTSLFPALRITALILPNAIKEAFVAYKNILDYDSNLIMQKALSLYIDSQLFEKNRLARLTNHESYQKQIEERITKTPCPLPHYPLHDGLLLDLRQYPKIASLKHSQLGLDFFEEAYLSTCPYQFAKVSLDNLENVLNYLKAELE

SEQ ID NO: 3519 - protein, 56 aa, Streptococcus pneumoniae
LPLDVNERNVLDIAKKEKKGYNVTKSREVWNEETKQVQRGRFLSEKWYRVWTISDG

SEQ ID NO: 3520 - protein, 170 aa, Streptococcus pneumoniae
MDKNVQEPVKLFQYNTLGALMAGLYGGTMTVGELLEHGDLGLGTLDSIDGELIVLDGKAYQAKGSGDQPEIVEVSPDALIPYAAVVPHQAEVIFRQRFEMTDKELKERIESYYDGENLFRSIKIRGEFLHMHVRMIPKSTPDTKFADVATHQPEYSRDNVAGTIVGFLDA

SEQ ID NO: 3521 - protein, 66 aa, Streptococcus pneumoniae
VAGYHLHFISNDFTFGGHVMILFIKEGIIELGAVDQWDQRFPVQDRQYLFVKFNVAEMKKDIEKAE

SEQ ID NO: 3522 - protein, 242 aa, Streptococcus pneumoniae
MLLLLAFLIGSIWFAKKKYQINLAVLGLGAVAFFVSSQILEKLVHILILHPQKDGSIALLQDHPLIYIIYGLAMAAFFEETARLVFFKWLEKKRSLEKADALAYGLGHGGLELIFLGLTSLLNLYIVLSTVQTQNPQVMQLLSENMLKTIQSLSVWQIYLLGFERILALGFQLLLTVWVYQAVRQKKWIYLLAAYGLHAFFDLAPSLSQVGWLTNPVLVEVILALELVLVAYGTKEIFCKKS

SEQ ID NO: 3523 - protein, 301 aa, Streptococcus pneumoniae
MSVREKMLEILEGIDIRFKEPLHSYSYTKVGGEADYLVFPRNRFELARLVKFANQENIPWMVLGNASNIIVRDGGIRGFVILCDKLNNVSVDGYTIEAEAGANLIETTRIALRHSLTGFEFACGIPGSVGGAVFMNAGAYGGEIAHILQSCKVLTKDGEIETLSAKDLAFGYRHSAIQESGAVVLSVKFALAPGTHQVIKQEMDRLTHLRELKQPLEYPSCGSVFKRPVGHFAGQLISEAGLKGYRIGGVEVSEKHAGFMINVADGTAKDYEDLIQSVIEKVKEHSGITLEREVRILGESK

SEQ ID NO: 3524 - protein, 378 aa, Streptococcus pneumoniae
LKKPIIEFKNVSKVFEDSNTKVLKDINFELEEGKFYTLLGASGSGKSTILNIIAGLLDATTGDIMLDGVRINDIPTNKRDVHTVFQSYALFPHMNVFENVAFPLRLRKIDKKEIEQRVAEVLKMVQLEGYEKRSIRKLSGGQRQRVAIARAIINQPRVVLLDEPLSALDLKLRTDMQYELRELQQRLGITFVFVTHDQEEALAMSDWIFVMNDGEIVQSGTPVDIYDEPINHFVATFIGESNILPGSMIEDYLVEFNGKRFEAVDGGMKPNEPVEVVIRPEDLRITLPEEGKLQVKVDTQLFRGVHYEIIAYDELGNEWMIHSTRKAIVGEEIGLDFEPEDIHIMRLNETEEEFDARIEEYVEIEEQEAGLINAHSRS

SEQ ID NO: 3525 - protein, 108 aa, Streptococcus pneumoniae
MKKTSSKLFVVPYMLWIALFVLAPLVLIFGQSFFNIEGQFSLENYKSYFASQHLTYLINEFQLSALCRDCDLCDLSYQLSNSPLFDPSQAPSTLAHADYPSYLDQFAP

SEQ ID NO: 3526 - protein, 210 aa, Streptococcus pneumoniae
MSFNSVLYAGIVTFVTCLISYPTALFLTRLKHRQLWLMLIILPTWINLLLKAYAFIGIFGQNGSINQFLEFIGIGSQQLLFTDFSFIFVASYIELPFMILPIFNVLDDMDNNLINASYDLGATKWETFRHVIFPLSMNGVRSGVQSVFIPSLSLFMLTRLIGGNRVITLGTAIEQNFLTNDNYGMGSTIGVILILTMFITMWVTKERRER

SEQ ID NO: 3527 - protein, 257 aa, Streptococcus pneumoniae
MKKFANLYLGLVFLVLYLPIFYLIGYAFNAGDDMNSFTGFSWTHFETMFGDGRLMLILAQTFFLAFLSALIATIIGTFGAIYIYQSRKKYQEAFLSLNNILMVAPDVMIGASFLILFTQLKFSLGFLTVLSSHVAFSIPIVVLMVLPRLKEMNGDMIHAAYDLGASQFQMFKEIMLPYLTPSIITGYFMAFTYSLDDFAVTFFVTGNGFSTLSVEIYSRARKGISLEINALSALVFLFSIILVVGYYFISREKEEQA

SEQ ID NO: 3528 - protein, 225 aa, Streptococcus pneumoniae
MKKIYSFLAGIAAIILVLWGIATHLDSKINSRDSQKLVIYNWGDYIDPELLTQFTEETGIQVQYETFDSNEAMYTKIKQGGTTYDIAIPSEYMINKMKDEDLLVPLDYSKIEGIENIGPEFLNQSFDPGNKFSIPYFWGTLGIVYNETMVDEAPEHWDDLWKPEYKNSIMLFDGAREVLGLGLNSLGYSSTSKDLQQLEETVDKLYTLTPNIKAIVADEMKGYMI

SEQ ID NO: 3529 - protein, 124 aa, Streptococcus pneumoniae
VTFSGEASQMLEKNENLRYVVPTEASNLWCDNMVIPKTVKNQNSAYAFINFMLKPENALQNAEYVGYSTPNLPAKELLPEETKEDKAFYPDVETMKHLEVYEKFDHKWTGKYSDLFLQFKMYRK

SEQ ID NO: 3530 - protein, 79 aa, Streptococcus pneumoniae
MKMSTFFKKSFWPTFMIVNQTVILFHLKDGLDRQYLTTESIYWVIGTFIFGNILVAVFSNMKIWDKKKNGSKKKYILKK

SEQ ID NO: 3531 - protein, 72 aa, Streptococcus pneumoniae
LPSLDGSQHRHFSGLRQVKINSQLSYYNVFLSLRQLEMISVELDQFPTSLITFSGYIFSYCRFSFYPKFSYY

SEQ ID NO: 3532 - protein, 162 aa, Streptococcus pneumoniae
LMKIFLVKQKFRLGGERFAIKDDRGEIAYQVEGSFFKIPKTFTIYDAAGEQVSQISKEILTLLPRFEIQLRDGSSFVIRKKLTFWRDKYEFDNLGLRIEGNIWDLNFKLLDDRDQLIAEIKKELFHLTSTYTVTVLEDAYADLVISLCVAIDYVEMLESQSH

SEQ ID NO: 3533 - protein, 88 aa, Streptococcus pneumoniae
MKQLSSAQVRQMWLDFWATKGHSVKPSVSLVPVNDPTLLWINSGVATLKKYFDGTIIPENPRITNAQKAIRTNDIENVGQDCASPYHV

SEQ ID NO: 3534 - protein, 786 aa, Streptococcus pneumoniae
MFEMLGNFSIGDYFRDEAITWAYELLTSPEWFDFPAEKLYMTYYPDDKDSYNRWIEVGVDPSHLIPIEDNFWEIGAGPSGPDTEIFFDRGEAFDPENIGLRLLAEDIENDRYIEIWNIVLSQFNADPAVPRSEYKELPHKNIDTGAGLERLVAVIQGAKTNFETDLFMPIIREVEKLSGKVYDQDGDNMSFKVIADHIRSLSFAIGDGALPGNEGRGYVLRRLLRRASMHGQKLGINEPFLYKLVPTVGKIMESYYPEVLEKRDFIEKIVKSEEESFARTLHSGQHFAQGIVADLKEKGQSVIAGQDVFKLYDTYGFPVELTEEIAEEAGMTVDREGFEAAMKEQQERARASAVKGGSMGMQNETLQNITVESVFNYNASQLSSKLVAIVADNAEVGAVSEGTASLIFAETSFYAEMGGQVADYGQILDESGKVVATVTNVQKAPNGQALHTVEVLAPLALNQEYTLAIDSNRRHRVMKNHTATHLLHAALHNILGNHATQAGSLNEVEFLRFDFTHFQAVTAEELRAIEQQVNEKIWEALEVKTVETDIDTAKEMGAMALFGEKYGKEVRVVTIGDYSIELCGGTHVGNTSEIGLFKIVKEEGIGSGTRRILAVTGKEAFEAYREQEDALKAVAATLKAPQVKEVPHKVEGLQEQLRQLQKENAELKEKAAAAAAGDIFKDVKEVNGHRYIASQVSVSDAGALRTFADNWKQKDYSDLLVLVAAIGDKVNVLVASKTKDLHAGNLVKELAPIIDGRGGGKPDMAMAGGSNQAKIQELLDAVAGKL

SEQ ID NO: 3535 - protein, 484 aa, Streptococcus pneumoniae
MQNQTLMQYFEWYLPHDGQHWTRLAENAPHLAHLGISHVWMPPAFKATNEKDVGYGVYDLFDLGEFNQKGTVRTKYGFKEDYLQAIQALKAQGIQPMADVVLNHKAAADHREAFQVIEVDPVDRTVELGEPFTINGWTSFTFDGRQDTYNDFHWHWYHFTGTDYDAKRRKSGIYLIQGDNKGWANEELVDNENGNYDYLMYADLDFKHPEVIQNIYDWADWFMETTGVAGFRLDAVKHIDSFFMRNFIRDMKEKYGDDFYVFGEFWNPDKEANLDYLEKTEEHFDLVDVRLHQNLFEASQAGANYDLRGIFTDSLVELKPDKAVTFVDNHDTQRGQALESTVEEWFKPAAYALILLRQDGLPCVFYGDYYGISGQYAQEDFKEILDRLLAIRKDLAYGEQNDYFDHANCIGWVRSGAENQSPIAVLISNDQENSKSMFVGQEWTNQTFVDLLGNHQGQVTIDEEGYGQFPVSARSVSVWAVNTI

SEQ ID NO: 3536 - protein, 63 aa, Streptococcus pneumoniae
MTNQAHNLSIFNLQIEITQGLFITIQLTNILKFNHGTTPIFICIIYRYTSTLIQKNQYFILSS

SEQ ID NO: 3537 - protein, 249 aa, Streptococcus pneumoniae
MIEFQNVSKLYGDKEALSNLNLQIENGEIMGLIGHNGAGKSTTIKSLVSIISPSSGRILVDGQELSENRLAIKRKIGYVADSPDLFLRLTANEFWELIASSYDLSRSDLEASLARLLNVFDFAENRYQVIETLSHGMRQKVFVIGALLSDPDIWVLDEPLTGLDPQAAFDLKQMMNEHALKGKTVLFSTHVLEVAEQVCDRIAILTKGDFIYCGTVKDLRKDYPDQSLESIYLSLAGRKEEVADASQGH

SEQ ID NO: 3538 - protein, 544 aa, Streptococcus pneumoniae
MRLKVINKLVDINILYSSQEANLANLRKKQAKNPGKKVNVSARVLSSYIFSSLLMLICFSNIAFRFPFEEMPSFFSTMVAILLVLAFSTSFTAFYNVFYESKDLASYRPYAFKESEIIMAKGLSVLLPALTGIVPILAYFLVLYIRLAPSLWLGLPLMLLSLTLLFVSVTLVTVVAVHFLAQTRVFRKYQSIFSNVMIGIGVLIPLIFIFFLQSTFGSIVDKVRDIPFLLYPLHIFYKIAVEPFSTEALVGLLAWIGLTLFLLYLTKKKVLPRFYDVILLNSEEKVKKERRSKERISTTKKGFFRMVLRYHLTLLGQGTGVITVLFTSAFLPYLMMISLISKIRDSQIVPDIHPPYWLPLFFVGVFIAVVNNNITSLHSIALSLERENVDFLKSLPFDFARYVKVKFWIIFAVQSFLPVLTLLGLSLYLGLPIISMIYLLVVWIIASVILSCHHYFKDVKNLSTNWSSITDLVNRSNGIVAIVLLFIYSAILMALVIGSIFLVQSLSTILAISLGVGALILLLALAIFGYHYYLSRILAEIEKR

SEQ ID NO: 3539 - protein, 387 aa, Streptococcus pneumoniae
MNRIRVSKRVEKKLAKGLVLLEASDLENVNLKDQEVEVQGQEGNFLGTAYLSQQNKGLGWFVSKDKVAFNQAFFETLFRKAKEKRNAYYQDDLTTAFRLFNQEGDGFGGLTVDLYGDYAVFSWYNSYVYQIRQTISEAFRQVFPEVLGAYEKIRFKGLDYESAHVYGQEAPDFFTVLENGVLYQVFMNDGLMTGIFLDQHEVRGSLVDGLAMGKSLLNMFSYTAAFSVAAAMGGASQTTSVDLAKRSRELSQAHFQANGLSTDEHHFIVMDVFEYFKYAKRKDLTYDVIVLDPPSFARNKKQTFSVAKDYHKLISQSLEILNPGGIIIASTNAANVSRQKFTEQIDKGFAGRSYQILNKYGLPADFAYNKKDESSNYLKVISMKVSK

SEQ ID NO: 3540 - protein, 225 aa, Streptococcus pneumoniae
MKLIVSVMPRSLEEAQALDATRYLDADIIEWRADYLPKEAILQVAPAIFEKFAGRELVFTLRTRSEGGEIDLSPEEYIHLIKEVAQFYQPDYIDFEYYSYKDVFEEMLDFPNLVLSYHNFQETPENMMEILSELTILNPKLVKVAVMAHTEQDVLDLMNYTRGFKTLNPEQEYVTISMGKVGKVSRITADVTGSSWSFASLDEVSAPGQISLASMKKIREILDEA

SEQ ID NO: 3541 - protein, 284 aa, Streptococcus pneumoniae
MKLDGYTRLAAVVANPIKHSISPFIHNRAFEATATNGAYVAWEIEASDLVETVANIRRYQMFGINLSMPYKEQVIPYLDKLSDEARLIGAVNTVVNENGNLIGYNTDGKGFFKCLPSFTISGKKMTLLGAGGAAKSILAQAILDGVSQISVFVRSVSMEKTRPYLDKLQEQTGFKVDLCALEYVSELQARIAESDLLVNATSVGMDGQSSPVPENIVLPETLLVADIIYQPFETPFLKWARSQGNPAVNGLGMLLYQAAEAFQLWTGKEMPTEEIWQSLTEKYQ

SEQ ID NO: 3542 - protein, 355 aa, Streptococcus pneumoniae
MKIRIDIPHHPYDIQIEKGCMAQAGQWLRELWQPQKVVIVTDNHVASLYAEKVKLSLEDAGFQVAVFDFLEGEERKNLTTVQKVYEFLVKQGLTRSDGIVALGGGVVGDLAGFVASTYMRGIHFVQIPTSLTAQVDSSIGGKTGVNTPFAKNMVGTFAQPDGVLIDPLVLETLGKRELIEGMGEVIKYGLIEDPELWALLTGLNGSVESILEHAETLIEHSCQVKRKMVVEDELDNGIRLYLNFGHTIGHAIEATAGYGKVMHGEAVAMGMVQISKVAEEKGLMPAGITQSITEMCQKFGLPVDYENWEVDKLYQALTHDKKTRGNTLKLVLVSELGSAIIHPVSLEEMKDYLVK

SEQ ID NO: 3543 - protein, 388 aa, Streptococcus pneumoniae
MRYLTAGESHGPRLTAIIEGIPAGLPLTAEDINEDLRRRQGGYGRGGRMKIESDQVVFTSGVRHGKTTGAPITMDVINKDHQKWLDIMSAEDIEDRLKSKRKITHPRPGHADLVGGIKYRFDDLRNSLERSSARETTMRVAVGAVAKRLLAELDMEIANHVVVFGGKEIDVPENLTVAEIKQRAAQSEVSIVNQEREQEIKDYIDQIKRDGDTIGGVVETVVGGVPVGLGSYVQWDRKLDARLAQAVVSINAFKGVEFGLGFEAGYRKGSQVMDEILWSKEDGYTRRTNNLGGFEGGMTNGQPIVVRGVMKPIPTLYKPLMSVDIETHEPYKATVERSDPTALPAAGMVMEAVVATVLAQEILEKFSSDNLEELKEAVAKHRDYTKNY

SEQ ID NO: 3544 - protein, 367 aa, Streptococcus pneumoniae
MAKTIYIAGLGLIGASMALGIKRDHPDYEILGYNRSQASRDIALKEGMIDRATDDFASFAPLADVIILSLPIKQTIAFIKELANLDLREGVIISDAGSTKSTIVDAAEQYLAGKSVRFVGAHPMAGSHKTGAASADVNLFENAYYIFTPSSLTSQDTLKEMKDLLSGLHARFIEIDAKEHDRVTSQISHFPHILASSLMEQTAVYAQEHEMARRFAAGGFRDMTRIAESEPGMWTSILLSNSETILDRIEDFKERLEAIGQAISKGDEEQIWNFFNQAREQRQTMEIHKRGGVDSSYDLYVDVPDEEDVILRILELLRGTSLVNIHINEENREDIHGILQISFKNAQDLERAEHLITENTDYTVVIK

SEQ ID NO: 3545 - protein, 112 aa, Streptococcus pneumoniae
MSNIYDSANELSRGLRGLPEYKAVKAAKDAIAADAEASKIFTEYLAFQEEIQKLAQTGQMPDASFQAKMEGFGKQIQGNSLLSEFFTKQQQLAIYLSDIEKIVFEPVSELLK

SEQ ID NO: 3546 - protein, 427 aa, Streptococcus pneumoniae
MKLKTNIRHLHGSIRVPGDKSISHRSIIFGSLAEGETKVYDILRGEDVLSTMQVFRDLGVEIEDKDGVITIQGVGMAGLKAPQNALNMGNSGTSIRLISGVLAGADFEVEMFGDDSLSKRPMDRVTLPLKKMGVSISGQTERDLPPLRLKGTKNLRPIHYELPIASAQVKSALMFAALQAKGESVIIEKECTRNHTEDMLKQFGGHLSVDGKKIIVQGPQKLTGQKVVVPGDISSAAFWLVAGLIVPNSRLVLQNVGINETRTGIIDVIRAMGGKLEITEIDPVAKSATLIVESSDLKGTEICGALIPRLIDELPIIALLATQAQGVTVIKDAEELKVKETDRIQVVADALNSMGADITPTADGMIIKGKSALHGARVNTFGDHRIGMMTAIAALLVADGEVELDRAEAINTSYPSFFDDLESLIHG

SEQ ID NO: 3547 - protein, 158 aa, Streptococcus pneumoniae
MAKVLLGFMGAGKSTIARGLDTNYLDMDALIEKRLGMSIANFFAEKGEETFRQVESEVLADLLQTDQVVSTGGGVVISQRNRDLLKTNTDNIYLKADFETLYQRIAADKDNQRPLFLNNSKEELVAIFQERQAWYEEVASRVLDVTKLSPEEIIEELR

SEQ ID NO: 3548 - protein, 282 aa, Streptococcus pneumoniae
MKIAYLGPKGSFSHHVVQTAFPHEELQAFANITDVIKAYEQGLVDYSVVPVENSIEGSVHETLDYLFHQAHIQAVAEIVQPIHQQLMVVPGHTKIEKIFSHPQGLAQGKKFIDEQYPEAQIEVTASTAYAARFISEHPDQPFAAVAPRSSAEEYGLELIAEDIQEMEANFTRFWVLGAEKPSIPLQAQTEKMSLALTLPDNLPGALYKALSTFAWRGIDLTKIESRPLKTALGEYFFIIDVDYIDKDLVHFAQKELEAIGIQYKILGAYPIYPISDHGKERR

SEQ ID NO: 3549 - protein, 230 aa, Streptococcus pneumoniae
MSKENPLSHHEQLRYDYLLKNIHYLNEREKNEFAYLQEKLTLARGNSSSSLEQEREEQVDLPSYANRSRSQSKSQALSFPPKKKRRKLRLKRIFMVIFSLLVCVALAMVFMFLRGYQDASAKKTADARAAQVEVFNGQDTRDGVNILIMGTDGRIGQNSVETRTDSIMVLNVGGSDKKMKLVSFMRDNLVYIDGYSQVINGRKQTDNKLNVAYELGEQEGKKGQKCFAKS

SEQ ID NO: 3550 - protein, 199 aa, Streptococcus pneumoniae
MFRQVLKDNFDLDIKFYALVDFQAFATAIDTLFPDGVTIDAQFSTLNGRPLTEATVGDDLYATETESPTQTIKVGKQQMNGSTLLNYARFRDDDEADYGRTKRQQQVLTAILEQIKDPTKLFTGSEALGKVFAMTSTNVPYTFLLTNGLSVLDGAKNGIEKLTIPELGDWVDAYDVYGGLGLLVDQNKYQTKLAQMGLR

SEQ ID NO: 3551 - protein, 281 aa, Streptococcus pneumoniae
MNNMTDLKAIQARSLEMAEYFVAFCKEHDLLCYLCGGGAIGALRNKGFIPWDDDLDFFMPRKDYEKLAELWPRYADERYFLSKSYKDFVDRNLFITIRDKETTCIKPYQQDLDLPHGLALDVLPLDYYPKDPAERKKQVRWALIYSLFCAQTIPEKHGALMKWGSRILLGLTPKSLRYRIWKKAEKEMTKYDLADCDGITELCSGPGYMRNKYPITSFEDNLFLPFEGTKMPIPIGYDVYLRTAFGDYMTPPPADKQVPHHDVVIADMDKSYTEYKGEYGG

SEQ ID NO: 3552 - protein, 133 aa, Streptococcus pneumoniae
MRTCFGTDSYPLSKCSISRISISYFSGSRFETMVDRIFSAPPPREKDHIKNKIFFLATIFSLVFCIRLIHISDDNIMMRYLLVCWWRRHIIPKSSSEIDIIADWNRHLCSFKWQEKIVFKRCDWVLVSHVART

SEQ ID NO: 3553 - protein, 385 aa, Streptococcus pneumoniae
MMLSSLIWISLIQNTRENMVAKKKILFFMWSFSLGGGAEKILSTIVSNLDPEKYDIDILEMEHFDKGYESVPKHVRILKSLQDYRQTRWLRAFLWRMRIYFPRLARRLLVKDDYDVEVSFTIMNPPLLFSKRREVKKISWIHGSIEELLKDSSKRESHRSQLDAANTIVGISKKTSNSIKEVYPDYASKLQTIYNGYDFQTILEKSQEKIDIEIAPQSICTIGRIEENKGSDRVVEVIRLLHQEGKNYHLYFIGAGDMEEELKKRVKEYGIEDYVHFLGYQKNPYQYLSQTKVLLSMSKQEGFPGVYVEALSLGLPFISTDVGGAEELSQEGRFGQIIESNQEAAQAITNYMTSASNFDVDEASQFIQQFTITKQIEQVEKLLEE

SEQ ID NO: 3554 - protein, 328 aa, Streptococcus pneumoniae
METALISVIVPVYNVAQYLEKSIASIQKQTYQNLEIILVDDGATDESGRLCDSIAEQDDRVSVLHKKNEGLSQARNDGMKQAHGDYLIFIDSDDYIHPEMIQSLYEQLVQEDADVSSCGVMNVYANDESPQSANQDDYFVCDSQTFLKEYLIGEKIPGTICNKLIKRQIATDLSFPKGLIYEDAYYHFDLIKLAKKYVVNTKPYYYYFHRGDSITTKPYAEKDLAYIDIYQKFYNEVVKNYPDLKEVAFFRLAYAHFFILDKMLLDDQYKQFEAYSQIHRFLKGHAFAISRNPIFRKGRRISALALFINISLYRFLLLKNIEKSKKLH

SEQ ID NO: 3555 - protein, 477 aa, Streptococcus pneumoniae
VIDGKRLLFSLTIVSYALTLVSGVVYLFNNNNVSLLSTLLFLLVSSLIACWNDIKYYLIHFIFYLTIFVFLVSRPTIDYFRDGALDTYHPIAYRFAFIVVMVSILGLTTGGILARYFIARKKIKVANIGNSLKEVYIKRLRFVSLGVFLLTYPFYFIRLFERLLYRLQTSYYAYYANFESKLPYFTYILSTFTVYAMCMYLATKPKKLQATAVLVSFIAANTIHLAIGTRNPFILSILFAFVYYFMREQTEKGKWIGFKEKLAIFVGSPILMLAMGVLNYVRDNVQVSHTGFWDILLDFIYKQGTSFGVLARGFLFNSSLPYRDFRNFTFGPVLDYFARGSLGAIFGGKAFEHTTNSVELAIDSNSYAHNLSYLVLNKEYLKGHGIGSSYIMELYTDYGMIGVFLLSFLLGVLFIAMLQVAYRSRTILFALSLLILNNLFFMPRSSFSESFFNLFTMQFWGIVLVIIFVAKMLTKEN

SEQ ID NO: 3556 - protein, 150 aa, Streptococcus pneumoniae
MFEHYSVADLFANLYKKRKANILALIALFALIAVPFTIKAVRNKNTVKDTTSYSTYLIYKITPPKESAKTILNHQIGGYSDFYGKLIDGNLNGAYLFNDVEPSELKKIASELDTTETTLKNSTNDYWWKKLTVYYMIDDAWGWCENFDIK

SEQ ID NO: 3557 - protein, 201 aa, Streptococcus pneumoniae
VKILTSSKDANDLLEKKIDGLIEKFKHAYANVKIEKLETINSKELNANGETALGLNVKNLILRLVVIGVVCVILVVMGNVLVYLFNPTINRVGDFSQYQIDFVTEITTIANLADVLSYKNTGQELTIVSSNKAILDKLKQSQEALKGMHFVDLQDVSSLLERDTVLLVEEYGVTRYKKFEQSLQILRNLNRSILGVATFKL

SEQ ID NO: 3558 - protein, 98 aa, Streptococcus pneumoniae
GTRKSAISIPRSIKSSKDIVIFKVVSLICFIFIDSNLILSVLSIILDFYDFIKRKFLQTDRKSLQNRLLADFEDLIHQNTYNLKVATPRIERFKFLRI

SEQ ID NO: 3559 - protein, 184 aa, Streptococcus pneumoniae
MKMKQISDTTLKITISLEDLMDRGMEIADFLVPQEKTEEFFYAILDELEMPDSFLDTGMLSFRVTAKPDKVDVFVTNSKIDQNLDFEDLSDGPDMEELAQMSADEFIKTLEKSIADKTKDDIEAIQSLEQVEAKEEEQEQAEQEAESKKEPYIYYILSFAKLADLGAFCQDSDFLKWKLLNSTK

SEQ ID NO: 3560 - protein, 127 aa, Streptococcus pneumoniae
VQTRAYGPTAKLDMGLDDFQYPLKWSNNSARSFCRVQKFPFQKVTVLAKSSQVSQLSKRKDVVDVRFFLTLSFLFSLLLLFFLGFNLLKRLNGFDIILGFVCDAFFQGFDKFICRHLSQFFHIWPIR

SEQ ID NO: 3561 - protein, 70 aa, Streptococcus pneumoniae
METSELYKMNERYYLTILVDIENHPSPYPAWLLARMREFAQDSDISRSVLQEYGQVLMSRDAVLNLQKIG

SEQ ID NO: 3562 - protein, 428 aa, Streptococcus pneumoniae
MTVKIALLGFGTVASGVPFLLKENGGKINQSAHSDIKVAKVLVKDEDEKNRLLAAGNDFNFVTNVDDILSDQDITIVVELMGRIEPAKTFITRALEAGKHVVTANKDLLAVHGAELLEIAQANKVALYYEAAVAGGIPILRTLANSLASDKITRVLGVVNGTSNFMVTKMVEEGWSYDDALAEAQRLGFAESDPTNDVDGIDAAYKMVILSQFAFGMKIAFDDVAHKGIRNITPEDVAVAQELGYVVKLVGSIEETSSGIAAEVTPTFLPKAHPLASVNGVMNAVFVESIGIGESMYYGPGAGQKPTATSVVADIVRIVRRLNDGTIGKDFNEYSRDLVLANPEDVKANYYFSILAPDSKGQVLKLAEIFNAQDISFKQILQDGKEGDKARVVIITHKINKAQLENVSAELKKVSEFDLLNTFKVLGE

SEQ ID NO: 3563 - protein, 289 aa, Streptococcus pneumoniae
MKIIVPATSANIGPGFDSVGVAVTKYLQIEVCEERDEWLIEHQIGKWIPHDERNLLLKIALQIVPDLQPRRLKMTSDVPLARGLGSSSSVIVAGIELANQLGQLNLSDHEKLQLATKIEGHPDNVAPAIYGNLVIASSVEGQVSAIVADFPECDFLAYIPNYELRTRDSRSVLPKKLSYKEAVAASSIANVAVAALLAGDMVTAGQAIEGDLFHERYRQDLVREFAMIKQVTKENGAYATYLSGAGPTVMVLASHDKMPTIKAELEKQPFKGKLHDLRVDTQGVRVEAK

SEQ ID NO: 3564 - protein, 141 aa, Streptococcus pneumoniae
MKPSGQEFPHPIFYSLFCFYTDTLGINSQVMQFSFERLLFQFCLNCWHLVMRSQNHNCRPSTRKVGCIGPIFFGHLLNHRKFSYQVLTIALMEEVSLDCLPSGHHVSCQQGSNRYIGDRTCSNSFLIRQFFRQDTTAVAST

SEQ ID NO: 3565 - protein, 74 aa, Streptococcus pneumoniae
LILFENLFKPRQRHLTVYMLLTSSVLSATSKHCLELTSSVLSTTSKHCFEQPAASFLVCSLIFIEYKLLFTKRI

SEQ ID NO: 3566 - protein, 85 aa, Streptococcus pneumoniae
MAEIYLAGGCFWGLEEYFSRISGVLETSVGYANGQVETTNYQLIKETDHAETVQVIYDEKEVSLREILLYYFRVIDPLIYQSTRE

SEQ ID NO: 3567 - protein, 255 aa, Streptococcus pneumoniae
MRRKCHSERFYFIISELSILSSINQQGNDRGRQYRTGIYYQDEADLPAIYTVVQEQERMLGRKIAVEVEQLRHYILAEDYHQDYLRKNPSGYCHIDVTDADKPLIDAANYEKPSQEVLKASLSEESYRVTQEAATEAPFTNAYDQTFEEGIYVDITTGEPLFFAKDKFASGCGWPSFSRPISKELIHYYKDLSHGMERIEVRSRSGSAHLGHVFTDGPRELGGLRYCINSASLRFVAKDEMEKAGYGYLLPYLNK

SEQ ID NO: 3568 - protein, 102 aa, Streptococcus pneumoniae
MKHLLSYFKPYIKESILAPLFKLLEAVFELLVPMVIAGIVDQSLPQGDQGHLWMQIGLLLIFAVIGVLVALIAQFYSAKAAVGFAIGIDKRSLSSYSFLAQA

SEQ ID NO: 3569 - protein, 487 aa, Streptococcus pneumoniae
LTNDLYRHILSLPKHSRDRLTTSSLVTRLTSDTYQIQTGINQFLRLFLRAPIIVFGAIFMAYRISAELTFWFLVMVAILTIVIVGLSRLVNPLYSSLRKKTDQLVQETRQQLQGMRVIRAFGQEKRELQIFQTLNQVYARLQEKTGFWSSLLTPLTYLIVNGTLLVIIWQGYISIQGGVLSQGALIALINYLLQILVELVKLAMLINSLNQSYISVKRIEEVFVEAPEDIHSELEQKQATRDKVLQVQELTFTYPDAAQPSLRYISFDMTQGQILGIIGGTGSGKSSLVQLLLGLYPVDKGNIDLYQNGRSPLNLEQWRSWIAYVPQKVELFKGTIRSNLTLGFNQEVSDQELWQALEIAQAKDFVSEKEGLLDALVEAGGRNFSGGQKQRLSIARAVLRQAPFLILDDATSALDTITESKLLKAIRENFPNTSLILISQRTSTLQMADQILLLEKGELLAVGKHDDLMKSSQVYCEINASQHGKED

SEQ ID NO: 3570 - protein, 61 aa, Streptococcus pneumoniae
AIVPRKARKRRKGWLAKSTAKRLSVWFTVCRFILVLLSMLGCIDFTIDLAGFHQVIVLANS

SEQ ID NO: 3571 - protein, 583 aa, Streptococcus pneumoniae
MKRQTVNQTLKRLAVDLASHPFLLFLAFLGTIAQVGLSIYLPILIGQVIDQVLVAGSSPVFWQIFLQMLLVVIGNTLVQWANPLLYNRLIFSYTRDLRERIIHKLHRLPIAFVDRQGSGEMVSRVTTDIEQLAAGLTMIFNQFFIGVLMILVSILAMLQIHLLMTLLVLLLTPLSMVISRFIAKKSYHLFQKQTETRGIQTQLIEESLSQQTIIQSFNAQTEFIQRLREAHDNYSGYSQSAIFYSSTVNPSTRFVNALIYALLAGVGAYRIMMGSALTVGRLVTFLNYVQQYTKPFNDISSVLAELQSALACVERIYGVLDSPEVAETGKEVLTTSDQVKGAISFKHVSFGYHPEKILIKDLSIDIPAGSKVAIVGPTGAGKSTLINLLMRFYPISSGDILLDGQSIYDYTRVSLRQQFGMVLQETWLTQGTIHDNIAFGNPEASREQVIAAAKAANADFFIQQLPQGYDTKLENAGESLSVGQAQLLTIARVFLAIPKILILDEATSSIDTRTEVLVQDAFAKLMKGRTSFIIAHRLSTIQDADLILVLVDGDIVEYGNHQELMDRKGKYYQMQKAAAFSSE

SEQ ID NO: 3572 - protein, 85 aa, Streptococcus pneumoniae
VWLLISSVLSATSKQCFELTSSVLSATSKQCFELTSSVLSATSKQCFELTSSVLSTTSKLCFEQPTASFLVCSLIFIEYYSEQFF

SEQ ID NO: 3573 - protein, 128 aa, Streptococcus pneumoniae
MKIKEQTRKLAVGCSKHSFEVVDKTDEVSSKHCFEVADRTDEVSSKHCFEVADRTDEVSSKHCFEVADRTDEISNHTYGKVNLKWFEESTTCLLKKEPIMKVFQLVNIVTCDQDFHVYLDGILAVKGF

SEQ ID NO: 3574 - protein, 63 aa, Streptococcus pneumoniae
NTKKIKKGGGGGALFGPVFEERVLPLAEPGYFQGPLWYMLGAAGLKNPYLFLPKKTILKTLDS

SEQ ID NO: 3575 - protein, 73 aa, Streptococcus pneumoniae
ITENQKRENQTDSLLMYIISSFKNTHSHISVMNREDRIRTCDTLVPNQVLYQAELLPELNRKMHPRGVEPLTA

SEQ ID NO: 3576 - protein, 68 aa, Streptococcus pneumoniae
MGEEEMRNKMIIAVSLVVAGVMTYLMFSGLDEDFYHFPWKVFAGFGIMSWLVREGLKLVRDVKKEFEE

SEQ ID NO: 3577 - protein, 64 aa, Streptococcus pneumoniae
MKRGIIYFFIGLSLLVWLVEMFTDWFDQALLCQFIRGALEFGFMIFVVFPMGMEWLKGESHDGG

SEQ ID NO: 3578 - protein, 98 aa, Streptococcus pneumoniae
VTSLSPSKQSKSVVFPAPFGPIKATHSPSLISKEMFRKISLSFIFLLNFSTLTTVMRLSFQPLHSHRENDENHKSKLQSTTNELAKQGLIKPISKHFH

SEQ ID NO: 3579 - protein, 294 aa, Streptococcus pneumoniae
MTVVKVEKLSKKIKDKEILRNISFEINDGECVALIGPNGAGKTTLLDCLLGDKLVTSGQVSIQGLPVTSSKLDYTRAYLPQENIIVQKLKVKELIAFFQRIYPNPLSNQEIDQLLQFVKQQKEQLAEKLSGGQKRLFSFILTLIGRPKIVFLDEPTASMDTSTRQRFWEIVQELKAQGVTILYSSHYIEEVEHTADRILLLNKGELIRDTTPLAMRSEEIEKHFILPIAYKEVVEQSNLVENWTLKQDSLQVVTREADAFWELLAQAGCRMQEIEVNNRSLLNTIFEETQKGDN

SEQ ID NO: 3580 - protein, 245 aa, Streptococcus pneumoniae
MKRWIALSKIEFLLTKRQLIYYLLSVGMPTAFYLFFSGIYQDTPGELANFMRDYLISMTAFSMMSTAIFSFPVVLHTDKINNWQKTLRHSPVNMVEYYLSKITSMLVDYLVSILVVFSVGHFVRGVDMSLGNWIGAALLLIVGSIAFVALGLTLTLLPTSQLMSVVGNLLYLGLAVLGGLWMPISLFPDWMQVVGKCLPTYQLMELLKTFLNEGGINLSATVYLLVFSVVLFGLTIYLQGHKENA

SEQ ID NO: 3581 - protein, 365 aa, Streptococcus pneumoniae
MLERLKSIHYMFWISLIFMVFPILTVVTGWLSAWHLLIDILFVVAYLGVLTTKSQRLSWLYWGILLTYVVGNTAFVAVNYIWFFFFLSNLLSYHFSVGGLKSLHVWTFLLAQVLVVGQLLIFQRIEVEFLFYLLVILAFVDLMTFGLVRIRIVEDLKEAQAKQNAQINLLLAENERNRIGQDLHDSLGHTFAMLSVKTDLALQLFQMEAYPQVEKELKEIHQISKDSMNEVRTIVENLKSRTLTSELETVKKMLEIAGIEVETDNQLDTASLTQELESMASMILLELVTNIIKHAKASKAYLKLERTEKELILTVSDDGCGFAFLKGDELHTVRDRVFPFSGEVSVISQKHPTEVQVRLPYKERN

SEQ ID NO: 3582 - protein, 199 aa, Streptococcus pneumoniae
MKVLVAEDQSMLRDAMCQLLTLQPDVESVLQAKNGQEAIQLLEKESVDIAILDVEMPVKTGLEVLEWIRSEKLETKVVVVTTFKRAGYFERAVKAGVDAYVLKERSIADLMQTLHTVLEGRKEYSPELMEMVMTRPNPLTEQEIAVLKGIARGLSNQEIADQLYLSNGTIRNYVTNILSKLDAGNRTEAANIAKESGWL

SEQ ID NO: 3583 - protein, 336 aa, Streptococcus pneumoniae
MNADDTVTIYDVAREAGVSMATVSRVVNGNKNVKENTRKKVLEVIDRLDYRPNAVARGLASKKTTTVGVVIPNITNGYFSSLAKGIDDIAEMYKYNIVLANSDEDNEKEVSVVNTLFSKQVDGIIYMGYHLTDKIRSEFSRSRTPIVLAGTVDVEHQLPSVNIDYKQATIDAVSYLAKENERIAFVSGPLVDDINGKVRLVGYKETLKKAGITYSEGLVFESKYSYDDGYALAERLISSNATAAVVTGDELAAGVLNGLADKGVSVPEDFEIITSDDSQISRFTRPNLTTIAQPLYDLGAISMRMLTKIMHKEELEEREVLLPHGLTERSSTRKRK

SEQ ID NO: 3584 - protein, 130 aa, Streptococcus pneumoniae
LILFENLCKPRHVALPYVWLLTSSVSSTTSKTCFELTSSVSSTTSKTCFELTSSVSSTTSKTCFELTSSVSSATSKQCFELTSSVLSTTSKQCFELTSSVLSATSKQCVAQPLTSRLVRSMVFIKSTSLV

SEQ ID NO: 3585 - protein, 112 aa, Streptococcus pneumoniae
MNTIERTRRLVKGCATHCFEVADRTDEVSSKHCFEVVDRTDEVSSKHCFEVADETDEVSSKHVFEVVDETDEVSSKHVFEVVDETDEVSSKHVFEVVDETDEVSNHTYGKAT

SEQ ID NO: 3586 - protein, 320 aa, Streptococcus pneumoniae
MPKKILVLHTGGTISMQADASGAVVTSSDNPMNHVSNPLEGIQVHALDFFNLPSPHIKPKHMLVLYQKIKEEADNYDGVVITHGTDTLEETAYFLDTMEVPHMPIVLTGAMRSSNELGSDGVYNYLSALRVASDDRAADKGVLVVMNDEIHAAKYVTKTHTTNVNTFQTPTHGPLGLIMKQEILYFKTAEPRVRFDLDHIQGLVPIISAYAGMTDELIDMLDLEHLDGLIIQAFGAGNIPKETAQKLESLLQKGIPVALVSRCFNGIAEPVYAYQGGGVQLQKAGVFFVKELNAQKARLKLLIALNAGLTGQALKDYMEG

SEQ ID NO: 3587 - protein, 462 aa, Streptococcus pneumoniae
MEVKAVFFDIDGTLVNNRKSVLKSTKDAIKIVKEQGVLVGVATGRGPFFVKELMDDLDLDFAVTYNGQYIFSKDRVLFTSPISKLHLRHLISYAKKEGTEIALGTKDAMLGSKIMSFGLGSFSQRISRFVPSVLTRTVSQSFNRMVSKVVPQKEEDLLHLMNQPIYQVLMLMTPEESEKAAADFEDLKLTRSNPFASDVINQGNSKLEGIRRVGKEYGFDLNQVMAFGDSDNDLEMLAGVGMSVAMGNGSSSVKEAAKHITTSNQQDGIHKALEHFGVLSSEKVFVSRDYHFNKVKTFHHMMDERTQEEPRAWDLEGATHRAGFKIEELVEFVRAASPSEEDFGQAVWQFHQALDKAADKVAKKTPAQQDLIGQVDALIDTLYFTYGSFVLMGVDPERIFDIVHQANMGKIFPDGKAHFDPVTHKILKPDNWEEKYAPEPAIKKELQRQLKAYERHKERNKS

SEQ ID NO: 3588 - protein, 150 aa, Streptococcus pneumoniae
MAQRYQNIMVAIDGSKEADLAFVKGVHSALRNDAKLTIAHVIDTRALQSVSTFDAEVYEELQVDAESLMKEYEKRAKDAGVADVHIVIEMGNPKTLLARTIPDAEEVDLILVGATGLNAFERLLVGSSSEYILRHAKVDLLVVREQEKTL

SEQ ID NO: 3589 - protein, 96 aa, Streptococcus pneumoniae
MKNSFQKSNFLYYGIILVSVLVEVIMICQLESLVPLLYPSFIGFLVFHVLYHLILFLVAKRSGRWDYLMIWGLFLMFNLLYDSFLGLLFLGLSFGL

SEQ ID NO: 3590 - protein, 238 aa, Streptococcus pneumoniae
MKEYNKSSKVEHVAYDIRGPVLEEAMLMLANGEKILRLNTGNPAQFGFTAPDEVIHDLIMNARDTEGYSDSKGIFSSRKAIMQYRQLKIFPNVDIDDIYFGNGVSELIVMSMQGLLDNGDEVLVPMPDYPLWTAAVSLAGGNAVHYICDEAVEWYPDIDDIKSKITSNTKAIVLINPNNPTGALYPKKLLLEIIEIARQNDLIIFADEIYDRMVMDGHVHTPVASLAPDVFCVSMNGL

SEQ ID NO: 3591 - protein, 110 aa, Streptococcus pneumoniae
LDSILSPFDISLNMSLMARQDHPTHTETCYAVGFLQTIHADTEDIWCQARHRRMHMSVHYHAVIDFIRKDNQIVLTGNLNNLQQEFLRIKGSSWVIWIDKDDCLGIGSDF

SEQ ID NO: 3592 - protein, 124 aa, Streptococcus pneumoniae
LAQQVVQTSLGGHQSVDELLLPGGRIYEQRNFIYNAIQDIPGLSAVKPKAGLYIFPKIDRNMYRIDDDEQFVLDFLKQEKVLLVHGRGFNWQEPDHFRIVYLPRVDELAQIQEKMTRFLKQYRR

SEQ ID NO: 3593 - protein, 44 aa, Streptococcus pneumoniae
VKRTYQPSKLRRARKHGFRNRMSTKNGRRVLAARRRKGRKVLAA

SEQ ID NO: 3594 - protein, 66 aa, Streptococcus pneumoniae
LHLLNFFTKIKISRLEFLLIFDRIRLDYAAKTLRPLRRRAANTRRPFLVDIRLRNPCLRARRSLLG

SEQ ID NO: 3595 - protein, 217 aa, Streptococcus pneumoniae
VTILGKDTVQQSAKGESVTQEATPEYKPETTPGGDKGGNTGNSDANANAGGGSQAGGSAHTGSQNSAQSQASKQLATEKESAKNAIEKAAKDKQDEIKGAPLSDKEKAELLARVEAEKQAALKEIENAKTMEDVKEAETIGVQAIAMVTVPKRPVAPKTTSAPQATAGTMQDVTYQSPAGKQLPNTGSASSAALASLGLVVATSGFALLGRKTRRRK

SEQ ID NO: 3596 - protein, 74 aa, Streptococcus pneumoniae
MIFDTHTHLNVEEFAGREAEEIALADEMGVTQMNIVGFDIPTIERALELVDEYEQLYATIGWHPTEAGIYTVGS

SEQ ID NO: 3597 - protein, 180 aa, Streptococcus pneumoniae
LLDKLKHPKVVALGEIGLDYHWMTAPKEVQEQVFRRQIQLSKDLDLPFVVHTRDALEDTYEIIKSEGVGPRGGIMHSFSGTLEWAEKFVDLGMTISFSGVVTFKKATDLQEAAKELPLDKMLVETDAPYLAPVPKRGRENKTAYTRYVVDFIADLRGMTTEELAVATTANAERIFGLDSK

SEQ ID NO: 3598 - protein, 186 aa, Streptococcus pneumoniae
MKEKISQVIVVEGRDDTVNLKRYFDVETYETRGSAINDQDIERIQRLHQRHGVIVFTDPDFNGERIRRMIMTAIPTVQHAFLKRDEAVPKSKTKGRSLGIEHASYEDLKTALAQVTEQFEHESQFDISRSDLIRLGFLAGADSRKRREYLGETLRIGYSNGKQLLKRLELFGVTLAEVEEAMKSYE

SEQ ID NO: 3599 - protein, 303 aa, Streptococcus pneumoniae
MLIGQKIKEIRIEKGISRPDFCGDEQELTVRQLSRIESGASQPSLPKLDYIARRLGVPVYSLMPDFSALPSAYLELKYQILREPIYDKEEEYDKKEACLEEIEDLFYEQLPNEEKVWFEATRATIDVIRSGQPEYGETVLDDYFKTIYDKELFLINELEVINLYFAIVLTKIKQGQNQIEEINRIHSFLVRLTNHVELIAPEYLFALSNTLFSGLACLDNLSSYDSLGAYIFSLNHIMEKTQDFQKKPIILMLEWKLSLIINNDYVSAEQFYQKSKLFADIIENSYLVTMLEKQWQEDLKKYL

SEQ ID NO: 3600 - protein, 98 aa, Streptococcus pneumoniae
MKQTVKKLALVASIAATLGGSVAVASAAVQYPEGGVWTYGSGNGGAYSNYYHPSKYHSSTVVSRKTGSSDKGYAGAGGTSRAWIRTSWGEKVAFYYNV

SEQ ID NO: 3601 - protein, 268 aa, Streptococcus pneumoniae
MMKRLFILISMVLVSLYMVITSVDHREEILFGNYPSVDVTGMMINQPVASREEVTEALSHLAVEHNSLIARRIVEPNEAGETRFTYATYGEGKLPEGLTISSKESAETSDLLGSYLIVSGSLDGVSLQTTLKELGYQGFVSNGEDPFSIVLLLTATPMVLLSLAIFLLTFMSLTLIYRIKSLRQAGIRLIAGESLFGVALRPVLEDVRQLICSVLVSSLLGLGILWYQGALFMATVQLVIIALLLYGLHLGRDFYLTKCRLSTWFTGK

SEQ ID NO: 3602 - protein, 449 aa, Streptococcus pneumoniae
VPCLWQRCNWSSLLFYFMDCTLAGISTLLSVVYLLGLQENSLVDLLKGKLPLKRMMTLMMVGQLLAVLVVGSSATRLLPHYREMQEMERASNKWSQSSDRYRLSFGWSSAFADEEGTRKDNREWQTFTEERLANTDSFYIMSNVDNFSDGAEVDLDGNRLSDYTPSGNVIYVSPRYLIEEKITVSSEFMDKMQNLSEGEFGLILPESLREQSIYYQGLFTDYLQNFSSESVEVTSQKHYLPQVRLAFTEIGQERFLYNDGYKTTRQYLKDPIIVVLTPQATGTRPVAGMLWGTTANSALKLDRYGDSITALKEQGLYHKVSYLVKSQLFFAKVLNDKRVEFYSLLIGTILTLSTAILLFDSMNLLYFEQFRRDLMIKRLAGMTIYELHGKYLLAQGGVLLLGLVLSSILTRDGLISALVVALFTLNALLILVRQDKKEEAGSMAVLKGK

SEQ ID NO: 3603 - protein, 213 aa, Streptococcus pneumoniae
MIDIQGLEKKFNDRAIFSGLNLKLEKGKVYALIGKSGSGKTTLLNILGKLEKIDGGRVLYQGKDLKTIPTREYFRDQMGYLFQNFGLLENQSIKENLDLGFVGQKISKVERLERQVGALEKVNLGYLDLEQKIYTLSGGEAQRVALAKTILKNPPLILADEPTAALDPENSEEVMNLLVDLKDENRIIIIATHNPLVWNKADEIIDMRKLAHV

SEQ ID NO: 3604 - protein, 102 aa, Streptococcus pneumoniae
MCEKIRIRRVSDYPSARGGLEDILIMENMTNHLLLVQIRVHGYLLDFASIEGQRQKHYRLKNLPQTVELTVDDVEEDVDLTLPENRSYQEADFFERMFRENC

SEQ ID NO: 3605 - protein, 168 aa, Streptococcus pneumoniae
VHENRRRDVVRQISHYLDWQVRIFKILDMLRQINLENIFVNYSHIIKITQGICQNWHQTVVNLKSHDLGCTLSQKFCQGTNTWPDFDDIDLIINFSRIHNFLKDIGIRQEILPKGLFKGKTVTLQHCLGHAIICNSHLFSFLLSVTTIVTHSPCILGMKIIPKNYLSS

SEQ ID NO: 3606 - protein, 290 aa, Streptococcus pneumoniae
MRIADYSVTKAVLERHGFTFKKSFGQNFLTDTNILQKIVDTAEIDDQVNVIEIGPGIGALTEFLAERAAQVMAFEIDHRLVPILADTLRDFDNVTVVNEDILKVDLAQHIQNFKNPNLPIKVVANLPYYITTPILMHLIESGIPFSEFVVMMQKEVADRISAQPNTKAYGSLSIAVQYYMTAKVAFIVPRTVFVPAPNVDSAILKMVRRPEPAVAVEDENFFFKVSKASFTHRRKTLWNNLTGYFGKTEEVKDKLTKALDQADLSPSVRGEALSLAEFAGLADALKGQGL

SEQ ID NO: 3607 - protein, 292 aa, Streptococcus pneumoniae
MQGQIIKALAGFYYVESDGQVYQTRARGNFRKKGHTPYVGDWVDFSAEENSEGYILKIHERKNSLVRPPIVNIDQAVVIMSVKEPDFNSNLLDRFLVLLEHKGIHPIVYISKMDLLEDRGELDFYQQTYGDIGYDFVTSKEELLSLLTGKVTVFMGQTGVGKSTLLNKIAPDLNLETGEISDSLGRGRHTTRAVSFYNLNGGKIADTPGFSSLDYEVSRAEDLNQAFPEIATVSRDCKFRTCTHTHEPSCAVKPAVEEGVIATFRFDNYLQFLSEIENRRETYKKVSKKIPK

SEQ ID NO: 3608 - protein, 300 aa, Streptococcus pneumoniae
MKYQGLKTSIRLSQRLLLLAEIVSSVLVPIPMSRLVPSNQLLKRVLLQPSVLTITCNSLVKLKIVEKPIKKSAKKFQNKEKPMSQYKIAPSILAADYANFEREIKRLEATGAEYAHIDIMDSHFVPQISFGAGVVESLRPHSKMVFDCHLMVSNPEHHLEDFARAGADIISIHVEATPHIHGALQKIRSLGVKPSVVINPGTPVEAIKHVLHLVDQVLVMTVNPGFGGQAFLPETMDKVRELVALREEKGLNFEIEVDGGIDDQTIAQAKEAGATVFVAGSYVFKGEVNERVQTLRKQLD

SEQ ID NO: 3609 - protein, 220 aa, Streptococcus pneumoniae
MSEYKLSENNWTRVAVFAGGNRGHYRTDFDAFVGVDRGSLWVLEEDLPLALAVGDFDSVTEEERQVIQKRAQYFVQARPEKDDTDLELALLTIFEKNPQAQVTIFGALGGRIDHMLANVFLPSNPKLAPYMHQIEIEDGQNLITYCPEGTSQLEPRSDYDYLAFMPVRDSQLTILGAKYELTEENFFFKKVYASNEYIDREVSVTCPDGYVVVLHSKDRR

SEQ ID NO: 3610 - protein, 404 aa, Streptococcus pneumoniae
MESLLILLLIANLAGLFLIWQRQDRQEKHLSKSLEDQADHLSDQLDYRFDQARQASQLDQKDLEVAVSDRLQEVRIELHQGLTQVRQEMTDNLLQTRDKTDQRLQALQESNEQRLEQMRQTVEEKLEKTLQTRLQASFETVSKQLESVNRGLGEMQTVARDVGALNKVLSGTKTRGILGELQLGQIIEDIMTPAQYEREYATVENSSERVEYAIKLPGQGDQEYVYLPIDSKFPLADYYRLEEAYETGDKDEIERCRKSLLASVKRFAKDIKSKYIAPPRTTNFGILFVPTEGLYSEIVRNPVFFDDLRREEQIIVAGPSTLSALLNSLSVGFKTLNIQKSADHISKTLASVKTEFGKFGGILVQAQKHLQHASGNIDELLNRRTIAIERTLRHIELSEGEACA

SEQ ID NO: 3611 - protein, 313 aa, Streptococcus pneumoniae
MKISHMKKDELFEGFNLIKSGDLRQTRVGKNYLAFTFQDDSGEIDGKLWDAQPHNIEAFTAGKVVHMKGRREVYNNTPQVNQITLRLPQAGEPNDPADFKVKSPVDVKEIRDYMSQMIFKIENPVWQRIVRNLYTKYDKEFYSYPAAKTNHHAFETGLAYHTATMVRLADAISEVYPQLNKSLLYAGIMLHDLAKVIELTGPDQTEYTVRGNLLGHIALIDSEITKTVMELGIDDTKEEVVLLRHVILSHHGLLEYGSPVRPRIMEAEIIHMIDNLDASMMMMSTALALVDKGEMSNKIFAMDNRSFYKPDLD

SEQ ID NO: 3612 - protein, 275 aa, Streptococcus pneumoniae
MKLRRSDRMVVISNYLINNPYKLTSLNTFAEKYESAKSSISEDIVIIKRAFEEIEIGHIQTVTGAGGGVIFTPSISSQDAKEMVEDLRTKLSESDRILPGGYIYLSDLLSTPAILKNIGRIIAKSFMDQKIDAVMTVATKGVPLANAVANVLNVSFVIVRRDLKITEGSTVSVNYVSGSSGDRIEKMFLSKRSLKAGSRVLIVDDFLKGGGTVNGMISLLREFDSELAGVAVFADNAQEEREKQFDYKSLLKVTNIDVKNQAIDVEVGNIFDEDK

SEQ ID NO: 3613 - protein, 69 aa, Streptococcus pneumoniae
EIELKVGTIVPAFLCKQNRRKLMKTPFINREELEAIVAEFPTPFHLYDEKGIREKARAVNQAFSWKQGL

SEQ ID NO: 3614 - protein, 127 aa, Streptococcus pneumoniae
LLPSSRLPFTCMMRRGFVRRQEPSTKLFRGNKGFKEYFAVKATPTPAILKILQEEGCGVDCSSYVELLMSHKLDFLGSEIMFSSNNTPDKEYAYARELGATINLDAFEDIEHSGESSRYSRNHLLSL

SEQ ID NO: 3615 - protein, 99 aa, Streptococcus pneumoniae
MISGIPAALSRMFNIFKGIQVNGRTQFTCIGVFLVWRVVGREHNLRTQKVQFMAHQKLYITRAVHTTTFFLENFQNSWSWSSLNCKIFLKALVSTKKLG

SEQ ID NO: 3616 - protein, 334 aa, Streptococcus pneumoniae
AINWTFWVLRLCSLPTTRQTRNTPMHVNWVRPLTWMPLKILNILERAAGIPEIISCRYNPGGVFELGTDIMDNPGEAKFGMTKDQLFEAFAILKEKGAKTFGIHSFLASNTVTHLYYPELARQLFELAVEIKEKLGIWLDFINLSGGIGVNYRPDQEPNDIALIGEGVRKVYEEVLTSAGLGQVKIFTELGRFMLAPHGALVTRVTHKKETYRTYLGVDASAVNLMRPAMYGAYHHISNVTHPDGPAEAVDVVGSLCENNDKFAVNRELPHTEIGDLLVIHDTGAHGFSMGYQYNAKLRSAEILYTEEGKARQIRRAERPEDYFATLYGFDFEE

SEQ ID NO: 3617 - protein, 264 aa, Streptococcus pneumoniae
MSEETIDYGQVTGMVHSTESFGSVDGPGIRFIVFLQGCHMRCQYCHNPDTWAMESNKSRERTVDDVLTEALRYRGFWGNKGGITVSGGEALLQIDFLIALFTKAKEQGIHCTLDTCALPFRNKPRYLEKFDKLMAVTDLVLLDIKEINEEQHKIVTSQTNKNILACAQYLSDIGKPVWIRHVLVPGLTDRDDDLIELGKFVKTLKNVDKFEILPYHTMGEFKWRELGIPYSLEGVKPPTADRVKNAKKLMDTESYQDYMKRVHG

SEQ ID NO: 3618 - protein, 308 aa, Streptococcus pneumoniae
VKSIKRFALSAMGVAMLLVLTGCVNVDKTTGQPTGFIWNTIGAPMAEAIKYFATDKGLGFGVAIIIVTIIVRLIILPLGIYQSWKATLHSEKMNALKHVLEPHQTRLKEATTQEEKLEAQQALFAAQKEHGISMFGGVGCFPILLQMPFFSAIYFAAQHTEGVAQASYLGIPLGSPSMILVACAGVLYYLQSLLSLHGVEDEMQREQIKKMIYMSPLMIVVFSLFSPASVTLYWVVGGFMMILQQFIVNYIVRPKLRKKVREELAKNPPKASAFSKPSGRKDVTPEQPTAITSKKKHKNRNAGKQRSR

SEQ ID NO: 3619 - protein, 92 aa, Streptococcus pneumoniae
MQKVRMIAQGRVQGVGFRWGVYSLALEIGGITGRVWNNDDGTVEILAQADSSAIMAKFIQEIRKGPTPFSKVSYLDVKLSNFPPYPDFKIAN

SEQ ID NO: 3620 - protein, 252 aa, Streptococcus pneumoniae
LCYNISMTIITSKANSVVKNTKKLHQKKYRKSAYLIEGWHLFEEAVQAGVTIEKIFTLENYRDQLATFSQTVWVSEDILLDLADSQTPQGIVAVVQKEEVGQADLSQGKFLFLEDVQDPGNVGTIIRTADAAGFTGVIVSDKSADIYSLKTLRSMQGSHFHLPIYRMTSQALLDETKKVAIPVLATTLSKDSVDYRELPSIENFVLVMGNEGQGISPLMAESADQLVHISMKGQAESLNVAVAAGILIFHLS

SEQ ID NO: 3621 - protein, 227 aa, Streptococcus pneumoniae
MNHTIIHDRAGLNQFYAKVYAFVGLGIGLSALVSGLMLTVFQSQLVYFLMQGRLWLTIATFAELALVFVASSMASRNSPAALPVFLLYSVLNGFTLSFVVAFYTPGTVLSAFVSSALLFFVMAAVGIFTKKDLSGIGRAMMAALIGLLIAMVVNIFLASGFFDYMISVAMVLVFSGLIAWDNQKIRLAYEQSQGRVATGWVVSMALSIYLDFINLFLSILRIFGRND

SEQ ID NO: 3622 - protein, 71 aa, Streptococcus pneumoniae
LIFQILGKSVFDKGNFFLLMDKTFLHRQLLKNLINVLYTYFQEKKRENLKKISVTQNTDFIDLLVIATKDT

SEQ ID NO: 3623 - protein, 330 aa, Streptococcus pneumoniae
MKKSFIHQQEEISFVKNTFTQYLKDKLEVVEVQGPILSKVGDGMQDNLSGVENPVSVKVLQIPDATYEVVHSLAKWKRHTLARFGFGEGEGLFVHMKALRPDEDSLDATHSVYVDQWDWEKVIPNGKRNIVYLKETVEKIYKAIRLTELAVEARYDIESILPKQITFIHTEELVERYPDLTPKERENAICKEFGAVFLIGIGGELPDGKPHDGRAPDYDDWTSESENGYKGLNGDILVWNESLGGAFELSSMGIRVDEETLRRQVEITGDEDRLELEWHKSLLNGLFPLTIGGGIGQSRMAMFLLRKRHIGEVQTSVWPQEVRDTYENIL

SEQ ID NO: 3624 - protein, 179 aa, Streptococcus pneumoniae
MKIVSGIYGGRPLKTLEGKTTRPTSDKVRGAIFNMIGPYFEGGRVLDLYAGSGGLSIEAVSRGMSSAVLVERDRKAQTIVAENIQITKEIGKFQLLKMDAERALEQVSGEFDLVFLDPPYTKEQIVADIEKMAERELFSEDVMVVCETDKAVELPEEIACLGIWKEKIYGISKVTVYVR

SEQ ID NO: 3625 - protein, 122 aa, Streptococcus pneumoniae
YVGIFFNPHKQGFLPIENRKRGLEKALGHLENVEVVASHDELVVDVAKRLGATCLVRGLRNASDLQYEASFDYYNHQLSSDIETIYLHSRPEHLYISSSGVRELLKFGQDIACYVPESIWRK

SEQ ID NO: 3626 - protein, 238 aa, Streptococcus pneumoniae
MKKKIRWPLYVIAALIVTFLAFVVPLPYYIEVPGGSEDIRQVLKINDTEDKEAGAYQFVTVGVQHATLAHMIYAWLTPFTDIRSAQETTGGSSDVEFMRINQFYMQTSQNMAKYQGLKTAGKDIELKYFGVYVLNVTDNSTFKGILNISDTVTAVNDQTFDSSKDLIDYVSSQKLGDSVKVTYEEDGQTKSAEGKIITLENGKNGIGIGLIDRTEVISNVPISFSTSWYWRSKCWSHV

SEQ ID NO: 3627 - protein, 77 aa, Streptococcus pneumoniae
VGDIGGIDKKVVASARAGAAIFFAPDNPVSEEEQKAHPDAKNNYQTALEAAKTIKTDMKIVPVKTLQDAIDYLKNNP

SEQ ID NO: 3628 - protein, 94 aa, Streptococcus pneumoniae
LSEVSKLAHKHRRWYNSQMVQLLFTLSSHMLFIYVSFYLLKDLVRWEKVLKVTDENTRKVRLLVAFFSIVIGYILSSFFISLYHLWQEALRGLL

SEQ ID NO: 3629 - protein, 427 aa, Streptococcus pneumoniae
MDKIVVQGGDNRLVGSVTIEGAKNAVLPLLAATILASEGKTVLQNVPILSDVFIMNQVVGGLNAKVDFDEEAHLVKVDATGDITEEAPYKYVSKMRASIVVLGPILARVGHAKVSMPGGCTIGSRPIDLHLKGLEAMGVKISQTAGYIEAKAERLHGAHIYMDFPSVGATQNLMMAATLADGVTVIENAAREPEIVDLAILLNEMGAKVKGAGTETITITGVEKLHGTTHNVVQDRIEAGTFMVAAAMTGGDVLIRDAVWEHNRPLIAKLLEMCVEVIEEDEGIRVRSQLENLKAVHVKTLPHPGFPTDMQAQFTALMTVAKGESTMVETVFENRFQHLEEMRRMGLHSEIIRDTARIVGGQPLQGAEVLSTDLRASAALILTGLVAQGETVVGKLVHLDRGYYGFHEKLAQLGAKIQRIEASDEDE

SEQ ID NO: 3630 - protein, 74 aa, Streptococcus pneumoniae
VLRFSGLRQAMKMNKKSSYVINRLLLVIIVLILGTLALGIGLMVGYGILGKGQDPWAILSPAKWQELIHKFTGN

SEQ ID NO: 3631 - protein, 274 aa, Streptococcus pneumoniae
MNKKTRQTLIGLLVLLLLSTGSYYIKQMPSAPNSPKTNLSQKKQASEAPSQALAESVLTDAVKSQIKGSLEWNGSGAFIVNGNKTNLDAKVSSKPYADNKTKTVGKETVPTVANALLSKATRQYKNRKETGNGSTSWTPPGWHQVKNLKGSYTHAVDRGHLLGYALIGGLDGFDASTSNPKNIAVQTAWANQAQAEYSTGQNYYESKVRKALDQNKRVRYRVTLYYASNEDLVPSSSQIEAKYSDGELEFNVLVPNVQKGLQLDYRTGEVTVTQ

SEQ ID NO: 3632 - protein, 327 aa, Streptococcus pneumoniae
  UNSURE (298): Xaa at each above location is unknown.
SEFVATFNIVFILTGLMPFLPATKMAMVFFNRARVDQKGNYGDTRYFRLLKVLENLNRFLSTIQVGITLITILSGASLTNTLGRVIASWLGNGETAQAVATFLSLAFLTYISIVFGELYPKRIALNLKDALAIRTAPVIIGIGKLVSPFVWLLAASTNFLSHLTPMSFDDADEKMTRDEIAYMLTNSEETLDADEIEMLQGVFSLDELMAREVMVPRTDAFMVDIQDDSQAIIQSILKQNYSRIPVYDGDKDNVIGIIHTKSLLKAGFVDGFDNIVWKRILQDPLFVPETIFVDDLLXELRNTQRQMAILLDEYSGMAGLVTLGKLL

SEQ ID NO: 3633 - protein, 94 aa, Streptococcus pneumoniae
  UNSURE (52): Xaa at each above location is unknown.
LWENSYKEIVGEIDDETDKAAIDVHQIGEDTYIVQRTMTLNDFNNYFDVELXSDDVDTIAGYYLTGVGTIPTTEKLSYELVSQNKQFILTNDKV

SEQ ID NO: 3634 - protein, 1203 aa, Streptococcus pneumoniae
LAGHDVQYGKHRTRRSFSRIKEVLDLPNLIEIQTDSFKAFLDHGLKEVFEDVLPISNFTDTMELEFVGYEIKEPKYTLEEARIHDASYSAPIFVTFRLINKETSEIKTQEVFFGDFPIMTEMGTFIINGGERIIVSQLVRSPGVYFNDKVDKNGKVGYGSTVIPNRGAWLELESDSKDITYTRIDRTRKIPFTTLVRALGFSGDDEIFDIFGDSELVRNTVEKDIHKNPMDSRTDEALKEIYERLRPGEPKTAESSRSLLVARFFDPRRYDLAAVGRYKINKKLNVKTRLLNQTIAEPLVDPETGEILVEAGTIMTRSVIESIESHLDGDLNKIVYIPNDAAVVTEPVVLQKFKVIAPTDPDRVVTIIGNANPDDKVRTVTPADILAEMSYFLNLAEGLGRVDDIDHLGNRRIRAVGELLANQVRLGLSRMERNVRERMSVQDNEVLTPQQIINIRPVTAAVKEFFGSSQLSQFMDQHNPLSELSHKRRLSALGPGGLTRDRAGYEVRDVHYTHYGRMCPIETPEGPNIGLINNLSSYGHLNKYGFVQTPYRKVDRETGVVTNEIVWLTADEEDEYTVAQANSRLNEDGTFAEKIVMGRHQGVNQEYPANIVDYMDVSPKQVVAVATACIPFLENDDSNRALMGANMQRQAVPLINPQAPYVGTGMEYQAAHDSGAAVIAQYDGKVTYADADKVEVRREDGSLDVYHIQKFRRSNSGTAYNQRTLVKVGDVVEKGDFIADGPSMENGEMALGQNPIVAYMTWEGYNFEDAVIMSERLVKDDVYTSVHLEEYESETRDTKLGPEEITREIPNVGEDALKDLDEMGIIRIGAEVKEGDILVGKVTPKGEKDLSAEERLLHAIFGDKSREVRDTSLRVPHGADGVVRDVKIFTRVNGDELQSGVNMLVRVYIAQKRKIKVGDKMAGRHGNKGVVSRIVPVEDMPYLPDGTPVDIMLNPLGVPSRMNIGQVMELHLGMAARTLGIHIATPVFDGASSEDLWSTVKEAGMDSDAKTILYDGRTGEPFDNRVSVGVMYMIKLHHMVDDKLHARSVGPYSTVTQQPLGGKAQFGGQRFGEMEVWALEAYGASNVLQEILTYKSDDINGRLKAYEAITKGKPIPKPGVPESFRVLVKELQSLGLDMRVLDEDDQEVELRDLDEGMDEDVIHVDDLEKAREKAAQEAKAAFEAEEAEKATKAEATEEAAEQE

SEQ ID NO: 3635 - protein, 116 aa, Streptococcus pneumoniae
MLTPDCNSSPFTRVKILTSRTTPSAPCGTRREVSRTSRDLSPKIACKRRSSAERSFSPLGVTFPTRISPSLTSAPIRIIPISSRSLRASSPTFGISRVISSGPSFVSRVSDSYSSR

SEQ ID NO: 3636 - protein, 56 aa, Streptococcus pneumoniae
MTSSSIPSSKSRSSTSWSSSSRTRMSRPRDCNSLTRTRKDSGTPGFGIGLPFVIAS

SEQ ID NO: 3637 - protein, 1225 aa, Streptococcus pneumoniae
VVDVNRFKSMQITLASPSKVRSWSYGEVKKPETINYRTLKPEREGLFDEVIFGPTKDWECACGKYKRIRYRGIVCDRCGVEVTRTKVRRERMGHIELKAPVSHIWYFKGIPSRMGLTLDMSPRALEEVIYFAAYVVIDPKDTPLEHKSIMTEREYRERLREYGYGSFVAKMGAEAIQDLLKQVDLEKEIAELKEELKTATGQKRVKAIRRLDVLDAFYKSGNKPEWMILNILPVIPPDLRPMLQLDGGRFASSDLNDLYRRVINRNNRLARLLELNAPGIIVQNEKRMLQEAVDALIDNGRRGRPITGPGSRPLKSLSHMLKGKQGRFRQNLLGKRVDFSGRSVIAVGPTLKMYQCGVPREMAIELFKPFVMREIVARDIVQNVKAAKRLVERGDERIWDILEEVIKEHPVLLNRAPTLHRLGIQAFEPVLIDGKALRLHPLVCEAYNADFDGDQMAIHVPLSEEAQAEARILMLAAEHILNPKDGKPVVTPSQDMVLGNYYLTMEEAGREGEGMVFKDRDEAVMAYRNGYVHLHSRVGIATDSLNKPWTEEQRHKVLLTTVGKILFNDIMPEGLPYLQEPNNANLTEGVPAKYFLPLGGDIKEAISNLELNPPFKKKNLGNIIAEIFKRFRTTETSALLDRMKNLGYHHSTLAGLTVGIADIPVVDDKAEIIEESHKRVEQITKQFRRGMITDDERYNAVTAEWRAAREKLEKRLIANQDPKNPIVMMMDSGARGNISNFSQLAGMRGLMAAPNGRIMELPILSNFREGLSVLEMFFSTHGARKGMTDTALKTADSGYLTRRLVDVAQDVIIREDDCGTDRGLLIRSIAEGKEMIESLEERLNGRYTKKTVKHPETGAVIIGPNELITEDKAREIVNAGVEEVTIRSVFTCNTRHGVCRHCYGINLATGDAVEVGEAVGTIAAQSIGEPGTQLTMRTFHTGGVASNTDITQGLPRVQEIFEARNPKGEAVITEVKGQVTAIEEDASTRTKKVFVKGETGEGEYVVPFTARMRVEVGGQVARGAALTEGSIQPKRLLAVRDVLSVETYLLGEVQKVYRSQGVEIGDKHIEVMVRQMIRKVRVMDPGDTDLLMGTLMDINDFTDANKDVLIAGGVPATGRPVLMGITKASLETNSFLSAASFQETTRVLTDAAIRGKKDHLLGLKENVIIGKIIPAGTGMARYRNLEPHAVNEEEYLNPPVEEEGNEETTEVVVDTAVETVEETVE

SEQ ID NO: 3638 - protein, 130 aa, Streptococcus pneumoniae
MCVPYPSPLSASFFYFTTFRGKMEKVFRRENERTRGFSHSLLFYCFFHSFNGSIHNYFCCFFISFFLYWRIKVFFFVDSMWFKVTVTGHTSTSWDDLTDDNIFFKSKEMVFLTTDSCVSKDTSCFLEGSR

SEQ ID NO: 3639 - protein, 137 aa, Streptococcus pneumoniae
MEHTFFIIKPDGVKRGLVGEVLKRIEQRGFTIEKLEFRSQVSEELIDQHYQDLVGQSFYPPIREFMTSGPVLVGVISGPKVIETWRTMMGATRPEEALPGTIRGDFAKAAGENEIIQNVVHGSDSEESAKREIALWF

SEQ ID NO: 3640 - protein, 92 aa, Streptococcus pneumoniae
MKKFDNYIIEKPCDSNSDKLQKILIIENLVDDILQFSLRINNSVGEIFLLQPFQKKTIFIPCYFEEDIVKVKDDDKVEWNLLEFQKFRAFLA

SEQ ID NO: 3641 - protein, 210 aa, Streptococcus pneumoniae
MIELKQVSKSFGERELFSNLSMTFEAGKVYALIGSSGSGKTTLMNMIGKLEPYDGTIFYRGKDLANYKSSDFFRHELGYLFQNFGLIENQSIEENLKLGLTGQKLSRSEQRLRQKQALEQVGLAYLDLDKRIFELSGGESQRVALAKVILKNPPFILADEPTASIDPATSQLIMEILLSLRDDNRLIIIATHNPAIWEMADEVFTMDRLK

SEQ ID NO: 3642 - protein, 671 aa, Streptococcus pneumoniae
MKKLFILISNLLASLFFVWVFTIWTDTYVSYYYSNVVVHDSSPETTFQHVATRLEKLAEETDSFIAIQHQDPNSEGTTVFSYTTFGDGKLPDGLQEKKLEDAQSSSVETNYFVFDGHLDIHLLREELSQLGLTNMNLTIPSKLSTLMAIFSNGFQLISLLIFILTFVALTLISQISQLRSSGIRLISGEKRWSIFLRPVGEDLKGIAVGFSLAGVLAILMQKILSLPTQSLMTIGAGLLSYNLILLSISLFFAQLFAVGIKKIHLMQIIKGQVPVRGIISLILIGQLLAIIIVTLGIGSSLKYSQAWQQHRIGQEAWSQERQLITLSISREGTSPGFDEQAQRKLRTWYQLMDLAVSEQKAFLSRHQLIDRTLQNGMASSKNLITSTEWHDYNPNGNVLIVTPQYLERQNIPVDTTIEQKMNHLDVGEFVLLLPEHLRSEEEHYKSVFEDDLTSRMSSQDERQQMTATVGYLESGQDRFVYNTTPISYQQFLKDPIIIVITPQSTGPQSILFWIDAVQNYVLFNQLSDAQELIQRQGIENWVSEMQTGYHNYITLLDNIQRERWVMLAGAVLGIATSILLFNTMNRLYFEEFRRAIFIKRIAGLRFLEIHRTYLFAQLGVFLLGFVASVFLQVEIGVAFLVLLLFTGLSLLQLHVQMQKENKMSILVLKGG

SEQ ID NO: 3643 - protein, 64 aa, Streptococcus pneumoniae
MKKKRVSRMKKNRGIQKLAILVLLGVFMFSNTIPYQQFIQKNRQLEIRVQSQKKSNGLDVGKAD

SEQ ID NO: 3644 - protein, 287 aa, Streptococcus pneumoniae
MNTLAEKFRLKRKELRLSQQTLAEGICEQSQISKIERGHFIPSADLLFKLSQRLEVPLDYFFNEQIEIKSNLSNFKQLSARLLDDRNYDDLEYIYRIEIERSTFLTLEDRTYLEWIKAIIDFYQYDSKCEAISSLENILLKVSSNTLIYLKALNTLSNFYSLVGREQEYEANYSHLIELYQTKNLDHQEFLFGYIRVRYNYAHYLVSKEKYNEAIQEALETIELCKQRQTSYQLAPLLILVGNAGAKFLDREQVKNYYIEARELCKIYNNPLMLMKIENYLKELDTV

SEQ ID NO: 3645 - protein, 136 aa, Streptococcus pneumoniae
VKLFYSMLLLINVLGAVLVLSDNLFIKNTLQQELVDFLLPSFFFLFGLDLLIFLPLKKYVRDFLAMLDRKKTVLVTILATLLFLRNPMTIVSLLIYIGLGLFFAAYLVPNSVKKEVSFYGHIFRDLVLVIVTLIFF

SEQ ID NO: 3646 - protein, 158 aa, Streptococcus pneumoniae
TQKKSFWYNKSMYTKNEEELQALGERLGHLLAKNDVLILTGELGAGKTTFTKGLAKGLQISQMIKSPTYTIVREYEGRLPLYHLDVYRIEGDADSIDLDEFIFGGGVTVIEWGNLLGDALPDAYLELEILKEADGRRLNFQAKGLRAEKLLEELQYGV

SEQ ID NO: 3647 - protein, 172 aa, Streptococcus pneumoniae
MEYELLIREAEPKDAAELVAFLNRVSLETDFTSLDGDGILLTSEEMEIFLNKQASSDNQITLLAFLNGKIAGIVNITADQRKRVRHIGDLFIVIGKRYWNNGLGSLLLEEAIEWAQASGILRRLQLTVQTRNQAAVHLYQKHGFVIEGSQERGAYIEEGKFIDVYLMGKLIG

SEQ ID NO: 3648 - protein, 338 aa, Streptococcus pneumoniae
MVKKIIGMVLALLSVTVVGVGVFAYTIYQQGTETLAKTYKKIGEETKVIEATEPLTILLMGVDTGNVERTETWVGRSDSMILMTVNPKTKKTTMMSLERDILTRIESGNGQAHEAKLNSAYADGGAELAIETIQKMMNIHIDRYVMVNMRGLQKLVDAVGGITVNNILGFPISISDQEEFNTISIGVGEQHIGGEEALVYARMRYQDPEGDYGRQKRQREVIQKVMEKALSLNSVGHYQEILKALSDNMQTNIDLSAKSIPNLLGYKDSFKTIETQQLQGEGEILQGVSYQIVSRAHMLEMQNILRRSLGQEEVTQLETNAVLFEDLFGRAPVGDEDN

SEQ ID NO: 3649 - protein, 418 aa, Streptococcus pneumoniae
  UNSURE (90),(96): Xaa at each above location is unknown.
MKAEIIAVGTEILTGQIVNTNAQFLSEKLAEIGVDVYFQTAVGDNEVRLLSLLEIASQRNHLVILTGGLGPTGDEPTKQTLAKFLGKALXFDPQAXEKLDIFFALRPDYARTPNNERQAQIVEGAIPLPNETGLAVGGKLEVDGVTYVVLPGPPSELKPMVLNQLLPKLMTGSKLYSRVLRFFGIGESQLVTILADLIDNQIDPTLAPYAKTGEVTLRLSTKASSQEEANQALDILENQILDCQTFEGISLRDFCYGYGEETSLASIVVEELKRQGKTIAAAESLTAGLFQATVANFSGASSIFKGGFVTYSLEEKSRMLDIPAKNLEEHGVVSEFTAQKMAEQARSKTQSDFGISLTGVAGPDSLEGHPVGTVFIGLAQEQGTEVIKVNIGGRSRADVRHIAVMHAFNLVRKALLSD

SEQ ID NO: 3650 - protein, 388 aa, Streptococcus pneumoniae
MAKKPKKLEEISKKFGAEREKALNDALKLIEKDFGKGSIMRLGERAEQKVQVMSSGSLALDIALGSGGYPKGRIIEIYGPESSGKTTVALHAVAQAQKEGGIAAFIDAEHALDPAYAAALGVNIDELLLSQPDSGEQGLEIAGKLIDSGAVDLVVVDSVAALVPRAEIDGDIGDSHVGLQARMMSQAMRKLGASINKTKTIAIFINQLREKVGVMFGNPETTPGGRALKFYASVRLDVRGNTQIKGTGDQKETNVGKETKIKVVKNKVAPPFKEAVVEIMYGEGISKTGELLKIASDLDIIKKAGAWYSYKDEKIGQGSENAKKYLAEHPEIFDEIDKQVRSKFGLIDGEEVSEQDTENKKDEPKKEEAVNEEVTLDLGDELEIEIEE

SEQ ID NO: 3651 - protein, 456 aa, Streptococcus pneumoniae
MNKKRTVDLIHGPILPSLLSFTFPILLSNIFQQLYNTADVLIVGRFLGQESLAAVGATTAIFDLIVGFTLGVGNGMGIVIARYYGARNFTKIKEAVAATWILGALLSILVMLLGFLGLYPLLQYLDTPAEILPQSYQYISMIVTCVGVSFAYNLFAGLLRSIGDSLAALGFLIFSALVNVVLDLYFITQLHLGVQSAGLATIISQGLSAVLCFYYIRKSVPELLPQFKHFKWDKSLYADLLEQGLAMGLMSSIVSIGSVILQSSVNTFGAVIISAQTAARRIMTFALLPMTAISASMTTFASQNLGAKQPDRIVQGLRIGSRLSISWAVFVCIFLFFASPALVSFLASSTDGYLIENGSLYLQISSTFYPILSLLLIYRNCLQGLGQKILPLVSSFIELIGKIVFVVLIIPWAGYKGVILCEPLIWVAMTVQLYFSLFRHPLIKEGKAILATKVQS

SEQ ID NO: 3652 - protein, 318 aa, Streptococcus pneumoniae
MEINVSKLRTDLPQVGVQPYRQVHAHSTGNPHSTVQNEADYHWRKDPELGFFSHIVGNGCIMQVGPVDNGAWDVGGGWNAETYAAVELIESHSTKEEFMTDYRLYIELLRNLADEAGLPKTLDTGSLAGIKTHEYCTNNQPNNHSDHVDPYPYLAKWGISREQFKYDIENGLTIETGWQKNDTGYWYVHSDGSYPKDKFEKINGTWYYFDSSGYMLADRWRKHTDGNWYWFDNSGEMATGWKKIADKWYYFNEEGAMKTGWVKYKDTWYYLDAKEGAMVSNAFIQSADGTGWYYLKPDGTLADKPEFTVEPDGLITVK

SEQ ID NO: 3653 - protein, 78 aa, Streptococcus pneumoniae
VRFEDILSSFILFPTSHTFITYIYHIHTPLIKRIAHSCHNFLNKKIMTKQGSNLLMLLKNLKLMSSYQKSYLQPQNST

SEQ ID NO: 3654 - protein, 80 aa, Streptococcus pneumoniae
LPKWKKVKGISRMDLSNKASNLRKKLGADGESPIDIFKLVQKIENLTLVFYGLGKNISGVCYKGTQFSLIAVNSDMPLGR

SEQ ID NO: 3655 - protein, 119 aa, Streptococcus pneumoniae
VKKSSVSLILIGEGDETERKADQFASYFLIFPSSLYRMVEEIRENANRTHLEVEDIIKLGQFYGISHKAMLYRLRNDGYLDAEEIKNMDISVIETASRLGYDTSLYRPLSESKKEMALG

SEQ ID NO: 3656 - protein, 141 aa, Streptococcus pneumoniae
LTSRVFIDADCISVFLWVGTEHLLEKLYLGKIVIPQEVYDEINIPTIPHLKSRIDQLVTKGSAEIVSIDIGTEEYALYRDLTRNHDSNKIIGKGEATSIFLAKKHNGILGSNNLRDVKPYVEEFSLEHMTTGDILIEAFKA

SEQ ID NO: 3657 - protein, 74 aa, Streptococcus pneumoniae
FRKTSRRTFLSSTMQDLLFHFYSYRLNLTLFFFELLICLLNSEFDLSKFIFVYFDEYFHEDSLKMNLHQFSFSF

SEQ ID NO: 3658 - protein, 331 aa, Streptococcus pneumoniae
MNVKKIMSIFQSFYVDVSIEELTLTLPISFVKRFEYTQMTFHKESFLLIKEKRRGSLSSFVTQARTMGEKANMDVVLVFSKLSDSEKKQLLQARVPFVDFKGNLFFPPLGLVLNANDTEIPKELTPSEQLTWIAFLLPKGQKVVNVDLLSQVTGLPNSTIYRCLRTFKALYWLNKQNKLYTYTVSKKELFLKSVSCLFNPIKKRILLPDGDIKQIKSVSNLLYGGAYALSHSTFLAETDENTSYVIWQRKFNQLSLPLSQHVLKGKMLEIWKYRPFVSEFWNDFKNNHDKQFVDPISLYLTLKDDDDPRIEEESEALENMILQYLGEDDAS

SEQ ID NO: 3659 - protein, 81 aa, Streptococcus pneumoniae
MMPANTKVIFQEMFADFQNYYVLIGGTATSIVLDSQGFKSRTTKDYDMVIIDEVKNKEFYTTWNHFLELGEYQGSQKDEKA

SEQ ID NO: 3660 - protein, 89 aa, Streptococcus pneumoniae
MIELFSILPEYPLKKDGREIPLHFDQDASLSALLLDEDYYNILVHEKETIQGYSVLSNCGLYSSKISSNHVSFHLQPQNSVLSSLQLAS

SEQ ID NO: 3661 - protein, 86 aa, Streptococcus pneumoniae
MRERSATGAQGLSKSIKKHLNDITRLTASLLGDEKLSAITSSSAVKADMHRFVIELELVKSTILQNDDISLDQNEIFEILKNFFDG

SEQ ID NO: 3662 - protein, 100 aa, Streptococcus pneumoniae
KQLIKKVGQAGKILADSGYQGLMKIYPQAQTPRKSSKLKPLTVEDKTYNHALSKERSKVENIFAKVETFKMFSTTCRNHRKRFGLRMNLSAGIINHELGF

SEQ ID NO: 3663 - protein, 43 aa, Streptococcus pneumoniae
MNYEASKQLTDARFKRLVGVQRTTFEEMLAVLKTAYQKSRTSW

SEQ ID NO: 3664 - protein, 152 aa, Streptococcus pneumoniae
MTPEEMYLTERLDVQIAHFLKKSVQHRRRYKVLKITEIVAGFLIAVFCAIPMPGDRYRLISVALSSLGLLCEGIINLYNAKENWISYQKTAQLLEKEKFLYQCQTEKYAGKTKAFALFVKTCEGLISEEINQWESIQSKEVAASADAPVKKE

SEQ ID NO: 3665 - protein, 202 aa, Streptococcus pneumoniae
MSQSSYLSPLLWLKKEADKEKMSATQCQIFFFYYQMFELLFARESDMKDLCLGTKGFYFSQLEKNLLSGVSRFLKNLEGKVTLKANQEVSARKALFLALTTSQSDWQELAPVFDFYQTIGRLENPSLLSSQDRQHLMWIYQSALEKDYIVKVIGDKHFVLKRQDATKLTARQTQTLEILSQSEDLVNPVYVTLGEKGVLLLD

SEQ ID NO: 3666 - protein, 136 aa, Streptococcus pneumoniae
LIKRGDVVALYLPFPTISSDLAVKNHMYICIDNSMTKNKELVKNQTFKPALLTRRLVKNFMIEEPDLARNPFTRPTLIDLDKVFMLDNTVIPTSYLARRRRNVSEELYEEILDYLVQPRLISLNKSEFMQLNPGTY

SEQ ID NO: 3667 - protein, 471 aa, Streptococcus pneumoniae
MANKAVNDFILAMNYDKKKLLTHQGESIENRFIKEGNQLPDEFVVIERKKRSLSTNTSDISVTATNDSRLYPGALLVVDETLLENNPTLLAVDRAPMTYSIDLPGLASSDSFLQVEDPSNSSVRGAVNDLLAKWHQDYGQVNNVPARMQYEKITAHSMEQLKVKFGSDFEKTGNSLDIDFNSVHSGEKQIQIVNFKQIYYTVSVDAVKNPGDVFQDTVTVEDLKQRGISAERPLVYISSVAYGRQVYLKLETTSKSDEVEAAFEALIKGVKVAPQTEWKQILDNTEVKAVILGGDPSSGARVVTGKVDMVEDLIQEGSRFTADHPGLPISYTTSFLRDNVVATFQNSTDYVETKVTAYRNGDLLLDHSGAYVAQYYITWNELSYDHQGKEVLTPKAWDRNGQDLTAHFTTSIPLKGNVRNLSVKIRECTGLAWEWWRTVYEKTDLPLVRKRTISIWGTTLYPQVEDKVEND

SEQ ID NO: 3668 - protein, 238 aa, Streptococcus pneumoniae
MGRKWANIVAKKTAKDGANSKVYAKFGVEIYVAAKKGDPDPESNSALKFVIDRAKQAQVPKHIIDKAIDKAKGNTDETFTEGRYEGFGPNGSMLIVDTLTSNVNRTAANVRAAFGKNGGNMGASGSVSYLFDNKGVIVFGGEDADAVFEQLLEADVDVDDVKAQEGTITVYTAPTDLHKAIVALRESGIEEFQVTELEMIPQSEVELSGEDLETFEKLYSVLEDDEDVQKIYTNVDGF

SEQ ID NO: 3669 - protein, 149 aa, Streptococcus pneumoniae
MGKPMLVFKRFGHQIHLMVQKEAKRCGIEFMGGPQGQVVHFLDNREKNQDLVLIKDIDQELNITKSVASNLVKRIVQNCLVELEASPVDKRAKFVRLTDKARSQMQQVKAFFERIDKQLMEDIDEDELLIFEKVLGQLQAKYQGNRRRE

SEQ ID NO: 3670 - protein, 290 aa, Streptococcus pneumoniae
EERIKKLAKRISRKEWGMILLAILFTCFSVYLELEVPTYISKITDLLGSQETNLDELWQPASMMMGMSFLAFLSVVAVGFFASRVAASYTSRLRSDIFNRVLDYSQTEIKKFSIPSLLTRTTNDITQVQMLITMGLQVVTRGSIMAIWAIGKILGHSEYWLWAVLVVVIVNVLMTTVLMTLAFPKQSLIQGLTDKLNSITRESLTGIRVVRAYNAEDYQNEKFAAVNDELTRLNLFVNRLMAILNPIMMGISSGLSVAIYWIGAYVINDAAPIARLPLFSDMIVFMSYAM

SEQ ID NO: 3671 - protein, 343 aa, Streptococcus pneumoniae
MDFLLMGALFIVLPRTMVSAKRINQVLDLHSSIQNPAQVQLTDENFKGQVEFKDVTFRYAANSEAVIEHVSFKAETGQTVAFIGSIGSGKSTLVNLIPRFYDVSAGEILVDGVNVQDYDFSATAHAGQRVAIVGPTGAGKTTIVNLLMKFYEIDKGSIRIDGVDTKAMTRSEVHDAFSMVLQDTWLFEGTIRDNLIYNQIGISDERMMEASKAVGIHHFIMTLPDGYDTILDDTVTLSVGQKQLLTIACALLKDASLLILDEATSSVDTRTEELIQKAMDRLMEGRTSFVIAHRLSIIRNADLILVMKDGNIIEQGNYEELMAQGGFYADLYNSQFTEDEAEE

SEQ ID NO: 3672 - protein, 120 aa, Streptococcus pneumoniae
MSQKLYNMKFAAVYLALIAKVERKGEKAESVHQVTSWLTGYEVSDVLACLDRDVTYGDFFLQAPYYVPERITITGKICGVRIEEIDDPLMQEIRRLDKLLDWLAKGKTSQQVLEKYEKHK

SEQ ID NO: 3673 - protein, 167 aa, Streptococcus pneumoniae
MKNYQEWYRNISSRLTSRPILLFLLRSFNRLMTVAMPLVYLILLVTTYLQLGLGQQVGVYVLIPASGFVALSLFRKKINHPRPYETWDICPLLDKDSAGRSMPSRHVFSATIISMACLHASLPIGLVCLIFSALLGLVRVLGGVHYPKDVLVGYACGLVWGFLFFLF

SEQ ID NO: 3674 - protein, 149 aa, Streptococcus pneumoniae
VMKLRIEIDGNLEETEIVIKTPTLTDEIADLQRLLQESKAPRLTFYKGTGEYYLDLSEILFFETEGSKIYAHNQKEAYEVRLKLYELESILPRYFNRVSKSTIANIRQIYSVDKSFSGTGTISFYQTHKEVHVSRHYQSLLKENLRNMR

SEQ ID NO: 3675 - protein, 224 aa, Streptococcus pneumoniae
MKKKAFGIVLLVLAALILVQGNFGIPSLGGHIWPLIGIAFFAYQSVGALLRRHLTSASFTALVALMIANHFYGILPIPNQTLIWAGVLIVLGVNMLTHSNRTWNGKKWWYDGEKNILIDKEVAFGTGTFYKQDQELVEDQVEVGFGNAKIYYDNAEMLGDFATLNIEVAFGNATVYVPQHWRVDLKVETSFGTAKADAPVAPTSKTLIIRGDVAFGKLELVYVK

SEQ ID NO: 3676 - protein, 73 aa, Streptococcus pneumoniae
VPGNKNNTLRKSLQTTSASSTTSKQCFEQPAASFLVWSLIFIEYKKSFSLKEEAFYLLFCCFLICPKAFFVLK

SEQ ID NO: 3677 - protein, 99 aa, Streptococcus pneumoniae
MNGMKAKKMWMAGLALLGIGSLALATKKVADDHKLMKTQEELTAIVRDHFSDMGEIATLYVQVYESSLESLLGGVIFEDGRHYTFVYENEDLVYEEEVL

SEQ ID NO: 3678 - protein, 105 aa, Streptococcus pneumoniae
MIQPASLEELASLVEKDGKKVFLFVADWCGDCRYIYPALPEIEESNPEFTFIRVDRDQYIDLAKLWDVYGIPSLVVLEKDKEIGRFVNRDRKSKQQINDFLAGLK

SEQ ID NO: 3679 - protein, 125 aa, Streptococcus pneumoniae
MFQATVSPFSLRKTRATLSLRSTFSLASPLFFTMTIRTSPTCSLLYVKIIVSFFSYFNPAKKSLICCLLLRSRLTKRPISLSFSRTTRLGIPYTSQSLAKSIYWSLSTRIKVNSGLLSSISGKAG

SEQ ID NO: 3680 - protein, 208 aa, Streptococcus pneumoniae
MIFTYNKEHVGDVLMVIVKNSGDAKLNVERKDKVARVFLKENGETVAWNIFEVSSLFEIAERGQVFLSDEQVARLNQELQAEGFTEEIVNDKEPKFVVGEIVEMVAHPDSDHLNICQVAVASDKIVQIVAGAPNARVGLKTIVALPGAMMPKGNFIFPGELRGEKSFGMMCSPRELHLPNAPQKRGVLELSEDQVVGTPFDPAKHWTA

SEQ ID NO: 3681 - protein, 253 aa, Streptococcus pneumoniae
MAKNVVITGATSGIGEAIARAYLEQGEDVVLTGRRIDRLEILKSEFAVSFPNQTVWTFPLDVTDMVMVKTVCSDILETIGRIDILVNNAGLALDLAPYQDYEELDMLTMLDTNVKGLMAVTRCFLPAMIKVNQGHVINMGSTAGIYAYAGAAVYSATKAAVKTFSDGLRIDTIATDIKVTTIQPGIVETDFSTVRFHGDKERAASVYQGIEALQAQDIADTVVYVTSQPRRVQITDMTIMANQQATGFMIHKK

SEQ ID NO: 3682 - protein, 131 aa, Streptococcus pneumoniae
MYNKVIMIGRLTSTPELHKTNNDKSVARATIAVNRRYKDQNGEREADFVNMVLWGRLAETLASYATKGSLISVDGELRTRRFEKNGQMNYVTEVLVTGFQLLESRAQRAMRENNAGQDLADLVLEEEELPF

SEQ ID NO: 3683 - protein, 94 aa, Streptococcus pneumoniae
MLKPLGDRVLLKIEEKEQTVGGFVLAGSAQEKTKTAQVVATGQGVRTLNGDLVAPSVKTGDRVLVEAHAGLDVKDGDEKYIIVGEANILAIIEE

SEQ ID NO: 3684 - protein, 202 aa, Streptococcus pneumoniae
LATGMALFFKASTAAATAVSIPRRIPIGFAPAVTFLIPSRTIAWVKTVAVVVPSPAISLVLEATSDTNLAPIFSKWSSNSISLAMVTPSLVIKGEPNDFSRTTLRPFGPKVTLTVSARISTPRTMAERASDENLISFDILTFSFYSSMIAKMLASPTMMYFSSPSLTSRPAWASTKTRSPVLTLGATKSPFKVRTPCPVATT

SEQ ID NO: 3685 - protein, 540 aa, Streptococcus pneumoniae
MSKEIKFSSDARSAMVRGVDILADTVKVTLGPKGRNVVLEKSFGSPLITNDGVTIAKEIELEDHFENMGAKLVSEVASKTNDIAGDGTTTATVLTQAIVREGIKNVTAGANPIGIRRGIETAVAAAVEALKNNAIPVANKEAIAQVAAVSSRSEKVGEYISEAMEKVGKDGVITIEESRGMETELEVVEGMQFDRGYLSQYMVTDSEKMVADLENPYILITDKKISNIQEILPLLESILQSNRPLLIIADDVDGEALPTLVLNKIRGTFNVVAVKAPGFGDRRKAMLEDIAILTGGTVITEDLGLELKDATIEALGQAARVTVDKDSTVIVEGAGNPEAISHRVAVIKSQIETTTSEFDREKLQERLAKLSGGVAVIKVGAATETELKEMKLRIEDALNATRAAVEEGIVAGGGTALANVIPAVATLELTGDEATGRNIVLRALEEPVRQIAHNAGFEGSIVIDRLKNAELGIGFNAATGEWVNMIDQGIIDPVKVSRSALQNAASVASLILTTEAVVANKPEPVAPAPAMDPSMMGGMM

SEQ ID NO: 3686 - protein, 69 aa, Streptococcus pneumoniae
VHVCCAPCSTYTLEYLTKYADVTIYFANSNIHPKAEYHKRVYVTKKFVSDFNERTGNTVQYLEAPYEPN

SEQ ID NO: 3687 - protein, 83 aa, Streptococcus pneumoniae
VAMDLGFDYFGSALTISPHKNSQTINSIGIDVQKIYTPHYFPNDFKKNQGYKRSVEMCEEYDIYRQCYCGCVYAAQAQNIDLV

SEQ ID NO: 3688 - protein, 63 aa, Streptococcus pneumoniae
LLYCSITLSIILNDLHSIIWHYITRIKIVLNKLYKCKKGIFRYSRVVTHFYKEIYSYDSVWHA

SEQ ID NO: 3689 - protein, 257 aa, Streptococcus pneumoniae
MIDKVIEQYKSHDNLDIRVELHKKYSKNKLGFNNWIFSNYQITDEVKVLELGCGTGELWKSNSDSIDKMKQLIVTDFSKDMVKSTKSVIGNRNNVNYEIMDIQKISFENETFDIVIANMLLHHVNDIPKALSEVNRVLKTGGIFYCATFGENGVVNYLASLFKDEVNQDLENRTFTLQNGKRYLSRYFNSVDTLLYDDELQVTSIDDLVKYIQSFKGISEIGSLEEEIIRKRLESEFNNGMLIIPKEYGMFIARKES

SEQ ID NO: 3690 - protein, 112 aa, Streptococcus pneumoniae
VKNYGEAFRYFRKLNGYSLEYAAADFISKSQLSRFERGENEISLSTFFELLSNINVSIENFCNHLEYYKRSERDDFLVNLSPNFYSLNIKGLEVIKNKQQKLFEKSGKKLIK

SEQ ID NO: 3691 - protein, 115 aa, Streptococcus pneumoniae
MVGKEILERTHYYEKIGKNRNLVVSACLNFWFCCLENSHLIYADYFEMKLQKLLKDDTKVFEKSTFKFVEGYKIYLTESKESGIKQMDNVIKYFEFIESKSIALYFQKRLNELID

SEQ ID NO: 3692 - protein, 177 aa, Streptococcus pneumoniae
MKLPKEGDFITIQSYKHDGSLHRTWRDTMVLKTTENAIIGVNDHTLVTESDGRRWVTREPAIVYFHKKYWFNIIAMIRDNGTSYYCNMASPYYLDEEALKYIDYDLDVKIFTDGEKRLLDVEEYERHKRKMNYSDDLDYILKEHVKILVDWINNGRGPFSEAYVNIWYKRYVELKNR

SEQ ID NO: 3693 - protein, 60 aa, Streptococcus pneumoniae
IVIKSPSFGSFITNQLSTIYKFIIYYCTIKLPKICEFHLEILKIFSKSACYIRKIVALSC

SEQ ID NO: 3694 - protein, 286 aa, Streptococcus pneumoniae
MRLIFNGIFCFTFRFIPLSYHILSYNRAMKITKLEKKKRLYLMELDNGDKCYITEDTIVRFMLSRDKVISEEELKEIQDFAQFSYGKNLALYHLSFKARTEKEVREYLKKYDIDKNIVSQVIANLKEDKWINDGQYAYAIINTNQLSGDKGPYVLTQKLAQKGISKSTIEENLKEFDFSEVAQRVANKLLKKYEGKLPARALQDKIIQNLTNKGFSYSDAKIAFDDLDSQVDQETTQELIFKELDKQYTKYARKYEGYELKQRLTQVLARKGYDFSDIASALREYL

SEQ ID NO: 3695 - protein, 451 aa, Streptococcus pneumoniae
MNLKVKQKIPLKIKRMGINGEGIGFYQKTLVFVPGALKGEDIYCQITSIRRNFVEAKLLKVNKKSKFRIVPSCTIYNECGGCQIMHLHYDKQLEFKTDLLHQALKKFAPAGYENYEIRPTIGMQEPKYYRAKLQFQTRKFKNQVKAGLYAQNSHYLVELKDCLVQDKETQVIANRLAELLTYHQIPITDERKVLGVRTIMVRRARKTGQVQIIIVTNRQLNLTQLVKELVKDFPEVVTVAVNTNTAKTSEIYGEKTEIIWGQESIQEGVLNYEFSLSPRAFYQLNPEQTEVLYSEAVKALDVDKEDHLIDAYCGVGTIGFAFAKKVKTLRGMDIIPEAIEDAKRNAKRMGFDNTHYEAGTAEEIIPRWYKEGYRADALIVDPPRTGLDDKLLDTILTYVPEKMVYISCNVSTLARDLVRLVEVYDLHYIQSVDMFPHTARTEAVVKLIKKV

SEQ ID NO: 3696 - protein, 81 aa, Streptococcus pneumoniae
YNAGPSGSDASAPFKQMSCNIHSYAVLAIVSNSYPPLPGRLPTRYSPVRNSSREASSSFSVLLACIRHAASVRPEPGSNSH

SEQ ID NO: 3697 - protein, 49 aa, Streptococcus pneumoniae
LLGQTSVHCRRFPTAASRRSLGRVSVPVWPITLSGRLCIVALVSPYPTN

SEQ ID NO: 3698 - protein, 61 aa, Streptococcus pneumoniae
DTAQTPTGGSSRESSAMDGSLTEQRRVSEEGFRIVKLCCKRRTSVRVESSHCDGILPERDG

SEQ ID NO: 3699 - protein, 86 aa, Streptococcus pneumoniae
AKAPQDLSRLNKTNAQFLILRKEVIQPHLPIRLPCYDFTPIIYPTLGGWLLTVTSPTSGVTNSRGVTGGVYKARERIHRGVLIRDY

SEQ ID NO: 3700 - protein, 75 aa, Streptococcus pneumoniae
MTFVNRRNSLYSSKISSNFVSVALPYVWLLTSSVSSTTSKTCFELTSSVLSTTSKQCFEQPAASFLVYSLIFIEY

SEQ ID NO: 3701 - protein, 78 aa, Streptococcus pneumoniae
TRKLAAGCSKHCFEVVDRTDEVSSKHVFEVVDETDEVSNHTYGKATLTKFEEIFEEYKEFRLLTKVILFSRIVDAMSR

SEQ ID NO: 3702 - protein, 93 aa, Streptococcus pneumoniae
MGYTVAVVGATGAVGAQMIKMLEESTLSIDKIRYLACARSAGKSVGFKDQDITIEETTEAAFEGVDIALFSAGSSTSAKYAPYASKSWRGSSR

SEQ ID NO: 3703 - protein, 91 aa, Streptococcus pneumoniae
QAGVVVVDNTSYFRQNPDVPLVVPEVNAHALDAHNGIIACPNCSTIQMMVALERFRQKWGLERIIVLTYQASIQELVWEQFLRHNVNFVKS

SEQ ID NO: 3704 - protein, 221 aa, Streptococcus pneumoniae
AVSPKMGLGAYHCFNLSSQYSGAGMGAILETQRELREVLNDGVKPCDLHAEILPSGGDKKHYPIAFNALPQIDVFTDNDYTYEEMKMTKETKKIMEDDSIAVSATCVRIPVLSAHSESVYIETKEVAPIEEVKAAIAAFPGAVLEDDVAHQIYPQAINAVGSRDTFVGRIRKDLDAEKGIHMWVVSDNLLKGAAWNSVQIAETLHERGLVRPTAELKFELK

SEQ ID NO: 3705 - protein, 311 aa, Streptococcus pneumoniae
MSYQDLKECKIITAFITPFHEDGSINFDAIPALIEHLLDHHTDGILLAGTTAESPTLTHDEELELFAAVQKIVNGRVPLIAGVGTNDTRDSIEFVKEVAEFGGFAAGLAIVPYYNKPSQEGMYQHFKAIADASDLPIIIYNIPGRVVVELTPETMLRLADHPNIIGVKECTSLANMAYLIEHKPEEFLVYTGEDGDAFHAMNLGADGVISVASHTNGDEMHEMFIAIAESDMKKAAAIQRKFIPKVNALFSYPSPAPVKAVLNYMGFEAGPTRLPLVPAPEEDAKRIIKVVVDGDYEATKATVTGVLRPDY

SEQ ID NO: 3706 - protein, 457 aa, Streptococcus pneumoniae
MITREFDTIAAISTPLGEGAIGIVRLSGTDSFAIVQKIFKGKDLNKVASHTLNYGHIIDPLTGKVMDEVMVGAMKSPKTFTREDIIEINTHGGIAVTNEILQLAIREGARLAEPGEFTKRAFLNGRVDLTQAEAVMDIIRAKTDRAMNIAVKQLDGSLSDLINNIRQEILNTLAQVEVNIDYPEYDDVEEATTAVVREKTMEFEQLLTNLLRTARRGKILREGISTAIIGRPNVGKSSLLNNLLREDKAIVTDIAGTTRDVIEEYVNINGVPLKLIDTAGIRETDDIVEQIGVERSKKALKEANLVLLVLNASEPLTAQDRQLLEISQDTNRIILLNKTDLPETIETSKLPEDVIRISVLKNQNIDKIEERINNLFFENAGLVEQDATYLSNARHISLIEKAVESLQAVNQGLELGMPVDLLQVDLTRTWEILGEITGDAAPDELITQLFSQFCLGK

SEQ ID NO: 3707 - protein, 74 aa, Streptococcus pneumoniae
VVKWKKSKLVEEAIMPFVRIDLFEGRTLEQKKALAKEVTEAVVRNTGAPQSAVHVIINDMPEGTYFPQGEMRTK

SEQ ID NO: 3708 - protein, 163 aa, Streptococcus pneumoniae
VIMTSALDTRDRVGYVSSRIGMKRPALAIEETTDIFGYIRDLPEKPYCVLVDEAQFLKRHHVYDLARVVDELDIPVMAFGLKNDFRNELFEGSKYLLLLADKIDEIKTICQYCKKKATMVLRTQDGLPVYDGEQIQIGGNETYISVCRKHYFAPEINKENEEK

SEQ ID NO: 3709 - protein, 280 aa, Streptococcus pneumoniae
MNIYDQLQAVEDRYEELGELLSDPDVVSDTKRFMELSKEEASNRDTVIAYREYKQVLQNIVDAEEMIKESGGDADLEEMAKQELKDAKAEKEEYEEKLKILLLPKDPNDDKNIILEIRGAAGGDEAALFAGDLLTMYQKYAEAQGWRFEVMEASMNGVGGFKEVVAMVSGQSVYSKLKYESGAHRVQRVPVTESQGRVHTSTATVLVMPEVEEVEYDIDPKDLRVDIYHASGAGGQNVNKVATAVRIVHLPTNIKVEMQEELYPAEEPREGYEDYPCTRR

SEQ ID NO: 3710 - protein, 142 aa, Streptococcus pneumoniae
LIQKTFVSTSITPLVLVDRTSIRLRLPFVSFTCQPISRLRCRKNCTQQKNREKAMKIIRARVADHFAQIAQDEQDAERKSTIGTGDRSERIRTYNFPQNRVTDHRIGLTLQKLDTILSGKLDEVVDALVLYDQTQKLEELNK

SEQ ID NO: 3711 - protein, 279 aa, Streptococcus pneumoniae
MKLAQLFSNFEEELIRQGEEAESLSFVYRSLKNLSFTDFIFALQQEVTTEEEKQFVEDIYQQLAAHKPAQYIIGQADFYGMHLKVDERVLIPRPETEELVELILTENLETNLSVLDIGTGSGAIALALAKNRPDWSVTAADVSQEALELASENASDQNLNIFFKKSDCFAEISEKYDIIVSNPPYISREDESEVGLNVLHSEPHLALFADEDGLAIYCRIAEDAKDYLKDGGKIYLEIGYKQGQSVPELFRKHLPEKKVRTLKDQFGQDRMVVVDDGQD

SEQ ID NO: 3712 - protein, 200 aa, Streptococcus pneumoniae
MMDRIRQELEKGGAVILPTETVYGLFAKALDEKAVDHVYQLKRRPRDKALNLNVASLEDILHFSKNQPAYLQKLVETFLPGPLTIILEANDRVPYWVNSDLATIGFRMPSHPITLDLIRETGPLIGPSANISGQASGVTFEQILKDFDQEVLGLEDDAFLTGQDSTIVDLSGDKVKILRQGAIKREDILARLPEISFEEA

SEQ ID NO: 3713 - protein, 143 aa, Streptococcus pneumoniae
MLRDLQETDVKAICDINQETLGYTFSPEETASQLARLSQDSHHFLLGYEDAANHVLLGYVHAEVYESLYSKAGFNILALAVSPQAQGQGIGKSLLQGLEQEAKRCGYGFIRLNSANHRLGAHAFYEKVGYTCDKMQKRFIRIF

SEQ ID NO: 3714 - protein, 418 aa, Streptococcus pneumoniae
MISDKDDFKAYDADLWNAIATEEERQQNNIELIASENVVSKAVMAAQGSILTNKYAEGYPGRRYYGGTDVVDVVETLAIERAKEIFGAKFANVQPHSGSQANCAAYMSLIEPGDTVMGMDLAAGGHLTHGAPVSFSGQTYNFLSYSVDPETELLDFDAILKQAQEVKPKLIVAGASAYSQIIDFSKFREIADAVGAKLMVDMAHIAGLVAAGLHPSPVPYAHITTTTTHKTLRGPRGGLILTNDEDLAKKINSAIFPGIQGGPLEHVVAAKAVSFKEVLDPAFKEYAANVIKNSKAMADVFLQDPDFRIISGGTENHLFLVDVTKVVENGKVAQNLLDEVNITLNKNSIPYETLSPFKTSGIRIGAAAITARGFGEEESRKVAELIIKTLKNSENEAVLEEVRSAVKELTDAFPLYEE

SEQ ID NO: 3715 - protein, 335 aa, Streptococcus pneumoniae
MPSHYTRNKTFMDIYIKKAIIHQFSPDDTELFLADKFLNITPKIEEYLRKKIEHVYSDEAKTGIFEEENPFFNHITDDLLETSVTLANLWKEEFSISENLKTNDLIFVQFSKEGVEHFAFLRIALRETLTHLGGEVDNPIKLTQNNLPGFGTGADEALVVNLQSRKYHLIEKRIKYNGTFLNYFSDNLLAVAPKISPKKSIKELEKTAQRIAESFNTDDFQFQSKVKSAIFNNLEESNELSPEKLANDLFDNNLTARLSFIDQVKEAVPEPVQFDEIDASRQLKKFENQKLSLSNGIELIVPNNVYQDAESVEFIQNENGTYSILIKNIEDIQSK

SEQ ID NO: 3716 - protein, 204 aa, Streptococcus pneumoniae
MFKRIRRVLVLAVFLFAGYKAYRVHQDVKQVMTYQPMVREILSEKDTPANEELVLAMIYTETKGKEGDVMQSSESASGSTNTINDNASSIRQGIQTLTGNLYLAQKKGVDIWTAVQAYNFGPAYIDFIAQNGKENTLALAKQYSRETVAPLLGNTTGKTYSYIHPISIFHGAELYVNGGNYYYSRQVRLNLYIIKCFTLFSTSG

SEQ ID NO: 3717 - protein, 324 aa, Streptococcus pneumoniae
MRKKLFLTSAAVLWAVTAMNSVHAATDVQKVIDETYVQPEYVLGSSLSEDQKNQTLKKLGYNASTDTKELKTMTPDVYSKIMNVANDSSLQLYSSAKIQKLGDKSPLEVKIETPENITKVTQDMYRNAAVTLGMEHAKITVAAPIPVTGESALAGIYYSLEANGAKVPQANKDLAQEELKALSDINAENKDKSGYDANKLNVALADIKSGLAKAKESKGNLTEEDIRKIVEDTLKNYKLDQVITGNQINIIINFALNLSKSDILSNADFTKTLNDLKQSIVSQAGDSFKNINLNFDADKALEDGGNFLSSLWQALVNFFKSFGS

SEQ ID NO: 3718 - protein, 547 aa, Streptococcus pneumoniae
KEKRMLKKNDIVEVEIVDLTHEGAGVAKVDGLVFFVENALPSEKILMRVLKVNKKIGFGKVEKYLVQSPHRNQDLDLAYLRSGIADLGHLSYPEQLKFKTKQVKDSLYKIAGIADVEVAETLGMEHPVKYRNKAQVPVRRVNGVLETGFFRKNSHDLMPLEDFFIQDPVIDQVVVALRDLLRRFDLKPYDEKEQSGLIRNLVVRRGHYSGQIMVVLVTTRPKVFRVDQLIEQVIKQFPEIVSVMQNINDQNTNAIFGKEWRTLYGQDYITDQMLGNDFQIAGPAFYQVNTEMAEKLYQTAIDFAELKKDDVIIDAYSGIGTIGLSVAKHVKEVYGVELIPEAVENSKKNAQLNNISNAHYVCDTAENAMKNWLKDGIQPTVILVDPPRKGLTESFIKASAQTGADRIAYISCNVATMARDIKLYQELGYELKKVQPVDLFPQTHHVETVALLSKLDVDKHISVEIELDEMNLTSAESKATYAQIKEYVWNKFELKVSTLYIAQIKKKCGIELREHYNKSKKDKQIIPQCTPEKEEAIMDALRHFKMI

SEQ ID NO: 3719 - protein, 97 aa, Streptococcus pneumoniae
LYAPFMKKDKEVYDKVCEYLSPHLNKDMEVLELACWFRVITVIEANSYVNIRSSRLLPKFKTQKINSWCAAYNIHFNNGYCKQHTNEFKDSLKSLIL

SEQ ID NO: 3720 - protein, 82 aa, Streptococcus pneumoniae
LSAIISLFFSSLNLFNYSINIDFIQSYIDLVICFREFVVLFRPYFAINCFKWDLLSLPFLPPNFEYKKDDRVFNFYRLRFTY

SEQ ID NO: 3721 - protein, 64 aa, Streptococcus pneumoniae
MDTVSKKRLKKTDVIAMAGLTTNVMAQMGKDKPITFKNLERICKALSCTPNDIISFEDNFSDEE

SEQ ID NO: 3722 - protein, 79 aa, Streptococcus pneumoniae
GLCKRSIGFNEVEENINQGTGQITTFNQLGFKGYSDKPDGWYLPKNMNDVAIILETKSEERDISKQIFIDELMKNIDII

SEQ ID NO: 3723 - protein, 344 aa, Streptococcus pneumoniae
GVFMKNKFFLIAILAMCIVFSACSSNSVKNEENTSKEHAPDKIVLDHAFGQTILDKKPERVATIAWGNHDVALALGIVPVGFSKANYGVSADKGVLPWTEEKIKELNGKANLFDDLDGLNFEAISNSKPDVILAGYSGITKEDYDTLSKIAPVAAYKSKPWQTLWRDMIKIDSKALGMEKEGDELIKNTEARISKELEKHPEIKGKIKGKKVLFTMINAADTSKFWIYTSKDPRANYLTDLGLVFPESLKEFESEDSFAKEISAEEANKINDADVIITYGDDKTLEALQKDPLLGKINAIKNGAVAVIPDNTPLAASCTPTPLSINYTIEEYLNLLGNACKNAK

SEQ ID NO: 3724 - protein, 211 aa, Streptococcus pneumoniae
PKIIKGSSVDIEDNVAAPRLPICQNLNLSKTLLFGKIKKLTKLLKAILTQVPDKASFIGVRPAFPLTAIAYTKITLTKPPMIAKLIWLMLDEIPKKERPITTLRLAPVFIPSIPGSAIGFLVTDCINTPLMARLEPAKIAKIVLGILLYIIDLIKSSFVLPIPKAAKKSLILISFVPSFNDKNIVIRRPRQITKIMPRFICFLFRIFACIS

SEQ ID NO: 3725 - protein, 335 aa, Streptococcus pneumoniae
MRNKKQINLGIIFVICLGLLITIFLSLKLGTKEINIRDFLAAFGMGNTNDDFIKSIIYKRIPRTIFAILAGSSLAISGVLMQSVTRNPIADPGILGINTGASLSVVIGLSFLGISSSISHISFAIIGGLVSVIFVYAIAVSGKAGLTPIKLALSGTCVSMALSSFVSFLILPNNNVLDKFRFWQIGSLGAATLSSISTLLPFIILGHLIAIFISSDLNALAMGDEMAVGLGVNVNRIRSLAIIASVLLCSSITAIGGPIGFVGLIVPHFCGLFISKDIRTMTISSSFIGAELLLICDIIGRMLGKPGEIEVGIITAIIGGPVLIYVTMKNRGVNN

SEQ ID NO: 3726 - protein, 335 aa, Streptococcus pneumoniae
MQNLIIGIQKRKNRITLFSSLFLLIIISLSFFILLIGDESYSFSTLIKVLNSETVPGASFSIMEIRLPKLLAGIIAGWSFGLAGFIFQTMLRNPLASPDIIGVTSSSSIAAVFCILVLKTNSLTTGIISITCGLTSSLILFLLAKKDGFSAARLIILGIGFQAVTRAGTSFLLLKVARYELQEVMRWLSGSLSFTKLDDIPLVLIVSIIATILVLFFNKRLEIIELGEEIAIGLGANPELSRLVLIFCAVSLTAFSTSITGPIACISFLAGPIALNIGKKRSPILAGLVGILLVLLSDIFSQNILPARYPVGVVTGLLGSPYLIYLLIKMNRRNI

SEQ ID NO: 3727 - protein, 73 aa, Streptococcus pneumoniae
KPIPNIISLAAEKPSFLASKNNIKDDVSPQVIEIIPVVKLFVFNTNMQKTAAIDEELVTPIISGLARGFLNIV

SEQ ID NO: 3728 - protein, 137 aa, Streptococcus pneumoniae
MSDNKTSKIPTNPANIGLLFLPIFKAMGPAKKDIQAIGPVIEVEKAVKDTAQKIKTSLESSGFAPSPIAISSPSSIISSLLLKNKTNIVAIILTIRTRGMSSNFVKDKEPLSHLITSCNSYLATFNNKNEVPALVTA

SEQ ID NO: 3729 - protein, 264 aa, Streptococcus pneumoniae
MKGLWSNSLTCGYDEKIILENINIKIPEEKISVIIGSNGCGKSTLIKTLSRLIKPLEGEVLLDNKSINSYKEKDLAKHIAILPQSPIIPESITVADLVSRGRFPYRKPFKSLGKDDLEIINRSMVKANVEDLANNLVEELSGGQRQRVWIALALAQDTSILLLDEPTTYLDISYQIELLDLLTDLNQKYKTTICMILHDINLTARYADYLFAIKEGKLVAEGKPEDILNDKLVKDIFNLEAKIIRDPISNSPLMIPIGKHHVSS

SEQ ID NO: 3730 - protein, 86 aa, Streptococcus pneumoniae
RITAILKRSGLIINKKKVQRLVQKLKLQVKSYSRKSRKYSSYKGQVGKISDNKIKRNIYYRKKGEIESSTNRLIYSKKIFTRWKNS

SEQ ID NO: 3731 - protein, 151 aa, Streptococcus pneumoniae
KEIFITEKKGKSSQVPTGSSIPKRYLLDGKTPRISATNIDNGILGYYEDIDDKNYRVFENFISVSCLGAVFYHKYKASLDMKIHCLKLKNKELNKEVAFYLTSIIRQALKNTEYKDQISSTVLPDIKIKLPIDSRGTPDWNYMERYRERER

SEQ ID NO: 3732 - protein, 91 aa, Streptococcus pneumoniae
REGEIDKKSTPIFYGEFKNVRLSKEEYKNLKEKLNSHTDIMINKLSRYMESSGKTYQNHYVTILKWYEEDKDKLRQKGLNKKMNYDVGESL

SEQ ID NO: 3733 - protein, 82 aa, Streptococcus pneumoniae
VPFHLFLSIKILLHHNSFFYLNLSVLVCLYLLHTILRLSHSGFDRSYHCFPCIWIVYLSLYLCVSLIFLLDFYILLCLTLHF

SEQ ID NO: 3734 - protein, 69 aa, Streptococcus pneumoniae
RNARRLLDDSYQEGLIFTATYAVGIGPFYISKFYFKIGYQERLLFTVKYKRVIYRILLHQDKYFLMVKF

SEQ ID NO: 3735 - protein, 559 aa, Streptococcus pneumoniae
MSKEKIKVYLYTRVSTSIQIEGYSLEAQKSRMKAFAIYNDYEIVGEYEDAGKSGKSIEGRIQFNRMMEDIKSGKDGVSFVLVFKLSRFARNAADVLSTLQIMQDYGVNLICVEDGIDSSKDAGKLMISVLSAVAEIERENIRIQTMEGRIQKAREGKWNGGFAPYGYKLEDGKLFINEEEAVAIRTIFDQYVNTTIGANGISKYLENHGIRKIPRQNGKNPLFDAGLIRKILKNPVYNGKIAFGRRTLEKVHGTRNEYKQVEQDEYLISEGIHEAIVSDEVWQAAQVKLKSQAKKYEHVNKGKDTRTHLLSGIVKCPICGVGMFGNKCIKKKKDGTKYKDFYYYGCKHRQMIRGHKCTFSKQIREELLDDAVAEVIVKIVSNPKFASMMQEKINMKVDTSEIEKEIDNYQKELRKSHSTKFKLIEEIDNLDVEDKHYKRRKQDLDDRLYRMYDKIDELESSLIDAKAKKQTIEAEKLTGDNIYKVLIYFDKLYKVMNDVERRQLISALISEIQVYEEKQSNGQWLKSITFKLPIIEENLNIGLDNDEQVECVSLLEKRS

SEQ ID NO: 3736 - protein, 203 aa, Streptococcus pneumoniae
VLIYISLIMKMERLSMVILELYQNDYSKDLVAFDSIEDGKAFVAQIPGYTLETEDGFEVEYFNPKNIPDYMEIIFNGNIVPLSKFMFDPEENVNIIWKEISNLSLKNDRVIEGYSKIDAYVVNNHEVKAYVETRETNYRKAKDFLESRGYEIDRSFFGSEDGEAILYRKKGIEVWHFLCHLDPMFVEIEDVEGYVKEEVGEIQ

SEQ ID NO: 3737 - protein, 62 aa, Streptococcus pneumoniae
MATDKNRIMISLDDKNLEKLENLVEDARDRRGMRLTKSQVIELLLNTVDYFDDIMGAIYSKK

SEQ ID NO: 3738 - protein, 252 aa, Streptococcus pneumoniae
MVVYIRQSKLPSEVSINKYNAQVGAYLQGEEAVLYQSFSEIKELTSEDIVVDYIMETRALLKMMGLNVPVHDYPIELKEFYGRKIYAGILGEIVNIPDNWGKFIKPKAGSKVFTGRVVNGTHDLIGIGLPFDYPIWISEVVEFIAEWRCFVLDGRVLDVRPYTGDYHAQFDASVIDEAISCWKDAPIAYGLDIGVTRDGRTLVVEVNDGYALGNYGLSPLKSINFHRARWKEMVKPYFEKNEIFKIQQDVIF

SEQ ID NO: 3739 - protein, 284 aa, Streptococcus pneumoniae
MLGAIIGDIVGSVYEWNNIKTKDFPLFRKDCFFTDDTVMTCAVAEAIMNGGQKDDFIDAMKKYGRMYPNADYGARFNAWLNSDNREPYNSFGNGSAMRISPCAWIMDCGFYAKTGMWPSSRGLTSLSAEVTHNHPEGVKGAMATADAIFLCRFYFGGYCREYEQSINDNPTECKRRIKDYIEKEYDYNLSQTLDEIRPNYRFNETCQETVPQAIIAFLESRDFEDAIRNAISLGGDSDTLAAITCSIAEAAYGIPDWIKDKAYSYLDEPLKDVVRRWENRIKAY

SEQ ID NO: 3740 - protein, 294 aa, Streptococcus pneumoniae
MKKAMVIINPTSGGEKALDYKEKLENKAKEYFEYVETKITEKALDATHFAEEASREQYDAVVVFGGDGTVNEVISGIDERDYIPKLGIIPGGTGNLITKLLEINQDIDGAIDELDFDLTNKIDIGKANDNYFGYIFSIGSLPEAIHNVEIEDKTKFGILTYAVNTMKSVMTDQVFNIKVETENGNYVGEASHVLVLLTNYFADKKIFEENKDGYANILILKDASIFSKLSVIPDLLKGDVIANDNIEYIKARNIKISSDSELESDVDGDKSDNLPVEIKVLAQRVEVFSKPKED

SEQ ID NO: 3741 - protein, 92 aa, Streptococcus pneumoniae
MELSAIYHRTESEYAYLYKDKKLHIRIRTKKGDIESINLHYGDPFIFMEEFYQDTKEMVKITSGTLFDHWQVEVSVDFARIQYLFELRDTEG

SEQ ID NO: 3742 - protein, 484 aa, Streptococcus pneumoniae
LYGDKGCVENSLENLHAIGNGFKLSYLHEIDACKVPDWVSNTVWYQIFPERFANGNALLNPEGTLDWDSSVTPKSDDFFGGDLQGIIDHMDYLQDLGITGLYLCPIFESTSNHKYNTTDYFEIDRHFGDKETFRELVDQAHHRGMKVMLDAVFNHIGSQSLQWKNVVKNGEQSAYKDWFHIQQFPVTTEKLVNKRDLPYHVFGFEDYMPKLNTANPEVKNYLLKVATYWIEEFNIDAWRLDVANEIDHQFWKDFRKAVLAKNPDLYILGEVWHTSQPWLNGDEFHAVMNYPLSDSIKDYFLRGIKKTDQFIDEINGESMYYKQQISEVMFNLLDSHDTERILWTANEDVQLVKSALAFLFLQKGTPCIYYGTELALTGGPDPDCRRCMPWERVSSDNDMLNFMKRLIKIRKYASVIISHGKYSLQEIKSDLVALEWKYEGRILKAIFNQSTEDYLLEKEAVALASNCQELENQLVISPDGFVIF

SEQ ID NO: 3743 - protein, 100 aa, Streptococcus pneumoniae
MGAARDFLELINHKGLPLFNPLVGDSHVNNRQEYDNTGSGNLQPEKWNETAKQLYNAIMWLIILWNAKPDTPLFNFKDEVIKYKTYEPFESSIKLVSINE

SEQ ID NO: 3744 - protein, 142 aa, Streptococcus pneumoniae
MDGITKDFIKTAKLMKQLWPQLTDKEAIDEVKKYTNGKNTAIFTEVEGDTIVGLALCSLRFDYVEGCKYSPVGFLEGIIVDEEYRLKDIAKNLCTKCEEWAKNKGCKEFASDCTLTNTDSIRFHLNIGFQEANRIIHFKKKL

SEQ ID NO: 3745 - protein, 189 aa, Streptococcus pneumoniae
MKKYSIVDKIVLSTKIKRIIIFTVFRENWEPYMKKYTEVFQSQFPNLNIDYLLLDTEQIDLDSYLDADIIIIGGGNTEKYIATYVNQEFKSYIDHMLNKEAKIIGFSAGALLLGEKVYVSPNDNSDHQIKIKNGLGLFSQFLISVHYDSWNDKANKDRAEELVNVPIIPLNDHSCLVLDKLGNIIEKID

SEQ ID NO: 3746 - protein, 70 aa, Streptococcus pneumoniae
MYFVIAEFNANWFTHRNSKRSYFLHHIKFKFFYNLTSTYQKHARNIFTDFDLSHNIFYHLTSLYLWLSYY

SEQ ID NO: 3747 - protein, 93 aa, Streptococcus pneumoniae
MMEKVASLGVPMCKPISIELCDDEVHSLHEWIDGRDAIDSILTYSENQQYTYGVEAGKILRKIHTIPATEVCEDWEIFFNLKIDDKISNEMIW

SEQ ID NO: 3748 - protein, 64 aa, Streptococcus pneumoniae
MNDEASKQLRDSRFKSLAGVQRTTFEEMLAVLKTTYQRKHAKGGRKTKLSLDDLLMVTIQYMRE

SEQ ID NO: 3749 - protein, 409 aa, Streptococcus pneumoniae
MKISKRHLLNYSILIPYLLLSILGLIVVYSTTSAILIEEGKSALQLVRNQGIFWIVSLILIALIYKLRLDFLRNERLIILVILIEMLLLFLARFIGISVNGAYGWISVAGVTIQPAEYLKIIIIWYLAHRFSKQQEEIATYDFQVLTQNQWLPRAFNDWRFVLLVLIGSLGIFPDLGNATILVLVSLIMYTVSGIAYRWFSTILALVSATSVFVLTTISLIGVETFSKIPVFGYVAKRFSAFFNPFADRADAGHQLANSYFAMVNGGWFGLGLGNSIEKRGYLPEAHTDFVFSIVIEEFGFVGASLILALLFFMILRIILVGIRAENPFNAMVALGVGGMMLVQVFVNIGGISGLIPSTGVTFPFLSQGGNSLLVLSVAVAFVLNIDASEKRAKLYRELENQPMNLLLK

SEQ ID NO: 3750 - protein, 898 aa, Streptococcus pneumoniae
MSLQKLENYSNKSVVQEEVLILTELLEDITKNMLAPETFEKIIQLKELSTQEDYQGLNRLVTSLSNDEMVYISRYFSILPLLINISEDVDLAYEINHQNNIDQDYLGKLSTTIKLVAEKENAVEILEHLNVVPVLTAHPTQVQRKSMLDLTNHIHSLLRKYRDVKLGLINKDKWYNDLRRYIEIIMQTDMIREKKLKVTNEITNAMEYYNSSFLKAVPHLTTEYKRLAQAHGLNLKQAKPITMGMWIGGDRDGNPFVTAKTLKQSALTQCEVIMNYYDKKIYQLYREFSLSTSIVNVSKQVREMARQSKDNSIYREKELYRRALFDIQSKIQATKTYLIEDEEVGTRYETANDFYKDLIAIRDSLLENKGESLISGDFVELLQAVEIFGFYLASIDMRQDSSVYEACVAELLKSAGIHSRYSELSEEEKCDLLLKELEEDPRILSATHAEKSELLAKELAIFKTARVLKDKLGDDVIRQTIISHATSLSDMLELAILLKEVGLVDTERARVQIVPLFETIEDLDHSEETMRKYLSLSLAKKWIDSRNNYQEIMLGYSDSNKDGGYLSSCWTLYKAQQQLTAIGDEFGVKVTFFHGRGGTVGRGGGPTYEAITSQPLKSIKDRIRLTEQGEVIGNKYGNKDAAYYNLEMLVSAAINRMITQKKSDTNTPNRYEAIMDQVVDRSYDVYRDLVFGNEHFYDYFFESSPIKAISSFNIGSRPAARKTITEIGGLRAIPWVFSWSQSRVMFPGWYGVGSSFKEFINKNPENIAILRDMYQNWPFFQSLLSNVDMVLSKSNMNIAFEYAKLCEDEQVKAIYETILNEWQVTKNVILAIEGHDELLADNPYLKASLDYRMPYFNILNYIQLELIKRQRRGELSSDQERLIHITINGIATGLRNSG

SEQ ID NO: 3751 - protein, 101 aa, Streptococcus pneumoniae
MKNKRLIGIIAALAVLVAGSLIYSSMNKSEAQNNKDEKKITKIGVLQFVSHPSLDLIYKGIQDGLAEEGYKDDQVKIDFMNSEGDQSKVATMSKQLVANGE

SEQ ID NO: 3752 - protein, 209 aa, Streptococcus pneumoniae
MAAITDPIGANLVKDLKKPGGNVTGVSDHNPAQQQIELIKALTPNVKTIGALYSSSEDNSKTQVEEFKAYAEKAGLTVETFAVPSTNEIASTVTVMTSKVDAIWVPIDNTIASGFPTVVSSNQSSKKPIYPSATAMVEVGGLASVVIDQHDLGVATGKMIVQVLKGAKPADTPVNVFSTGKSVINKKIAQELGITIPESVLKEAGQVIE

SEQ ID NO: 3753 - protein, 222 aa, Streptococcus pneumoniae
LAGMAAGLLYTKGKIPTLLSGILVMTSRHSIMLLIMGRANLGLLGTKQIQDVLPFDSDLNQLLTGLIFVSIVIALMLFFLDTKLGQAYIATGDNPDMARSFGIHTGRMELMGLVLSNGVIALAGALIAQQEGYADVSRGIGVIVVGLASLIIGEVIFKSLSLAERLVTIVVGSIAYQFLVWAVIALGFNTSYLRLYSALILAVCLMIPTFKQTILKGAKLSK

SEQ ID NO: 3754 - protein, 252 aa, Streptococcus pneumoniae
MTAIVELKNATKIVKNGFDEEKIILNDVSLEIFERDFITILGGNGAGKSTLFNTIAGTLSLTSGTIRILGEELTKFSPEKRAKYLSRVFQDPKMGTAPRMTVAENLLIAKFRGEKRGLLPRRLTSYKDEFQATIEKVGNGLEKHLNTPIEFLSGGQRQALSLLMATLKRPELLLLDEHTAALDPKTSVALMGLTDEFVKKDQLTALMITHHMEDALKYGNRLIVMKEGRVIQDLKQEEKAKMKISDYYQLFE

SEQ ID NO: 3755 - protein, 63 aa, Streptococcus pneumoniae
VNPIKATLVFGSRAAVCSSNKSNSGRFKVAIKRLKACLCPPDKNSIGVFKCFSRPFPTFSMVA

SEQ ID NO: 3756 - protein, 591 aa, Streptococcus pneumoniae
MEVLCMVDKQVIEEIKNNANIVEVIGDVISLQKAGRNYLGLCPFHGEKTPSFNVVEDKQFYHCFGCGRSGDVFKFIEEYQGVTFMEAVQILGQRVGIEVEKPLYSEQKPASPHQALYDMHEDAAKFYHAILMTTTMGEEARNYLYQRGLTDEVLKHFWIGLAPPERNYLYQRLSDQYREEDLLDSGLFYLSDANQFVDTFHNRIMFPLTNDQGKVIAFSGRIWQKTDSQTSKYKNSRSTAIFNKSYELYHMDRAKKSSGKASEIYLMEGFMDVIAAYRVGIENAVASMGTALSREHVEHLKRLTKKLVLVYDGDKAGQAAILKALDEIGDMPVQIVSMPDNLDPDEYLQKNGPEDLAYLLTKTRISPIEFYIHQYKPENSENLQAQIEFIEKIAPLIVKEKSIAAQNSYIHILADSLASFDYAQIEQIVNESRQVQRQNRMERISRPTPITMPVTKQLSAIMRAEAHLLYRMMESPLVLNDYRLREDFAFATPEFQVLYDLLGQYGNLPPEVLAEQTEEVERAWYQVLAQDLPAEISPQELSEVEMTRNKALLNQDNMRIKKKVQEASHVGDTDTALEELERLISQKRRME

SEQ ID NO: 3757 - protein, 304 aa, Streptococcus pneumoniae
MATKQKEVTTFDVQVAEFIRNHKQKGTATDDEINASLVIPFTLDADGIEDLLQRIQDAGISITDNEGNPSARVLSNEEEPELSDEDLIGSTSAKVNDPVRMYLKEIGVVPLLTNEEEKELALAVEAGDIEAKQRLAEANLRLVVSIAKRYVGRGMQFLDLIQEGNMGLMKAVDKFDYSKGFKFSTYATWWIRQAITRAIADQARTIRIPVHMVETINKLVREQRNLLQELGQDPTPEQIAERMDMTPDKVREILKIAQEPVSLETPIGEEDDSHLGDFIEDEVIENPVDLIRLVSSCVSNWMKS

SEQ ID NO: 3758 - protein, 65 aa, Streptococcus pneumoniae
ILLQTVKENVLRLRFGLDDGKMRTLEDVGKVFNVTRERIRQIEAKALRKLRQPSRSKPLRDFIED

SEQ ID NO: 3759 - protein, 109 aa, Streptococcus pneumoniae
MAYTEEQIENIKTRILTALEEVIDPELGIDIVNLGLIYEIRFDGDTGQTEIDMTLTTMGCPLADLLTDQIYDAMIEVPEVTDTEVKLVWYPAWTVEKMSRYARIAIGIK

SEQ ID NO: 3760 - protein, 68 aa, Streptococcus pneumoniae
NHATRKDRLEEKRGNFLAFPTVSHMLLYVYLMPMAMRAYRLIFSTVHAGYQTNLTSVSVTSGTSIIAS

SEQ ID NO: 3761 - protein, 266 aa, Streptococcus pneumoniae
MLSSSEKVAGQGVSGAYRELVRLLHRAAKDQLIVTENLPIEADVTHFHTIDFPYYLSTFQKKRSGRKIGYVHFLPATLEGSLKIPFFLKGIVKRYVFSFYNRMEHLVVVNPMFIEDLVAAGIPREKVTYIPNFVNKEKWHPLPQEEVVRLRTDLGLSDNQFIVVGAGQVQKRKGIDDFIRLAEELPQITFIWAGGFSFGGMTDGYEHYKKIMENPPKNLIFPGIVSPERMRELYALADLFLLPSYNELFPMTILEAASCEARYYVA

SEQ ID NO: 3762 - protein, 65 aa, Streptococcus pneumoniae
FWEGNYRATAGREEMKEAILEYQANPAALKDLKEKAKNISREYSEEHLLQIWLDFYEKQAALGRK

SEQ ID NO: 3763 - protein, 441 aa, Streptococcus pneumoniae
MRIGLFTDTYFPQVSGVATSIRTLKTELEKQGHAVFIFTTTDKDVNRYEDWQIIRIPSVPFFAFKDRRFAYRGFSKALEIAKQYQLDIIHTQTEFSLGLLGIWIARELKIPVIHTYHTQYEDYVHYIAKGMLIRPSMVKYLVRGFLHDVDGVICPSEIVRDLLSDYKVKVEKRVIPTGIELAKFERPEIKQENLKELRSKLGIQDGEKTLLSLSRISYEKNIQAVLVAFADVLKEEDKVKLVVAGDGPYLNDLKEQAQNLEIQDSVIFTGMIAPSETALYYKAADFFISASTSETQGLTYLESLASGTPVIAHGNPYLNNLISDKMFGTLYYGEHDLAGAILEALIATPDMNEHTLSEKLYEISAENFGKRVHEFYLDAIISNNFQKDLAKDDTVSQRIFKTVLYLPQQVVAVPVKGSRRMLKASKTQLISMRDYWKDHEE

SEQ ID NO: 3764 - protein, 58 aa, Streptococcus pneumoniae
MRSGRDKKIAGVCAGVAHYLDMDPTIVQVIWGVLTCCYGSGIVAYIILWIIAPVATDY

SEQ ID NO: 3765 - protein, 391 aa, Streptococcus pneumoniae
VVFVVDEGLRTLMDFRYNRHFKADSGEKGMTKGMHGRGAEDLRVRVPQGTTVRDAETGKVLTDLIKHGQEFIVAHGGRGGRGNIRFATPKNPAPEISENGEPGQERELQLELKILADVGLVGFPSVGKSTLLSVITSAKPKIGAYHFTTIVPNLGMVRTQSGESFAVADLPGLIEGASQGVGLGTQFLRHIERTRVILHIIDMSASEGRDPYEDYLAINKELESYNLRLMERPQIIVANKMDMPESQENLEEFKKKLAENYDEFEELPAIFPISGLTKQGLATLLDATAELLDKTPEFLLYDESDMEEEAYYGFDEEEKAFEISRDDDATWVLSGEKLMKLFNMTNFDRDESVMKFARQLRGMGVDEALRARGAKDGDLVRIGKFEFEFVD

SEQ ID NO: 3766 - protein, 419 aa, Streptococcus pneumoniae
MRKIVINGGLPLQGEITISGAKNSVVALIPAIILADDVVTLDCVPDISDVASLVEIMELMGATVKRYDDVLEIDPRGVQNIPMPYGKINSLRASYYFYGSLLGRFGEATVGLPGGCDLGPRPIDLHLKAFEAMGATASYEGDNMKLSAKDTGLHGASIYMDTVSVGATINTMIAAVKANGRTIIENAAREPEIIDVATLLNNMGAHIRGAGTNIIIIDGVERLHGTRHQVIPDRIEAGTYISLAAAVGKGIRINNVLYEHLEGFIAKLEEMGVRMTVSEDSIFVEEQSNLKAINIKTAPYPGFATDLQQPLTPLLLRANGRGTIVDTIYEKRVNHVFELAKMDADISTTNGHILYTGGRDLRGASVKATDLRAGAALVIAGLMAEGKTEITNIEFILRGYSDIIEKLRNLGADIRLVED

SEQ ID NO: 3767 - protein, 175 aa, Streptococcus pneumoniae
MFSFFETDRLYLRPFFFSDSQDFREIASNPENLQFIFPTQASLEESQYALANYFMKSPLGVWAICDQKNQQMIGSIKFEKLDEIKKEAELGYFLRKDAWSQGFMTEVVRKICQLSFEEFGLKQLSIITHLENEASQRVALKSGFSLFRQFKGSDRYTRKMRDYLEFRYVKGEFNE

SEQ ID NO: 3768 - protein, 425 aa, Streptococcus pneumoniae
MSKHQEILSYLEELPVGKRVSVRSISNHLGVSDGTAYRAIKEAENRGIVETRPRSGTIRVKSQKVAIERLTFAEIAEVTSSEVLAGQEGLEREFSKFSIGAMTEQNILSYLHDGGLLIVGDRTRIQLLALENENAVLVTGGFQVHDDVLKLANQKGIPVLRSKHDTFTVATMINKALSNVQIKTDILTVEKLYRPSHEYGFLRETDTVKDYLDLVRKNRSSRFPVINQHQVVVGVVTMRDAGDKSPSTTIDKVMSRSLFLVGLSTNIANVSQRMIAEDFEMVPVVRSNQTLLGVVTRRDVMEKMSRSQVSALPTFSEQIGQKLSYHHDEVVITVEPFMLEKNGVLANGVLAEILTHMTQDLVVNSGRNLIIEQMLIYFLQAVQIDDILRIQARIIHHTRRSAIIDYDIYHGHQIVSKANVTVKIN

SEQ ID NO: 3769 - protein, 286 aa, Streptococcus pneumoniae
MITLKSAREIEAIDKAGDFLASIHIGLRDLIKPGVDMWEVEEYVRRRCKEENFLPLQIGVDGAMMDYPYATCCSLNDEVAHAFPRHYILKDGDLLKVDMVLGGPIAKSDLNVSKLNFNNVEQMKKYTQSYSGGLADSCWAYAVGTPSEEVKNLMDVTKEAMYKGIEQAVVGNRIGDIGAAIQEYAESRGYGVVRDLVGHGVGPTMHEEPMVPNYGIAGRGLRLREGMVLTIEPMINTGDWEIDTDMKTGWAHKTIDGGLSCQYEHQFVITKDGPVILTSQGEEGTY

SEQ ID NO: 3770 - protein, 180 aa, Streptococcus pneumoniae
MRFSAFKIFSNSVCKRIITKGLGFRALLLYTISKVKLREDILVSQSIVPVEIPQYCRFDSKKRNGILFNVRIANLKFTFFRLDFLRNKIWYSSSMNDEASKQLTDARFKRLVGVQRTTFEEMLAVLKTAYQLKHAKGGRKPKLSLEDLLMATLQYVREYRTYEEIAAVFGIHESNLIRRS

SEQ ID NO: 3771 - protein, 74 aa, Streptococcus pneumoniae
WVEVTLVQSGVTISRTPLSSEATVMIDATEVKINRPKKELANYSCKKMPRYEGSSDCHKSRENCFFGYHCELLS

SEQ ID NO: 3772 - protein, 129 aa, Streptococcus pneumoniae
MKAQAIVTSQGRIVSLDITVNYCHDMKLFKMSCRNIGQAGKILADSGYQGLMKIYPQAQTPRKSSKLKPLTVEDKACNHALSKERSKVENIFAKVKTFKIISTTYRNHRKRFGLRMNLSAGIINHELGF

SEQ ID NO: 3773 - protein, 763 aa, Streptococcus pneumoniae
MNALLNGMNDRQAEAVQTTEGPLLIMAGAGSGKTRVLTHRIAYLIDEKLVNPWNILAITFTNKAAREMKERAYSLNPATQDCLIATFHSMCVRILRRDADHIGYNRNFTIVDPGEQRTLMKRILKQLNLDPKKWNERTILGTISNAKNNLIDDVAYAAQAGDMYTQIVVQCYTAYQKELRQSESVDFDDLIMLTLRLFDQNPDVLTYYQQKFQYIHVDEYQDTNHAQYQLVKLLASRFKNICVVGDADQSIYGWRGADMQNILDFEKDYPKAKVVLLEENYRSTKTILQAANEVIKNNKNRRPKNLWTQNADGEQIVYYRADDELDEAVFVARTIDELSRSQNFLHKDFAVLYRTNAQSRTIEEALLKSNIPYTMVGGTKFYSRKEIRDIIAYLNLIANLSDNISFERIINEPKRGIGPGTVEKIRDFANLQNMSMLDASANIMLSGIKGKAAQSIWDFANMMLDLREQLDHLSITELVESVLEKTGYVDILNAQATLESKARVENIEEFLSVTKNFDDTTDVTEEETGLDKLSRFLNDLALIADTDSGSQETSEVTLMTLHAAKGLEFPVVFLIGMEENVFPLSRATEDPDELEEERRLAYVGITRAEKILYLTNANSRLLFGRTNYNRPTRFINEISSDLLEYQGLARPANTSFKASYSSGSISFGQGMSLAQALQDRKRGAAPKSIQSSGLPFGQFTAGAKPASSEANWSIGDIALHKKWGEGTVLEVSGSGARQELKINFPEVGLKKLLASVAPIEKKI

SEQ ID NO: 3774 - protein, 240 aa, Streptococcus pneumoniae
FSILLTNNKVRRIFMYSISFQEDSLLPRERLAKEGVEALSNQELLAILLRTGTRQVSVFEIAQKVLNNLSSLTDLKKMTLQELQSLSGIGRVKAIELQAMIELGHRIHKHETLEMESILSSQKLAKKMQQELGDKKQEHLVALYLNTQNQIIHQQTIFIGSVTRSIAEPREILHYAIKHMATSLILVHNHPSGAVAPSQNDDHVTKLVKEACELMGIVLLDHLIVSHSNYFSYREKTDLI

SEQ ID NO: 3775 - protein, 229 aa, Streptococcus pneumoniae
MKKPVIGITGNEKTHPDDDIMMSYAAKGFVEGVKDAGGIPIILPIGDQEMACHYISLIDKLILTGGQNVDPKFYGEPKTIDSDDYHLQRDIFELALIKEAIKQKKPIFSVCRGTQLFNVAMGGTLYQDIEDHWQDSSVEYTTQRLVTEPDTVLQEIYGEISHINSFHHQSIKDLAPNLKVVAHDPKDGIIEAVMSTDDVAFLGVQWHPELLFENRPKDKKLFDYVVNEL

SEQ ID NO: 3776 - protein, 213 aa, Streptococcus pneumoniae
VKDKQFAIPKATAKRLSLYYRIFKRFHAEKIERANSKQIAEAIGIDSATVRRDFSYFGELGRRGFGYDVKKLMTFFADLLNDNSITNVMLVGIGNMGHALLHYRFHERNKMKIIMAFDLDDHPEVGTQTPDGIPIYGISQIKDKIKDADVKTAILTVPSVKSQEVANLLVDAGVKGILSFSPVHLHLPKDVVVQYVDLTSELQTLLYFMRKED

SEQ ID NO: 3777 - protein, 83 aa, Streptococcus pneumoniae
VVSLQNRKDRAKMFELTYKDCYHVERTLKYEDHEALMLTLSGCVTLPDTLYVTSLTFRGQKVYQGLVGDLYRFLSHADFLHQN

SEQ ID NO: 3778 - protein, 115 aa, Streptococcus pneumoniae
MAFEKIIQLKNCRYDYTLSPSVKKFTLKDNTFFETKVGNYELTRLLEKVPNSGEGFQLKIIINKELTGAKINITDKFGLRLVDIFKSEDHHIHQEKFYFLMDSLVERGIFTKSER

SEQ ID NO: 3779 - protein, 264 aa, Streptococcus pneumoniae
LVQHFGFEATIIQPENQEITAQQIQKALRDDTILVSTMFANNETGNLLPIAEIGQILKQHPAAYHVDAVQAIGKIPIHSEELGIDFLTASAHKFHGPKGIGFLYASSMDFDSYLHGGDQEQKKRAGTENLPAIVGMVAALKEDLEKQEEHFQHVQNLETAFLAELEGIQYYLNRGKHHLPYVLNIGFPGQKNDLLLLRLDLAGISISTGSACTAGVVQSSHVLEAMYGANSERLKESLRISLSPQNTVEDLQTLAKTLKEIIGG

SEQ ID NO: 3780 - protein, 144 aa, Streptococcus pneumoniae
LLICMPFRFKVSLIFQWIIFSLFPYSQNITAIKDCLVQMLLSLALKNSGVKRARSLAEYLDAPIAIIDYPQDDATRNEGYIIGDVEGKTAILIDDILNTGRTFSEASKIVEREGATEIYAVSSHGLFVEGAAELLDNTNIKEIL

SEQ ID NO: 3781 - protein, 182 aa, Streptococcus pneumoniae
MSDRKNMKLFALNSNQEIAQKIAQAVGVPLGKLSSRQFSDGEIQVNIEESVRGYDVYIIQSTSFPVNNHLMELLIMVDACVRASAHSINVVLPYFGYARQDRIACPREPLTAKLVANMLVKAGVDRILTLDLHAVQVQGFFDIPVDNLFTVPLFAKHYCDKGLLGSDVVVVSPKKFRCQTCA

SEQ ID NO: 3782 - protein, 189 aa, Streptococcus pneumoniae
MKHLEIELKTLLKKDEYNRLKDQFTGVTPVLQTNYYIDTPDFELREKKVAMRIRTFEDWAELTLKVPQSVGNMEYNQKLQLKDAENYLSKEELPQGLVLDELAKHGIQSKNWQVLGCLTTLRYEMKTAIGLMALDQSRYFDMTDYELELEVENHEQGKQDFRQFLEKNQISYQKAPSKLVRFVKSMKNS

SEQ ID NO: 3783 - protein, 167 aa, Streptococcus pneumoniae
MTLEWEEFLDPYIQAVGELKIKLRGIRKQYRKQNKHSPIEFVTGRVKPIESIKEKMARRGITYATLEHDLQDIAGLRVMVQFVDDVKEVVDILHKRQDMRIIQERDYITHRKASGYRSYHVVVEYTVDTINGAKTILAEIQIRTLAMNFWATIEHSLNYKYQGDFPV

SEQ ID NO: 3784 - protein, 70 aa, Streptococcus pneumoniae
NILSTTSTKGISQYEIKKRLEITARIAHQLDEEMGEIRDDIQEAQALFDPLSRKLNDGVGSSHGTDEEYR

SEQ ID NO: 3785 - protein, 262 aa, Streptococcus pneumoniae
PTRNTARGQRVLYELRDRLKRNQFILNDTNPDIVISIGGDGMLLSAFHKYENQLDKVRFIGLHTGHLGFYTDYRDFELDKLVTNLQLDTGARVSYPVLNVKVFLENGEVKIFRALNEASIRRSDRTMVADIVINGVPFERFRGDGLTVSTPTGSTAYNKSLGGAVLHPTIEALQLTEIASLNNRVYRTLGSSIIVPKKDKIELIPTRNDYHTISVDNSVYSFRNIERIEYQIDHHKIHFVATPSHTSFWNRVKDAFIGEVDE

SEQ ID NO: 3786 - protein, 298 aa, Streptococcus pneumoniae
MRFEFIADEHVKVKTFLKKHEVSKGLLAKIKFRGGAILVNNQPQNATYLLDVGDYVTIDIPAEKGFETLEAIELPLDILYEDDHFLVLNKPYGVASIPSVNHSNTIANFIKGYYVKQNYENQQVHIVTRLDRDTSGLMLFAKHGYAHARLDKQLQKKSIEKRYFALVKGDGHLEPEGEIIAPIARDEDSIITRRVAKGGKYAHTSYKIVASYGNIHLVYIHLHTGRTHQIRVHFSHIGFPLLGDDLYGGSLEDGIQRQALHCHYLSFYHPFLEQDLQLESPLPDDFSNLITQLSTNTL

SEQ ID NO: 3787 - protein, 324 aa, Streptococcus pneumoniae
MEVFESLKANLVGKNARIVLPEGEEPRILQATKRLVKETEVIPVLLGNPEKIKIYLEIEGIMDGYEVIDPQHYPQFEEMVSALVERRKGKMTEEDVRKVLVEDVNYFGVMLVYLGLVDGMVSGAIHSTASTVRPALQIIKTRPNVTRTSGAFLMVRGTERYLFGDCAININPDAEALAEIAINSAITAKMFGIEPKIAMLSYSTKGSGFGESVDKVVEATKIAHDLRPDLEIDGELQFDAAFVPETAALKAPGSTVAGQANVFIFPGIEAGNIGYKMAERMGGFAAVGPVLQGLNKPVNDLSRGCNADDVYKLTLITAAQAVHQ

SEQ ID NO: 3788 - protein, 78 aa, Streptococcus pneumoniae
KLQKTDFYRSEHQKRKDEICPFSSLADFNPLQLTKSQKILFSYSFKIKKGIYRFTDMYITDFYRSCIDRISSLGSFPF

SEQ ID NO: 3789 - protein, 198 aa, Streptococcus pneumoniae
AQAETVSQTVSLPNAKIVLDRFHIVQHLSRAMSRVHVQIMNQFHRKSHEYKAIKRYWKLIQQDSRKLSDKRFYRPTFRMHLTNKEILNKLLSYSEDLKHHYQLYNKEPEKFFGLIEDNLKQVHPIFQTVFKTFLKDKEKIVNALQLPYSNAKLEATNNLIKLIKRNAFGFRNFENFKKRIFIALNIKKERTKFVLSQA

SEQ ID NO: 3790 - protein, 108 aa, Streptococcus pneumoniae
NSPGSDCFNREMEMSFIAQDFDKLNIITVLEGRTQAIIRNHFLRYDRAVRCRVKIITMDMFSPYYGLAKQLRFQISRLRLKQSPRLFHSRMLKSFLIAFTLYNILAVL

SEQ ID NO: 3791 - protein, 172 aa, Streptococcus pneumoniae
MEQLHFITKLLDIKDPNIQILDIINKDTHKEIIAKLDYDAPSCPECGNQLKKYDFQKPSKIPYLETTGMPTRILLRKRRFKCYHCSKMMVAETSIVKKNHQIPRIINQKIAQKLIEKISMTDIAHQLFISTSTVIRKLNDFHFKHDFSCLPEIMSWDVETVRVVTVSIGRWR

SEQ ID NO: 3792 - protein, 107 aa, Streptococcus pneumoniae
DERNFRNLMMNMQNMMRQAQKLQKQMEQSQAELAAMQFVGKSAQDLVQATLTGDKKVVSIDFNPAVVDPEDLETLSDMTVQAINSALEQIDETTKKKLGAFAGKLPF

SEQ ID NO: 3793 - protein, 230 aa, Streptococcus pneumoniae
MRLLPIRKISRQSKRLALFLTFCAGYVDAYTFIVRGNTLVAGQTGNVVFLSVELIKNNVSDVRDKVLTLLAFMMGVFLLTIYKEKLRIVKKPILSLIPLAILSIIIAFVPQTVDNIYLVPPLAFCMGLVTTAFGEVSGIAYNNAFMTGNIKRTMLAFGDYFRTKHTPFLREGFIFVSLLSSFVLGVVFSAYLTIFYHEKTILGVPIMMSVFYLSMLFASWQKKVKEKASF

SEQ ID NO: 3794 - protein, 104 aa, Streptococcus pneumoniae
MSTYAIIKTGGKQVKVEVGQAVYVEKLNVEAGQEVTFNEVVLVGGENTVVGTPLVAGATVVGTVEKQGKQKKVVTYKYKPKKGSHRKQGHRQPYTKVVINAINA

SEQ ID NO: 3795 - protein, 146 aa, Streptococcus pneumoniae
VSSNFRTPQLAIFGSLKDCLYHVFSLKLSVDCVDDNFCIWLTVTLFTVATFFRFVLVSNHFLLFSLFFNSSNYSSSSNKWSSDNSVFTTNKNNFVKSNFLTSFNVQFFNVNCLTNFNFNLFSASFDNCVCAHYAPPMIFMGFPDFL

SEQ ID NO: 3796 - protein, 114 aa, Streptococcus pneumoniae
MIQAVFERAEDGELRSAEITGHAESGEYGLDVVCASVSTLAINFINSIEKFAGYEPILELNEDEGGYLMVEIPKDLPSHQREMTQLFFESFFLGMANLSENSSEFVQTRVITEN

SEQ ID NO: 3797 - protein, 97 aa, Streptococcus pneumoniae
MLKMTLNNLQLFAHKKGGGSTSNGRDSQAKRLGAKAADGQTVTGGSILYRQRGTHIYPGVNVGRGGDDTLFAKVEGVVRFERKGRDKKQVSVYPIAK

SEQ ID NO: 3798 - protein, 54 aa, Streptococcus pneumoniae
LIPILFNMYSGLILFENQIQTTSISPCRTQVQPAANFLVCTLIFIEYESGIEHC

SEQ ID NO: 3799 - protein, 305 aa, Streptococcus pneumoniae
MIITIPIKNQKDIGTPSDSVVVLGYFDGIHKGHQELFRVANKAARKDLLPIVVMTFNESPKIALEPYHPDLFLHILNPAERERKLKREGVEELYLLDFSSQFASLTAQEFFATYIKAMNAKIIVAGFDYTFGSDKKTAEDLKDYFDGEVIIVPPVEDEKGKISSTRIRQAILDGNVKEAGKLLGAPLPSRGMVVHGNARGRTIGYPTANLVLLDRTYMPADGVYVVDVEIQRQKYRAMASVGKNVTFDGEEARFEVNIFDFNQDIYGETVMVYWLDRIRDMTKFDSVDQLVDQLKADEEVTRNWS

SEQ ID NO: 3800 - protein, 282 aa, Streptococcus pneumoniae
MIKKIYPIFTILLGAAIYAFGLTYFVVPHHLFEGGATGITLITFYLFKIPVSLMNLLINIPLFILAWKIFGAKSLYSSLLGTLALSGWLAFFEHIPLHIDLQGDLLITALIAGILLGIGLGIIFNAGGTTGGTDILARILNKYTHISIGKLLFILDFCILMLILLIFKDLRLVSYTLLFDFIVSRVIDLIGEGGYAGKGFMIITKRPDQLAKAINDDLGRGVTFISGQGYYSKENLKIIYCIVGRNEIVKTKEMIHRIDPQAFITITEAHEILGEGFTFEKE

SEQ ID NO: 3801 - protein, 279 aa, Streptococcus pneumoniae
MTKIKIVTDSSVTIEPELVKQLDITIVPLSVMIDNVVYSDADLKEEGKFLQLMQESKNLPKTSQPPVGVFAEIFEDLCKDGGQILAIHMSHALSGTVEAARQGASLSTADVTVVDSSFTDQALKFQVVEAAKLAQEGKDMEAILSHVEEVKNHTELYIGVSTLENLVKGGRISRVTGLLSSLLNIRVVMQMKDHELQPMVKGRGTKTFKKWLDELITSLSERAVAEIGISYSGSDDWAKEMKESLQAYVEKPISVLETGSIIQTHTGENAWAILIRYHS

SEQ ID NO: 3802 - protein, 91 aa, Streptococcus pneumoniae
MANKQDLIAKVAEATELTKKDSAAAVEAVFAAVADYLAAGEKVQLIGFGNFEVRERAERKGRNPQTGKEMTIAASKVPAFKAGKALKDAVK

SEQ ID NO: 3803 - protein, 633 aa, Streptococcus pneumoniae
MIILQANKIERSFAGEVLFDNINLQVDERDRIALVGKNGAGKSTLLKILVGEEEPTSGEINKKKDISLSYLAQDSRFESENTIYDEMLHVFDDLRRTDKQLRQMELEMGEKSGEDLDKLMSDYDRLSENFRQAGGFTYEADIRAILNGFKFDESMWQMKIAELSGGQNTRLALAKMLLEKPNLLVLDEPTNHLDIETISWLENYLVNYSGALIIVSHDRYFLDKVATITLDLTKHSLDRYVGNYSRFVELKEQKLATEAKNYEKQQKEIAALEDFVNRNLVRASTTKRAQSRRKQLEKMERLDKPEAGKKAANMTFQSEKTSGNVVLTVENAAVGYDGEVLSQPINLDLRKMNAVAIVGPNGIGKSTFIKSIVDQIPFIKGEKRFGANVEVGYYDQTQSKLTPSNTVLDELWNDFKLTPEVEIRNRLGAFLFSGDDVKKSVGMLSGGEKARLLLAKLSMENNNFLILDEPTNHLDIDSKEVLENALIDFDGTLLFVSHDRYFINRVATHVLELSENGSTLYLGDYDYYVEKKATAEMSQTEEASTSNQAKEASPVNDYQAQKESQKEVRKLMRQIESLEAEIEELESQSQAISEQMLETNDADKLMELQAELDKISHRQEEAMLEWEELSDQV

SEQ ID NO: 3804 - protein, 297 aa, Streptococcus pneumoniae
VGRIIRSGVKMEHLGKVFREFRTSGNYSLKEAAGESCSTSQLSRFELGESDLAVSRFFEILDNIHVTIENFMDKARNFHNHEHVSMMAQIIPLYYSNDIAGFQKLQREQLEKSKSSTTPLYFELNWILLQGLICQRDASYDMKQDDLDKVADYLFKTEEWTMYELILFGNLYSFYDVDYVTRIGREVMEREEFYQEISRHKRLVLILALNCYQHCLEHSSFYNANYFEAYTEKIIDKGIKLYERNVFHYLKGFALYQKGQCKEGCKQMQEAIHIFDVLGLPEQVAYYQEHYEKFVKS

SEQ ID NO: 3805 - protein, 392 aa, Streptococcus pneumoniae
MNRYAVQLISRGAINKMGNMLYDYGNSVWLASMGTIGQTVLGMYQISELVTSILVNPFGGVISDRFSRRKILMTADLVCGILCLAISFIRNDSWMIGALIVANIVQAIAFAFSRTANKAIITEVVEKDEIVIYNSRLELVLQVVGVSSPVLSFLVLQFASLHMTLLLDSLTFFIAFVLVAFLPKEEAEVQEKKAFTGRDIFVDIKDGLHYIWHQQEIFFLLLVASSVNFFFAAFEFLLPFSNQLYGSEGAYASILTMGAIGSIIGALLASKIKANIYNLLILLALTGVGVFMMGLPLPTFLSFSGNLVCELFMTIFNIHFFTQVQTKVESEFLGRVLSTIFTLAILFMPIAKGFMTVLPSVHLSSFLIIGSGVIILSCISFIYVRTHFEKLI

SEQ ID NO: 3806 - protein, 655 aa, Streptococcus pneumoniae
NGLMNKRMNELVALLNRYATEYYTSDNPSVSDSEYDRLYRELVELETAYPEQVLADSPTHRVGGKVLDGFEKYSHQYPLYSLQDAFSREELDAFDARVRKEVAHPTYICELKIDGLSISLTYEKGILVAGVTRGDGSIGENITENLKRVKDIPLTLPEELDITVRGECYMPRASFDQVNQVRQENGEPEFANPRNAAAGTLRQLDTAVVAKRNLATFLYQEASPSTRDSQEKGLKYLEQLGFVVNPKRILAENIDEIWNFIQEVGQERENLPYDIDGVVIKVNDLASQEELGFTVKAPKWAVAYKFPAEEKEAQLLSVDWTVGRTGVVTPTANLTPVQLAGTTVSRATLHNVDYIAEKDIRKDDTVIVYKAGDIIPAVLRVVESKRVSEEKLDIPTNCPSCNSDLLHFEDEVALRCINPRCPAQIMEGLIHFASRDAMNITGLGPSIVEKLFAANLVKDVADIYRLQEEDFLLLEGVKEKSAAKLYQAIQASKENSAEKLLFGLGIRHVGSKASQLLLQYFHSIENLYQADSEEVASIESLGGVIAKSLQTYFATEGSEILLRELKETGVNLDYKGQTVVADAALSGLTVVLTGKLERLKRSEAKSKLESLGAKVTGSVSKKTDLVVVGADAGSKLQKAQELGIQVRDEAWLESL

SEQ ID NO: 3807 - protein, 759 aa, Streptococcus pneumoniae
MYNYPMRIHYHRKNGEYDTCSFVKSQDQRIDLLTYKEDYFGALFSFEHPSSHVIESLNFVVHTGQTSKEYSIRFNHYPLLTEVWILEGDDRIYYSENPAIASPFYKNQNPFAFDKAINSASFDHHWGYQGELGCRVEDNQAHFSLWSPTATKVQVVVYESAANDAPVWKTFEMKRGNSYSYNHKDNTIGVWSLDVEEDLVGKTYQYQVQFPHHQTLTRDPYTIATSPDGKRSAILSHVEKQVENFEVKHGSEATWRLENPCKAVICEMHIRDLTKSPTSGVDEHLRGTFLGAAQAGTVNQYGQSTAFDYIKKLGYNYVQLQPIADRHKEYDEDGNVTYNWGYDPQNYNAPETSFSTNPDDPAQVIRDLKVMVQAYHDAGIGVIMDVVYNHTFSVVDAPFQTTVPDYYYRMNPDGTFQNGTGVGNETASEHEMFRKYMIDSLLYWVQEYNIDGFRFDLMGIHDVKTMQMIRQSLDEIDSNIILYGEGWDMGTGLAPYDKAKKDNAYQMPNIGFFNDNQRDAVKGGEVYGAIKSGFVSGAATEPILAKAILGSRELGSYTHPNQVLNYVEAHDNYNLHDLLATLHPDQSSEQIMRKVETATAMNLLMQGMAFMEIGQEFGRTKLVATGENGELTHDDRERAMNSYNAPDSVNQVNWNLINERQDSIEFIRQVIRLKTKTGAFSYSSYDEIYHHVFVHSAIEHSGCLIYEVHGKEHLLVVVNAKSEPYQFENAGNLAMLVTNSRSKEDNVLNDISLAVLSVL

SEQ ID NO: 3808 - protein, 474 aa, Streptococcus pneumoniae
LTRYQNLVNGKWKSSEQEITIYSPINQEELGTVPAMTQTEADEAMQAARAALPAWRALSAIERAAYLHKTAAILERDKEKIGTILAKEVAKGIKAAIGEVVRTADLIRYAAEEGLRITGQAMEGGGFEAASKNKLAVVRREPVGIVLAIAPFNYPVNLSASKIAPALIAGNVVMFKPPTQGSISGLLLAKAFEEAGIPAGVFNTITGRGSEIGDYIIEHKEVNFINFTGSTPIGERIGRLAGMRPIMLELGGKDAALVLEDADLEHAAKQIVAGAFSYSGQRCTAIKRVIVLESVADKLATLLQEEVSKLTVGDPFDNADITPVIDNASADFIWGLIEDAQEKEAQALTPIKREGNLLWPVLFDQVTKDMKVAWEEPFGPVLPIIRVASVEEAIAFANESEFGLQSSVFTNDFKKAFEIAEKLEVGTVHINNKTQRGPDNFPFLGVKGSGAGVQGIKYSIEAMTNVKSIVFDVK

SEQ ID NO: 3809 - protein, 642 aa, Streptococcus pneumoniae
MDNREALKTFMTGENFYLQHYLGAHREELNGEYGYTFRVWAPNAQAVHLVGDFTNWIENQIPMVRNDFGVWEVFTNMAQEGHIYKYHVTRQNGHQLMKIDPFAVRYEARPGTGAIVTELPDKKWRDGLWLARRKRWGFAERPVNIYEVHAGSWKRNPDGSPYSFAQLKDELIPYLVEMNYTHIEFMPLMSHPLGLSWGYQLMGYFALEHAYGRPEEFQDFVEECHTHNIGVIVDWVPGHFTINDDALAYYDGTPTFEYQDHNKAHNHGWGALNFDLGKNEVQSFLISCIKHWIDIYHLDGIRVDAVSNMLYLDYDDAPWTPNKDGGNLNYEGYYFLQRLNEVIKLEYPDVMMIAEESSSATKITGMKEIGGLGFDYKWNMGWMNDILRFYEEDPIYRKYDFNLVTFSFMYVFKENYLLPFSHDEVVHGKKSMMHKMWGDRYNQFAGLRNLYTYQICHPGKKLLFMGSEYGQFLEWKSEEQLEWSNLEDPMNAKMKYFTSQLNQFYKDHRCLWEIDTSYDGIEIIDADNRDQSVLSFIRKGKKGEMLVCIFNMVPVERKDFTIGLPVAGIYEEVWNTELEEWGGVWKEHNQTVQTQEGLWKDYEQTLTFTLPAMGASVWKIKRRLKSTKTVTNKNQKGVENEK

SEQ ID NO: 3810 - protein, 380 aa, Streptococcus pneumoniae
MKNEMLALILAGGQGTRLGKLTQSIAKPAVQFGGRYRIIDFALSNCANSGIHNVGVVTQYQPLALNNHIGNGSSWGLDGINSGVSILQPYSASEGNRWFEGTSHAIYQNIDYIDSVNPEYVLILSGDHIYKMDYDDMLQSHKDNNASLTVAVLDVPLKEASRFGIMNTDANNRIVEFEEKPAQPKSTKASMGIYIFDWQRLRNMLVAAEKSKVGMSDFGKNVIPNYLESGESVYAYEFSGYWKDVGTIESLWEANMEYISPENALDSRNRQWKIYSRNLISPPNFLGANAHVEDSLVVDGCFVDGTVKHSILSTGAQVREGAEVLDSVIMSGAIIGQGAKIKRAIIGEGAIISDGVEIDGTDEVQVVGYNEVVGVATDED

SEQ ID NO: 3811 - protein, 379 aa, Streptococcus pneumoniae
MKIDKYSAILGNTVGFHNMSTLTDHRPVASLPFGGKYRLIDFPLSSLANAGVRSVFGIFQQDNISSVFDHIRSGREWGLSTLLSHYYLGIYNTRVESSTVGKEYYQQLLTYLKRSGSNQTVALNCDVLINIDLNQVFHLHSTTKEPITVVYKKLAKKDISEVNAILDVDETDHVLSHKLFDSKSTAETFNMSTDIFVVDTPWLIEHLEEEAKKEHPEKLRYVLRDLAVKEGAFAYEYTGYLANIHSVKSYYQANIDMLESQKFYSLFSPNQKIYTKVKNEEPTYYANTSKVSTSQFASGSIIEGQVANSVLSRNIHVHKDSLVKDSLLFPRVVIGEGAQVEYAILDKGVEVEPGVVIRGTAEHPVVVKKGAKVTEDIHS

SEQ ID NO: 3812 - protein, 477 aa, Streptococcus pneumoniae
MKILFVAAEGAPFSKTGGLGDVIGALPKSLVKAGHEVAVILPYYDMVEAKFGNQIEDVLHFEVSVGWRRQYCGIKKTVLNGVTFYFIDNQYYFFRGHVYGDFDDGERFAFFQLAAIEAMERIAFIPDLLHVHDYHTAMIPFLLKEKYRWIQAYEDIETVLTIHNLEFQGQFSEGMLGDLFGVGFERYADGTLRWNNCLNWMKAGILYANRVSTVSPSYAHEIMTSQFGCNLDQILKMESGKVSGIVNGIDADLYNPQTDALLDYHFNQEDLSGKAKNKAKLQERVGLPVRADVPLVGIVSRLTRQKGFDVVVESLHHILQEDVQIVLLGTGDPAFEGAFSWFAQIYPDKLSANITFDVKLAQEIYAACDLFLMPSRFEPCGLSQMMAMRYGTLPLVHEVGGLRDTVCAFNPIEGSGTGFSFDNLSPYWLNWTFQTALDLYRNHPDIWRNLQKQAMESDFSWDTACKSYLDLYHSLVN

SEQ ID NO: 3813 - protein, 123 aa, Streptococcus pneumoniae
MSQVKGLCVLDVDGTLILEEVIDFLGREAGHEAEISQITSRAMRGELVFESSLRKRVSLLEGLPILVFDNVFNSIHLSLNVPEFISILQKNGILVDLVSGGFTPIVGEISKIPWYCLFHCQPA

SEQ ID NO: 3814 - protein, 109 aa, Streptococcus pneumoniae
LERLAKSLGIAYFTANQLEVKEGLLTGKLVGQIISPQVKKETLEKWRKKLKLSKERTVAIGDGVNNLLMLKSAELGIAFCAKEVLKKEIPHHVDKRDFLEVLPLIDCLE

SEQ ID NO: 3815 - protein, 371 aa, Streptococcus pneumoniae
MKIVIAPDSFKESLTAQQVAEAIKRGFQQSIADVECLLCPVGDGGEGTVDAIRHSLDLKEKWIQVTDPSGQKEAMRYFQKGELALFEVADLVGLGKIPLEKRNPLQIQTCGIGELILHLISKGIKDIYIGVGGTASNDGGLGIAAGLGYQFYDRDGNVLPASGQSLLNLASVSTENRYKIPEGVQIHILADVVSPLCGHQGATYTFGNQKGLHPTMFAVVDQAIQDFYEKFSPATLEIKGAGAGGGLAGGLCAFAQASIVSGIDTCLDLINFDKKVSDADLVVVGEGRLDSQSFAGKAPIGVAKRTPVGVPVIAICGSLAEDLPPLPFENIQAVFSILEKSEPLEDSLKNASLYLERTAANIGHLLNMCKI

SEQ ID NO: 3816 - protein, 148 aa, Streptococcus pneumoniae
MTDLSKQLLEKAHGGLKINPDEQRRYLGTFEERVLGYVDIDTANSPQLEKGFLFILENLQEKAEPLFVKISPTIEFDKQVFYLKEAKETDSQATIVSEEHITSPFGLVIHSNAPVQVEEKDLRLAFPKLWEVKKEEPAKTSLWKKWFS

SEQ ID NO: 3817 - protein, 434 aa, Streptococcus pneumoniae
MSIITDVYAREVLDSRGNPTLEVEVYTESGAFGRGMVPSGASTGEHEAVELRDGDKSRYGGLGTQKAVDNVNNIIAEAIIGYDVRDQQAIDRAMIALDGTPNKGKLGANAILGVSIAVARAAADYLEIPLYSYLGGFNTKVLPTPMMNIINGGSHSDAPIAFQEFMILPVGAPTFKEALRYGAEIFHALKKILKSRGLETAVGDEGGFAPRFEGTEDGVETILAAIEAAGYVPGKDVFIGFDCASSEFYDKERKVYDYTKFEGEGAAVRTSAEQIDYLEELVNKYPIITIEDGMDENDWDGWKALTERLGKKVQLVGDDFFVTNTDYLARGIQEGAANSILIKVNQIGTLTETFEAIEMAKEAGYTAVVSHRSGETEDSTIADIAVATNAGQIKTGSLSRTDRIAKYNQLLRIEDQLGEVAEYRGLKSFYNLKK

SEQ ID NO: 3818 - protein, 155 aa, Streptococcus pneumoniae
FKDFLKGVEDFSTVTKGFFKCWRTNWQDHELLESDWSVRVRTTVDDVHHWSWKNFSVESTKVAVKWDFKVVSSSTSYSDRHTEDCIRTQFTFVRSTVKCDHSTVNSLLITYIVANDSFSNDVVYVVNSFLCTKTTVTRFVTVAKFNCFVFTSRSS

SEQ ID NO: 3819 - protein, 43 aa, Streptococcus pneumoniae
LYLAMRSVRESEPVLICPALVATAISAIVESSVSPERCDTTAV

SEQ ID NO: 3820 - protein, 168 aa, Streptococcus pneumoniae
VKSLGINFYLFLPTHLSTILLRKHGLISKSTSKGYYQVAIPFMRLFCLVLVSIDYINCLSETTDKNWHKSDRVFVTNTGKTVHSSILSKSLQRANERLKKPIPKHLSPHIFRHTTISILSENKIPLKTITDRVGHSDSEVTTSIYTHVTKNMKDEAINVLDKVMKKIF

SEQ ID NO: 3821 - protein, 112 aa, Streptococcus pneumoniae
LVAGLTNGELIAPMTYEETMTSDFFEAWFQKFLLPTLNTPSVIIMDNARFHRMGKLELLCEEFGYKLLPLPPYSPEYNPIEKTWAHIKKHLKRVLPSCNTFYEALLSCSCFN

SEQ ID NO: 3822 - protein, 115 aa, Streptococcus pneumoniae
MWYNLLMAYSIDFRKKVLSYCERTGSITEASHVFQISRNTIYGWLKLKKKTGELNHQVKGTKPRKVDRDRLKNYLTDNPDAYLTEIASEFGCHPTTIHYALKAMGYTRKKEPHLL

SEQ ID NO: 3823 - protein, 1091 aa, Streptococcus pneumoniae
MKLLYTDIRTSLTEILTREAEELVAAGKRVFYIAPNSLSFEKERAVLEYLSQQASFSITVTRFAQMARYLVLNDLPAKTTLDDIGLGLAFYKCLAELDPKDLRVYGAIKQDPQLIQQLIELYHEMTKSQMSFLDLENLTDEDKRADLLLIFEKVTAYLNQGQLAQGSQLSHLIEAIENDKVSSDFNQIALVIDGFTRFSAEEERVVDLLHGKGVEIVIGAYASKKAYTSPFSEGNLYQASVKFLHHLASKYQTPAQDCSQTHEKMDSFDKASRLLESSYDFSELALDVDEKDRENLQIWSCLTQKEELELVARSIRQKLHENSDLSYKHFRILLGDVASYQLSLKTIFDQYQIPFYLGRSEAMAHHPLTQFVESILALKRYRFRQEDLINLLRTDLYTDLSQSDIDAFEQYIRYLGINGLPAFQQTFTKSHHGKFNLERLNVLRLRILAPLETLFASRKQKAENLLQKWSVFLKEGAVTKQLQDLTTTLEAVEQERQTEVWKAFCHVLEQFATVFAGSQVSLEDFLALLHSGMSLSQYRTIPATVDTVLVQSYDLIAPLTADFVYAIGLTQDNLPKISQNTSLLTDEERQNLNQTTEEGVQLLIASSENLKKNRYTMLSLVNSARKQLFLSAPSLFNESESKESAYLQELIHFGFRRREKRMNHKGLSKEDMGSYHSLLSSLVAYHQQGEMSDTEQDLTFVKVLSRVIGKKLDLQGLENPAIPTSPSSKTLTKDTLQALYPAKQEFYLSTSGLTEFYLNEYSYFLRYVLGLQEELRLRPDARSHGNFLHRIFERALQLPNEDSFDQRLEQAIQETSQEREFEAIYQESLEAQFTKEVLLDVARTTGHILRHNPAIETIKEEANFGGKDQAFIQLDNGRSVFVRGKVDRIDRLKANGAIGVVDYKSSLTQFQFPHFFNGLNSQLPTYLAALKREGEQNFFGAMYLEMAEPIQSLMAVKSLAGAVVEASKSMKYQGLFLEKESSYLGEFYNKNKANQLTDEEFQLLLDYNAYLYKKAAEKILAGRFAINPYTENGRSIAPYVQQHQAITGFEANYHLGQARFLEKLDLADGKRLVGEKLKQAWFEKIREELNR

SEQ ID NO: 3824 - protein, 1216 aa, Streptococcus pneumoniae
MKLIPFLSEEEIQKLQEAEANSSKEQKKTAEQIEAIYTSGQNILVSASAGSGKTFVMVERILDQLARGVEISQLFISTFTVKAATELKERLEKKISKKIQETDDVDLKQHLGRQLADLPNAAIGTMDSFTQKFLGKHGYLLDIAPNFRILQNQSEQLLLENEVFHEVFEAHYQGKQKETFSHLLKNFAGRGKDERGLRQQVYKIYDFLQSTSNPQKWLSESFLKGFEKADFTSEKEKLTEQIKQALWDLESFFRYHLDNDAKEFAKAAYLENVQLILDEIGSLNQEFDSQAYQAVLARVVAISKEKNGRALTNASRKADLKPLADAYNEERKTQFTKLGQLSDQIAILDYQERYHGDTWKLAKTFQSFMSDFVEAYRQRKRQENAFEFADISHYTIEILENFPQVRESYQERFHEVMVDEYQDTNHIQERMLELLSNGHNRFMVGDIKQSIYRFRQADPQIFNEKFQRYAQNPQEGKLILLKENFRSSSEVLSATNDVFERLMDQEVGEINYDNKHQLVFANTKLTPNPDNKAEFLLYDKDDTGEEEESQTETKLTGEMRLVIKEILKLHQEKGVAFKEIALLTSSRSRNDQILLALSEYGIPVKTDGEQNNYLQSLEVQVMLDTLRVIHNPLQDYALVALMKSPMFGFDEDELARLSLQKAEDKVHENLYEKLVNAQKMASSQKGLIHTALAEKLKQFMDILASWRLYAKTHSLYDLIWKIYNDRFYYDYVGALPNGPARQANLYALALRADQFEKSNFKGLSRFIRMIDQVLEAQHDLASVAVAPPKDAVELMTIHKSKGLEFPYVFILNMDQDFNKQDSMSEVILSRQNGLGVKYIAKMETGAVEDHYPKTIKLSIPSLTYRQNEEELQLASYSEQMRLLYVAMTRAEKKLYLVGKGSREKLESKEYPAAKNGKLNSNTRLQARNFQDWLWAISKVFTKDKLNFSYRFIGEDQLTREAIGELETKSPLQDSSQADNRQSDTIKEALEMLKEVEVYNTLHRAAIELPSVQTPSQIKKFYEPVMDMEGVEIAGQGQSVGKKISFDLPDFSTKEKVTGAEIGSATHELMQRIDLSQQLTLASLTETLKQVQTSQAVRDKINLDKILAFFDTVLGQEILANTDHLYREQPFSMLKRDQKSQEDFVVRGILDGYLLYENKIVLFDYKTDRYDEPSQLVDRYRGQLALYEEALSRAYSIENIEKYLILLGKDEVQVVKV

SEQ ID NO: 3825 - protein, 78 aa, Streptococcus pneumoniae
YSIKIKEQTRKLAAVSSKHCFEVVDRTDEVSSKHCFEVVDRTDEVSNHIYSKAKLTWFEEIFKEYKLYFYNLNLVFTE

SEQ ID NO: 3826 - protein, 63 aa, Streptococcus pneumoniae
LKISSNHVSFALLYIWLLTSSVLSTTSKQCFELTSSVLSTTSKQCFELTAASFLVCSLIFIEY

SEQ ID NO: 3827 - protein, 392 aa, Streptococcus pneumoniae
MTLPVRKSLHDAVLQASKADTWEQATKEWNEVSFIFNGIGRSNCVCGNAIKYAYELFNGVTGQRLFPIGSDCVRHFHRLPLDQQLEEEEKLLRKVENLTRKAQKKEKIKVNKSDFDERLLKWLWEKGVFKPNRGNQFAPERDYQLFLEVFQGGSWTKAEPKKKARMEEVLEKCIKPFLLGKSDDQLYLVKLGKEKIDYEQELRIQAEKERKKRDKIAKQYADNLVLAMGPAERAYQDYFGFTETLTQEERKWEKILFGKNRAERAIKAKQYQKELEKDQRIASQDPIERKQKQTWLLNSYFRELPEEKARFSRLLLEYRKNGEVPFSTEYLSDHLIDFFYKMKAFEFEIAPEQVRDFLKKSLQEDYRSSAQGSWIEGILLNCLKPFLERLVI

SEQ ID NO: 3828 - protein, 110 aa, Streptococcus pneumoniae
MKNALVFHQNTFPLFLLEIKFIYVTKTFIILVYYLLSIEKAVYLNYTLNLQKSLKIEMRFHTLFYIIWGYNNTYHEIYTVGVTHITNRSKNGLRQLRRIPSIQLPCADER

SEQ ID NO: 3829 - protein, 1965 aa, Streptococcus pneumoniae
MEKYFGEKQERFSFRKLSVGLVSATISSLFFMSVLASSSVDAQETAGVHYKYVADSELSSEEKKQLVYDIPTYVENDDETYYLVYKLNSQNQLAELPNTGSKNERQALVAGASLAALGILIFAVSKKKVKNKTVLHLVLVAGIGNGVLVSVHALENHLLLNYNTDYELTSGEKLPLPKEISGYTYIGYIKEGKTTSDFEVSNQEKSAATPTKQQKVDYNVTPNFVDHPSTVQAIQEQTPVSSTKPTEVQVVEKPFSTELINPRKEEKQSSDSQEQLAEHKNLETKKEEKISPKEKTGVNTLNPQDEVLSGQLNKPELLYREETIEIKIDFQEEIQENPDLVEGIVRVKQEGKLGKKVEIVRIFSVNKEEVSREIVSTSTTAPIPRIVEKGTKKTQVIKEQPETGVEHKDVQSGAIVEPAIQPELPEAVVSDKGVPEVQPALSKAVITDKGETEVQPESPDTVVSDKGEPEQVAPLPEYKGNIEQVKPETPVEKTKEQGPEKTEEVPVKPTEETPVNPNEGTTEGTSIQEAENPVQPAEESTTNSEKVSPDTSSENTGEESSNPSDSTTSVGESNKPEHNDSKNENSEKTVEEVPVNPNEGTVEGTSNQETEKPVQPAEETQTNSGKIANENTGEVSNKPSDSKPPVEESNQPEKNGTATKPENSGNTTSENGQTEPEKKLELRNVSDIELYSQTNGTYRQHVSLDGIPENTDTYFVKVKSSAFKDVYIPVASITEEKRNGQSVYKITAKAEKLQQELENKYVDNFTFYLDKKAKEENTNFTSFSNLVKAINQNPSGTYHLAASLNANEVELSTDDKSYIKGTFTGQLIGEKDGKHYAIYNLKKPLFENLSGATVEKLSLKNVAISGKNDIGSLANEATNGTKIKQVHVDGVLAGERGVGGLLAKADQSSIAESSFKGRIVNTYETTDSYNIGGLVGHLTGKNASIAKSKATVTISSNTNRSDQTVGGLAGLVDRDAQIQDSYAEGDINNVKHFGRVAGVAGNLWDRTSGDVRHAGSLTNVLSDVNVTNGNAITGYHYTGMKVANTFSSKANRVFNVTLEKDEVVSKESFEERGTMLDASQIVSKKAEISPLTLPTVEPLSTSGKKDSDFSKIAHYQANRALVYKNIEKLLPFYNKSTIVKYGNLVKENSLLYQKELLSAVMMKDDQVITDIVSNKQTANKLLLHYNDHSSEKFDLKYQTDFANLAEYNLGNTGLLYTPNQFLYDRDSIVKEVLPELQKLDYQSDAIRKTLGISPAVKLTELYLEEQFSKTKQNLGGSLKKLLSADAGLASDNSVTRGYLVDKIKNNKEALLLGLTYLERWYNFNYGQVNVKDLVMYHPDFFGKGNTSPLDTLIELGKSGFNNLLAKNNVDTYGISLASHHGTTDLFSALETYRKVFLPNTSNNDWFKKQTKAFIVEEKSTIAEVKAKQKQAGTKYSIGVYDRITSNTWKYRNMVLPLLTLPERSVFVISTLSSLGFGAYDRYRNSEHKAGKDLNNFVEENASETAKRQRDHYDYWYRILDNEGREKLYRTILLYDAYKFGDDTTSGKATVEAKFDSSNPAMKNFFGPVGNKVVHNHHGAYATGDGVYYMSYRMLDKDGAITYTHEMTHDSDQDIYLGGYGRRSGLGPEFFAKGLLQAPDHPYDATITITINSILKHSKSDSLEGSRLQVLDPTERFQNSADLQNYVHNMFDLIYMLEYLEGQSIVKKLNVSQKMEALRKIENQYLTDPADGNEVYATNVVKELTEEEARNLNSFDSLIDNNILSAREYKAGTYERNGYFTIKLFAPIFSALSSEKGTPGDLMGRRIAYELLAAKGFKDGMVPYISNQYEGIAKQNGQTINLYGKKQGLVTDKLVLEKIFSGKYPSWTAFKKAMYQERIAQFDHLTKVIFKDPTKPWPSYGTKTINNVDELQALMDQAVLKDAEGPRWSNYNPEIDSAVHKLKRAIFKAYLDQTNDFRSSIFENKK

SEQ ID NO: 3830 - protein, 75 aa, Streptococcus pneumoniae
KGDEEQTKIQAGIPTDNEVSYALIYQQETLPATGSSTSALTALGLLAVGSLVLLVRNSFLLPLKSHHLMAFFYIG

SEQ ID NO: 3831 - protein, 283 aa, Streptococcus pneumoniae
MATIQWFPGHMSKARRQVQENLKFVDFVTILVDARLPLSSQNPMLTKIVGDKPKLLILNKADLADPAMTKEWRQYFESQGIQTLAINSKEQVTVKVVTDAAKKLMADKIARQKERGIQIETLRTMIIGIPNAGKSTLMNRLAGKKIAVVGNKPGVTKGQQWLKTNKDLEILDTPGILWPKFEDETVALKLALTGAIKDQLLPMDEVTIFGINYFKEHYPEKLAERFKQMKIEEEPSVIIMDMTRALGFRDDYDRFYSLFVKEVRDGKLGNYTLDTLEDLDGND

SEQ ID NO: 3832 - protein, 259 aa, Streptococcus pneumoniae
MATIKEIKELLVTVKELESPIFLDLEKDNRSGVQKEISKRKRAIQAELDENLRLESMLSYEKELYKQGLTLIAGIDEVGRGPLAGPVVAAAVILPKNCKIKGLNDSKKIPKKKHLEIFQAVQDQALSIGIGIIDNQVIDQVNIYEATKLAMQEAISQLSPQPEHLLIDAMKLDLPISQTSIIKGDANSLSIAAASIVAKVTRDELMKEYDQQFPGYDFATNAGYGTAKHLEGLTKLGVTPIHRTSFEPVKSLVLGKKES

SEQ ID NO: 3833 - protein, 516 aa, Streptococcus pneumoniae
MEEQSEIVRSKKEFAFASSTILSQVGRGIIVGLIVGIIVGSFRFLIEKGFHLIQGVYQDQGYLVRNLFVLVLFYILICWLSAKLTRSEKDIKGSGIPQVEAELKGLMSLNWWGILWKKYVLGILAIASGLMLGREGPSIQLGAVGGKGIAKWLKSSPVEERSLIASGAAAGLAAAFNAPIAALLFVVEEVYHHFSRFFWVSTLAASIVANFVSLLMFGLTPVLDMPDNIPPMTLDQYWIYLVMGIFLGFSGFLYEKAVLNVGRVYDLIGQKIHLDRAYYPILAFILIIPVGIFLPQILGGGNQLVLSLTEQNFSFQVLLAYFLIRFIWSMISYGSGLPGGIFLPILALGSLLGALVGVICVNLGLVSQEQFPIFVILGMSGYFGSISKAPLTAMILVTEMVGDIRNLMPLGLVTLVSYIIMDLLKGTPVYEAMLEKMLPEEVSSEGEVTLIEIPVSDKIAGKQVHELNLPHNVLITTQVHNGKSQTVNGSTRMYLGDMIHLVIPKSEIGKVKDLLL

SEQ ID NO: 3834 - protein, 356 aa, Streptococcus pneumoniae
MKREILLERIDKLKQLMPWYVLEYYQSKLAVPYSFTTLYEYLKEYDRFFSWVLESGISNADKISDIPLSVLENMSKKDMESFILYLRERPLLNANTTKQGVSQTTINRTLSALSSLYKYLTEEVENDQGEPYFYRNVMKKVSTKKKKETLAARAENIKQKLFLGDETEGFLTYIDQEHPQQLSNRALSSFNKNKERDLAIIALLLASGVRLSEAVNLDLRDLNLKMMVINVTRKGGKRDSVNVAAFAKPYLENYLAIRNQRYKTEKTDTALFLTLYRGVPNRIDASSVEKMVAKYSEDFKVRVTPHKLRHTLATRLYDATKSQVLVSHQLGHASTQVTDLYTHIVNDEQKNALDSL

SEQ ID NO: 3835 - protein, 329 aa, Streptococcus pneumoniae
MKYIINHSNDTAFNIALEEYAFKHLLDEDQIFLLWINKPSIIVGRHQNTIEEINRDYVRENGIEVVRRISGGGAVYHDLNNLNYTIISKEDENKAFDFKSFSTPVINTLAQLGVKAEFTGRNDLEIDGKKFCGNAQAYINGRIMHHGCLLFDVDLSVLANALKVSKDKFESKGVKSVRARVTNIINELPKKITVEKFRDLLLEYMKKEYPEMTEYVFSEEELAEINHIKDTKFGTWDWNYGKSPEFNVRRGTKFTSGKVEVFANVTESKIQDIKIYGDFFGIEDVAAVEDVLRGVKYEREDVLKALKTIDITRYFAGISREEIAEAVVG

SEQ ID NO: 3836 - protein, 567 aa, Streptococcus pneumoniae
MALEVIMPKAGVDMTEGQIVQWNKKVGEFVKEGEILLEIMTDKVSMELEAEEDGYLIAILKGDGETVPVTEVIGYLGEERENIPTAGAASPEASPVPVASTSNDDGNSDDAFDIVVIGGGPAGYVAAIKAAQLGGKVALVEKSELGGTCLNRGCIPTKTYLHNAEIIENIGHAANRGIVIENPNFTVDMEKLLETKSKVVNTLVGGVAGLLRSYGVTVHKGIGTITKDKNVLVNGSELLETKKIILAGGSKVSKINVPGMESPLVMTSDDILEMNEVPESLVIIGGGVVGIELGQAFMTFGSKVTVIEMMDRIVPAMDAEVSKNLRLILERKGMTILTGTKLQEIIEENGQLRIKVEGKDDIIASKALLSIGRMPDLEGIGEVEFELDRGCIKVNEYMETSVPGIYAPGDINGTKMLAHAAFRMGEVAAENALKGNHAVAKLNLTPAAIYTLPEVAAVGLTEEQAREKYDVAIGKFNFAANGRAIASDAAQGFVKVIADKKCGEILGVHIIGPAAAELINEASSIIEMEITVEEMLKTIHGHPTYSEVMYEAFADVLGMAIHSPKKK

SEQ ID NO: 3837 - protein, 375 aa, Streptococcus pneumoniae
LASSKPSSISYFSVAFDALCIINRIGEVMADDKLRATPAARKLADDLGINLYDVSGSGANGRVHKEDVETYKDTNVVRISPLAKRIALEHNIAWQEIQGTGHRGKIMKKDVLALLPENIENDSIKSPAQIEKVEEVPDNVTPYGEIERIPMTPMRKVIAQRMVESYLTAPTFTLNYEVDMTEMLALRKRVLEPIMEATGKKTTVTDLLSLAVVKSLMKHPYINASLTEDGKTIITHNYVNLAMAVGMDNGLMTPVVYNAEKMSLSELVVAFKDVIGRTLDGKLAPSELQNSTFTISNLGMFGVQSFGPIINQPNSAILGVSSTIEKPVVVNGEIVIRPIMSLGLTIDHRVVDGMAGAKFMKDLKELIETPISMLI

SEQ ID NO: 3838 - protein, 330 aa, Streptococcus pneumoniae
METKTMSFRDTIILAMSEEMRRDENVFLMGEDVGVFGGDFGTSVGMLEEFGPERVRDCPISEAAISGAAAGAAMTGLRPIVDMTFMDFSVIAMDNIVNQAAKTRYMFGGKGQVPMTVRCAAGNGVGSAAQHSQSLESWFTHIPGLKVVAPGTPADMKGLLKSSIRDNNPVIILEYKSEFNQKGEVPVDPDYTIPLGVGEIKRQGTDVTVVTYGKMLRRVVQAAEELAEEGISVEIVDPRTLVPLDKDIIINSVKKTGKVVLVNDAHKTSGYIGEISAIISESEAFDYLDAPIRRCAGEDVPMPYAQNLENAMIPTVESIKDAIRKTYNKE

SEQ ID NO: 3839 - protein, 145 aa, Streptococcus pneumoniae
VLGGRANSVTSCTTNSHWNLTFTTKHVTCFSSLVDDIVHGNNREVHEGHIDDWTKSCHGCSCCCSRDGSFRNRTVTDTFWTKFFKHSNRSTEVSSEDTDVFSHQEHIFIATHFLRHSKDNGVTEGHCFCFHFISFSLVCVNIFKG

SEQ ID NO: 3840 - protein, 103 aa, Streptococcus pneumoniae
LTILSMAITEKSMKVISTIGRSPVMAAPAAAPEMAASEIGQSRTRSGPNSSSIPTEVPKSPPKTPTSSPIKNTFSSRRISSDIARIMVSRKDIVFVSILSLSP

SEQ ID NO: 3841 - protein, 322 aa, Streptococcus pneumoniae
MSTLDKNLLLEMFRKMEEIRRMDLKIAQLVKKGKVPGMTHFSVGEEAANVGAMLALNPDDLITSNHRGHGQAIAKGIDLNGMMAEILGKYTGTCKGKGGSMHIADLDAGNLGANGIVGGGMGIAVGAALSQQMQNTGKIVVCFFGDGATNEGVFHEAVNMASIWNLPVIFYCINNGYGISADIKKMTNIEHIHQRSAAYGIPGMFIEDGNNVIDVYEGFQKAVDHVRSGNGPVLIESVTYRWLGHSSSDPGKYRTREEVELWKQKDPIENLRNYLIENNIASAEELEEIQAQVKEAVEASVKFAEESPFPSLESAFEDIYAD

SEQ ID NO: 3842 - protein, 453 aa, Streptococcus pneumoniae
MYKTKCLREKLVLFLKIFFPILIYQFANYSASFVDTAMTGQYNTMDLAGVSMATSIWNPFFTFLTGIVSALVPIIGHHLGRGKKEEVASDFYQFIYLALGLSVVLLGMVLFLAPTILNHIGLEAAVAAVAVRYLWFLSIGIIPLLLFSVIRSLLDSLGLTKLSMYLMLLLLPLNSGFNYLLIYGAFGVPELGGAGAGLGTSLAYWVLLGISVLVLFKQEKLKALHLEKRIPLNMDKIKEGVRLGLPIGGTVFAEVAVFSVVGLIMAKFSSLIIASHQSAMNFSSLMYAFPMSISSAMAIVVSYEVGAKRFDDAKTYIGLGRWTALIFAAFTLTFLYIFRGNVASLYGNDPKFIDLTARFLTYSLFFQLADTFAAPLQGILRGYKDTVIPFYLGLLGYWGVAIPVATLFDSLTDFGAYSYWIGLIISLIVSGALYRWRLTVIMKRFESLAKSKR

SEQ ID NO: 3843 - protein, 86 aa, Streptococcus pneumoniae
MNYFRKRRERQAKSNSGIYCPAANRSKIQYETKEKADHAVQYDNGGLVRSYYCRTCACWHTTSKSNKPPLSLKNYGLKLFGLDKSE

SEQ ID NO: 3844 - protein, 422 aa, Streptococcus pneumoniae
MLLIKNGRVMDPKSGLDQVCDVLVQDGKIIKIAPEITEEGAETIDATGLVVAPGLVDIHVHFREPGQTHKEDIHTGALAAAAGGFTTVVMMANTSPTISDVETLQAVLQSAAKEKINVKTVATITKNFNGKNLTDFKALLEAGAVGFSDDGIPLESSKIVKEAMEEAKKLNTFISLHEEDPGLNGVLGFNENIAREHFHICGATGVAEYAMMARDVMIAYATKAHVHIQHLSKEESVKVVEFAQGLGAEVTAEVAPQHFSKTEALLLTQGSNAKMNPPLRLESDRRAVIEGLKSGVITVIATDHAPHHVDEKNVEDITKAPSGMTGLETSLSLGLTYLVEAGELSLMELLEKMTYNPAKLYNFEAGYLAENGPADITIFDAKADRLVDSHFASKAANSPFIGETLKGQVKYTICKGQIVYQA

SEQ ID NO: 3845 - protein, 154 aa, Streptococcus pneumoniae
MPQLATICYIDNGKELLMLHRNKKPNDVHEGKWIGVGGKLERGETPQECAAREILEETGLKAKPVLKGVITFPEFTPDLDWYTYVFKVTEFEGDLIDCNEGMLEWVPYDEVLSKPTWEGDHTFVEWLLEDKPFFSAKFVYDGDKLLDTQVDFYE

SEQ ID NO: 3846 - protein, 221 aa, Streptococcus pneumoniae
MKESAMEHSSWHALIKAQLPEGYFGKINQFMEQVYSQGIIYPPKEKVFQALLTTLLEEVKVVILGQDPYHGPGQAQGLSFSVPDSIPAPPSLQNILKELSDDIGVKKSHDLTAWAEQGVLLLNACLTVPAGQANGHAGQIWEPFTDAVIQVVNHLDRPVVFVLWGAYARKKKALVTNPHHLIIESAHPSPLSVYRGFWGSKPFSKANAFLKETGQEPIALA

SEQ ID NO: 3847 - protein, 200 aa, Streptococcus pneumoniae
MSEVDFNEAVNYEFTSDTCQLANSIYQSLFKFFDKKNFSGDLIFTWKSPSLVKEGDYIGKRDSQVDNLRVIGNIFPNYLTNRKYSLNMNRNGCMGDFPHDFFDIYLDHVAKYAYEQKVNNIKEYYPLKRAILHQENALYFRFFSNFDDFLEKNYLKTIWQVSKETPFSEMDFNMFKNISEKIIFERGSKMLNDLKSNYKK

SEQ ID NO: 3848 - protein, 237 aa, Streptococcus pneumoniae
LFYKFLLFDLDHTLLDFDAAENVALTQLLKEEGVADIQAYKDYYVPMNKALWKDLELKKISKQELVNTRFSRLFAHFGQEKDGSFLAQRYQFYLAQQGQTLSGAHDLLDSLIERDYNLYAATNGITAIQTGRLAQSGLAPYFNQVFISEQLQTQKPDALFYEKIGQQIAGFSKEKTLMIGDSLTADIQGGNNAGIDTIWYNPHHLENHTQAQPTYEVYSYQDLLDCLDKNILEKITF

SEQ ID NO: 3849 - protein, 75 aa, Streptococcus pneumoniae
LMESIGLVIVSHSKHIAEGVVELISKVAKDVPITYVGGTEGGGIGTSFDQVDRVVSENPADTLLAFFDLGSAIKC

SEQ ID NO: 3850 - protein, 851 aa, Streptococcus pneumoniae
VHQISLRKKERMKINKKYLAGSVATLVLSVCAYELGLHQAQTVKENNRVSYIDGKQATQKTENLTPDEVSKREGINAEQIVIKITDQGYVTSHGDHYHYYNGKVPYDAIISEELLMKDPNYQLKDSDIVNEIKGGYVIKVNGKYYVYLKDAAHADNVRTKEEINRQKQEHSQHREGGTSANDGAVAFARSQGRYTTDDGYIFNASDIIEDTGDAYIVPHGDHYHYIPKNELSASELAAAEAFLSGRENLSNLRTYRRQNSDNTPRTNWVPSVSNPGTTNTNTSNNSNTNSQASQSNDIDSLLKQLYKLPLSQRHVESDGLIFDPAQITSRTARGVAVPHGNHYHFIPYEQMSELEKRIARIIPLRYRSNHWVPDSRPEEPSPQPTPEPSPSPQPAPNPQPAPSNPIDEKLVKEAVRKVGDGYVFEENGVSRYIPAKNLSAETAAGIDSKLAKQESLSHKLGAKKTDLPSSDREFYNKAYDLLARIHQDLLDNKGRQVDFEALDNLLERLKDVSSDKVKLVDDILAFLAPIRHPERLGKPNAQITYTDDEIQVAKLAGKYTTEDGYIFDPRDITSDEGDAYVTPHMTHSHWIKKDSLSEAERAAAQAYAKEKGLTPPSTDHQDSGNTEAKGAEAIYNRVKAAKKVPLDRMPYNLQYTVEVKNGSLIIPHYDHYHNIKFEWFDEGLYEAPKGYTLEDLLATVKYYVEHPNERPHSDNGFGNASDHVQRNKNGQADTNQTEKPSEEKPQTEKPEEETPREEKPQSEKPESPKPTEEPEEESPEESEEPQVETEKVEEKLREAEDLLGKIQDPIIKSNAKETLTGLKNNLLFGTQDNNTIMAEAEKLLALLKESK

SEQ ID NO: 3851 - protein, 829 aa, Streptococcus pneumoniae
LQLEISNRKRVSMKINKKYLVGSAAALILSVCSYELGLYQARTVKENNRVSYIDGKQATQKTENLTPDEVSKREGINAEQIVIKITDQGYVTSHGDHYHYYNGKVPYDAIFSEELLMKDPNYKLKDEDIVNEVKGGYVIKVDGKYYVYLKDAAHADNVRTKEEINRQKQEHSQHREGGTPRNDGAVAFARSQGRYTTDDGYIFNASDIIEDTGDAYIVPHGDHYHYIPKNELSASELAAAEAFLSGRGNLSNSRTYRRQNSDNTSRTNWVPSVSNPGTTNTNTSNNSNTNSQASQSNEDVDSLLKQLYALPLSKRHVESDGLVFDPAQITSRTARGVAVPHGDHYHFIPYSQMSELEERIARIIPLRYRSNHWVPDSRLEQPSLQPTPEPSPGPQPAPNLKIDSNSSLVSQLVRKVGEGYVFEEKGISRYVFAKDLPSETVKNLESKLSKQESVSHTLTAKKENVAPRDQEFYDKAYNLLTEAHKALFENKGRNSDFQALDKLLERLNDESTNKEKLVDDLLAFLAPITHPERLGKPNSQIEYTEDEVRIAQLADKYTTSDGYIFDEHDIISDEGDAYVTPHMGHSHWIGKDSLSDKEKVAAQAYTKEKGILPPSPDADVKANPTGDSAAAIYNRVKGEKRIPLVRLPYMVEHTVEVKNGNLIIPHKDHYHNIKFAWFDDHTYKAPNGYTLEDLFATIKYYVEHPDERPHSNDGWGNASEHVLGKKDHSEDPNKNFRADEEPVEETPAEPEVPQVETEKVEAQLKEAEVLLAKVTDSSLKANATETLAGLRNNLTLQIMDNNSIMAEAEKLLALLKGSNPSLLCKVKLI

SEQ ID NO: 3852 - protein, 410 aa, Streptococcus pneumoniae
MTEMLKGIAASDGVAVAKAYLLVQPDLSFETITVEDTNAEEARLDAALQASQDELSVIREKAVGTLGEEAAQVFDAHLMVLADPEMISQIKETIRAKKVNAEAGLKEVTDMFITIFEGMEDNPYMQERAADIRDVTKRVLANLLGKKLPNPASINEEVIVIAHDLTPSDTAQLDKNFVKAFVTNIGGRTSHSAIMARTLEIAAVLGTNNITEIVKDGDILAVNGITGEVIINPTDEQAAEFKAAGEAYAKQKAEWALLKDAQTVTADGKHFELAANIGTPKDVEGVNNNGAEAVGLYRTEFLYMDSQDFPTEDEQYEAYKAVLEGMNGKPVVVRTMDIGGDKEHPYFDMPHEMNPFLGFRALRISISETGDAMFRTQIRAPSSCVCSRSIAYHVPNGCALERIPCSESSL

SEQ ID NO: 3853 - protein, 45 aa, Streptococcus pneumoniae
SAPWPTPRLITPIIDLRLTDLPLYSRVISEANLLAVCTNNVAGRA

SEQ ID NO: 3854 - protein, 87 aa, Streptococcus pneumoniae
MASKDFHVVAETGIHARPATLLVQTASKFASDITLEYKGKSVNLKSIMGVMSLGVGQGADVTISAEGADADDAIAAISETMEKEGLA

SEQ ID NO: 3855 - protein, 72 aa, Streptococcus pneumoniae
MVTVYSKNNCVQCKMTKRFLDSNNVSYREINLDEQPEYVDQVKELGFSAAPVIQTPTEVFSGFQPGKLKQLA

SEQ ID NO: 3856 - protein, 719 aa, Streptococcus pneumoniae
MGLKHLEDVTYFRLNNEINRPVNGQIMLHKDKEALDAFFKENVVPNTMVFDSIKDKINYLIEHNYIETAFIKKYRPEFLEELAQFIKDQNFQFKSFMAAYKFYNQYALKTNDGEYYLENMEDRVFFNALYFADGNEAVAIDIANEIIHQRYQPATPSFLNAGRARRGELVSCFLIQVTDDMNSIGRSINSALQLSRIGGGVGITLSNLREAGAPIKGYEGAASGVVPVMKLFEDSFSYSNQLGQRQGAGVVYLNVFHPDIIAFLSTKKENADEKVRVKTLSLGVVVPDKFYELARKNEEMYLFSPYSVEKEYGVPFNYIDITEKYDELVANPNIRKTKIKARDLETEISKLQQESGYPYVVNIDTANRANPVDGKIIMSNLCSEILQVQEPSLINDAQEFLQMGTDVSCNLGSTNVVNMMTSPDFGRSIRAMVRALTFVTDSSHIVAVPTIDHGNSQAHTFGLGAMGLHSYLAQQLIEYGSPESVEFTSIYFMLMNYWTLVESNNIARERGITFHNFEKSDYANGSYFDKYVTGEFVPTSDRVKELFKNVFIPGVADWAELRDKVQEDGLYHQNRLAVAPNGSISYINDVSASIHPITQRIEERQEKKIGKIYYPAAGLSTETIPYYTSAYDMDMRKVIDVYAAATEHVDQGLSLTLFMRSDIPKGLYEWKRENKQTTRDLSILRNYAFNKGIKSIYYVRTFTDDGGEVGANQCESCVI

SEQ ID NO: 3857 - protein, 62 aa, Streptococcus pneumoniae
FVDDIFDGIPVNGFVVSFHLKSLSVFSIANSQLFLLYHNSIGVSHKKSEARLLKCYINYVMT

SEQ ID NO: 3858 - protein, 320 aa, Streptococcus pneumoniae
METYYKAINWNAIEDVIDKSTWEKLTEQFWLDTRIPLSNDLDDWRKLSNKEKDLVGKVFGGLTLLDTMQSETGVQALRADIRTPHEEAVFNNIQFMESVHAKSYSSIFSTLNTKAEIEEIFEWTNTNPYLQKKAEIVNEIYLNGSPLEKKVASVFLETFLFYSGFFTPLYYLGNNKLANVAEIIKLIIRDESVHGTYIGYKFQLGFNELPEEEQEKLKEWMYDLLYTLYENEEGYTESLYDGVGWTEEVKTFLRYNANKALMNMGQDPLFPDSAEDVNPIVMNGISTGTSNHDFFSQVGNGYLLGEVEAMQDDDYNYGLD

SEQ ID NO: 3859 - protein, 253 aa, Streptococcus pneumoniae
MLKQEKLTKILEIVNSKGTITVKQIMDEIAVSDMTARRYLQELADKDLLIRVHGGAEKLRTNSLLTNERSNIEKQALQTAEKQEIAHFAGSLVEERETIFIGPGTTLEFFARELPIDNIRVVTNSLPVFLILSERKLTDLILIGGNYRDITGAFVGTLTLQNLSNLQFSKAFVSCNGIQNGALATFSEEEGEAQRIALNNSNKKYLLADHSKFNKFDFYTFYNISNLDTIVSDSKLSDSILFKLSKHIKVIKP

SEQ ID NO: 3860 - protein, 83 aa, Streptococcus pneumoniae
MFKDFIQSIYEKVYIINFEKCSQIPCLTSEELKSLGKWYVSTGKEWICHSDADLEEFKNLFLNFINPEEWDTISFDSDFMPFQ

SEQ ID NO: 3861 - protein, 471 aa, Streptococcus pneumoniae
VKKMTKTLPKDFIFGGATAAYQAEGATHTDGKGPVAWDKYLEDNYWYTAEPASDFYNRYPVDLKLAEEYGVNGIRISIAWSRIFPTGYGQVNAKGVEFYHNLFAECHKRHVEPFVTLHHFDTPEALHSNGDFLNRENIEHFVDYAAFCFEEFPEVNYWTTFNEIGPIGDGQYLVGKFPPGIQYDLAKVFQSHHNMMVSHARAVKLYKEKGYKGEIGVVHALPTKYPLDPENPADVRAAELEDIIHNKFILDATYLGRYSAETMEGVNHILLVNGGSLDLREEDFTALEAAKDLNDFLGINYYMSDWMEAFDGETEIIHNGKGEKGSSKYQIKGVGRRVAPDYVPRTDWDWIIYPQGLYDQIMRVKKDYPNYKKIYITENGLGYKDEFVDNTVYDDGRIDYVKQHLEILSDAIADGANVKGYFIWSLMDVFSWSNGYEKRYGLFYVDFETQERYPKKSAHWYKKVAETQIID

SEQ ID NO: 3862 - protein, 564 aa, Streptococcus pneumoniae
MDKLIIFIEKGKPFFEKLSRNIYLRAIKDGFISSMPAVLFSSIFILIAAVPNIFGFKWSDEQLAFILKPYNYSMGILALLVAGTTAKSLTDSVNTRSMEKTNQINYMSTFLAAVVGLLILAADPIEGGFANGLLGTRGLLTAFLAAFITVNIYKVCIKNNVTIRLPEEVPPNIAQVFKDVIPFALSVLSIYGLDLIVRNIFGTNVAESVGKILAPLFSATDGYIGLAIVFGAYAFFWFVGIHGPSVVEPLIVAISYANIEANVQLVQAGMHADKILNPVTQTFVVTMGGTGATLVVPFMFMWLCKSKRNRIVGRASVVPTFFGVNEPILFGAPIVLNPIFFIPFVTAPIINVWIMKFFVDVLQMNSFSIILPWTTPAPIGIVMGTALAPLSFVLAITLIIIDTLIYYPFVKVYDHQILEEERKGNSSSELKEKVAANFNTVKADAILEKAGVDAAQNTITEETNVLVLCAGGGTSGLLANALNKAAAEYNVPVKATAGGYGAHREMLPEFDLVILAPQVASNFEDMKAETDKLGIKLAKTEGAQYIKLTRDGKGALAFVQEQFD

SEQ ID NO: 3863 - protein, 105 aa, Streptococcus pneumoniae
MNREEVTLLGFEIVAYAGDARSKLLEALKAAEAGDFEKADALVEEAGSCIAEAHHAQTSLLTKEASGEDLAYSVTMMHGQDHLMTTILLKDLMHHLIELYKRGVK

SEQ ID NO: 3864 - protein, 278 aa, Streptococcus pneumoniae
MYRILNPMNHNVSLVRNDKGEEVIVIGKGIAFGKKKGDLIAENQVEKIFRMKTEESRENFMALLKDVPLDFITVTYEIIDKLSKKYHYPIQEYLYVTLTDHIYCSYQALTQGRYKDSNLPDISAKYPVAFQIANEAFEIYRQKLADHFPEDEIIRIAYHFINAEGENEVELVESIDKRKEILRNVEEVLTDYAIQRTKKNNHFYDRFMIHLNYFLDYLDRSRDDNQSLLDMEDHIKQSYPKAFEIGSKIYDVITQHTGLDLYKSERVYLVLHIQRLLS

SEQ ID NO: 3865 - protein, 269 aa, Streptococcus pneumoniae
MELTKYPSSMLLDPEYGLPATKALDEKAGLLLAYEKTGYDTTSTKRLPDCLDVWSAKRIKEEGADAVKFLLYYDVDSSDELNQEKQAYIERIGSECVAEDIPFFLEILAYDEKIADAGSVEYAKVKPHKVIGAMKVFSDPRFNIDVLKVEVPVNIKYVEGFAEGEVVYTREEAAAFFKAQDEATNLPYIYLSAGVSAKLFQDTLVFAHESGANFNGVLCGRATWAGSVEAYIKDGEAAAREWLRTTGFENIDELNKVLQTTATSWKERV

SEQ ID NO: 3866 - protein, 272 aa, Streptococcus pneumoniae
GTFNVTRVLSEFGDSVLATGLVGGKLGEFLVEHIDDQVKKDFFSIQGETRNCIAILHGDNQTEVLEKGPEVLEQEGQDFLEHFKKLLESVEVVAISGSLPAGLPVDYYASLVELANQAGKLVVLDCSGAALQAVLESPHKPTVIKPNNEELSQLLGREVSEDLEELKEVLQESLFTGIEWIIVSLGANGTFAKHGDTFYKVDIPRIQVVNPVGSGDSTVAGISSGLLHKESDAGLLIKANVLGMLNAQEKMTGHVNMANYQALYDQLIVKEV

SEQ ID NO: 3867 - protein, 162 aa, Streptococcus pneumoniae
MDGFIVTVKIIGHLLVVVFSAIPFFKEFCKEVCVCLLSIVTFKVFNFRNQFLVFFRWFVFSMNESFDDITHKQFTSNLTTKADNVSVQLLFSIKGCCHITNQGRTNTWNFIYSVVDTNTSTTDTYPKISLAASYSFPYFFTKDWVVSPCMVICTKVNDFISF

SEQ ID NO: 3868 - protein, 171 aa, Streptococcus pneumoniae
MRIAIGCDHIVTDEKMAVSEFLKSKGYEVIDFGTYDHTRTHYPIFGKKVGEAVTSGQADLGVCICGTGVGINNAVNKVPGVRSALVRDMTTALYAKEQLNANVIGFGGKITGELLMCDIIEAFIHAEYKPSEENKKLIAKIEHLESHNAQQTDANFFTEFLEKWDRGEYHD

SEQ ID NO: 3869 - protein, 141 aa, Streptococcus pneumoniae
MSIVIGADAAGLRLKEVVKDFLEKENFHLVDVTAEGQDFVDVTLAVAAEVNKEEQNLGIVIDAYGAGPFMVATKIKGMVAAEVSDERSAYMTRGHNNSRMITMGAQLVGDELAKNIAKGFVNGKYDGGRHQIRVDMLNKMG

SEQ ID NO: 3870 - protein, 96 aa, Streptococcus pneumoniae
TYCILLFIFSMLDSSSVLAVFKKQSISPHKHNILLLFEEVNSLCLFLLFIFYFFIKLLSQTLILQPDWLLRDKHSSYLLNDLLLQGMLTSQTMVQR

SEQ ID NO: 3871 - protein, 158 aa, Streptococcus pneumoniae
MPYFIGGHPGFNCPLLDDGVYEDYYLESEKEETCSVPRPFPETGMLDFQDRSPWLEGQKEIDLSYDLFSTDAVTLDELQSRTIALRSLKHDKGLKVHFAEFPNLIIWSTLNKGPFITFEPWSGLSTFLEEGDHLEDKKNVCLLEANQVEELGFEIEVL

SEQ ID NO: 3872 - protein, 206 aa, Streptococcus pneumoniae
VREYRTYEQIAADFGIHESNFIRRSQWVEVTLVQSGVTCQALLSALRTRYDMMRRKYKSIAIKKELANDSGKKKCHAMKAQAIVTSQGRIVSLDITVNYCHDMKLFKMSCRNIGQAGKILADSGYQGLMKIYPQVQTPRKSSKLKSLIAEDKAYNHALSKERSKVENIFAKVKTFKMFSTTYRNHRKRFGLRMNLSAGIINHELGF

SEQ ID NO: 3873 - protein, 106 aa, Streptococcus pneumoniae
LTILYFLRNKIWYSSSMNDEASKQLTDARFKRLVGVQRTTFEEMLAVLKTAYQLKHAKGGRKPKLSLEDLLMATLHMCENIELMNKLRLILVFTKATLSVGANGLK

SEQ ID NO: 3874 - protein, 100 aa, Streptococcus pneumoniae
MIKILAACGAGVNSSHQIKSALEEELSNRGYDVHCDAVMVKDVNEDLMKGYDIFTPIAATDLGFEPGIPVIEAGPILFCIPAMSVPVFDNIILPAKQNMV

SEQ ID NO: 3875 - protein, 147 aa, Streptococcus pneumoniae
VFCLEADNQEQLFDQVASLLEEREIVTPTYREALITREKSFPTGLDMEFLGKDLPNVAIPHTDIVHNLAEKVVVVRLEKPVTFHNMIAPGKEVEVSLLFFIINNSSSSQTNILAQLMDFFTGNGHLEDLSKISEPEKLYAYIAEATA

SEQ ID NO: 3876 - protein, 430 aa, Streptococcus pneumoniae
MKSDKTIIRKIHMEQLHFITKLLDIKDPNIKILDIINMDTHKEIIAKLDYEAPSCPDCGSLMKKYDFQKPSKIPYLETTGMPSRILLRKRRFKCYHCSKMMVAETPLVKKNHQIPRIINQKIAQKLIEKISMTDIAHQLAISTSTVIRKLNDFHFEHDFSRLPKIMSWDEYAFTKGKMSFIAQDFDNLNIITVLEGRTQAVIRNHFLRYDRAVRCQVKIITMDMFSPYYDLAKQLFPCAKIVLDRFHIIQHLSRAMSRFRVQIMNQFERKSHEYKAIKRYWKLIQQDSRKLSDKRFYRPTFRMHLTNKEILDKILSYSEDLKHHYQIYQLLLFHFQNKDPEKFFGLIEDTLKQVHPIFQTVFKTFLKNKEKIVNALQLPYSNAKLEATNNLIKLIKRNAFGFRNFENFKKRIFIALNIKKERTNFVLSRA

SEQ ID NO: 3877 - protein, 62 aa, Streptococcus pneumoniae
LAQISILHFDFLSIDKHSHTVFNTLRKSLQTTLALSATSKQCFEQLAASFLVCSLIFIEYKV

SEQ ID NO: 3878 - protein, 416 aa, Streptococcus pneumoniae
MLSSKDIIKAHKVLNGVVVNTPLDYDHYLSEKYGAKIYLKKENAQRVRSFKIRGAYYAISQLSKEERERGVVCASAGNHAQGVAYTCNEMKIPATIFMPITTPQQKIGQVRFFGGDFVTIKLVGDTFDASAKAAQEFTVSENRTFIDPFDDAHVQAGQGTVAYEILEEARKESIDFDAVLVPVGGGGLIAGVSTYIKETSPEIEVIGVEANGARSMKAAFEAGGPVKLKEIDKFADGIAVQKVGQLTYEATRQHIKTLVGVDEGLISETLIDLYSKQGIVAEPAGAASIASLEVLAEYIKGKTICCIISGGNNDINRMPEMEERALIYDGIKHYFVVNFPQRPGALREFVNDILGPNDDITRFEYIKRASKGTGPVLIGIALADKHDYAGLIRRMEGFDPAYINLNGNETLYNMLV

SEQ ID NO: 3879 - protein, 118 aa, Streptococcus pneumoniae
MNITNLFSIKTGCDETDRQLQKLFFQLDLQLGELTDQLRKLDSNFVPRSQFVDTLDLNDVEYKEILNYFIFHRNDSEESLVEWLYDWISTNRYELPKEFSIRMAHKYHESVTEVFGDE

SEQ ID NO: 3880 - protein, 77 aa, Streptococcus pneumoniae
KTLTNIVGKSLGPKSAVRFGEALSYIEGPLRRINETIDGGLYQIEQMIASGLKESGLNDWTAKTLASAIRGILDVLI

SEQ ID NO: 3881 - protein, 88 aa, Streptococcus pneumoniae
LYNVITPSVIVLADQNKADWSYDENTVINIYDDANFEDGRLHMTFEQFFKLAQIAREEGLEIHSPFERAGATKSARYIAKWILRNKKH

SEQ ID NO: 3882 - protein, 340 aa, Streptococcus pneumoniae
MTVQMEYEKDVKVAALDGKKIAVIGYGSQGHAHAQNLRDSGRDVIIGVRPGKSFDKAKEDGFDTYTVAEATKLADVIMILAPDEIQQELYEAEIAPNLEAGNAVGFAHGFNIHFEFIKVPADVDVFMCAPKGPGHLVRRTYEEGFGVPALYAVYQDATGNAKNIAMDWCKGVGAARVGLLETTYKEETEEDLFGEQAVLCGGLTALIEAGFEVLTEAGYAPELAYFEVLHEMKLIVDLIYEGGFKKMRQSISNTAEYGDYVSGPRVITEQVKENMKAVLADIQNGKFANDFVNDYKAGRPKLTAYREQAANLEIEKVGAELRKAMPFVGKNDDDAFKIYN

SEQ ID NO: 3883 - protein, 166 aa, Streptococcus pneumoniae
MRCWGCSSMRRMLTAKLQNRSGVLNRFTGVLSRRQVNIESISVGATEDPNVSRITIIIDVASHDEVEQIIKQLNRQIDVIRIRDITDKPHLEREVILVKMSAPAEKRAEILAIIQPFRATVVDVAPSSITIQMTGNAEKSEALLRVIRPYGIRNIARTGATGFTRD

SEQ ID NO: 3884 - protein, 566 aa, Streptococcus pneumoniae
MEKISLESPKTGSDLVLETLRDLGVDTIFGYPGGAVLPFYDAIYNFKGIRHILGRHEQGCLHEAEGYAKSTGKLGVAVVTSGPGATNAITGIADAMSDSVPLLVFTGQVARAGIGKDAFQEADIVGITMPITKYNYQVRETADIPRIITEAVHIATTGRPGPVVIDLPKDISALETDFIYSPEVNLPSYQPTLEPNDMQIKKILKQLSKAKKPVLLAGGGISYAEAATELNEFAERYQIPVVTSLLGQGTIATSHPLFLGMGGMHGSFAANIAMTEADFMISIGSRFDDRLTGNPKTFAKNAKVAHIDIDPAEIGKIISADIPVVGDAKKALQMLLAEPTVHNNTEKWIEKVTKDKNRVRSYDKKERVVQPQAVIERIGELTNGDAIVVTDVGQHQMWTAQYYPYQNERQLVTSGGLGTMGFGIPAAIGAKIANPDKEVVLFVGDGGFQMTNQELAILNIYKVPIKVVMLNNHSLGMVRQWQESFYEGRTSESVFDTLPDFQLMAQAYGIKNYKFDNPETLAQDLEVITEDVPMLIEVDISRKEQVLPMVPAGKSNHEMLGVQFHA

SEQ ID NO: 3885 - protein, 678 aa, Streptococcus pneumoniae
MTVKINTKDGQIELTDEVIATVVGGAATEIFGVVGMASKNALKDNFQALLGKENYSKGVVVKAAEDGSIAVDVYTVLSYGTKISEVSKNIQERVAFSCGKPAWNYCSDCKCLHSKYQSCRRITVSKITTSLFQEMVQAASTRLNKQAEYVNSLNVFPVPDGDTGTNMGMTIENGAKEVADKPASTVGEVASILAKGLLMGARGNSGVITSQLFRGFSQAIKDKDELTGQDLALAFQSGVEVAYKAVMKPVEGTILTVSRGAAIGAKKKAEQTDDAVEVMRAALEGAKTALAKTPDMLPVLKEVGVVDSGGQGLVFIYEGFLSALTGEYIASEDFVATPANMSEMINVEHHKSVAGHVATEDITFGYCTEIMVALKQGPTYAKDFDYDEFRNYLDELGDSLLVVNDDEIVKVHVHTEDPGLVMQEGLKYGSLVKVKVDNMRNQHEAQVEKEATQVIKSAEEKEYALIAVVAGKGLADIFCSQGVDYVIEGGQTMNPSTEDFIKAVEQVNARNIIFLPNNKNIFMAAQSAAEVLEQPAVVVEARTLPQGMTSLLAFDPSKSIEENQERMTAALSDVVSGSVTTAVRDTTIDGLEIHENDNLGMVDGKILVSNPDMHQTLTETLKHMLDEDSEIVTFYVGEDGSEELANEIAQEIVEEFEDVEVEIHQGQQPVYPYLFSVE

SEQ ID NO: 3886 - protein, 62 aa, Streptococcus pneumoniae
MAKVCYFTGRKTVSGNNRSHAMNQTKRAVKPNLQKVTVLIDGKPKKVWASARALKSGKVERV

SEQ ID NO: 3887 - protein, 81 aa, Streptococcus pneumoniae
GTIICGFFRYFIPKYVSESRVLYLDSDIVVRKSIDELWDLDLTAIPLAAVRDDFYTHNFNSGVLLINDGMWRAENVTQDLI

SEQ ID NO: 3888 - protein, 65 aa, Streptococcus pneumoniae
VKEEKKAIVLGADNAYMDKVETTIKSLCVHHYNLKFYVFNDDLPREWFQLMEKRLETLNSEIVNV

SEQ ID NO: 3889 - protein, 514 aa, Streptococcus pneumoniae
MNIQEEIKKRRTFAIISHPDAGKTTITEQLLYFGGEIREAGTVKGKKTGTFAKSDWMDIEKQRGISVTSSVMQFDYDGKRVNILDTPGHEDFSEDTYRTLMAVDAAVMVVDSAKGIEAQTKKLFEVVKHRGIPVFTFMNKLDRDGREPLELLQELEEILGIASYPMNWPIGMGKAFEGLYDLYNQRLELYKGDERFASLEDGDKLFGSNPFYEQVKDDIELLNEAGNEFSEEAILAGELTPVFFGSALTNFGVQTFLEIFLKFAPEPHGHKKTDGDIVDPYDKDFSGFVFKIQANMDPRHRDRIAFVRIVSGEFERGMSVNLPRTGKGAKLSNVTQFMAESRENVTNAVAGDIIGVYDTGTYQVGDTLTVGKNKFEFEPLPTFTPEIFMKVSAKNVMKQKSFHKGIEQLVQEGAVQLYKNYQTGEYMLGAVGQLQFEVFKHRMEGEYNAEVVMSPMGKKTVRWIKPEDLDERMSSSRNILAKDRFDQPVFLFENDFALRWFADKYPDVELEEKM

SEQ ID NO: 3890 - protein, 100 aa, Streptococcus pneumoniae
MKITQEEVTHVANLSKLRFSEEETAAFATTLSKIVDMVELLGEVDTTGVAPTTTMADRKTVLRPDVAEEGTNRDRLFKNVPEKDNYYIRVPAILDDGGDA

SEQ ID NO: 3891 - protein, 488 aa, Streptococcus pneumoniae
MTFNNKTIEELHNLLVSKEISATELTQATLENIKSREEALNSFVTIAEEQALVQAKAIDEAGIDADNVLSGIPLAVKDNISTDGILTTAASKMLYNYEPIFDATAVANAKTKGMIVVGKTNMDEFAMGGSGETSYYGATKNAWDHSKVPGGSSSGSAAAVASGQVRLSLGSDTGGSIRQPAAFNGIVGLKPTYGTVSRFGLIAFGSSLDQIGSFAPTVKENALLLNAIASEDAKDSTSAPVRIADFTSKIGQDIKGMKIALPKEYLGEGINPEVKETILNAAKHFEKLGAIVEEVSLPHSKYGVAVYYIIASSEASSNLQRFDGIRYGYRAEDATNLDEIYVNSRSQGFGEEVKRRIMLGTFSLSSGYYDAYYKKAGQVRTLIIQDFEKVFADYDLILGPTAPSVAYDLDSLNHDPVAMYLADLLTIPVNLAGLPGISIPAGFSQGLPVGLQLIGPKYSEETIYQAAAAFEATTDYHKQQPVIFGGDN

SEQ ID NO: 3892 - protein, 212 aa, Streptococcus pneumoniae
MNFETVIGLEVHVELNTNSKIFSPTSAHFGNDQNANTNVIDWSFPGVLPVLNKGVVDAGIKAALALNMDIHKKMHFDRKNYFYPDNPKAYQISQFDEPIGYNGWIEVELEDGTTKKIGIERAHLEEDAGKNTHGTDGYSYVDLNRQGVPLIEIVSEADMRSPEEAYAYLTALKEVIQYAGISDVKMEEGSMRVDANISLVLMVKRNSVPRLN

SEQ ID NO: 3893 - protein, 268 aa, Streptococcus pneumoniae
LKNLNSFSNVRKGLEYEVQRQAEILRSGGQIRQETRRYDEANKTTILMRVKEGAADYRYFPEPDLPLFEISDEWIEEMRTELPEFPKERRARYVSDLGLSDYDASQLTANKVTSDFFEKAVALGGDAKQVSNWLQGEVAQFLNAEGKTLEQIELTPENLVEMITIIEDGTISSKIAKKVFVHLAKNGGGAREYVEKAGMVQISDPAILIPIIHQVFADNEAAVADFKSGKRNADKAFTGFLMKATKGQANPQVALKLLAQELAKLKEN

SEQ ID NO: 3894 - protein, 347 aa, Streptococcus pneumoniae
MATMKAARWHAAKDVRIQEIEVPEVLPHQVKVAVKFTGICGTDLHEFLDGPIFIPTDEHVYSGQKAPVTLGHEFSGEIIEVGSDVTRVKVGDRVAVEPILAKNNLVGDYNLDPNLNFVGLAADGGFAKYCVLDGDLVHVIPDSLSYEQAALTEPAAVAVYAVRQSSLKAGDTAVVFGLGPIGLLIVEALRAAGASKIYAVELSPERQAKAEELGAIVVRPEEGETAVEAIHRLTNGGVDVSYEVTGVPVVLGQALAAVHKAGECMVVSIWEREANINPNEFAIQEKTLKGIIAYRHIFPKVLELMEQGYFSAEKLVTKKIKLENIVEEGFIELTQDKSQIKILVEPE

SEQ ID NO: 3895 - protein, 66 aa, Streptococcus pneumoniae
YSSKISSNHVSVTLPYIWLLTSSVLSTTSKQCFEQPAASFLVCSLISIEYEKKYSGYSLTLTTPPD

SEQ ID NO: 3896 - protein, 186 aa, Streptococcus pneumoniae
MIEASKLKAGMTFETADGKLIRVLEASHHKPGKGNTIMRMKLRDVRTGSTFDTSYRPEEKFEQAIIETVPAQYLYKMDDTAYFMNTETYDQYEIPVVNVENELLYILENSDVKIQFYGTEVIGVTVPTTVELTVAETQPSIKGATVTGSGKPATMETGLVVNVPDFIEAGQKLVINTAEGTYVSRA

SEQ ID NO: 3897 - protein, 129 aa, Streptococcus pneumoniae
MGIEEQLGEIVIAPRVLEKIIAIATAKVEGVHSFSNRSVSDTLSKLSLGRGIYLKNVDEELTADIYLYLEYGVKVPKVAVAIQKAVKDAVRNMADVELAAINIHVAGIVPDKTPKPELKDLFDEDFLND

SEQ ID NO: 3898 - protein, 140 aa, Streptococcus pneumoniae
MTSPLLESRRQLRKCAFQALMSLEFGTDVETACRFAYTHDREYTDVQLPAFLIDLVSGVQAKKEELDKQITQHLKAGWTIERLTLVERNLLRLGVFEITSFDTPQLVAVNEAIELAKDFSDQKSARFINGLLSQFVTEEQ

SEQ ID NO: 3899 - protein, 189 aa, Streptococcus pneumoniae; identical to SEQ ID NO: 2665

SEQ ID NO: 3900 - protein, 260 aa, Streptococcus pneumoniae
MEQLHFITKLLDIKDPNIQILDIINKDTHKEIIAKLDYEAPSCPECGSQMKKYYFQKPSKIPYLETTGMPTRILLRKRRFKCYHCSKIMVAETSIVKKNHQIPRIINQKIAQKLIEKISMTDIAHQLSISTSTVIRKLNDFHFKHDFSCLSEIMSWDEYAFTKGKMSFIAQDFNKLNIITVLEGRTQAIIRNHFLRYDRVVRCRVKIITMDMFSPYYDLAKQLRFQISRLRLKQSPRLFHSRMLKSCWIAFTLYNILAVL

SEQ ID NO: 3901 - protein, 277 aa, Streptococcus pneumoniae
LEVRLPNRVIFQKSTMRNTKKLRQFGIFLLIILLSTYLPQTIRLYVTIILGLGADVYSLILTMGLVGSFLLLIWRLKKKKMLFIFEKKSWNWSFVFYLFATYVVYQILGNFWARYAHLINHRNIHDEYFTVVLSNGQPTFLSTILSFVLPVIIDPVFEETLDRGYFMNTFFPKSKYYLDVILSGLIFGLSHLILSHRDPISLLYYSLIGFFFALVYRSTDNLRLTILCHSFLTFSIMQNLSGFLFTIISIIIFLDSGRQRKKCLISIKHFFFLLLAL

SEQ ID NO: 3902 - protein, 83 aa, Streptococcus pneumoniae
LTFLIELFTSYFKSLYFKKVLAMTGTETFTVISTEDLEQTSGGLAVWEDGYSRWLYYREFAPYMRQGALNSYIDAWKYGFRTG

SEQ ID NO: 3903 - protein, 255 aa, Streptococcus pneumoniae
MNIAKIVREAREQSRLTTLDFATGIFDEFIQLHGDRSFRDDGAVVGGIGWLGDQAVTVVGIQKGKSLQDNLKRNFGQPHPEGYRKALRLMKQAEKFGRPVVTFINTAGAYPGVGAEERGQGEAIARNLMEMSDLKVPIIAIIIGEGGSGGALALAVADRVWMLENSIYAILSPEGFASILWKDGTRAMEAAELMKITSHELLEMDVVDKVISEVGLSSKELIKSVKKELQTELARLSQKPLEELLEERYQRFRKY

SEQ ID NO: 3904 - protein, 288 aa, Streptococcus pneumoniae
MALFSKKDKYIRINPNRSVREKPQAKPEVPDELFSQCPGCKHTIYQKDLGSERICPHCSYTFRISAQERLALTIDMGTFKELFTGIESKDPLHFPGYQKKLASMREKTGLHEAVVTGTALIKGQTVALGIMDSNFIMASMGTVVGEKITRLFEYATVEKLPVVLFTASGGARMQEGIMSLMQMAKISAAVKRHSNAGLFYLTILTDPTTGGVTASFAMEGDIILAEPQSLVGFAGRRVIENTVRESLPEDFQKAEFLLEHGFVDAIVKRRDLPDTIASLVRLHGGSPR

SEQ ID NO: 3905 - protein, 455 aa, Streptococcus pneumoniae
MFRKILIANRGEIAVRIIRAARELGIATVAVYSTADKEALHTLLADEAVCIGPGKATESYLNINAVLSAAVLTEAEAIHPGFGFLSENSKFATMCEEVGIKFIGPSGHVMDMMGDKINARAQMIKAGVPVIPGSDGEVHNSEEALIVAEKIGYPVMLKASAGGGGKGIRKVEKPDDLVSAFETASSEAKANYGNGAMYIERVIYPARHIEVQILGDEHGHVIHLGERDCSLQRNNQKVLEESPSIAIGKTLRHEIGAAAVRAAEFVGYENAGTIEFLLDEASSNFYFMEMNTRVQVEHPVTEFVSGVDIVKEQICIAAGQPLSVKQEDIVLRGHAIECRINAENPAFNFAPSPGKITNLYLPSGGVGLRVDSAVYPGYTIPPYYDSMIAKIIVHGENRFDALMKMQRALYELEIEGVQTNADFQLDLISDRNVIAGDYDTSFLMETFLPKYQEKE

SEQ ID NO: 3906 - protein, 140 aa, Streptococcus pneumoniae
MIDIQGIKEALPHRYPMLLVDRVLEVSEDTIVAIKNVTINEPFFNGHFPQYPVMPGVLIMEALAQTAGVLELSKPENKGKLVFYAGMDKVKFKKQVVPGDQLVMTATFVKRRGTIAVVEAKAEVDGKLAASGTLTFAIGN

SEQ ID NO: 3907 - protein, 161 aa, Streptococcus pneumoniae
MNLNDIKDLMTQFDQSSLREFSYKNGTDELQFSKNEARPVPEVATQVAPAPVLATPSPVAPTSAPAETVAEEVPAPAEASVASEGNLVESPLVGVVYLAAGPDKPAFVTVGDSVKKGQTLVIIEAMKVMNEIPAPKDGVVTEILVSNEEMVEFGKGLVRIK

SEQ ID NO: 3908 - protein, 92 aa, Streptococcus pneumoniae
LFLVRKYLYHQPSLLQDICWGLRRAVEAIVTIEAMRHNFVPMTAGTSEVSDYIEANVVYGQGLEKEIPYAISNTFGFGGHNAVLAFKRWENR

SEQ ID NO: 3909 - protein, 359 aa, Streptococcus pneumoniae
VKRMKLNRVVVTGYGVTSPIGNTPEEFWNSLATGKIGIGGITKFDHSDFDVHNAAEIQDFPFDKYFVKKDTNRFDNYSLYALYAAQEAVNHANLDVEALNRDRFGVIVASGIGGIKEIEDQVLRLHEKGPKRVKPMTLPKALPNMASGNVAMRFGANGVCKSINTACSSSNDAIGDAFRSIKFGFQDVMLVGGTEASITPFAIAGFQALTALSTTEDPTRASIPFDKDRNGFVMGEGSGMLVLESLEHAEKRGATILAEVVGYGNTCDAYHMTSPHPEGQGAIKAIKLALEEAEISPEQVAYVNAHGTSTPANEKGESGAIVAVLGKEVPVSSTKSFTGHLLGAAACSRSYRHHRSYAS

SEQ ID NO: 3910 - protein, 243 aa, Streptococcus pneumoniae
MKLEHKNIFITGSSRGIGLAIAHKFAQAGANIVLNSRGAISEELLAEFSNYGIKVVPISGDVSDFADAKRMIDQAIAELGSVDVLVNNAGITQDTLMLKMTEADFEKVLKVNLTGAFNMTQSVLKPMMKAREGAIINMSSVVGLMGNIGQANYAASKAGLIGFTKSVAREVASRNIRVNVIAPGMIESDMTAILSDKIKEATLAQIPMKEFGQAEQVADLTVFLAGQDYLTGQVVAIDGGLSM

SEQ ID NO: 3911 - protein, 73 aa, Streptococcus pneumoniae
FPIKPTTLDILMIAPSLAFIIGFKTDCVILKAPVRLTLSTFSKSASVILSIRVSWVIPALLTKTSTEPSSAIA

SEQ ID NO: 3912 - protein, 306 aa, Streptococcus pneumoniae
MTKTAFLFAGQGAQYLGMGRDFYDQYPIVKETIDRASQVLGYDLRYLIDTEEDKLNQTRYTQPAILATSVAIYRLLQEKGYQPDMVAGLSLGEYSALVASGALDFEDAVALVAKRGAYMEEAAPADSGKMVAVLNTPVEVIEEACQKASELGVVTPANYNTPAQIVIAGEVVAVDRAVELLQEAGAKRLIPLKVSGPFHTALLEPASQKLAETLAQVSFSDFTCPLVGNTEAAVMQKEDIAQLLTRQVKEPVRFYESIGVMQEAGISNFIEIGPGKVLSGFVKKIDQTAHLAHVEDQASLVALLEK

SEQ ID NO: 3913 - protein, 324 aa, Streptococcus pneumoniae
MKTRITELLKIDYPIFQGGMAWVADGDLAGAVSKAGGLGIIGGGNAPKEVVKANIDKIKSLTDKPFGVNIMLLSPFVEDIVDLVIEEGVKVVTTGAGNPSKYMERFHEAGIIVIPVVPSVALAKRMEKIGADAVIAEGMEAGGHIGKLTTMTLVRQVATAISIPVIAAGGIADGEGAAAGFMLGAEAVQVGTRFVVAKESNAHPNYKEKILKARDIDTTISAQHFGHAVRAIKNQLTRDFELAEKDAFKQEDPDLEIFEQMGAGALAKAVVHGDVEGGSVMAGQIAGLVSKEETAEEILKDLYYGAAKKIQEEASRWTGVVRND

SEQ ID NO: 3914 - protein, 74 aa, Streptococcus pneumoniae
MAVFEKVQEIIVEELGKDASEVTLESTFDDLDADSLDLFQVISEIEDAFDIQIEAENDLKTVGDLVAYVEEQAK

SEQ ID NO: 3915 - protein, 188 aa, Streptococcus pneumoniae
LVSETLLKPVDWSDRSTAVLFGDGAAGVLLEASEQEHFLAESLNSDGSRSECLTYGHSGLHSPFSDQESADSFLKMDGRTVFDFAIRDVAKSIKQTIDESPIEVTDLDYLLLHQANDRILDKMARKIGVDRAKLPANMMEYGNTSAASIPILLSECVEQGLIPLDGSQTVLLSGFGGGLTWGTLILTI

SEQ ID NO: 3916 - protein, 139 aa, Streptococcus pneumoniae
MAFAKISQVAHYVPEQVVTNHDLAQIMDTNDEWISSRTGIRQRHISRTESTSDLATEVAKKLMAKAGITGEELDFIILATITPDSMMPSTAARVQANIGANKTFAFDLTAACKGFVFALSTAEKFIASGRFQKGLVIGK

SEQ ID NO: 3917 - protein, 65 aa, Streptococcus pneumoniae
LQKPLFQILQKLVKISQTFTHDSNFFLAHAINNFFYHGLVEAFMQSMNQATLLCQMQMHHTTILF

SEQ ID NO: 3918 - protein, 144 aa, Streptococcus pneumoniae
MDYQRINEYLTSIFNNVLVIEEVNLRGSRFKDISIKEMHTIDVIGKAPDVTPSQVSKELMVTLGTVTTSLNNLERKGYIERVRSEQDRRVVHLHLTKKGRLIHRLHKRFHKAMVEKIIDGMSEEEIAVMGKGLTNLYQFLEDLK

SEQ ID NO: 3919 - protein, 65 aa, Streptococcus pneumoniae
LKQRISKKECELIRREEDLNLQENKKYLHHSLNFDIILSVKCFDCKSFLKKEGYEKWTTNESMNI

SEQ ID NO: 3920 - protein, 97 aa, Streptococcus pneumoniae
KGALMEHIIYQLEEDLAILTLNRPEVANGFHIPMCEEILEALTLAEENSAVHFILINANGKVFSVGGDLVEMNRAVDEDDIPSLDKNRRGWAIRISY

SEQ ID NO: 3921 - protein, 75 aa, Streptococcus pneumoniae
MKTICDLRTVQGKDCQVLFKLINNVFHQGSFLFYKQFILFENLFKPRQLPSATSKQYFELTSASFLVCSLIFIEC

SEQ ID NO: 3922 - protein, 454 aa, Streptococcus pneumoniae
MKVVKFGGSSLASASQLEKVLNIVKSDSERRFVVVSAPGKRNAEDTKVTDALIKYYRDYVAGNDISKSQSWIIDRYAAMVSELGLKPAVLEKISKSIHTLATLPIEENEFLYDTFLAAGENNNAKLIAAYFNQNGIDARYMHPREAGIVVTSEPGHARIIPSSYDKIEELTNTNEVLVIPGFFGVTKENQICTFSRGGSDITGSIIAAGVKADLYENFTDVDGIFAAHPGIIHQPHSIPELTYREMRELAYAGFSVLHDEALLPAYRGKIPLVIKNTNNPDHPGTRIVLKHSNDEFPVVGIAGDSGFVSINMSKYLMNREIGFGRKVLQILEELNIGWEHMPTGIDDLSIILRSRQLTPIKEEEILRQLVQKAKVDHAEIEHDLSIIMIVGEKMKSHIGVTATATRALSENKINIQMMSQGSSEVSIMFVVNKDQEKAAIKALYNAFFGESKED

SEQ ID NO: 3923 - protein, 123 aa, Streptococcus pneumoniae
MAQSLNKTVLLSTTGTSYLSIAGKVGKFLVGDQALEFYPDVNVEQFIQIPWSHINQIGANVTGCKISRHFEVFTDKGKFLFASKDSGAILKIARDKLGNDKVVKLPTLIQTISQKFKNLFAKK

SEQ ID NO: 3924 - protein, 374 aa, Streptococcus pneumoniae
MLDIKRIRTDFEAVAEKLATRGVDAAVLNEMKEIDAKRRNILVKVETLKAERNTVSAEIAQAKRNKENTDDKIAAMQNLSAEVKALDAELAEIDAKLTEFTTTLPNIPADSVPVGADEDDNVEVRRWGTPREFDFEPKAHWDLGEDLGILDWERGGKVTGARFLFYKGLGARLERAIYNFMLDEHGKEGYTEVITPYIVNHDSMFGTGQYPKFKEDTFELSDTNFVLIPTAEVPLANYYRDEILDGKDLPIYFTAMSPSFRSEAGSAGRDTRGLIRLHQFHKVEMVKFAKPEESYEELEKMTANAENILQKLNLPYRVVALSTGDMGFSAAKTYDLEVWIPRQNNYVKSQAVQTQKISKPVVPKSVTVMKQMAR

SEQ ID NO: 3925 - protein, 90 aa, Streptococcus pneumoniae
  UNSURE (36): Xaa at each above location is unknown.
KHSSKTQPSIPCRCSLYWRYGLLSCEDLRLGSVDSXTKQLREISSCSNTEDFQARRAQIRYRDEADGKVKLPPYLERFWTCSWTYSGCNS

SEQ ID NO: 3926 - protein, 303 aa, Streptococcus pneumoniae
LEVRMKKLPLVFSGCLLGLAGAGNLILDTLPVLSHLFSLTGLVLWIYFLILHLFNWKETKQELTKPPLLSGMATFPMAGMILSTYVFRVFSYLPLVAQGIWWFSFLLDLTLIAGFTIKFACPGRRVHATPSWTVLYVGIAVAALTYPLVGIIEIAYATLSFGFLLTFYLYPLIYSDLKKHPLPLALLGQEGIYCAPFSLLLASLVRVGGTSLPTWGLIVMILASQSFFFFVLTRMPNILKQGFQPAFSALTFPTIITATSLKMAQGILKLPFLDYLVLAETIICLTILFFVLGAYLIWLRKKV

SEQ ID NO: 3927 - protein, 68 aa, Streptococcus pneumoniae
KGIEIEGQEKTKTQGRIGNFDNTYQRIGQGSHCYPHIENRPTWSGMNPPPWTSKLDGKTSNQGQIQEK

SEQ ID NO: 3928 - protein, 182 aa, Streptococcus pneumoniae
MTTFTIHTVESAPAEVKEILETVEKDNNGYIPNLIGLLANAPTVLEAYQIVSSIHRRNSLTPVEREVVQITAAVTNGCAFCVAGHTAFSIKQIQMNDDLIQALRNRTPIETDPKLDTLAKFTLAVINTKGRVGDEALSEFLEAGYTQQNALDVVFGVSLAILCNYANNLANTPINPELQPYA

SEQ ID NO: 3929 - protein, 440 aa, Streptococcus pneumoniae
MLELLKSIDDFAWGPPLLILLVGTGIYLTMRLGLLQVLRLPKAFQLIFIQDKGHGDVSSFAALCTALASTVGTGNIIGVATAIKVGGPGALFWMWMAAFFGMATKYAEGLLAIKYRTKDDHGAVAGGPMHYILLGMGEKWRPLAVLFAVAGVLVALLGIGTFTQVNSITESIQNTTTISPAITALVLSVFVAIAVFGGLKSISKVSTTVVPFMAIIYILGTLTVIFFNIGKIPGTIALVFTSAFSPLAAVGGFAGASVRMAIQNGVARGVFSNESGLGSAHIAAAAAKTNEPVEQGLISMTGTFIDTLIICTLTGLTILVTGVWSGDLNGVALTQSAFSTVFSHFGPALLTIFLVLFAFTTILGWNYYGERCFEFLFGVRFIWLYRVVFVLMVLLGGFIELDMVWIIADIVNALMALPNLIALLVLSPVVIAETKKYFDK

SEQ ID NO: 3930 - protein, 778 aa, Streptococcus pneumoniae
MNKKILETLEFDKVKALFEPHLLTEQGLEQLRQLAPTAKADKIKQAFAEMKEMQALFVEQPHFTILSTKEIAGVCKRLEMGADLNIEEFLLLKRVLLTSRELQSFYANLENVSLEELALWFEKLHDFPQLQGNLQAFNDAGFIENFASEELARIRRKIHDSESQVRDVLQDLLKQKAQMLTEGIVASRNGRQVLPVKNTYRNKIAGVVHDISASGNTVYIEPREVVKLSEEIASLRADERYEMLRILQEISERVRPHAAEIANDAWIIGHLDLIRAKVRFIQERQAVVPQLSENQEIQLLHVCHPLVKNAVANDVYFGQDLTAIVITGPNTGGKTIMLKTLGLTQVMAQSGLPILADKGSRVGIFEEIFADIGDEQSIEQSLSTFSSHMTNIVDILGKVNQHSLLLLDELGAGTDPQEGAALAMAILEDLRLRQIKTMATTHYPELKAYGIETAFVQNASMEFDTATLRPTYRFMQGVPGRSNAFEIAKRLGLSEVIVGDASQQIDQDNDVNRIIEQLEEQTLESRKRLDNIREVEQENLKMNRVLKKLYNELNREKETELNKAREQAAEIVDMALSESDQILKNLHSKSQLKPHEIIEAKAKLKKLAPEKVDLSKNKVLQKAKKKRAPKVGDDIVVLSYGQRGTLTSQLKDGRWEAQVGLIKMTLEEKEFDLVQAQQEKPVKKKQVNVVKRTSGRGPQARLDLRGKRYEEAMNELDAFIDQALLNNMAQVDIIHGIGTGVIREGVTKYLQRNKHVKSFGYAPQNAGGSGATIVTFKG

SEQ ID NO: 3931 - protein, 250 aa, Streptococcus pneumoniae
MDRGYESYNLMAHFQEKGWLYIIRIRDGKQSMPSSFNLPNTECFDQKVSLKLSRKQTNQLKKLYRDFPNDYHFIPHNSIFDFLPETSRKQDPVTLYELPFRMVRLEVEEGKYETLVTNTDYSVQELKNLYASRWGIETSFRDLKYSIGLVNFHAKKKGGILQEIFARFTNFNFCRWVTSQVAIDSSHKKQRYKVCFSDAAYACRLFFNGSLSSLQLKNYLKKQLSIIRPNRKYSRKIKAQSVVDFIYRVT

SEQ ID NO: 3932 - protein, 64 aa, Streptococcus pneumoniae; identical to SEQ ID NO: 3389

SEQ ID NO: 3933 - protein, 181 aa, Streptococcus pneumoniae; identical to SEQ ID NO: 3390

SEQ ID NO: 3934 - protein, 182 aa, Streptococcus pneumoniae
MISFLLLLVLVWGFYIGYRRGLLLQVYYLISAMASAFMAGQFYKGLGEQFHLLLPYANSQEGQGTFFFPSDQLFQLDKVFYAGIGYLLVFGIVYSIGRLLGLLLHLIPSKKLGGKLFQVSAGILSMLVTLFVLQMALTILATIPMAVIQNPLEKSIVAKHIIQSIPITTSWLKQIWVTNLIG

SEQ ID NO: 3935 - protein, 103 aa, Streptococcus pneumoniae
VNFMANLNRFKFTFGKKSLTLTSEHDNLFMEEIAKVATEKYQAIKEQMPSADDETIALLLAVNCLSTQLSREIEFDDKEQELEELRHKLVTCKQEQSKIEDSL

SEQ ID NO: 3936 - protein, 293 aa, Streptococcus pneumoniae
MASITLTPSEKDIQAFLEHYQTSLAPSKNPYIRYFLKLPQATVSIYTSGKILLQGEGAEKYASFFGYQAVEQTSGQNLPLIGTDEVGNGSYFGGLAVVAAFVTPDQHDFLRKLGVGDSKTLTDQKIRQIAPILKEKIQHQALLLSPSKYNEVIGDRYNAVSVKVALHNQAIYLLLQKGVQPEKIVIDAFTSAKNYDKYLAQEANRFSNPISLEEKAEGKYLSVAVSSVIARDLFLENLENLGRELGYQLPSGAGTASDKVASQILQAYGMQGLNFCAKLHFKNTEKAKKRLER

SEQ ID NO: 3937 - protein, 204 aa, Streptococcus pneumoniae
MNSFKNFLKEWGLFLLILSLLALSRIFFWSNVRVEGHSMDPTLADGEILFVVKHLPIDRFDIVVAHEEDGNKDIVKRVIGMPGDTIRYENDKLYINDKETDEPYLADYIKRFKDDKLQSTYSGKGFEGNKGTFFRSIAQKAQAFTVDVNYNTNFSFTVPEGEYLLLGDDRLVSSDSRHVGTFKAKDITGEAKFRFWPITRIGTF

SEQ ID NO: 3938 - protein, 92 aa, Streptococcus pneumoniae
LVILGLLGFLKCSDTGDWPEAEFSFPCDIFCFEGTYVAAVARNQAVISEEKVFSFWNSKAKVGVVVDINCEGLGFLSDTSKESSFISFKALA

SEQ ID NO: 3939 - protein, 788 aa, Streptococcus pneumoniae
MEVYFSGTIERIIFENPSNFYRILLLEIDDTDAEDFDDFEIIVTGTMADVIEGEDYTFWGQIVQHSKYGEQLQISRYDRAKPTSKGLVKYFSSSHFKGIGLKTAQKIVDTYGENTIDEILQHPEKLEGIAGLSAKNREAFVSTLRLNYGTEMILAKLANYGIPNKLAFQIQDFYKEETLDVVENYPYQLVEDIKGLGFTIADQLAEELGIESQAPERFRAGLVHSLFQTCMETGDTYVEARDLLEQTLTLLESSRPVELDPSQVAQELSYLIEEDKVQQIDTKIFDNSLFFAEEGIRSHLIRILEKGKQKSQDLETIQKHITTVEQELGIEYDNIQKQAICDAIQNKVFILTGGPGTGKTTVINGIIAVYALLEGLDFRKKNNLPILLAAPTGRAARRMNELTGLPSATIHRHLGMTGDDDTSHLEDYLDADFIIVDEFSMVDTWLANQLFSNISSNSKILIVGDSDQLPSVSPGQVLADLLHIPLIPQTRLEKIYRQSKESTIVTLASQIRQGILPADFTQKKADRSYFEIASGHIPATIEKILGAALRNGIPARDIQVLAPMYRGTAGIDAINQLMQDLLNPPQKDQLSFEAPQCHYRKRDKVIHLVNDAEINVFNGDLGAITDLIPGKYTESKQDEIVIDFDGNEVSYPRNEWYKIRLAYAMSIHKSQGSEFPVVILPITSASRRMLERNLIYTAITRAKSKLILLGELQAFDYATQHIGTARKTYLIERFSDLLENVEEKQQAVSETVTSSASEQSYILTEENWDRIPAMIGITDTDLKEIFGK

SEQ ID NO: 3940 - protein, 427 aa, Streptococcus pneumoniae
MSVSFENKETNRGVLTFTISQDQIKPELDRVFKSVKKSLNVPGFRKGHLPRPIFDKKFGEESLYQDVMNALLPNAYEAAVKEAGLEVVAQPKIDVTSMEKGQDWVIAAEVVTKPEVKLGDYKNLEVSVDVEKEVTDADVEERIERERNNLAELVIKEAAAENGDTVVIDFVGSIDGVEFDGGKGENFSLGLGSGQFIPGFEDQLVGHSAGETVDVIVTFPEDYQAEDLAGKEAKFVTTIHEVKAKEVPALDDELAKDIDEEVETLADLKEKYRKELAAAKEEAYKDAVEGAAIDTAVENAEIVELPEEMIHEEVHRSVNEFLGNLQRQGINPDMYFQITGTTQEDLHNQYQAEAESRTKTNLVIEAVAKAEGFDASEEEIQKEVEQLAADYNMEVAQVQNLLSADMLKHDITIKKAVELITSTATVK

SEQ ID NO: 3941 - protein, 378 aa, Streptococcus pneumoniae
MKHSVHFGAGNIGRGFIGEILFKNGFHIDFVDVNNQIIYALNEKGKYEIEIAQKGQSRIEVTNVAGINSKEHPEQVIEAIQKTDIITTAIGPNILPFIAELLAKGIEARRVAGNTQALDVMACENMIGGSQFLYQEVKKYLSPEGLTFADNYIGFPNAAVDRIVPTQSHEDSLFVMVEPFNEWVVETKRLKNPDLRLKDVHYEEDLEPFIERKLFSVNSGHATSAYIGAHYGAKTILEALQNPNIKSRIESVLAEIRSLLIAKWNFDKKELENYHKVIIERFENPFIVDEVSRVARTPIRKLGYNERFIRPIRELKELSLSYKNLLKTVGYAFDYRDVNDEESIRLGELLAKQSVKDVVIQVTGLDDQELIEQIVEYI

SEQ ID NO: 3942 - protein, 145 aa, Streptococcus pneumoniae
MKLEKHLIKLNKQFSNKEEAICYCGQVLYEGGYVNEDYIEAMIERDKELSVYMGNFIAIPHGTDAAKKDVLKSGITVVQVPRGVDFGNVSNPQVATVLFGIAGIGNEHLEIIQKISIFCADVDNVLKLADAQSKEEVLRLFDAVE

SEQ ID NO: 3943 - protein, 651 aa, Streptococcus pneumoniae
MLLTKREEQLLKAFLHVGKLSMQDMTEILQVSSRTIYRTLSDLTDSMEQYGIEITKHGKYYILTGELDDLPTELEVLVEYSPQERQELITYRLLTESGFVTNEALQECTKVSNVTIIQDISDIDKRLLDFDLKIERQKGYRISGDSVGKRRFLAILLTNCISVADFSTGNFGSFDILEADRTRLASQIVNKQLSGFPDMDARMKMFFAILLSLIGQEQNIENSPNTSKQALEISQKIFQAYSKQTAQFYSIQEIIYFASILDELIIKRQDNPLFTEKFDGEFFYNISNLIDTVSMYTKIDFFKDKVLFNFLFHHIRLSLGVPILFQSENLPESVQILVERNKFLYTVISLLVNDIFPKYLHTDYEYGMIALHFISSLGRSPEIYPVRVLLLTDERRVTRDLLVSKIKSVAPFVELIDIQSLVDYHSIDLSQYDYILSTKPLTNQEIDVISSFPTVKELLELQERLQYVQAHRTIVARDAIAPEKSYDLQDYLISSSQLLSQFELVQLENNQSFEHTVEQIIQYQKNVSDRDYLTRKLLSHFQNSPMAIPNTGLVLLHSQSSKVTTNSFTMFELKLPISALSMKREEEEVKRCLLMLMSKEASEEARDLMTAISQSIIENHLYTEIYKTGNQSIIYQMLNTIFNEKIKKLEN

SEQ ID NO: 3944 - protein, 595 aa, Streptococcus pneumoniae
EKEDDLMEEKVSLKVRVQKLGTSLSNMVMPNIGAFIAWGVLTALFIADGYLPNEQLATVVGPMLTYLLPILIGYTGGYMIHGQRGAVVGAIATVGAITGSSVPMFIGAMVMGPLGGWTIKKFDEKFQEKIRPGFEMLVNNFSAGLVGFALLLLAFYAIGPVVSTLTGAVGNGVEAIVNAHLLPMANIIIEPAKVLFLNNALNHGIFTPLGVEQVAQAGKSILFLLEANPGPGLGILLTYAVFGKGSAKSSSWGAMVIHFFGGIHEIYFPYVMMKPTLFLAAMAGGISGTFTFQLLDAGLKSPASPGSIIAIMATAPKGVWPHLNVLLGVLVAAVVSFLVAALILHADKSTEDSLEAAQAATQAAKAQSKGQLVSTSVDAVVSTDSVEKIIFACDAGMGSSAMGASILRDKVKKAGLEIPVSNQAISNLLDTPKTLIVTQEELTPRAKDKSPSAIHVSVDNFLASPRYDEIVASLTGASPIAEIEGDIPTSAPVDSQEIDLNHIDAVVVAYGKAQGTATMGCETIRAIFRNKNIRIPVSTAKISELGEFNSKNIMIVTTISLQAEVQQAAPNSQFLIVDSLVTTPEYDKMAARMYK

SEQ ID NO: 3945 - protein, 66 aa, Streptococcus pneumoniae
LSYLFYSQRSKNAMIEGIIEEKDFSRFDDNISHRKEVSIDNSLNTIPNSSSKSRYDWTDCVESQKQ

SEQ ID NO: 3946 - protein, 190 aa, Streptococcus pneumoniae; identical to SEQ ID NO: 2680

SEQ ID NO: 3947 - protein, 277 aa, Streptococcus pneumoniae
MTEFSLDLLLKVIKLARSTYYYHLKQLDKTDKDQELKAEIQSIFIEHKGNYTYRRVHLELRNRGYLVNHKRVQGLMKVLNLQAKMRQKRKYSSHKGDVGKKAENLIQSQFEGSKTMEKCYTDVTEFAIPASTQKLYLSPVLDGFNSEIIAYHLSTSPNLEQVQTMLEQAFTEKHYENTILHSDQGWQYQHDSYHRFLESKGTQASMLRKGNSQDNGMMESFFGILKSEMFYGYEKTFKSLNQLEQAIIDYIDYYNNKRIKVKLKGLSPVQYRTKSFG

SEQ ID NO: 3948 - protein, 340 aa, Streptococcus pneumoniae
MKLFKKMMQVVLATFFFGLLGTSTVCADDSEGWQFVQENGRTYYKKGDLKETYWRVIDGKYYYFDPLSGEMVVGWQYIPAPHKGVTIGPSPRQEIAFRPDWFYFGQDGVLQEFVGKQVLEAKTATNTNKHHGEEYDSPAEKRVYYFEDQRSYHTLKTGWVYDDGDWYYLQKDGGFDSRINRLTVGELARGWVKDYPLTYDEEKLKPAPWYYLDPATGIMQTGWQHLGNKWYYLRSSGAMATGWYQDGSTWYYLDAENGDMKTGWQNLGNKWYYLRSSGAMATGWYQEGSTWYYLNASNGDMKTGWFQVNGNWYYAYDSGALAVNTTVGGYYLNYNGEWVK

SEQ ID NO: 3949 - protein, 97 aa, Streptococcus pneumoniae
MNEICHLFIYSVLKGYSLEGWKKINGSWYYYRQHDKQTGWQEINDTWYYLDSSGKMLTDWQKVNGKWYYLNSNRAMVTGSQTIDGKVYNFASSGEWI

SEQ ID NO: 3950 - protein, 218 aa, Streptococcus pneumoniae
LIKIDNTLQYPYSTSAMVLSKYYGVADGMNVEGRGSANFIKDNVLITAAHNYYRHDYGKEADDIYVLPAVSPSQEPFGKIKVKEVRYLKEFRNLNSKDAREYDLALLILEKPIGAKLGTLGLPTSQKNLTGITVTITGYPSYNFKIYQMYTDKKQVLSDDGMFLDYQVDTLEGSSGSTVYDASHRVVGVHTLGDGANQINSAVKLNERNLSFIYLFGS

SEQ ID NO: 3951 - protein, 79 aa, Streptococcus pneumoniae
MKKTVYKKLGISIIASTLLASQLSTVSALSVISSTGEEYEVSETLEKGPGSNDSSLSEISPTYGSYYQKQSEVLSVMMI

SEQ ID NO: 3952 - protein, 90 aa, Streptococcus pneumoniae
LSIKWSLLDNIWLRRVAIDHQLLRKEKTNTQLMEKILLHNLNQTEFFINKAIGWTLRAYSKTNPTWVACFIDENKERMAELSIKEASKYL

SEQ ID NO: 3953 - protein, 84 aa, Streptococcus pneumoniae
VAANYLKAMQSYLKETDLPKLEQLVVTKSWWDTVDILDRVVGSLVYEHPELEEIILILFENLFKPRQLYLQPQNSVLSNLRLAS

SEQ ID NO: 3954 - protein, 210 aa, Streptococcus pneumoniae
MKILLVDDHEMVRLGLKSYFDLQDDVEVVGEAFNGSQGIDLALELRPDVIVMDIVMPEMNGIDATLAILKEWPEAKILIVTSYLDNEKIMPVLDAGAKGYMLKTSSADELLHAVSKVAAGELAIEQEVSKKVEYHRNHMELHEELTARERDVLQLIAKGYENQRIADDLFISLKTVKTHVSNILAKLEVSDRTQAAVYAFQHHLVGQEEF

SEQ ID NO: 3955 - protein, 331 aa, Streptococcus pneumoniae
MKKQAYVIIALTSFLFVFFFSHSLLEILDFDWSIFLHDVEKTEKFVFLLLVFSMSITCLLALFWRGIEELSLRKMQANLKRLLAGQEVVQVADPDLDASFKSLSGKLNLLTEALQKAENHSLAQEEEIIEKERKRIARDLHDTVSQELFAAHMILSGISQQALKLDREKMQIQLQSVTAILETAQKDLRVLLLHLRPVELEQKSLIEGIQILLKELEDKSDLRVSLKQNMTKLPKKIEEHIFRILQELISNTLRHAQASCLDVYLYQTDVELQLKVVDNGIGFRLGSLDDLSYGLRNIKERVEDMAGTVQLLTAPKQGLAVDIRIPLLDKE

SEQ ID NO: 3956 - protein, 232 aa, Streptococcus pneumoniae
MRKFKIFLFIEACLLTGALILMVSEHFSRFLLILFLFLLLIRYYTGKEGNNLLLVAATILFFFIVMLNPFVILAIFVAVIYSLFLLYPMMNQEKEQTNLVFEEVVTVKKEKNRWFGNLHHFSSYQTCQFDDINLFRFMGKDTIHLERVILTNHDNVIILRKMVGTTKIIVPVDVEVSLSVNCLYGDLTFFNQPKRALRNEHYHQETKDYLKSNKSVKIFLTTMIGDVEVVRG

SEQ ID NO: 3957 - protein, 336 aa, Streptococcus pneumoniae
MTTNRKDEHILYALEQKSSYNSFDEVELIHSSLPLYNLDEIDLSTEFAGRKWDFPFYINAMTGGSNKGREINQKLAQVAESCGILFVTGSYSAALKNPTDDSFSVKSSHPNLLLGTNIGLDKPVELGLQTVEEMNPVLLQVHVNVMQELLMPEGERKFRSWQSHLADYIKQIPVPIVLKEVGFGMDAKTIERAYEFGVRTVDLSGRGGTSFAYIENRRSGQRDYLNQWGQSTMQALLNAQEWKDKVELLVSGGVRNPLDMIKCLVFGAKAVGLSRTVLELVETYTVEEVIGIVQGWKADLRLIMCSLNCATIADLQKVDYLLYGKLKEAKDQMKKA

SEQ ID NO: 3958 - protein, 335 aa, Streptococcus pneumoniae
MIAVKTCGKLYWAGEYAILEPGQLALIKDIPIYMRAEIAFSDSYRIYSDMFDFAVDLRPNPDYSLIQETIALMGDFLAVRGQNLRPFSLKICGKMEREGKKFGLGSSGSVVVLVVKALLALYNLSVDQNLLFKLTSAVLLKRGDNGSMGDLACIVAEDLVLYQSFDRQKVAAWLEEENLATVLERDWGFFISQVKPTLECDFLVGWTKEVAVSSHMVQQIKQNINQNFLSSSKETVVSLVEALEQGKAEKVIEQVEVASKLLEGLSTDIYTPLLRQLKEASQDLQAVAKSSGAGGGDCGIALSFDAQSTETLKNRWADLGIELLYQERIGHDDKS

SEQ ID NO: 3959 - protein, 344 aa, Streptococcus pneumoniae
LYHSLGNQFDTRTRTSRKIRRERSCSDMDREPVTVRSYANIAIIKYWGKKKEKEMVPATSSISLTLENMYTETTLSPLPANVTADEFYINGQLQNEVEHAKMSKIIDRYRPAGEGFVRIDTQNNMPTAAGLSSSSSGLSALVKACNAYFKLGLDRSQLAQEAKFASGSSSRSFYGPLGAWDKDSGEIYPVETDLKLAMIMLVLEDKKKPISSRDGMKLCVETSTTFDDWVRQSEKDYQDMLIYLKENDFAKIGELTEKNALAMHATTKTASPAFSYLTDASYEAMDFVRQLREKGEACYFTMDAGPNVKVFCQEKDLEHLSEIFGQRYRLIVSKTKDLSQDDCC

SEQ ID NO: 3960 - protein, 292 aa, Streptococcus pneumoniae
MTKKVGVGQAHSKIILIGEHAVVYGYPAISLPLLEVEVTCKVVPAESPWRLYEEDTLSMAVYASLEYLDITEACIRCEIDSAIPEKRGMGSSAAISIAAIRAVFDYYQADLPHDVLEILVNRAEMIAHMNPSGLDAKTCLSDQPIRFIKNVGFTELEMDLSAYLVIADTGVYGHTREAIQVVQNKGKDALPFLHALGELTQQAEVAISQKDAEGLGQILSQAHLHLKEIGVSSPEADFLVETTLSHGALGAKMSGGGLGGCIIALVTNLTHAQELAERLEEKGAVQTWIESL

SEQ ID NO: 3961 - protein, 109 aa, Streptococcus pneumoniae
MTRKVYDTDLNDQEWAKIEPYFSKHRTYKWPKRVLVNETLYVTKTGCQWRMLPHDFPLYLMVWSFFRRSMTTGWFQVNGRWYYAYSSGALAVNTTVDGYSVNYNGEWVR

SEQ ID NO: 3962 - protein, 291 aa, Streptococcus pneumoniae
LYPPELDSKILSIIKKAVTIRTTHTYEYQYSLLFGDAGYLWLLLHLFSISKNQYYLQLANVTAKKLIENYDTLEEIDFALGKSGVLLSLIKYYQFTNDNTLKIFIHNSIGEIYHYFLQRDTAKESILDYSFAHGYCGIAYALFAYSKVLEPSMFYNDLHTFHTELKKLLEKVTSNTENLGNLQLSWCKGISGIILYLCMYDCDGNKDIISKYQEFVFNHHLKMMTGYCHGITSLLQTTVYNQNKLLMKKIQQVILACSERDDHGLLMFQGDSGKADLFDFGIGSMGYIGVY

SEQ ID NO: 3963 - protein, 410 aa, Streptococcus pneumoniae
MKLFWTNNIYRQLLLNSCFSSFGDSIFYLAIINYVAQYNFAPLAILLISISEMVPLLSQLFLGILGDFQENRVKHALWIAKIKILLYAILTVFLVLSPFSLVSVIMIVIINLISDTLSYLSAYMMNALYISVIKDDLHDAMGFRQSLMRVVRIVANLAGAFLINVISIQTISLINTLTFVIAFLGLYVIRHTLYEVEKRIEMSHTALSFKKYFQHLKQSLAVLLRLKDTVILLFLTTSMIAILDVSPRLIALRFIQQTLAQLSIGQLLALLSIIMSCGAILGNMTSSNLFKNIRFTHLLVFCEISLLTLITSILCQAYIVIFMTSFISSTIIGILSPRLQAAVFAHIPSDKMGTVGSALSTVDILAPSLLSLLALSIASGVSVQLALIFLYLILIALIFCQWLVKFNTHN

SEQ ID NO: 3964 - protein, 332 aa, Streptococcus pneumoniae
MKLLKKTMQAGLTVIFFGLLATNTVFADNSEVWQFVQENGRTYYKKGDLKETYWRVIDGKYYYFDSLSGEMVVGWQYIPFPSKGSTIGPYPNGIRLEGFPKSEWYYFDKNGVLQEFVGWKTLEIKTKDSVGRKYGEKREDSEDKEEKRYYTNYYFNQNHSLETGWLYDQSNWYYLAKTEINGENYLGGERRAGWINDDSTWYYLDPTTGIMQTGWQYLGNKWYYLRSSGAMATGWYQEGTTWYYLDQPNGDMKTGWQNLGNKWYYLRSSGAMVTGWVKDDSTWYYLNAGNGDMKTGWFQVNGRWYYAYSSGALAVNTTVDGYSVNYNGEWVR

SEQ ID NO: 3965 - protein, 370 aa, Streptococcus pneumoniae
LQLCNCFFEEFLYIDIQSSFYYNRFRRIYKMKLLKKMMPIALAVFFFGLLATSTVFADTMGGRFVDKDNRKYYVKDDHKAIYWHKIDGKTYYFGDIGEMVVGWQYLEIHGTGYRDDLFDNRPVFEIGLQEKWYYFGQDGALLEQTDKQVLEAKTSENTGKVYGEQYPLSAEKKTYYFDNNYAVKTGWIYEDGNWYYLNKLGNFGDDSYNPLPIGEVAKGWTQDFHVTIDIDRSKPAPWYYLDASGKMLTDWQKVNGKWYYFGSSGSMATGWKYVRGKWYYLDNKNGDMKTGWQYLGNKWYYLRSSGAMVTGWYQDGSTWYYLDAENGDMKIGWTKVNGKWYYLNSSGAMVTGSQTIDGKVYNFASSGEWI

SEQ ID NO: 3966 - protein, 229 aa, Streptococcus pneumoniae
MGKRILLLEKERNLAHFLSLELQKEQYRVDLVEEGQKALSMALQTDYDLILLNVNLGDMMAQDFAEKLSRTKPASVIMILDHWEDLQEELEVVQRFAVSYIYKPVFIENLVARISAIFRGRDFIDQHCSLMKVPRTYRNLRIDVEHHTVYRGEEMIALTRREYDLLATLMGSKKVLTREQLLESVWKYESATETNIVDVYIRYLRSKLDVKGQKSYIKTVRGVGYTMQE

SEQ ID NO: 3967 - protein, 457 aa, Streptococcus pneumoniae
LPLILNLVVTQLLSTTGSKEKTEDVIACHPEKNFVPSYDVESFVNSIEKPRRIMLMVQAGPGTDATIQALLPHLDKGDILIDGGNTFYKDTIRRNEELANSGINFIGTGVSGGEKGALEGPSIMPGGQKEAYELVSDVLEEISAKAPEDGKPCVTYIGPDGAGHYVKMVHNGIEYGDMQLIAESYDLMQHLLGLSAEDMAEIFTEWNKGELDSYLIEITADILSRKDDEDQDGPIVDYILDAAGNKGTGKWTSQSSLDLGVPLSLITESVFARYISTYKEERVHASKVLPKPAAFNFEGDKAELIEKIRQALYFSKIISYAQGFAQLRVASKENNWNLPFADIASIWRDGCIIRSRFLQKITDAYNRDADLANLLLDEYFLDVTAKYQQAVRDIVALAVQAGVPVPTFSAAITYFDSYRSADLPANLIQAQRDYFGAHTYQRKDKEGTFHYSWYDEK

SEQ ID NO: 3968 - protein, 464 aa, Streptococcus pneumoniae
MSKKRRNRHKKEGQEPQFDFDEAKELTVGQAIRKNEEVEAGVLPEDSILDKYVKQHRDEIEADKFATRQYKKEEFVETQSLDDLIQEMREAVEKSEASSEEVPSSEDILLPLPLDDEEQGLDPLLLDDENPTEMTEEVEEEQNLSRLDQEDSEKKSKKGFILTVLALVSVIICVSAYYVYRQVNRSTKEIETSQSTTANQSDVDDFNTLYDAFYTDSNKTALKNSQFDKLSQLKTLLDKLEGSREHTLAKSKYDSLATQIKAIQDVNAQFEKSAIVDGVLDTHAKAKSDAKFTDIKTGNTELDKVLDKAISLGKSQQTSTFSSSSSQTSSSSSSQASSNTTSEPKPSSSNETRSSRSEVNMGLSSAGVAVQRSASRVAYNQSAIDDSNNSAWDFADGVLEQILATSRSRGYITGDQYILERVNIVNGNGYYNLYKPDGTYLFTLNCKTGYFVGNGAGHADDLDY

SEQ ID NO: 3969 - protein, 385 aa, Streptococcus pneumoniae
MKKEFNLIATVAAGLEAVVGREVRELGYDCQVENGRVRFQGDVRAIIETNLWLRAADRIKIIVGTFPAKTFEELFQGVFALDWENYLPLGARFPISKAKCVKSKLHNEPSVQAISKKAVVKKLQKHYARPEGVPLMENGPEFKIEVSILKDVATVMIDTTGSSLFKRGYRTEKGGAPIKENMAAAILQLSNWYPDKTLIDPTCGSGTFCIEAVMIARKMAPGLRRSFAFEEWNWISDRLIQEVRTEAAKKVDRELELDIMGCDIDARMVEIAKANAQAAGVAGDITFKQMRVQDLRSDKINGVIISNPPYGERLSDDAGVTKLYAEMGQVFAPLKTWSKFILTSDEAFESKYGSQADKKRKLYNGTLKVDLYQYFGQRVKRQEVK

SEQ ID NO: 3970 - protein, 109 aa, Streptococcus pneumoniae
MASIIFSAKDIFEQEFGREVRGYNKVEVDEFLDDVIKDYETYAALVKSLRQEIADLKEELTRKPKPSPVQAEPLEAAITSSMTNFDILKRLNRLEKEVFGKQILDNSDF

SEQ ID NO: 3971 - protein, 175 aa, Streptococcus pneumoniae
MATALVLGYSAFDLGLFSDKDPRLKLIKKAIRKDLEAMAADGVSWLVFTGSLGFEYWVLEVAQEMKTEYGFQLATIFAFETHGENWNEGNQMKLSRFKQVDFVKYAYPRYEHKGQLRDYQQFLLENTTSSYLFYDEENETKLAYFYQKMKNQEDYFIKRLTFDQLNELAENFSEN

SEQ ID NO: 3972 - protein, 198 aa, Streptococcus pneumoniae
MVNYPHKVSSQKRQTSLSQPKNFANRGMSFEKMINATNDYYLSQGLAVIHKKPTPIQIVQVDYPQRSRAKIVEAYFRQASTTDYSGVYNGYYIDFEVKETKQKRAIPMKNFHPHQIQHMEQVLAQQGICFVLLHFSSQQETYLLPAFDLIRFYHQDKGQKSMPLEYIREYGYEIKAGAFPQIPYLNVIKEHLLGGKTR

SEQ ID NO: 3973 - protein, 719 aa, Streptococcus pneumoniae
MNKPTILRLIKYLSISFLSLVIAAIVLGGGVFFYYVSKAPSLSESKLVATTSSKIYDNKNQLIADLGSERRVNAQANDIPTDLVKAIVSIEDHRFFDHRGIDTIRILGAFLRNLQSNSLQGGSTLTQQLIKLTYFSTSTSDQTISRKAQEAWLAIQLEQKATKQEILTYYINKVYMSNGNYGMQTAAQNYYGKDLNNLSLPQLALLAGMPQAPNQYDPYSHPEAAQDRRNLVLSEMKNQGYISAEQYEKAVNTPITDGLQSLKSASNYPAYMDNYLKEVINQVEEETGYNLLTTGMDVYTNVDQEAQKHLWDIYNTDEYVAYPDDELQVASTIVDVSNGKVIAQLGARHQSSNVSFGINQAVETNRDWGSTMKPITDYAPALEYGIYDSTATIVHDEPYNYPGTNTPVYNWDRGYFGNITLQYALQQSRNVPAVETLNKVGLNRAKTFLNGLGIDYPSIHYSNAISSNTTESDKKYGASSEKMAAAYAAFANGGTYYKPMYIHKVVFSDGSEKEFSNVGTRAMKETTAYMMTDMMKTVLTYGTGRNAYLAWLPQAGKTGTSNYTDEEIENHIKTSQFVAPDELFAGYTRKYSMAVWTGYSNRLTPLVGNGLTVAAKVYRSMMTYLSEGSNPEDWNIPEGLYRNGEFVFKNGARSTWNSPAPQQPPSTESSSSSSDSSTSQSSSTTPSTNNSTTTNPNNNTQQSNTTPDQQNQNPQPAQP

SEQ ID NO: 3974 - protein, 67 aa, Streptococcus pneumoniae
SGVVFDCCVLLLGLVVVLLFVLGVVELDCEVELSDDELELSVDGGCCGAGEFHVERAPFLNTNSPFL

SEQ ID NO: 3975 - protein, 1767 aa, Streptococcus pneumoniae
MNKGLFEKRCKYSIRKFSLGVASVMIGAAFFGTSPVLADSVQSGSTANLPADLATALATAKENDGRDFEAPKVGEDQGSPEVTDGPKTEEELLALEKEKPAEEKPKEDKPAAAKPETPKTVTPEWQTVEKKEQQGTVTIREEKGVRYNQLSSTAQNDNAGKPALFEKKGLTVDANGNATVDLTFKEDSEKGKSRFGVFLKFKDTNNNVFVGYDKDGWFWEYKSPTTSTWYRGSRVAAPETGSTNRLSITLKSDGQLNASNNDVNLFDTVTLPAAVNDHLKNEKKILLKAGSYDDERTVVSVKTDNQERVKTEDTPAQKETGPVVDDRKVTYDTIQSKVLKAVIDQAFPRVKEYTLNGHTLPGQVQQFNQVFINNHRITPEVTYKKINETTAEYLMKLRDDAHLINAEMTVRLQVVDNQLHFDVTKIVNHNQVTPGQKIDDERKLLSSISFLGNALVSVSSDQTGAKFDGATMSNNTHVSGDDHIDVTNPMKDLAKGYMYGFVSTDKLAAGVWSNSQNSYGGGSNDWTRLTAYKETVGNANYVGIHSSEWQWEKAYKGIVFPEYTKELPSAKVVITEDANADKKVDWQDGAIAYRSIMNNPQGWEKVKDITAYRIAMNFGSQAQNPFLMTLDGIKKINLHTDGLGQGVLLKGYGSEGHDSGHLNYADIGKRIGGVEDFKTLIEKAKKYGAHLGIHVNASETYPESKYFNEKILRKNPDGSYSYGWNWLDQGINIDAAYDLAHGRLARWEDLKKKLGDGLDFIYVDVWGNGQSGDNGAWATHVLAKEINKQGWRFAIEWGHGGEYDSTFHHWAADLTYGGYTNKGINSAITRFIRNHQKDAWVGDYRSYGGAANYPLLGGYSMKDFEGWQGRSDYNGYVTNLFAHDVMTKYFQHFTVSKWENGTPVTMTDNGSTYKWTPEMRVELVDADNNKVVVTRKSNDVNSPLYRERTVTLNGRVIQDGSAYLTPWNWDANGKKLSTDKEKMYYFNTQAGATTWTLPSDWAKSKVYLYKLTDQGKTEEQELTVKDGKITLDLLANQPYVLYRSKQTNPEMSWSEGMHIYDQGFNSGTLKHWTISGDASKAEIVKSQGANDMLRIQGNKEKVSLTQKLTGLKPNTKYAVYVGVDNRSNAKASITVNTGEKEVTTYTNKSLALNYVKAYAHNTRRNNATVDDTSYFQNMYAFFTTGSDVSNVTLTLSREAGDQATYFDEIRTFENNSSMYGDKHDTGKGTFKQDFENVAQGIFPFVVGGVEGVEDNRTHLSEKHDPYTQRGWNGKKVDDVIEGNWSLKTNGLVSRRNLVYQTIPQNFRFEAGKTYRVTFEYEAGSDNTYAFVVGKGEFQSGRRGTQASNLEMHELPNTWTDSKKAKKATFLVTGAETGDTWVGIYSTGNASNTRGDSGGNANFRGYNDFMMDNLQIEEITLTGKMLTENALKNYLPTVAMTNYTKESMDALKEAVFNLSQADDDISVEEARAEIAKIEALKNALVQKKTALVADDFESLDAPAQPGEGLENAFDGNVSSLWHTSWNGGDVGKPATMVLKEPTEITGLRYVPRGSGSNGNLRDVKLVVTDESGKEHTFTATDWPDNNKPKDIDFGKTIKAKKIVLTGTKTYGDGGDKYQSAAELIFTRPQVAETPLDLLGYEAALAKAQKLTDKDNQEEVASVQASMKYATDNHLLTERMVEYFADYLNQLKDSATKPDAPTVEKPEFKLSSLASEQGKTPDYKQEIARPETPEQILPATGESQSDTALFLAGVSLALSALFVVKTKKD

SEQ ID NO: 3976 - protein, 660 aa, Streptococcus pneumoniae
MKSSKLFALAGVTLLAATTLAACSGSGSSTKGEKTFSYIYETDPDNLNYLTTAKAATANITSNVVDGLLENDRYGNFVPSMAEDWSVSKDGLTYTYTIRKDAKWYTSEGEEYAAVKAQDFVTGLKYAADKKSDALYLVQESIKGLDAYVKGEIKDFSQVGIKALDDQTVQYTLNKPESFWNSKTTMGVLAPVNEEFLNSKGDDFAKATDPSSLLYNGPYLLKSIVTKSSVEFAKNPNYWDKDNVHIDKVKLSFWDGQDTSKPAENFKDGSLTAARLYPTSASFAELEKSMKDNIVYTQQDSITYLVGTNIDRQSYKYTSKTSDEQKASTKKALLNKDFRQAIAFGFDRTAYASQLNGQTGASKILRNLFVPPTFVQADGKNFGDMVKEKLVTYGDEWKDVNLADSQDGLYNPEKAKAEFAKAKSALQAEGVQFPIHLDMPVDQTATTKVQRVQSMKQSLEATLGADNVIIDIQQLQKDEVNNITYFAENAAGEDWDLSDNVGWGPDFADPSTYLDIIKPSVGESTKTYLGFDSGEDNVAAKKVGLYDYEKLVTEAGDETTDVAKRYDKYAAAQAWLTDSALIIPTTSRTGRPILSKMVPFTIPFALSGNKGTSEPVLYKYLELQDKAVTVDEYQKAQEKWMKEKEESNKKAQEDLAKHVK

SEQ ID NO: 3977 - protein, 77 aa, Streptococcus pneumoniae
PKLNFKKRGWLFSQSFEGAKATAIIMSLLETAKRHQLNSEKYLFYLLECLPNEETLVNKEVLEAYLPWTKVVQEKCK

SEQ ID NO: 3978 - protein, 149 aa, Streptococcus pneumoniae; identical to SEQ ID NO: 3463

SEQ ID NO: 3979 - protein, 57 aa, Streptococcus pneumoniae
LPFLVLNLLKLTDAGTKQRSLPLRAGDVLDVSVVVHQLAKPPSLFPGKITDHNKLNL

SEQ ID NO: 3980 - protein, 85 aa, Streptococcus pneumoniae
LVNCEPLEAYRQLEEAELVGCWAHVRRKFFEATPKQADKSSLGAKGLAYCDQLFSLERDWEALPADERLQKRQEHLQPLMEDFFA

SEQ ID NO: 3981 - protein, 142 aa, Streptococcus pneumoniae; identical to SEQ ID NO: 3462

SEQ ID NO: 3982 - protein, 283 aa, Streptococcus pneumoniae
MILITGANGQLGTELRYLLDERNEEYVAVDVAKMDITNEEMVEKVFEEVKPTLVYHCAAYTAVDAAEDEGKELDFAINVTGTKNVAKASEKHGATLVYISTDYVFDGKKPVGQEWEVDDRPDPQTEYGRTKRMGEELVEKHVSNFYIIRTAWVFGNYGKNFVFTMQNLAKTHKTLTVVNDQYGRPTWTRTLAEFMTYLAENRKEFGYYHLSNDATEDTTWYDFAVEILKDTDVEVKPVDSSQFPAKAKRPLNSTMSLAKAKATGFVIPTWQDALQEFYKQEVR

SEQ ID NO: 3983 - protein, 349 aa, Streptococcus pneumoniae
MTEYKNIIVTGGAGFIGSNFVHYVYENFPDVHVTVLDKLTYAGNRANIEEILGNRVELVVGDIADAELVDKLAAQADAIVHYAAESHNDNSLNDPSPFIHTNFIGTYTLLEAARKYDIRFHHVSTDEVYGDLPLREDLPGHGEGPGEKFTAETKYNPSSPYSSTKAASDLIVKAWVRSFGVKATISNCSNNYGPYQHIEKFIPRQITNILSGIKPKLYGEGKNVRDWIHTNDHSSGVWTILTKGQIGETYLIGADGEKNNKEVLELILKEMGQAADAYDHVTDRAGHDLRYAIDASKLRDELGWKPEFTNFEAGLKATIKWYTDNQEWWKAEKEAVEANYAKTQEIITV

SEQ ID NO: 3984 - protein, 198 aa, Streptococcus pneumoniae
MSDNFFGKTLAVRKIDAIPGLLEFDIPVHGDNRGWFKENFQKEKMEPLGFPESFFAAGKLQNNVSFSRKNVLRGLHAEPWDKYISVADDGKVLGSWVDLREGETFGNTYQTVIDASKGIFVPRGVANGFQVLSDTVSYSYLVNDYWALELKPKYAFVNYADPSLGIEWENIAEAEVSEADKNHPLLKDVKPLKKEDLE

SEQ ID NO: 3985 - protein, 289 aa, Streptococcus pneumoniae
MKGIILAGGSGTRLYPLTRAASKQLMPVYDKPMIYYPLSTLMLAGIKDILIISTPQDLPRFKDLLLDGSEFGIKLSYAEQPSPDGLAQAFLIGEEFIGDDSVALILGDNIYHGPGLSKMLQKAAQKEKGATVFGYQVKDPERFGVVEFDTDMNAISIEEKPENPRSNYAVTGLYFYDNDVVEIAKGIKPSARGELEITDINKAYLNRGDLSVELMGRGFAWLDTGTHESLLEASQYIETVQRMQNVQVANLEEIAYRMGYISCEDVLELAQPLKKNEYGQYLLRLIGEA

SEQ ID NO: 3986 - protein, 475 aa, Streptococcus pneumoniae
VGSIVMKLKFLITNLFHVLLSNLITILTSVIVVLILPKIMGVTEYSYWQLYIFYLTYIGFFHLGWIDGIYLKYGGLEYQNLDKKQFYSQILQFSSFLILISFLLFGFNLLTVTDQNAKYIYNMTIISMIVTNLRMLFVYILQMTNRLKDSSIILISDRVIYVILLFLFIIFKWHEYKVMIWADVLGRTFSLLLSFWICKDIVFQSLSEFILDLRESFDNIRVGINLMLSNIASSMIIGIVRMGIQWNWNIETFGKVSLTLSISNLLMTFINAIGLVVFPLLKRTKTENLSKIYSNLRNVLMLIMFAILLIYYPLKIVLDLWLPAYQDALIFMTLIFPMSVYEGKMALVINTYLKALRMERDILKINTLIMLFSMLVTLITTLLLNSLELTVVSIVVLLALRSVIAELILSKKLDVSVKKDIVLEFLLTIVFISSSWYLPIWPAVIVYLLAYTLYLYLKRKDIKMYIEYFRKKIFE

SEQ ID NO: 3987 - protein, 94 aa, Streptococcus pneumoniae
TITAGQIGKYQLEEIKTIVKRNSNTISFLTETSSFLDRISSAITLRKASKTTIDTTVSSKLFNNRVVIRVTNILNNIIKVFILRISLSILNAFK

SEQ ID NO: 3988 - protein, 447 aa, Streptococcus pneumoniae
MLLNFLFIFIFLLIIITFILFEGDLFQPAVILTLAYFISIASALVNRNVWGTELHFKTFGLILLGVATFIIVSLLTKLSYKPKVEGISYKELKEINPSKIIYGILLILNLVMLFLYIHEIQKVVLFSGRGFSNITDLISNYRYLSYYSNEVEDRVSGMINQLAKIIPATTFVSLYIFINNYFITKQIKKNFIYLIPIAIFFVYAIISGGRLPLIRLVIGTLLILYIYSVYGSHKSQLTRSFKMITRSLFAFLMLIVLFFLLKFVLGRSSQEDFISYITRYMGGSIQLFDLFVIDPIRRNKELGAETFSGIYEMLAKLGFDNNIIKGLEWRISPNYYSLGNVYTAIRRYYSDFGVIGIVICQSFTAWLYTLGYEKIRHHSLVTNGQRFRLILLAASFYPLFLNSIEDVFYISMVTIGYGIQIVIFYLVFWVLLKVQVDFNKGKLRINR

SEQ ID NO: 3989 - protein, 328 aa, Streptococcus pneumoniae
MGKSVAILMTTYNGERYLSQQIDSIRSQTFTNWTLFIRDDGSKDKTVEVIQRYSKIDDRIRLVENPSKFHGAYYNFFNLIEYVKNNYQFDYYFFCDQDDIWKEHKLEIQLLRFSKDEMPEMVYSDMSTIDANNKLIDISINNIMGIELPNINNLYFIHAYIWGCTAGFNHALLEMVPSVDIDKDYLYIEKLSHDNYFAKFALEYGKVLFCPEQLVLYRRHGHNVTTSHHFKLSPLNILRKAILGFNELALTHAGVYNQTLYMLKKASEKSPLSDRLLEIQEVIKIGGLKGVRYFCQNRISRKQLVRTIGLYTIMLFGTYKKYIMKELS

SEQ ID NO: 3990 - protein, 241 aa, Streptococcus pneumoniae
MIMSIYKLYKDIERKTMSPAKKAMAKNDYFAFYVGRPLSYLLTVPFLKTNITPNQVSYLSIAPLILGFLTMTFTTNFILLLLAWFLFFLWNLLDGVDGNLARYREQYSKDGSVVDAMAGYVAMVLTYFGAGIVATHLNGSDMYVILGALSGISLIFPRLVMHKYINTVARNESVNNIKDKSNFSTIKLLALNMTSITGIPQVLLLVTILTNQWEFFTLVYFTINFLLMIFSLYSLFKKENV

SEQ ID NO: 3991 - protein, 185 aa, Streptococcus pneumoniae
LKVQEKLKLLKEFIKICSKNKMKYFASGGSLLEAARYKGFIPWNDDMALGLPRKHFEKFINEIDFEKYNKNYILESSEMNLGIFQYKLKSAILILGKSYDVCLNLFLLDRMSELVIDGESGFKVPLYNLEVAVDRSRSIIENRELANELGSVAFQRVQSIFEIKEKVSELENIFMSLGEDDNVNI

SEQ ID NO: 3992 - protein, 314 aa, Streptococcus pneumoniae
MDIVYATDNNFVDVLSASIKSLYTTNSDLDLNLWIIADKVSDRNKEKINRLSKQFAQREINWIENVEIPFKLHLDRGSISSFSRLFLGSVLPSSMSKVLYLDSDIIVMDSLRSILDIDFKDKILYGVNDTFNKEYKQVLGIPIDKPMFNAGVMLINLELWRNNNVEEKFLQVIQKFNGTILQGDLGVLNAVLYNSFGVLPPEYNYMTIFEDLTYEEMIVFKKPINYYSKEEIKNARERIVLRHFTTCFLSLRPWQENSEVAHVEIFKKYYRGTYKQVSPSKLSRIYKILPKKMSLYLLGFIQSKVRPKLYRILK

SEQ ID NO: 3993 - protein, 455 aa, Streptococcus pneumoniae
MNGKLVKPSLAIVQSFLVILLAYLLSTVRETEIVSTTAIVLYILHYFAFYISDYGQDFFKRGYLIELVQTLKYILFFALAISISNFFLEDRFSISRRGMIYFLLLHVLLVYVLNRFIKWYWKRAYPNFKGSKKILLLTATSRVEKVLDRLIESDDVVGELVAVSVLDKPDFQHDYLKVVAEGEIVNFATHEVVDEVFINLPSEKYNIGELVSQFETMGVDVTVNLNAFDCILAHNKQICEMAGLNVVTFSTTFYKTSHVIAKRVIDIIGSLVGLILCGLVSIVLVPLIRKDGGSAIFAQTRIGKNGRHFTFYKFRSMCVDAEEKKRELMEQNTMQGGMFKVDEDPRITKIGHFIRKTSLDELPQFYNVLKGDMSLVGTRPPTVDEYEHYTPEQKRRLSFKPGITGLWQVSGRSEIKNFDEVVKLDVAYIDGWTIWKDIEILLKTVKVVLMKDGAK

SEQ ID NO: 3994 - protein, 226 aa, Streptococcus pneumoniae
MPTLEISQVKLELAKKAEEYYNALCTNLQLSGDDLKVFSITSVKPGEGKTTTSTNIARAFARAGYKTLLIDADMRNSVMSGVFKSRERITGLTEFLSGTTDLSQGLCDTNIENLFVIQAGSVSPNPTALLQSRNFSTMLETVRKYFDYIVVDTAPVGVVIDAAIITQKCDASILVTKAGETKRRDIQKAKEQIEQTGKPCLGVVLNKFDTSVDEYGSYGSYGKKKK

SEQ ID NO: 3995 - protein, 231 aa, Streptococcus pneumoniae
MMKEQNTIEIDVFQVLKTLWKHKLIILLVALVTGAGAFAYSTFIVKPEYTSTTRIYVVNRNQEGKSGLTNQDLQAGTYLVKDYREIILSQDVLEKVATNLKLDMPAKALTSKVQVTVPTDTRIVSISVKDKEPEEASRIANSLREVAAGKIVAVTRVSDVTTLEEARPATTPSSPNVRRNTLVGFLGGAVVTVITVLLIELLDTRVKRPEEVEEVLQVPLLGVVPDLDKMK

SEQ ID NO: 3996 - protein, 259 aa, Streptococcus pneumoniae
LHLSKRLFRTCWRADEMIDIHSHIVFDVDDGPKSREESKALLTEAYRQGVRTIVSTSHRRKGMFETPEEKIAENFLQVREIAKEVASDLVIAYGAEIYYTPDVLDKLENNRIPTLNNSRYALIEFSMNTPYRDIHSALNKILMLGITPVIAHIERYDVLENNEKRVRELIDMGCYTQINSSHVLKSKLFGEPYKFMKKRAQYFLERDLVHIIASDMHNVDGRPPHMAEAYDLVSQKYGEAKAQELFIDNPRKIVMDQLI

SEQ ID NO: 3997 - protein, 484 aa, Streptococcus pneumoniae
VLIMSRRFKKSGSQKVKRSVNIVLLTIYLLLVCFLLFLIFKYNILAFRYLNLVATAFVLLVALIGLLSIIYKKAEKFTIFLLVLSILVSSVSLFAVQQFVGLTNRLNATSNYSEYSLSVAVLADSEIENVTQLTSVTAPTGTDNENIQKLLADIKSSQNIDLTVNQSSSYLSAYRSLIAGETKAIVLNSVFENIIESEYPDHASKIKKIYTKGFIKKVEAPKTSKNQSFNIYVSGIDTYGPISSVSRSDVNILMTVNRDTKKILLTTTPRDAYVPIADGGNNQKDKLTHAGIYGVDSSIHTLENLYGVDINYYVRLNFTSFLKLIDLLGGVDVYNDQEFTALANKKHYSIGNVHLDSEEALAFVRERYSLADGDRDRGRNQQKVIVAILQKLTSTEVLKNYSTIIDSLQDSIQTNMPLETMINLVNAQLESGGTYKVNSQDLKGRGRTDLPSYAMPDSNLYVMEINDSSLASVKTAIQDVLEGR

SEQ ID NO: 3998 - protein, 357 aa, Streptococcus pneumoniae
MKRIQLNMNETKKYLVIKAIAQGKKTKKRACVELNLSERQINRLLLAYQQKEKEAFRHGNRNRKPKHAIPDEIKERILKKYLSYQTYKPNVRHFCELLAEEEGIQLSDTTVRKILYKKNILSPKSHRKTKKRVRKQAKLNPKQPLDNPILPTAENFLEDPKKVHPSRPRKKFAGELIQMDASPHAWFGVETSNLHLAIDDASGNILGAYFDKQETLNAYYHVLEQILANHGIPLQIKTDKRTVFTYQASNSKKMEDDTHTQFGYACHQLGILLETTSIPQAKGRVERLNQTLQSRLPIELERNNIHTLEEANTFLPSYIQTFNEQFGNKTKLSVFEEAPKPSERNLILARLAGESRR

SEQ ID NO: 3999 - protein, 120 aa, Streptococcus pneumoniae
LDWRERVVDSGHHIRFQNRCYIPTEQGKEVYFIRKTKALVIKAFDGDIYLNIADKIYHTKELLNHELYSKNFEQEPEQKKERRKYIPPQTHPWKLTSFKQYLHKNKKDYEEFKGGFFSTC

SEQ ID NO: 4000 - protein, 316 aa, Streptococcus pneumoniae
MNSIRKTLNKNQNKKKKDASISLHKPIRGNSHLSNNIFIKIKRIMKSLKEDFSVRAEKYENYQETFQGPNSFSKTDPDATFMRMKEDHMKNGQLKAAYNLQIATENQFVLHYDVFSNPTDTKTLLPFLETYPHDLKTVVADAGYGSEENLLRLDEKEVNHLIKYAMFDKEQKRGYKQSARNLANWHYNDKEDSYTHPDGWYYRFHHTKHQKTQTDFQQEIKVYYADEPESAPQKGLYMNEGYQNLKAKECQALLSPQGRQIFAQRKIDVEPVFGQIKACLGYKRCNLRGKRQVRIDMGLVLMANNLLKYNKRTTQN

SEQ ID NO: 4001 - protein, 178 aa, Streptococcus pneumoniae
MKLTYDDKVQIYELRKQGYSLEKLSNKFGINNSNLRYMIKLIDRYGIEFVKKGKNQYYSPELKQEMIDKVLHANWSQDRVSLKYALPNRGMLPNWLAQYKKNGYTIVEKTRGRPAKMERKRKKTWEEMTELERLQEENERLRTEVAYLKKLKELEERDEALERERQKQLEKWFQEDFD

SEQ ID NO: 4002 - protein, 160 aa, Streptococcus pneumoniae
MVSGGFRLDFLLETARLARSTYYYQLKQLDGVDKDKEIKTEIQAIYNEHKGNYGYRRIHLELRNRGFVVNHKKVQRLMKVLGLTARIRRKRKYSSYQGEIGKKAENLIQRQFEATKPMEKCYTDVTEFAIPNSTQKLYLSPVLDGFNSEISPIIFQLHQT

SEQ ID NO: 4003 - protein, 277 aa, Streptococcus pneumoniae; identical to SEQ ID NO: 3261

SEQ ID NO: 4004 - protein, 536 aa, Streptococcus pneumoniae
MQEKWWHNAVVYQVYPKSFMDSNGDGVGDLPGITSKLDYLAKLGITAIWLSPVYDSPMDDNGYDIADYQAIAAIFGTMEDMDQLIAEAKKRDIRIIMDLVVNHTSDEHAWFVEACENTDSPERDYYIWRDEPNDLDSIFSGSAWEYDEKSGQYYLHFFSKKQPDLNWENEKLRQKIYEMMNFWIDKGIGGFRMDVIDMIGKIPDEKVVNNGPMLHPYLKEMNQATFGDKDLLTVGETWGATPEIAKLYSDPKGQELSMVFQFEHIGLQYQEGQPKWHYQKELNIAKLKEIFNKWQTELGVEDGWNSLFWNNHDLPRIVSIWGNDQEYREKSAKAFAILLHLMRGTPYIYQGEEIGMTNYPFETLDQVEDIESLNYAREALEKGVPIEEIMDSIRVIGRDNARTPMQWDESKNAGFSTGQPWLAVNPNYEMINVQEALANPDSIFYTYQKLVQIRKENSWLVRADFELLDTADKVFAYIRKDGDRRFLVVANLSNDKQNFSVDGKVRSVLIENTAAKEVLEKQVLAPWDAFCVEMTD

SEQ ID NO: 4005 - protein, 494 aa, Streptococcus pneumoniae
MKNQAFSSEQYLNLQRDHILERIIQLDGKLYIEFGGKMLEDFHAARVLPGYEPDNKIKLLQELKEQVEVVIAINASNIEHSKARGDLGISYDQEVLRLIDKFNELGIFVGSVVITQYTGQPAADAFRNQLEKNGIDSYLHYPIKGYPTDMDHIISSKGMGKNDYIKTSRNLIVVTAPGPGSGKLATCMSNMYHDQINGIKSGYAKFETFPVWNLPLHHPVNLAYEAATADLDDVNMIDPFHLQTYGETTVNYNRDIEIFPVLKRMLERILGKSPYASPTDMGVNMVGFAITDDEAAVEASKQEIIRRYYQTVLDFKAEKVGEAAVKKIELLMNDLGITPADRKVAVVARQKAEETGGPALAFELPNGEIVTGKNSELFGPTAAALINAIKKSADIAKEVKLIEPEVVKPIQGLKIDHLGSRNPRLHSNEILIALAITATENPDAARAMEELGNLKGSEAHSTIILTDEDKNVLRKLGINVTFDPYYQYDRLYRK

SEQ ID NO: 4006 - protein, 160 aa, Streptococcus pneumoniae
MSKEVIVESFELDHTIVKAPYVRLIGEETGPKGDIISNYDIRLVQPNEDSIPTAGLHTIEHLLAKLIRTRIDGMIDCSPFGCRTGFHMIMWGRHTSAKIAAVIKDSLKEIAETTTWEDVPGTTIESCGNYKDHSLFSAKEWAKLILEQGISDDAFERHVI

SEQ ID NO: 4007 - protein, 701 aa, Streptococcus pneumoniae
MNNNFNNFNNMDDLFNQLMGGMRGYSSENRRYLINGREVTPEEFAHYRATGQLPGNAETDVQMPQQASGMKQDGVLAKLGRNLTAEAREGKLDPVIGRNKEIQETSEILSRRTKNNPVLVGDAGVGKTAVVEGLAQAIVNGDVPAAIKNKEIISIDISGLEAGTQYRGSFEENVQNLVNEVKEAGNIILFFDEIHQILGAGSTGGDSGSKGLADILKPALSRGELTVIGATTQDEYRNTILKNAALARRFNEVKVNAPSAENTFNILQGIRDLYQQHHNVILPDEVLKAAVDYSVQYIPQRSLPDKAIDLVDVTAAHLAAQHPVTDVHAVEREIETEKDKQEKAVEAEDFEAALNYKTRIAELERKIENHTEDMKVTASVNDVAESVERMTGIPVSQMGASDIERLKDMAHRLQDKVIGQDKAVEVVARAIRRNRAGFDEGNRPIGSFLFVGSTGVGKTELAKQLALDMFGTQDAIIRLDMSEYSDRTAVSKLIGTTAGYVGYDDNSNTLTERVRRNPYSIILLDEIEKADPQVITLLLQVLDDGRLTDGQGNTVNFKNTVIIATSNAGFGYEANLTEDADKPELMDRLNPFFRPELLNRFNAVIEFSHLTKEDLSKIVDLMLAEVNQTLAKKDIDLVVSQAAKDYITEEGYDEVMGVRPLRRVVEQEIRDKVTDFHLDHLDAKHLEADMEDGVLVIREKA

SEQ ID NO: 4008 - protein, 79 aa, Streptococcus pneumoniae
LFFDFHCVFKHKNTLKHQGAILTSNIKLLGSGDLLEAQLPKRRSQPSTRSKDFLYQTIPQAQNGDVQASYGKYVYHLSV

SEQ ID NO: 4009 - protein, 326 aa, Streptococcus pneumoniae
MFISISAGIVTFLLTLVGIPAFIQFYRKAQITGQQMHEDVKQHQAKAGTPTMGGLVFLITSVLVAFFFALFSSQFSNNVGMILFILVLYGLVGFLDDFLKVFRKINEGLNPKQKLALQLLGGVIFYLFYERGGDMLSVFGYQVHLGIFYIVFALFWLVGFSNAVNLTDGVDGLASISVVISLSAYGVIAYVQGQMDILLVILAMIGGLLSFFIFNHKPAKIFMGDVGSLALGGMLAAISMALHQEWTLLIIGIVYVFETTSVMMQVSYFKLTGGKRIFRMTPVHHHFELGGLSGKGNPWSEWKVDFFFWGVGLLASLLTLAILYLM

SEQ ID NO: 4010 - protein, 750 aa, Streptococcus pneumoniae
MKWTKRVIRYATKNRKSPAENRRRVGKSLSLLSVFVFAIFLVNFAVIIGTGTRFGTDLAKEAKKVHQTTRTVPAKRGTIYDRNGVPIAEDATSYNVYAVIDENYKSATGKILYVEKTQFNKVAEVFHKYLDMEESYVREQLSQPNLKQVSFGAKGNGITYANMMSIKKELEAAEVKGIDFTTSPNRSYPNGQFASSFIGLAQLHENEDGSKSLLGTSGMESSLNSILAGTDGIITYEKDRLGNIVPGTEQVSQRTMDGKDVYTTISSPLQSFMETQMDAFQEKVKGKYMTATLVSAKTGEILATTQRPTFDADTKEGITEDFVWRDILYQSNYEPGSTMKVMMLAAAIDNNTFPGGEVFNSSELKIADATIRDWDVNEGLTGGRMMTFSQGFAHSSNVGMTLLEQKMGDATWLDYLNRFKFGVPTRFGLTDEYAGQLPADNIVNIAQSSFGQGISVTQTQMIRAFTAIANDGVMLEPKFISAIYDPNDQTARKSQKEIVGNPVSKDAASLTRTNMVLVGTDPVYGTMYNHSTGKPTVTVPGQNVALKSGTAQIADEKNGGYLVGVTDYIFSAVSMSPAENPDFILYVTVQQPEHYSGIQLGEFANPILERASAMKDSLNLQTTAKALEQVSQQSPYPMPSVKDISPGDLAEELRRNLVQPIVVGTGTKIKNSSAEEGKNLAPNQQVLILSDKVEEVPDMYGWTKETAETLAKWLNIELEFQGSGSTVQKQDVRANTAIKDIKKITLTLGD

SEQ ID NO: 4011 - protein, 105 aa, Streptococcus pneumoniae
MAEKMEKTGQILQMQLKRFSRVEKAFYFSIAVTTLIVAISIIFMQTKLLQVQNDLTKINAQIEEKKTELDDAKQEVNELLRAERLKEIANSHDLQLNNENIRIAE

SEQ ID NO: 4012 - protein, 316 aa, Streptococcus pneumoniae
MTKEFHHVTVLLHETIDMLDVKPDGIYVDATLGGAGHSEYLLSKLSEKGHLYAFDQDQNAIDNAQKRLAPYIEKGVVTFIKDNFRHLQARLREAGVQEIDGICYDLGVSSPQLDQRERGFSYKKDAPLDMRMNQDASLTAYEVVNHYDYHDLVRIFFKYGEDKFSKQIARKIEQAREVKPIETTTELAEIIKLVKPAKELKKKGHPAKQIFQAIRIEVNDELGAADESIQQAMDMLALDGRISVITFHSLEDRLTKQLFKEASTVEVPKGLPFIPDDLKPKMELVSRKPILPSAEELEANNRSHSAKLRVVRKIHK

SEQ ID NO: 4013 - protein, 64 aa, Streptococcus pneumoniae
MNRVKEFRKELGISQLELAKDIGVSRQTINMIENDKYNPTLELCLNLARSLQTDLNSLFWKEDF

SEQ ID NO: 4014 - protein, 141 aa, Streptococcus pneumoniae
LRVFIGQKEWNKISENHQIKEDDKDLVPNTIGLTPFVFVKGTRNTVCAFDQFFSEGFFFHEFAPFLKIFLPKETVEVSLEAAGEIETEFQSWIVLVVFNHIDGLSRDTDILGELELGNAQFLAKFFHTIHLVSFLICVVYI

SEQ ID NO: 4015 - protein, 93 aa, Streptococcus pneumoniae
MKKETFTEKLIKRTYGISGPLDEYKRREADSIGNQVFIVLFYLMIFGNLIPLLLAYKYPQEVALIYPPLILVIALIAAGYVTYQMKKNRHHSH

SEQ ID NO: 4016 - protein, 84 aa, Streptococcus pneumoniae
MLNEKESKQLHYPGLKAGLFFGLWMFFITPLLSILIDEGQDYFHSLLTIRNGVSSILGSIFFGASIQFLISRRIAKTKKNQDED

SEQ ID NO: 4017 - protein, 80 aa, Streptococcus pneumoniae
MKKEKKQLRYPGLKAGSIYGTVIFFIIPLIDTLTSENPNFISSLLNTKHIFKTMLGAFFFGVMIHIVDSLRIARAKKDQD

SEQ ID NO: 4018 - protein, 111 aa, Streptococcus pneumoniae
MKSLARLLNIHVFISIFLFFALISGAVSHTVLLLLLLFLPALNKGLEKIQSKRIPVLNAALFFLLISFPQLLTNPVQWKFSIFLVVTIISSLAYFYNFYQVVKEVDQKQLI

SEQ ID NO: 4019 - protein, 63 aa, Streptococcus pneumoniae
TFMFLSVFSFSLPLFQELFLIQFYYSYSSFFLRSIKDLRKYNQNGYLSSTQPSSFSSYPFHNF

SEQ ID NO: 4020 - protein, 333 aa, Streptococcus pneumoniae
LEKKLTIKDIAEMAQTSKTTVSFYLNGKYEKMSQETREKIEKVIHETNYKPSIVARSLNSKRTKLIGVLIGDITNSFSNQIVKGIEDIASQNGYQVMIGNSNYSQESEDRYIESMLLLGVDGFIIQPTSNFRKYSRIIDEKKKKMVFFDSQLYEHRTSWVKTNNYDAVYDMTQSCIEKGYEHFLLITADTSRLSTRIERASGFVDALTDANMRHASLTIEDKHTNLEQIKEFLQKEIDPDEKTLVFIPNCWALPLVFTVIKELNYNLPQVGLIGFDNTEWTCFSSPSVSTLVQPSFEEGQQATKILIDQIEGRNQEERQQVLDCSVNWKESTF

SEQ ID NO: 4021 - protein, 633 aa, Streptococcus pneumoniae
MKEERRQFFERIDGNQCRDYILSHCSKDYEKVKSSLERLMDNRFMFDSPWDMEPCSKIHQNQPMVWDQVFEDDPEWAYMLNRQEYLLQFMIGYVVEGDKDYIQKCKFFLFDWIEQVREFSPQSLMTRTLDTGIRSFTWLKLLLLLLKFDLLEEKELEKILVSLEKQIDFMKSYYRAKYTLSNWGILQTIPMLAIYHFFSDKMDLEEAYHFASEELKQQIETQILGDGSQFEQSILYHVEVYKALLDLCLLLPDLQDSYQELLEKMATYIQMMTGLDGRTLAFGDSDSTETTEMLSLSAVVLNKEDLLNGLDVKVDLLSLLFLGREKVKRLQEFERRAWQPKSMIFEDSGHVCIKDEHRYLFFKNGPLGSAHSHSDENSFCLQYQGQPIFIDAGRYSYREIYERYLLKSAWSHSTCIVDGKAPERITGSWEYEYYPHSLFCHHKEREGVHYIEGAYWSAEPDLPYLHKRKILMLVEDVWLLVDDIRCQGQHEALTQFILDKDVTYQDGKINQLRLWSEVDFDLEDTIISPKYNELERSSKLTKRQFFENQMLDYTIIAHESFEIIRHSVYQTDDREVENALAFEVKNDETDKLILLLSEDICVGEKLCLVDGTKMRGKCLVYDKINERMIRLQC

SEQ ID NO: 4022 - protein, 97 aa, Streptococcus pneumoniae
MDTTLFYGIVIVLAVSPLLLSSFHSIRQQKLLRKQMEQRQEYLASLTSGDEVLLLSGIHGKIISIQDDLVSLQIAKGVVIYVEKESVMGKTKELLFK

SEQ ID NO: 4023 - protein, 272 aa, Streptococcus pneumoniae
MTGSNKLTKRDYLKTSLRAFFCQNGFNYSNYQGLGYANVMYPALKKHYGEDQEGFYQALEENCEFYNTNPHFLPFITSLHLVMLENGRPAKETRSIKMALMGPLAGIGDSLSQFCLAPLFSTIAASFAQKSLVVGPILFFLAMNTILTAIKLSTGLYGYKLGTTVIDKLSEQMATISRIANIIGVTVIAGLAATSVKIMVPITFAAGEVKADAKQSIVSIQGMLDKVAPALLPALFTLLVYYLIKEKKWTTYKLVILTVIIGIIGSWLKIIA

SEQ ID NO: 4024 - protein, 259 aa, Streptococcus pneumoniae
MSINVFQAILIGLWTAFCFSGMLLGIYTNRCIVLSFGVGIILGDLPTALAMGAIGELAYMGFGVGAGGTVPPNPIGPGIFGTLMAITSAGKVSPEAALALSTPIAVAIQFLQTFAYTVRAGAPETAMKHLKNHNLKKFKFTLNATIWLFAFIGFTLGCLGALSMDTLLKLVDYIPPVLLTGLTVAGKMLPAIGFAMILSVMAKKELIPFVLLGYVCAAYLNIPTIGIAIVGTIFALIEFYNKPKTADHVVEEEAHDDWI

SEQ ID NO: 4025 - protein, 163 aa, Streptococcus pneumoniae
MTMPNIIMTRIDERLIHGQGQLWVKYLGCNTVIVANDEVSTDKMQQTLMKTVVPDSVAMRFFPLQKVIDIIHKANPAQTIFIVVKNVKDALTLVEGGVPIKEINIGNIHNATGKEQVTRSIFLGEEDKVALKELSQTHQVTFNTKTTPTGNDGAVQVNIMDYI

SEQ ID NO: 4026 - protein, 335 aa, Streptococcus pneumoniae
MDNTEWTNGFWTGELWLAYEYSQQDAFKNIAHKNVLSFLDRVNKRVELDHHDLGFLYTPSCMAEYKINGDGEAREATLKAADKLIERYQEKGGFIQAWGDLGKKEHYRLIIDCLLNIQLLFFAYQETGDQKYYDIAESHFYASANNVIRDDASSFHTFYFDPETGQPFKGVTRQGYSDDSCWARGQSWGVYGIPLTYRHLKDESCFDLFKGVTNYFLNRLPKDHVSYWDLIFNDGSDQSRDSSATAIAVCGIHEMLKHLPEVDADKDIYKHAMHAMLRSLIEHYANDQFTPGGTSLLHGVYSWHSGKGVDEGNIWGDYYYLEALIRFYKDWNLYW

SEQ ID NO: 4027 - protein, 145 aa, Streptococcus pneumoniae
LDIEQAVDNQTVMLFLAQVSPSLNKTTFFLIAFNQLICSFQGCFSSLSISIYLIFSHTRRCVQEAEIMVIQFYSLIDTIQERKNIFMSDVFKCILLTVFISQPQFSCPETIGPFRVIHDWIDIIKGSWCREIFLEIVKVELLTAE

SEQ ID NO: 4028 - protein, 144 aa, Streptococcus pneumoniae
MKIVLVGHGHFATGIYSSLQLIAGNQENVEAIDFVEGMSADELKQKILLAISNEEEVLILSDLLGGSPFKVSSTIMGENPAKTMNVLSGLNLAMLMEAVFARMAHSFDEVVNKSVVAAQGGVVNGKELFSTDAEEEEEDFESGI

SEQ ID NO: 4029 - protein, 217 aa, Streptococcus pneumoniae
MTNTSFSIEQFSLKGKIALITGASYGIGFAIAKSYAEAGATIVFNDINQDLVNKGIEAYREVGIEAHGYVCDVTDEDGIQAMVKQIEQEVGVIDILVNNAGIIRRVPMCEMSAADFRKVIDIDLNAPFIVSKAVIPSMIKKGHGKIINICSMMSELGRETVSAYAAAKGGLKMLTRNIASEYGGANIQCNGIGPGYIATPQTAPLRELQEEWFSPPI

SEQ ID NO: 4030 - protein, 124 aa, Streptococcus pneumoniae
MWPLTKLLASLARKTAGPIKSSGFPQRAAGVFAMMNWSNGWREPLFLQLTKRCCLRSGNITRSNSVTLDIGSTVFRRNVAGQHFQAPFSSSISANCFTSQFAHHRTNIDNLSMPFLYHRRNNCL

SEQ ID NO: 4031 - protein, 97 aa, Streptococcus pneumoniae
PATLRLNTVEPISNVTELDRVILPLLKQHLFVSCKKSGSRHPFDQFIIAKTPAARWGNPEDLMGPAVFLASDASNFVNGHILYVDGGILAYIGKQPE

SEQ ID NO: 4032 - protein, 213 aa, Streptococcus pneumoniae
MKIALINENSQASKNHIIYDSLKEATDKKGYQLFNYGMRGEEGESQLTYVQNGLMAAILLNTKAVDFVVTGCGTGVGAMLALNSFPGVVCGLAVDPTDAYLYSQINGGNALSIPYAKGFGWGAELTLKLMFERLFAEEMGGGYPRERVIPEQRNARILNEVKQITHNDLMTILKIIDQDFLKDTISGKYFQEYFFENCQDDEVAAYLKEVLAK

SEQ ID NO: 4033 - protein, 333 aa, Streptococcus pneumoniae
MTKILLFGEPLIRISPLDATSIGDHVASSTYFGGSEINIACNLQALGISTKVFTALPANEIGDRFLTFLKQHQIDTSSICRLGDRIGLYYLENGFGCRQSEVFYDRKHTSISQIRPNMLDMDSLFQGISHFHFSGITVAIGQEVRAILLLLLEEAKRRGIVVSMDLNLRTKMISVLEAKYEFSKFARFTDYCFGIDPLMIDDQNLEMFPRDSASLEEVENRMRLLKEAYGFKAIFHTLRSSDEQDKNVYQAYALEERFEESVQLKTAVYQRIGSGDAFISGALYQLLHHSSLKTTIDFAVASATLKCTLPGDHLSTSATSIENLLANAQDIIR

SEQ ID NO: 4034 - protein, 209 aa, Streptococcus pneumoniae
MTKSDTIIELKKQKIVAVIRGNTKEEGLQASIACIKGGIKAIEIAYTNQYAGQIIKELVDLYQDDQSVCIGAGTVLDAVTARDAILAGANYVVSPSFHAETAKMCNLYSTPYIPGCITLTEITTALEAGSEIIKLFPGSTLSPAYISAVKAPIPQVSVMVTGGVGLNNIPQWFAAGADAVGIGGELNKLASQGNFDRISEIAQQYITLR

SEQ ID NO: 4035 - protein, 117 aa, Streptococcus pneumoniae
VEVFYHIVFTPKYRRKVIYNQYRSSLGEIFHRLCSYKGVEMIEGHLMPDHVHMLVSIPSRLSVSSFMGYLKGKSALMMFDKHANLKYKFGNRHFWAEGYYVSPVGLNEATIKKYSQD

SEQ ID NO: 4036 - protein, 1078 aa, Streptococcus pneumoniae
LILQYVYWSVYMQTKTKKLIVSLSSLVLSGFLLNHYMTVGAEETTTNTIQQSQKEVQYQQRDTKNLVENGDFGQTEDGSSPWTGSKAQGWSTWVDQKNSSADASTRVIEAKDGAITISSPEKLRAAVHRMVPIEAKKKYKLRFKIKTDNKVGIAKVRIIEESGKDKRLWNSATTSGTKDWQTIEADYSPTLDVDKIKLELFYETGTGTVSFKDIELVEVADQLSEDSQTDKQLEEKIDLPIGKKHVFSLADYTYKVENPDVASVKNGILEPLKEGTTNVIVSKDGKEVKKIPLKILASVKDAYTARLDDWNGIIAGNQYYDSKNEQMAKLNQELEGKVADSLSSISSQADRTYLWEKFSNYKMSANLTATYRKLEEMAKQVTNPSSRYYQDETVVRTVRDSMEWMHKHVYNSEKSIVGNWWDYEIGTPRAINNTLSLMKEYFSDEEIKKYTDVIEKFVPDPEHFRKTTDNPFKALGGNLVDMGRVKVIAGLLRKDDQEISSTIRSIEQVFKLVDQGEGFYQDGSYIDHTNVAYTGAYGNVLIDGLSQLLPVIQKTKNPIDKDKMQTMYHWIDKSFAPLLVNGELMDMSRGRSISRANSEGHVAAVEVLRGIHRIADMSEGETKQRLQSLVKTIVQSDSYYDVFKNLKTYKDISLMQSLLSDAGVASVPRTSYLSAFNKMDKTAMYNAEKGFGFGLSLFSSRTLNYEHMNKENKRGWYTSDGMFYLYNGDLSHYSDGYWPTVNPYKMPGTTETDAKRADSDTGKVLPSAFVGTSKLDDANATATMDFTNWNQTLTAHKSWFMLKDKIAFLGSNIQNTSTDTAATTIDQRKLESSNPYKVYVNDKEASLTEQEKDYPETQSVFLESSDSKKNIGYFFFKKSSISMSKALQKGAWKDINEGQSDKEVENEFLTISQAHKQNGDSYGYMLIPNVDRATFNQMIKELESSLIENNETLQSVYDAKQGVWGIVKYDDSVSTISNQFQVLKRGVYTIRKEGDEYKIAYYNPETQESAPDQEVFKKLEQAAQPQVQNSKEKEKSEEEKNHSDQKNLPQTGEGQSILASLGFLLLGAFYLFRRGKNN

SEQ ID NO: 4037 - protein, 158 aa, Streptococcus pneumoniae
MTSLYDFSVLNQNNQATPLDSYRGKVLLIVNTATGCGLTPQYQGLQELYERYQDQGFEILDFPCNQFMGQAPGSAEEINAFCSLHFQTTFPRFAKIKVNGKEADPLYVWLKDHKSGPLGKRIEWNFAKFLISRDGQVFERFSSKTDPKQIEEAIQTLL

SEQ ID NO: 4038 - protein, 737 aa, Streptococcus pneumoniae
LKIFKGEFYRISVLTDKLVRLEYSQTGSFEDRTTQLIYNRDFGQVSLDYIETSNVLDIMTDYFHLHFNKGEFNAENLFIELKGNFAVYGSRWYFGESIETLKGTARTLDKADGAISLEDGIISRNGIALLDDSQGFIWDEQSGYIERENQIDLYFFAYGHDYRGAIRDFYHLTGSTPLLPRYALGNWWSRYWPYTSDEYLDLIDRFETEKIPLSIGVLDMDWHITDIPARFGSGWTGYSWNRNLIPNPEQLLQQLHDRKLKLSLNVHPADGIRAYEEAYPQIAKRLGLNVELEEPAIFDFFNPSFREAYFKDVHYELEKQGVDFWWIDWQQGTQGMLDPLWLLNHYHYQDSCKNAEGGLILSRYAGPGSHRYPVGFSGDTIISWNSLRFQPYFTATASNIGYSWWSHDIGGHMLGDYDEELQTRWLQFGVFSPITRLHSSRSPFNSKEPWFFSETTSKIMKKYLRLRHQMIPYLYTMNVKTHEEGAPLISPIYYFYPENDESYNVPNQYFFGTELMVAPIVEKMDLTFQSAKVDVWFPEGEWYDFFSEKKYTGGVKLSVYRDISTTPVFAKSGAIIPLVGSEIGMGVDLPEVVDWYVFPGKQHSFEMLEDQNGQRYKTRLSIDWEMGMVELALQGDSSIVPSNRKHRIHFKGTNVSIIELPNKNDTAKFEWKDNKRTSLNDEVFRLLKTASLPYELKDRLLNQFINAKNSHDLMNILHHQDKELRGRLLEMIFTSQN

SEQ ID NO: 4039 - protein, 60 aa, Streptococcus pneumoniae
LLFYYCIVFYDNILYFIVFLNNSSSLFINYSNYFLFCFIPYIAKKYEKAEKNILKRPLHC

SEQ ID NO: 4040 - protein, 448 aa, Streptococcus pneumoniae
MDQQNGLFGFLENHVMGPMGKLAQFKVVRAITAAGMAAVPFTIVGSMFLVFSILPQAFSFWPIVADIFSASFDKFRSLYMVANYATMGSLSLYFVLSLAYELTKIYAEEEELNMNPLNGALLALMAFVMTVPQIIFDGGMMKTVTSLKEGAVIADGWAMGNGVARFGTTGIFTAIIMAIVTVLIYRMCVKHNWVIKMPEAVPEGVSRGFTALVPGFVVAFVVIFINGLLVAMGTDIFKVIAIPFGFVSNLTNSWIGLMIIYLLTQLLWIVGIHGANIVFAFVSPIALANMAENAAGGHFAVAGEFSNMFVIAGGSGATLGLCLYIAFASKSEQLKAIGRASVVPALFNINEPLIFGLPIIYNPALAIPFILAPMVTATIYYVANSLNFIKPIIAQVPWPTPVGIGAFLGTADLRAVLVALVCAFAAFLVYLPFIRVYDQKLVKEEQGI

SEQ ID NO: 4041 - protein, 168 aa, Streptococcus pneumoniae
MDKKERQKIEQQRREMALTNTFFNRYLLLRYSIALFFFGNIYWLLNQFINPSPIIIFPIMLIVFSILATVEQFKLYGNRKEKLGITLMFVRIQMLISIGLLVLTWTSWFKNLFPIFENNQVARLFVFVVLLLGLVLSLLDIRRIKKIYKRTDKVYQQFVQLEKNSLSL

SEQ ID NO: 4042 - protein, 104 aa, Streptococcus pneumoniae
MNQEELQVAAFEIILHSGNARSEIHEAFAKMREGSFDDAESKLNQSNEIILEAHHAQTKLLQEYASGVEIKIEIIMVHAQDHLMTTMTLLEVAKEMLALYKKVN

SEQ ID NO: 4043 - protein, 659 aa, Streptococcus pneumoniae
MNVLNIKEKDILQFLIKNKERFVTSKELAEYLSCSDRTVRNVLKLIEKTMIIQGVRLISKQGQGYQIFFENQGAYQEFRQTYELEEDYTKTAVSKGDDRLVFILNKLLFEQVPVLFDDLADELYVSRSTLSHDFRKIRVMLSEYNLSIESRANKGVYVSGEERDKRRFIINYFLENQFFKTIHCYVKFNFFDQTVPLEEFARIVLDECQEANLKLSDFVLQNLVVHIALSVIRLKSGFEIKNIDCQMTDDATERKVAQRILSKVREVTNQEFPVQEIDYITLHLLAKSQQCQKNQKNISEEVLKKSLFKTFQNLGLDDMYNFSSDFQLIEGLITHLMTLQVRLESRITLNNPLVDEIKQNYSDIFFMTREILANMDKFLEWTISDDEVAYVSLHFLAAMERSKESTKFNILAICATGFGAAQMLRNRLETEFGKRVEVVDVIGYYELNQEKLKGIDFIVSAVDLSNLYFQIPVFKVSVFLKSDEMEMIRKAMDQMQVSSYVPSSKINKFENNGFRQYFSKENFLICTESDKVNLLEKMVEGLSVGESNEFEQSLLYGIKQREELSSVVFSEKIAVPHPIQPFGTEGKVSVAICKDSLLWDNQSSYVQLVFLLSPSIYGNEGLATVTKKIVSLTENDELQNQLISCNNFEDFINIFEKIK

SEQ ID NO: 4044 - protein, 113 aa, Streptococcus pneumoniae
LDLRKGENIMAKALIICAAGMSSSLMAQKTTEFLKGKGKDIVVDAISATEGGKAIAAAAFDLYLVSPQTKMYFKQFEEAGSKAGKPVVQIPPQAYIPIPMGIEKMANLILENI

SEQ ID NO: 4045 - protein, 79 aa, Streptococcus pneumoniae
MIGSIAAILTTFAFLPQVFRVVKTKDTGSIALGMYVMQVIGIALWLAHGIRIGDLPLILANSVSFLLSGIILFYKLKYK

SEQ ID NO: 4046 - protein, 492 aa, Streptococcus pneumoniae
LRFIIRVSKSGGKKMTTFKDGFLWGGAVAAHQLEGGWQEGGKGISVADVMTAGRHGVAREITLGVLEGKYYPNHEAIDFYHRYKEDIALFAEMGFKCFRTSIAWTRIFPKGDELEPNEEGLQFYDNLFDECLKNGIEPVITLSHFEMPYHLVTEYGGWKNRKLIDFFARFAEVIFKRYKDKVKYWMTFNEINNQANYQEDFAPFTNSGIVYEEGDNREAIMYQAAHYELVASARAVKIGHEINPDFQIGCMIAMCPIYPATCNPKDILMAMKAMQKRYYFADVHVLGKYPEHIFKYWERKGISVDFTAQDKEDLLGGTVDYIGFSYYMSFAIDSHRENNPYFDYLETEDLVKNNYVKASEWEWQIDPEGLRYALNWFTDHYHLPLFIVENGFGAIDKVAADGMVHDDYRIEYLGAHIREMKKAVVEDGVDLMGYTPWGCIDLVSAGTGEMRKRYGFIYVDKDDNGKGSYNRSPKKSFGWYKEVISSNGESVE

SEQ ID NO: 4047 - protein, 121 aa, Streptococcus pneumoniae
LKDDFGGYKMTLTIHVYYKGDGDSAIKFAREMLDSGLVEEIRNQKGNLKYEYFLPIEKEGTILLIDQWINQETLDKHYQSKTMQKILDLRKKYHLQMQVERYIEDDSGMPESDKSFIDTGN

SEQ ID NO: 4048 - protein, 68 aa, Streptococcus pneumoniae
MDNARFHRMGKLELLCEEFGHKLLPLPPYSSEYNPIEKTWAHIKKHLKKVLPSCNTFYEALLSCSCFN

SEQ ID NO: 4049 - protein, 130 aa, Streptococcus pneumoniae
MSQAQYAGTGRRKNAVARVRLVPGTGKITVNKKDVEEYIPHADLRLVINQPFAVTSTVGSYDVFVNVVGGGYAGQSGAIRHGIARALLQVDPDFRDSLKRAGLLTRDSRKVERKKPGLKKARKASQFSKR

SEQ ID NO: 4050 - protein, 148 aa, Streptococcus pneumoniae
MNKTTFMAKPGQVERKWYVVDATDVPLGRLSAVVASVLRGKNKPTFTPHTDTGDFVIVINAEKVKLTGKKATDKIYYTHSNHPGGLKQISAGELRSKNAVRLIEKSVKGMLPHNTLGRAQGMKLKVFVGAEHTHAAQQPEVLDISGLI

SEQ ID NO: 4051 - protein, 121 aa, Streptococcus pneumoniae
LITITKSPVSVCGVNVGLFFPRSTLATTAERRPSGTSVASTTYHLRSTWPGLAINVVLFMISPIYSSIFVYGDGCSFPSKSIWKVPGPFKWGKQYRLLSYQISPLKVNRYEKYFSVTSQSN

SEQ ID NO: 4052 - protein, 105 aa, Streptococcus pneumoniae
MAFTNTHMRSASFGIVTSLPDDIIDSFWYIIDHFLKNVFELEEELEFQLLNNQGKITFHFSSQHLPTAIDFDFNHPFDPRYPPRVLVLDMDGRETILLPEENDLF

SEQ ID NO: 4053 - protein, 130 aa, Streptococcus pneumoniae
LTNCELVGIYILKESSVLATEPWGGVEQDSFANQVVEVETWLPAQDLLETLLAIESELGRVREVHWGPRLIDLDLLFVEDQILYTDDLILPHPYIAERLFVLESLQEIAPHFIHPILKQPIRNLYDALKK

SEQ ID NO: 4054 - protein, 169 aa, Streptococcus pneumoniae
MDQLQIKDLEMFAYHGLFPSEKELGQKFVVSAILSYDMTKAATDLDLTASVHYGELCQQWTTWFQETSEDLIETVAYKLVERTFESYPLVQEMKLELKKPWAPVHLSLDTCSVTIHRRKQRAFIALGSNMGDKQANLKQAIDKLRARGHLYSQRVQCLSDGALGWSGAG

SEQ ID NO: 4055 - protein, 184 aa, Streptococcus pneumoniae
MDTQKIEAAVKMIIEAVGEDANREGLQETPARVARMYQEIFSGLGQTAEEHLSKSFEIIDDNMVVEKDIFFHTMCEHHFLPFYGRAHIAYIPDGRVAGLSKLARTVEVYSKKPQIQERLNIEVADALMDYLGAKGAFVVIEAEHMCMSMRGVRKPGTATLTTVARGLFETDKDLRDQAYRLMGL

SEQ ID NO: 4056 - protein, 440 aa, Streptococcus pneumoniae
MKEIENNQWIANYRTDQPHFGLERMVELLALRGNPHLKLKVLHIGGTNGKGSTIAFLKKMLEKLGLRVGVFSSPYLIHYTDQISINGESISEVRLEALMADYQSLLEGEAVANLQGTTEFEIITALAYDYFASEQVDVAIMEVGMGGLLDSTNVCQPILTGITTIGLDHVALLGDTLEAIAEQKAGIIKQGMPLVTGRIAPEALAVIDRIAEGKDAPRLAYGTDYQVRHQESVVTGEVFDYTSAVRQGRFQTSLLGLYQIENAGMAIALLDTFCQEDGRELASNDFLGQALEETSWPGRLEIVSRDPLMILDGAHNPHAIKALLVTLQERFADYHKEILFTCIKTKALEDMLDLLGAMPDTELTLTHFADSRATDENVLKEAAKSRNLSYQDWHDFLEQNLTDKKEEKQTVRIVTGSLYFLSQVRAYLMERKNENGYTKD

SEQ ID NO: 4057 - protein, 326 aa, Streptococcus pneumoniae
MMKSLEGVIDMSSKANHAKTAICGIINVTPDSFSDGGQFFALEQALQQARKLIAEGASMLDIGGESTRPGSSYVEVEIEEEIQRVVPVIKAIRKESDVLISIDTWKSQVAEAALAAGANLVNDITGLMGDEKMAHVIAKDGAKVVIMFNLVMARPQHPSSLIFPHFGFNQAFTEEELADFETLPIEELMETFFERALARANQAGIAQENILLDPGIGFGLTKKENLLLLRDLDKLHQKGYPIFLGVSRKRFVINILEENGFEVNPETELGFHNWDTASAHVTSIAARQGVEVVRVHDVASHKMAVEIASAIRLADEAENLDLKQYK

SEQ ID NO: 4058 - protein, 235 aa, Streptococcus pneumoniae
MKDKTIWQEVLNRGKWVLILLVAFVLSQFPIGLALFLANKQFPILQSGLLVGALSIVVLIVFIIGARKTQLATFNLSFFKAKDLARLVLSYLVIFATNLLGSLLLRLTNEVTTNNQSILNGIVQNSSLISTFFLLVLIAPICEEILCRGIIPKKIFRGKEKLGFVVGAIVFALLHMPTNLPSVIIYGGMSTVLTWTAYKTERLEMSILLHMILNGIAFCLLALLVLISRNLGLSF

SEQ ID NO: 4059 - protein, 61 aa, Streptococcus pneumoniae
LVQSRLAGKKLKSRSYSELYHSVLIGYWLLPHLLVEAGVNPRDLSQKSPDNSVPSEPSLLP

SEQ ID NO: 4060 - protein, 493 aa, Streptococcus pneumoniae
MINDIILLLFVKIKRRLMMDKLFKLKENGTDVRTEVLAGLTTFFAMSYILFVNPQILSQTGMPAQGVFLATIIGAVAGTLMMAFYANLPYAQAPGMGLNAFFTFTVVFGLGYSWQEALAMVFICGIISLIITLTNVRKMIIESIPNALRSAISAGIGVFLAYVGIKNAGLLKFTIDPGNYTVVGEGADKAQATIAANSSAVPGLVSFNNPAVLVALAGLAITIFFVIKGIKGGIILSILTTTVLAIAVGLVDLSSIDFANNHVGAAFEDLKTIFGAALGSEGLGALVSDTARLPETLMAILAFSLTDIFDTIGTLIGTGEKVGIVATNGENHQSAKLDKALYSDLIGTTVGAIAGTSNVTTYVESAAGIGAGGRTGLTALVVAICFALSSFFSPLLAIVPTAATAPILIIVGIMMLSNLKNIPWDDMAEAVPAFFTSIFMGFSYSITQGIAVGFLTYTLTKVVKGQAKDVHVMIWILDALFILNYISMALSMV

SEQ ID NO: 4061 - protein, 270 aa, Streptococcus pneumoniae
MTKKIIAVDLDGTLLNSDSQISDFTKRTIKKVAEKGHQVIITTGRPYRMSKDFYRELGLDTPMINFNGSLTHLPDQVWDFEKCLTVDKKYLLDMVQRSEDIQADFIAGEYRKKFYITNPNEEIANPKLFGVEAFQPEDQFQPELVTKDPNCILLQTRASDKYALAKDMNAFYQHQLSINTWGGPLNILECTPKGVNKAFALDYLLKIMNRDKKDLIAFGDEHNDTEMLAFAGKGYAMKNANPELLPYADEQISLSNDQDGVAKTLQDLFL

SEQ ID NO: 4062 - protein, 310 aa, Streptococcus pneumoniae
MKAVVVNPESTGVAIEEKVLRPLETGEALVEVEYCGVCHTDLHVAHGDFGQVPGRVLGHEGIGIVKEIAPDVKSLKVGDRVSVAWFFEGCGTCEYCTTGRETLCRTVKNAGYSVDGGMAEQCIVTADYAVKVPDGLDPAQASSITCAGVTTYKAIKEAKVEPGQWVVLYGAGGLGNLAVQYAKKVFNAHVIAVDINNDKLALAKEVGADIVINGLEVEDVAGLIKEKTDGGAHSAVVTAVSKVAFNQAVDSIRAGGRVVAVGLPSEMMELSIVKTVLDGIQVIGSLVGTRKDLEEAFQFGAEGLVVPVVQ

SEQ ID NO: 4063 - protein, 332 aa, Streptococcus pneumoniae
MTIMSIGIIIASHGEFAAGIHQSGSMIFGEQEKVQVVTFMPNEGPDDLYAKFNNAVAAFDAEDEVLVLADLWSGSPFNQASRVMGENPERKFAIITGLNLPMLIQAYTERLMDAAAGVEKVAANIIKEAKDGIKALPEELNPVEEVASAAAAPVAQAAIPEGTVIGDGKLKINLARLDTRLLHGQVATAWTPDSKANRIIVASDNVAKDDLRKELIKQAAPGNVKANVVPIQKLIEISKDPRFGETHALILFETPQDALRAIEGGVPIKTLNVGSMAHSTGKTLVNTVLSMDKEDVATFEKMRDLGVEFDVRKVPNDSKKDLFDLINKANVK

SEQ ID NO: 4064 - protein, 267 aa, Streptococcus pneumoniae
MSIISMVLVVVVAFFAGLEGILDQFQFHQPLVACTLIGLVTGHLEAGIILGGSLQMIALGWSNIGAAIAPDAALASVAAAIIMVLGGDFTKTGIGVAQAVAIPLAVAGLFLTMIVRTISVGLVHTADAAAKKGDFGAVERAHFIALLFQGLRIALPAALLLMVPTETVQSILSAMPDWLKDGMAIGGGMVVAVGYAMVINMMATREVWPFFALGFVLAAVSDITLIGFGAIGVAIALIYLHLSKTGGNGGGGAATSNDPIGDILEDY

SEQ ID NO: 4065 - protein, 303 aa, Streptococcus pneumoniae
MTEKLQLTKSDRKKVWWRSTFLQGSWNFERMQNLGWAYTLIPAIKKLYTKKEDQIAALERHLEFFNTHPYVAAPVMGVTLALEEERANGVEIDDAAIQGVKIGMMGPLAGIGDPVFWFTVRPILGSLGASLALTGNILGPLLFFVAWNLIRMSFLWYVQEIGYKAGSEITKDMSGGILQDITKGASILGMFILAVLVQRWVNIKFAFDVSKVQLDEKAYIHWDKLPEGSKGIQEAFAQVGQGLSQTPEKVTTFQQNLDMLIPGLSGLLLTLLCMYLLKKKVSPITIILALFAVGIVAHVLHIM

SEQ ID NO: 4066 - protein, 444 aa, Streptococcus pneumoniae
MNAIQESFTDKLFANYEANVKYQAIENAASHNGIFAALERRQSHVDNTPVFSLDITKDKVTNQKASGRCWMFAALNTFRHKLISQYKLENFELSQAHTFFWDKYEKSNWFLEQVIATSDQELTSRKVSFLLQTPQQDGGQWDMVVSLFEKYGVVPKSVYPESVSSSSSRELNAILNKLLRQDAQILRDLLVSGADQATVQAKKEDLLQEIFNFLAMSLGLPPRKFDFAYRDKDNNYKSEKGITPQEFYKKYVNLPLEDYVSVINAPTADKPYGKSYTVEMLGNVVGSRAVRYINVPMERLKELAIAQMQAGETVWFGSDVGQLSNRKAGILATDVYDFESSMDIKLTQDKAGRLDYSESLMTHAMVLTGVDLDENGKSTKWKVENSWGDKVGTDGYFVASDAWMDEYTYQIVVRKELLTAEEQAAYGAEPIVLAPWDPMGALAE

SEQ ID NO: 4067 - protein, 240 aa, Streptococcus pneumoniae
MRLDKFLVACAVGSRTEVKNLLKAGRVTVNGKKEKSAKLQIDEKIDEIRFDGQVLEYEEFVYYMMNKPKGVISATEDPKHRTVLDLLDDLARSKEIFPVGRLDIDTHGLLLLTNDGQLAHVLLSPKRHVDKTYLAQVKGIMTQEDVEIFAEGIPLKDFTCQPAILELVSIDTEKNQSQIRVTIAEGKFHQIKRMVGYCGKEVVDLQRLTMGTLVLDENLERGEWRRLTKEELEILRANII

SEQ ID NO: 4068 - protein, 136 aa, Streptococcus pneumoniae
LYSLQTTSDSLCRRCGGYASSVLSATSKQCFELTSSVLSTTSKRCFELTSSVLSTTSKRCFELTSSVLSATSKQCFEQPAASFLVCSLIFIEYNTKGSPSATFFLCFLNQASMFSLDTAIHHDIITSTITQNLFRF

SEQ ID NO: 4069 - protein, 76 aa, Streptococcus pneumoniae
MKIKEQTRKLAAGCSKHCFEVADRTDEVSSKHCFEVADRTDEVSNIYTGKATLTRFEEIFEEYETKRRLVIVPASF

SEQ ID NO: 4070 - protein, 76 aa, Streptococcus pneumoniae
MLGSMFVGLLVGFLAGAMTNRGERMGCFGKMFLGWIGAFLGHLLFGTWGPVLSGTAIIPAVLGAMIVLAIFWRRGS

SEQ ID NO: 4071 - protein, 413 aa, Streptococcus pneumoniae
MVLPNFKENLEKYAKLLVANGINVQPGHTLALSIDVEQRELAHLIVKEAYALGAHEVIVQWTDDVINREKFLHAPMERLDNVPEYKIAEMNYLLENKASRLGVRSSDPGALNGVDADKLSASAKAMGLAMKPMRIATQSNKVSWTVAAAAGLEWAKKVFPNAASDEEAVDFLWDQIFKTCRVYEADPVKAWEEHAAILKSKADMLNKEQFSALHYTAPGTDLTLGLPKNHVWESAGAVNAQGEEFLPNMPTEEVFTAPDFRRADGYVTSTKPLSYNGNIIEGIKVTFKDGQIVDITAEKGDQVMKDLVFENAGARALGECALVPDPSPISQSGITFFNTLFDENASNHLAIGAAYATSVVDGAEMSEEELEAAGLNRSDVHVDFMIGSNQMDIDGIREDGTRVPLFRNGNWAN

SEQ ID NO: 4072 - protein, 60 aa, Streptococcus pneumoniae
FILIYFKGVLMKLRIFAEDKPAKKVFEYQLELADRTILLSTALLSGAIALAGIFSALKEK

SEQ ID NO: 4073 - protein, 76 aa, Streptococcus pneumoniae
IKINHCDCLSSANLKSIPTYLLYKPKANLAGYGIHELLENAWMPSMNDHDIWQDVLFLEPENSKLLLIILPSNHAS

SEQ ID NO: 4074 - protein, 92 aa, Streptococcus pneumoniae
VLKIRYHKQFKKDFKLAMKRGLKAELLEEVLNFLVQEKEHPARYRDHSLTASKHFQGVRECHTQPDWLLVYKVDKSELILNLLRTGSHSDLF

SEQ ID NO: 4075 - protein, 87 aa, Streptococcus pneumoniae
MSKMSMSIRLDSEVKEQAQQVFSNLGMDMTTAINIFLRQAIQYQGLPFDVRLDENRKLLQVLTDLDQNRNMSQSFESVSDLMEDLRA

SEQ ID NO: 4076 - protein, 1463 aa, Streptococcus pneumoniae
MSNSFEILMNQLGMPAEMRQAPALAQANIERVVVHKISKVWEFHFVFSNILPIEIFLELKKGLSEEFSKTGNKAVFEIKARSQEFSNQLLQSYYREAFSEGPCASQGFKSLYQNLQVRAEGNQLFIEGSEAIDKEHFKKNHLPNLAKQLEKFGFPTFNCQVEKNDVLTQEQEEAFHAENEQIVQAANEEALRAMEQLEQMAPPPAEEKPVFDFQAKKAAAKPKLDKAEITPMIEVTTEENRLVFEGVVFDVEQKVTRTGRVLINFKMTDYTSSFSMQKWVKNEEEAQKFDLIKKNSWLRVRGNVEMNNFTRDLTMNVQDLQEVVHYERKDLMPEGERRVEFHAHTNMSTMDALPEVEEIVATAAKWGHKAVAITDHGNVQSFPHGYKAAKKAGIQLIYGMEANIVEDRVPIVYNEVEMDLSEATYVVFDVETTGLSAIYNDLIQVAASKMYKGNVIAEFDEFINPGHPLSAFTTELTGITDDHVKNAKPLEQVLQEFQEFCKDTVLVAHNATFDVGFMNANYERHDLPKISQPVIDTLEFARNLYPEYKRHGLGPLTKRFGVALEHHHMANYDAEATGRLLFIFIKEVAEKHGVTDLARLNIDLISPDSYKKARIKHATIYVKNQVGLKNIFKLVSLSNTKYFEGVPRIPRTVLDAHREGLILGSACSEGEVFDVVVSQGVDAAVEVAKYYDFIEVMPPAIYAPLIAKEQVKDMEELQTIIKSLIEVGDRLGKPVLATGNVHYIEPEEEIYREIIVRSLGQGAMINRTIGHGEHAQPAPLPKAHFRTTNEMLDEFAFLGEELARKLVIENTNALAEIFEPVEVVKGDLYTPFIDKAEETVAELTYKKAFEIYGNPLPDIVDLRIEKELTSILGNGFAVIYLASQMLVQRSNERGYLVGSRGSVGSSFVATMIGITEVNPLSPHYVCGQCQYSEFITDGSYGSGFDMPHKDCPNCGHKLSKNGQDIPFETFLGFDGDKVPDIDLNFSGEDQPSAHLDVRDIFGEEYAFRAGTVGTVAAKTAYGFVKGYERDYGKFYRDAEVERLAQGAAGVKRTTGQHPGGIVVIPNYMDVYDFTPVQYPADDVTAEWQTTHFNFHDIDENVLKLDVLGHDDPTMIRKLQDLSGIDPNKIPMDDEGVMALFSGTDVLGVTPEQIGTPTGMLGIPEFGTNFVRGMVDETHPTTFAELLQLSGLSHGTDVWLGNAQDLIKQGIADLSTVIGCRDDIMVYLMHAGLEPKMAFTIMERVRKGLWLKISEEERNGYIEAMKANKVPEWYIESCGKIKYMFPKAHAAAYVMMALRVAYFKVHHPIYYYCAYFSIRAKAFDIKTMGAGLEAIKRRMEEISEKRKNNEASNVEIDLYTTLEIVNEMWERGFKFGKLDLYRSQATEFLIDGDTLIPPFVAMDGLGENVAKQLVRAREEGEFLSKTELRKRGGLSSTLVEKMDEMGILGNMPEDNQLSLFDELF

SEQ ID NO: 4077 - protein, 693 aa, Streptococcus pneumoniae
MAREFSLEKTSNIGIMAHVDAGKTTTTERILYYTGKIHKIGETHEGASQMDWMEQEQERGITITSAATTAQWNNHRVNIIDTPGHVDFTIEVQRSLRVLDGAVTVLDSQSGVEPQTETVWRQATEYGVPRIVFANKMDKIGADFLYSVSTLHDRLQANAHPIQLPIGSEDDFRGIIDLIKMKAEIYTNDLGTDILEEDIPAEYLDQAQEYREKLIEAVAETDEELMMKYLEGEEITNEELKAGIRKATINVEFFPVLCGSAFKNKGVQLMLDAVIDYLPSPLDIPAIKGINPDTDAEETRPASDEEPFAALAFKIMTDPFVGRLTFFRVYSGVLQSGSYVLNTSKGKRERIGRILQMHANSRQEIDTVYSGDIAAAVGLKDTTTGDSLTDEKSKIILESINVPEPVIQLMVEPKSKADQDKMGIALQKLAEEDPTFRVETNVETGETVISGMGELHLDVLVDRMRREFKVEANVGAPQVSYRETFRASTQARGFFKRQSGGKGQFGDVWIEFTPNEEGKGFEFENAIVGGVVPREFIPAVEKGLVESMANGVLAGYPMVDVKAKLYDGSYHDVDSSETAFKIAASLSLKEAAKSAQPAILEPMMLVTITVPEENLGDVMGHVTARRGRVDGMEAHGNSQIVRAYVPLAEMFGYATVLRSASQGRGTFMMVFDHYEDVPKSVQEEIIKKNKGED

SEQ ID NO: 4078 - protein, 118 aa, Streptococcus pneumoniae
TIIKLSFNVNHWVTCKNTVSHRFYQTFFNRWDKFTRNHTTDDCVFEFESFTFFVWSKFNPYITELTFTTRLTFEESTCLSRSAECFTVRYLRRTYVRFNFELTTHTINKDVKVKFTHT

SEQ ID NO: 4079 - protein, 149 aa, Streptococcus pneumoniae
TTQYWEEFNVDSRFTDTSFQFFVSDFFTFEVFHHQFFVSFSNCFNQFFTVFLSLVKVFSWDVFFKDIRTKVVSIDFSFHLDQVNDTTEVIFRTDWQLDWVCICLKTIVKCAYRVKEVSTDFVHFVGKYDTWNSVLSCLTPNCFSLRLNT

SEQ ID NO: 4080 - protein, 143 aa, Streptococcus pneumoniae
MNLIGCNRNLLRFPIFSGTFLTLSHPILPTEVCECTVSFSHTVSIFTFLNCCTSVVSSIQDFFCKTVLHCVFTTKTSDCYQPTKSKCCTTFWTNFNWDLVVRTTNTTCTYFKYRHDVFHSCFKYFKCIVASSFFDLLKSTVND

SEQ ID NO: 4081 - protein, 156 aa, Streptococcus pneumoniae
MSRKNRAPKRDVLPDPLYNSQLVTRLINRVMLDGKRGTAASIVYGAFEQIKEATGNDALEVFETAMENIMPVLEVRARRVGGSNYQVPVEVRPERRTTLGLRWLVTIARLRGEHTMQDRLAKEILDAANNTGAAVKKREDTHRMAEANRAFAHFRW

SEQ ID NO: 4082 - protein, 137 aa, Streptococcus pneumoniae
MPTINQLVRKPRKSKVEKSKSPALNVGYNSHKKVQTNVSSPQKRGVATRVGTMTPKKPNSALRKFARVRLSNLIEVTAYIPGIGHNLQEHSVVLLRGGRVKDLPGVRYHIVRGALDTAGVNDRKQGRSKYGTKRPKA

SEQ ID NO: 4083 - protein, 1204 aa, Streptococcus pneumoniae
DTAAGSGKNESDISSPRNANASLEKTEEKPAASPADPAPQTGQDRSSEPTTSTSPVTTETKAEEPIEDNYFRIHVKKLPEENKDAQGLWTWDDVEKPSENWPNGALSFKDAKKDDYGYYLDVKLKGEQAKKISFLINNTAGKNLTGDKSVEKLVPKMNEAWLDQDYKVFSYEPQPAGTVRVNYYRTDGNYDKKSLWYWGDVKNPSSAQWPDGTDFTATGKYGRYIDIPLNEAAREFGFLLLDESKQGDDVKIRKENYKFTDLKNHSQIFLKDDDESIYTNPYYVHDIRMTGAQHVGTSSIESSFSTLVGAKKEDILKHSNITNHLGNKVTITDVAIDEAGKKVTYSGDFSDTKHPYTVSYNSDQFTTKTSWRLKDETYSYDGKLGADLKEEGKQVDLTLWSPSADKVSVVVYDKNDPDKVVGTVALEKGERGTWKQTLDSTNKLGITDFTGYYYQYQIERQGKTVLALDPYAKSLAAWNSDDAKIDDAHKVAKAAFVDPAKLGPQDLTYGKIHNFKTREDAVIYEAHVRDFTSDPAIAKDLTKPFGTFEAFIEKLDYLKDLGVTHIQLLPVLSYYFVNELKNHERLSDYASSNSNYNWGYDPQNYFSLTGMYSSDPKNPEKRIAEFKNLINEIHKRGMGAILDVVYNHTAKVDIFEDLEPNYYHFMDADGTPRTSFGGGRLGTTHHMTKRLLVDSIKYLVDTYKVDGFRFDMMGDHDAASIEEAYKAARALNPNLIMLGEGWRTYAGDENMPTKAADQDWMKHTDTVAVFSDDIRNNLKSGYPNEGQPAFITGGKRDVNTIFKNLIAQPTNFEADSPGDVIQYIAAHDNLTLFDIIAQSIKKDPSKAENYAEIHRRLRLGNLMVLTAQGTPFIHSGQEYGRTKQFRDPAYKTPVAEDKVPNKSHLLRDKDGNPFDYPYFIHDSYDSSDAVNKFDWTKATDGKTYPENVKSRDYMKGLIALRQSTDAFRLKSLQDIKDRVHLITVPGQNGVEKEDVVIGYQITAPNGDIYAVFVNADEKAREFNLGTAFAHLRNAEVLADENQAGSVGIANPKGLEWTEKGLKLNALTATVLRVSQNGTSPESTAEEKPDSTPSKPEHQDPAPEARPDSTKPDAKVADAENKPSQATADSQAEQPAQEAQASSVKEAVQNESVENSSKKNIPATPDRQAELPNTGIKNENKLLFAGISLLALLGLGFLLKNKKEN

SEQ ID NO: 4084 - protein, 307 aa, Streptococcus pneumoniae
LDVYGIGEHHRADFAVSAPEIVLAAGAVNTKKIRLTSAVSILSSMDPIRLFQQYATIDALSNGRSEIMAGRGSFTESFPLFGYDLKDYDSLFDEKLDLLQLVNEKTKLDWQGRLTQTIAGKEVYPRPVQDKLPMWIATGGHVESTVKIAQAGLPIVYAIIGGNPRYFKKLIQAYREIGSEAGHADKDLKVGAHSWGWIAEDGEQAVKDYFHPTKQVVDAISKDRPHWQELRYEQYLEQVGPNGAMFVGNPDQVAEKLIRMIEDLGLDRFMLHLPLGSMPHDQVLRAIELFGTQVAPKVRAYFAMKEA

SEQ ID NO: 4085 - protein, 602 aa, Streptococcus pneumoniae
MCGIVGVVGNTNATDILIQGLEKLEYRGYDSAGIFVLDGADNHLVKAVGRIAELSAKTAGVEGTTGIGHTRWATHGKPTEDNAHPHRSETERFVLVHNGVIENYLEIKEEYLAGHHFKGQTDTEIAVHLIGKFAEEEGLSVLEAFKKALHIIRGSYAFALIDSENPDVIYVAKNKSPLLIGLGEGYNMVCSDAMAMIRETNQYMEIHDQELVIVKADSVEVQDYDGNSRERASYTAELDLSDIGKGTYPYYMLKEIDEQPTVMRKLIQAYTDDAGQVVVAPAIIKAVQDADRIYILAAGTSYHAGFASKKMLEELTDTPVELGISSEWGYGMPLLSKKPLFIFISQSGETADSRQVLVKANEMGIPSLTVTNVPGSTLSREANYTMLLHAGPEIAVASTKAYTAQIAALAFLAKAVGEANGNAKAQAFDLVHELSIVAQSIESTLSEKETIEAKVRELLETTRNAFYIGRGQDYYVAMEASLKLKEISYIQCEGFAAGELKHGTIALIEEGTPVLALLSDPVLANHTRGNIQEVAARGAKVLTIAEENVAKDTDDIVLTTVHPYLSPISMVVPTQLVAYFATLHRGLDVDKPRNLAKSVTVE

SEQ ID NO: 4086 - protein, 459 aa, Streptococcus pneumoniae
MLRFPKDFVWGSSTSGPQTEGRVAGDGKGDNLWDYWFQVEPNRYYNGIGSDKTSTFYENWERDIELLLETGHTAFRTSIQWSRIFPQGCGKVNTQGVDFYRKVFEAIKAKGIRLLVNLYHFDLPFALQEDGDGWENKATVSAYEDYARFCFETYGDLVDQWITFNEPIVPVEFGYFYDAHYPHKVDAEPAVKVAYHTQLASSRAVKACHELLPDSKIGIVLNLTPAYPRSQHPADVKAARIAALFQAQSFLDPSVLGTYPQELVEILHEHGLLPDATEEELELIRDNTVDFLGVNYYQPLRVMAPRFAKHPESPLLPEHFYEPYVMPGRKINSHRGWEIYEQGIYDIAQNIKENYGNIEWMLTENGMGVEGEEKFRQDGMIQDDYRIDFVKGHLRELHRAIEDGANCKGYLIWTFIDCWSWLNSYKNRYGLVELDLETQERRLKKSGHWFKELSDNNGF

SEQ ID NO: 4087 - protein, 346 aa, Streptococcus pneumoniae
KWQQTSTNQATVLSLKKKLLVLQRQMLNQLMKLQPSSMFQKNKRLKPSSTLQMASLLQPFLVGNDQLNEVKLKNHLGADFFDVASEEEVANVVQAGFGSLGPVGLPENIKIIADRKVQDVRNAVVGANEDGYHLTGVNPGRDFTAEYVDIREVREGEISPDGQGVLNFARGIEIGHIFKLGTRYSASMGADVLDENGRAVPIIMGCYGIGVSRLLSAVMEQHARLFVNKTPKGEYRYAWGINFPKELAPFDVHLITVNVKDEEAQALTEKLEASLMGAGYEVLTDDRNERVGVKFSDSDLIGLPIRITVGKKAADGIVEVKIKATGDTIEVHADNVLETLEILSKK

SEQ ID NO: 4088 - protein, 335 aa, Streptococcus pneumoniae
MKQSKMPIPTLREMPSDAQVISHALMLRAGYVRQVSAGVYSYLPLANRVIEKAKNIMRQEFEKIGAVEMLAPALLSAELWRESGRYETYGEDLYKLKNREKSDFILGPTHEETFTAIVRDSVKSYKQLPLNLYQIQPKYRDEKRPRNGLLRTREFIMKDAYSFHANYDSLDSVYDEYKAAYERIFTRSGLDFKAIIGDGGAMGGKDSQEFMAITSARTDLDRWVVLDKSVASFDEIPAEVQEEIKAELLKWIVSGEDTIAYSSESSYAANLEMATNEYKPSNRVVAEEEVTRVATPDVKSIDEVAAFLNVPEEQTIKTLFYIADGELVAALSSWK

SEQ ID NO: 4089 - protein, 419 aa, Streptococcus pneumoniae
MLGILTFILVFGIIVVVHEFGHFYFAKKSGILVREFAIGMGPKIFAHIGKDGTAYTIRILPLGGYVRMAGWGDDTTEIKTGTPVSLTLADDGKVKRINLSGKKLDQTALPMQVTQFDFEDKLFIKGLVLEEEKTFAVDHDATVVEADGTEVRIAPLDVQYQNATIWGKLITNFAGPMNNFILGVVVFWVLIFMQGGVRDVDTNQFHIMPQGALAKVGVPETAQITKIGSHEVSNWESLIQAVETETKDKTAPTLDVTISEKGSDKQVTVTPEDSQGRYLLGVQPGVKSDFLSMFVGGFTTAADSALRILSALKNLIFQPDLNKLGGPVAIFKASSDAAKNGIENILYFLAMISINIGIFNLIPIPALDGGKIVLNILEAIRRKPLKQEIETYVTLAGVVIMVVLMIAVTWNDIMRLFFR

SEQ ID NO: 4090 - protein, 267 aa, Streptococcus pneumoniae
MTQDLQKRTLFAGIALAIFLPILMIGGLLLQIAIGIIAMLAMHELLKMRGLETMTMEGLLTLFATFALTIPLENYLTFLPVDGNVVAYSVLISIMLGTTVFSKSYTIEDAVFPLAMSFYVGFGFNALLDARVAGLDKALLALCIVWATDSGAYLVGMNYGKRKLAPRVSPNKTLEGALGGILGAILVTIIFMIVDSTVALPYGIYKMSVFAIFFSIAGQFGDLLESSIKRHFGVKDSGKFIPGHGGVLDRFDSMLLVFPIMHLFGLF

SEQ ID NO: 4091 - protein, 258 aa, Streptococcus pneumoniae
LNRNKIMFGFFKKDKAVEVEVPTQVPAHIGIIMDGNGRWAKKRMQPRVFGHKAGMEALQTVTKAANKLGVKVITVYAFSTENWTRPDQEVKFIMNLPVEFYDNYVPELHANNVKIQMIGETDRLPKQTFEALTKAEELTKNNTGLILNFALNYGGRAEITQALKLISQDVLDAKINPGDITEELIGNYLFTQHLPKDLRDPDLIIRTSGELRLSNFLPWQGAYSELYFTDTLWPDFDEAALQEAILAYNRRHRRFGGV

SEQ ID NO: 4092 - protein, 190 aa, Streptococcus pneumoniae
MNTVKNKQEILEAFRENPDMMAILTIIRDLGLKDSWLAAGSVRNFIWNLLSDKSPFDHETDIDVIFFDPDFSYEETLLLKKKLREDFPQYQWELKNQVYMHQHSPHTASYTSSRDAMSKYPERCTAVGLRLNEESDFELYVPYGLEDILNFQVRPTPHFLENEDRMELYQTRLSKKNWQEKWKNLIFKNT

SEQ ID NO: 4093 - protein, 332 aa, Streptococcus pneumoniae
MSRILDNEIMGDEELVERTLRPQYLREYIGQDKVKDQLQIFIEAAKMRDEALDHVLLFGPPGLGKTTMAFVIANELGVNLKQTSGPVIEKAGDLVAILNELEPGDVLFIDEIHRLPMSVEEVLYSAMEDFYIDIMIGAGEGSRSVHLELPPFTLIGATTRAGMLSNPLRARFGITGHMEYYAHADLTEIVERTADIFEMEITHEAASELALRSRGTPRIANRLLKRVRDFAQIMGNGVIDDIITDKALTMLDVDHEGLDYVDQKILRTMIEMYSGGPVGLGTLSVNIAEERETVEDMYEPYLIQKGFIMRTRSGRVATAKAYEHLGYEYSEK

SEQ ID NO: 4094 - protein, 34 aa, Streptococcus pneumoniae
MTGPDVCLRLTPSSLAITKAMVVFPRPGGPNKST

SEQ ID NO: 4095 - protein, 138 aa, Streptococcus pneumoniae
MITIKKQEIVKLEDVLHLYQAVGWTNYTHQPEMLEHALSHSLVIYLALDGDAVVGLIRLVGDGFSSVFVQDLIVLPIYQRQGIGSALMKEALKDYKDAYQVQLVTEETEKNVGFYRSMGFEILSTYNCIGMTWANREK

SEQ ID NO: 4096 - protein, 231 aa, Streptococcus pneumoniae
MPVNEYGQMIGESMEGYTPGALPSIDFLEGRYARIEALSVEKHAEDLLAVYGPDTPREMWTYLFQEPVADMGELVSLLNQMLARKDRFYYAIIDKATGKALGTFSLMRIDQNNRVIEVGAVTFSPELRGTRIGTEAQYLLARYIFEELNYRRYEWKCDALNLPSRRVAERLGFVYEGTFRQAVVYKGRTRDTDWLSMIDMDWPQVKDRLETWLRPENFDKNGQQYKSLREL

SEQ ID NO: 4097 - protein, 63 aa, Streptococcus pneumoniae
RIPTLFHNDINEFSWLKQFGKLFEVGNQQINWLFYNNINQFIWYTNHFHDFLTVNFCFDFFIR

SEQ ID NO: 4098 - protein, 833 aa, Streptococcus pneumoniae
MSFYNHKEIEPKWQGYWAEHHTFKTGTDASKPKFYALDMFPYPSGAGLHVGHPEGYTATDILSRYKRAQGYNVLHPMGWDAFGLPAEQYAMDTGNDPAEFTAENIANFKRQINALGFSYDWDREVNTTDPNYYKWTQWIFTKLYEKGLAYEAEVPVNWVEELGTAIANEEVLPDGTSERGGYPVVRKPMRQWMLKITAYAERLLNDLDELDWSESIKDMQRNWIGKSTGANVTFKVKGTDKEFTVFTTRPDTLFGATFTVLAPEHELVDAITSSEQAEAVADYKHQASLKSDLARTDLAKEKTGVWTGAYAINPVNGKEMPIWIADYVLASYGTGAVMAVPAHDQRDWEFAKQFDLPIVEVLEGGDVKEAAYTEDGLHVNSDFLDELNKEDAIAKIVAWLEKKGCGQEKVTYRLRDWLFSRQRYWGEPIPIIHWEDGTSTAVPETELPLVLPVTKDIRPSGTGESPLANLTDWLEVTREDGVKGRRETNTMPQWAGSSWYYLRYIDPHNTEKLADEDLLKQWLPVDIYVGGAEHAVLHLLYARFWHKFLYDLGVVPTKEPFQKLFNQGMILGTSYRDHRGALVATDKVEKRDGSFFHIETGEELEQAPAKMSKSLKNVVNPDDVVEQYGADTLRVYEMFMGPLDASIAWSEEGLEGSRKFLDRVYRLITSKEILAENNGALDKAYNETVKAVTEQIESLKFNTAIAQLMVFVNAANKEDKLYVDYAKGFIQLIAPFAPHLAEELWQTVAETGESISYVAWPTWDESKLVEDEIEIVVQIKGKVRAKLMVAKDLSREELQEIALADEKVKAEIDGKEIVKVISVPNKLVNIVVK

SEQ ID NO: 4099 - protein, 362 aa, Streptococcus pneumoniae
MRIFASPSRYIQGENALFENAKSILDLGNYPILLCDQLVYDIVGKRFEDYLHRYGFHIVLALFNGEASDNEINRVVALAEKENCDSIIGLGGGKTIDSAKAIADLIEKPVIIAPTIASTDAPVSALSVIYTDEGAFDHYLFYSKNPDLVLVDTKVISQAPKRLLASGIADGLATWVEARAVMQANGKTMLGQQQTLAGVAIAKKCEETLFADGLQAMAACEAKVVTPALENIVEANTLLSGLGFESGGLAAAHAIHNGFTALTGDIHHLTHGEKVAYGTLVQLLLENRPKEELDKYIEFYKKIGMPTTLKEMHLDQVGYDDLIKVGKQATMEGETIHQMPFKISPSDVAQAIIAVDAYVNSK

SEQ ID NO: 4100 - protein, 222 aa, Streptococcus pneumoniae
MEFMLDTLNLDEIKKWSEILPLAGVTSNPTIAKREGSINFFERIKDVRELIGSTPSIHVQVISQDFEGILKDAHEIRRQAGDDIFIKVPVTPAGLRAIKVLKKEGYHITATAIYTVIQGLLAIEVGADYLAPYYNRMENLNIDSNSVIRQLALAIDRQNSPSKILAASFKNVAQVNNALAAGAHAVTAGADVFESAFAMPSIQKAVDDFSDDWFVIQNSRSI

SEQ ID NO: 4101 - protein, 815 aa, Streptococcus pneumoniae
VLTMVNTEVARTTIKTEYFGSLTERMNKYREDVLNKKPYIDAERAVLATRAYERYKEQPNVLKRAYMLKEILENMTIYIEEESMIAGNQASSNKDAPIFPEYTLEFVLNELDLFEKRDGDVFYITEETKEQLRSIAPFWENNNLRARAGALLPEEVSVYMETGFFGMEGKMNSGDAHLAVNYQKLLQFGLRGFEERARKAKVALDLTDPASIDKYHFYDSIFIVIDAIKVYAKRFVALAKSLAENANPKRKKELLEIADICSRVPYEPATTFAEAIQSVWFIQCILQIESNGHSLSYGRFDQYMYPYMKADLESGKETEDSIVERLTNLWIKTITINKVRSQSHTFSSAGSPLYQNVTIGGQTRDKKDAVNPLSYLVLKSVAQTHLPQPNLTVRYHAGLDARFMNECIEVMKLGFGMPAFNNDEIIIPSFIAKGVLEDDAYDYSAIGCVETAVPGKWGYRCTGMSYMNFPKVLLITMNDGIDPASGKRFAPSFGHFKDMKNFSELENAWDKTLRYLTRMSVIVENSIDLSLEREVPDILCSALTDDCIGRGKHLKEGGAVYDYISGLQVGIANLSDSLAAIKKLVFEEERISPSQLWHALETDYAGEEGKVIQEMLIHDAPKYGNDDDYADKLVTAAYDIYVDEIAKYPNTRYGRGPIGGIRYSGTSSISANVGQGRGTLATPDGRNAGTPLAEGCSPSHNMDQHGPTSVLKSVSKLPTDEIVGGVLLNQKVNPQTLAKEEDKLKLIALLRTFFNRLHGYHIQYNVVSRETLIDAQKHPEKHRDLIVRVAGYSAFFNVLSKATQDDIIGRTEHTL

SEQ ID NO: 4102 - protein, 426 aa, Streptococcus pneumoniae
QKIIAPMMKFVNMRGIIALKDGMLAILPLTVVGSLFLIMGQLPFEGLNKSIASVFGANWTEPFMQVYSGTFAIMGLISCFSIAYSYAKNSGVEALPAGVLSVSAFFILLRSSYIPKQGEAIGDAISKVWFGGQGIIGAIIIGLVVGSIYTFFIKRKIVIKMPEQVPQAIAKQFEAMIPAFVIFLSSMIVYILAKSLTNGGTFIEMIYSAIQVPLQGLTGSLYGAIGIAFFISFLWWFGVHGQSVVNGVVTALLLSNLDANKAMLASANLSLENGAHIVTQQFLDSFLILSGSGITFGLVVAMLFAAKSKQYQALGKVAAFPAIFNVNEPVVFGFPIVMNPVMFVPFILVPVLAAVIVYGAIATGFMQPFSGVTLPWSTPAILSGFLVGGWQGVITQLVILAMSTLVYFPFFKVQDRLAYQNEIKQS

SEQ ID NO: 4103 - protein, 102 aa, Streptococcus pneumoniae
MVKIGLFCAAGFSTGMLVNNMKIAAQASGVEAEIEAFSQSKLADYAPNIDVALLGPQVAYTLDKSKEICDKCDVPIAVIPMMDYGMLDGKKVLDLALSLISG

SEQ ID NO: 4104 - protein, 106 aa, Streptococcus pneumoniae
MEIIVPDQIIMGLILYAGDAKQHIYKALDYIKNGTCERCEEEIQLADAALLEAHNLQTKFLAQEASGTKTEITALFVHSQDHLMTSMTEINLIKEIISLRKELHKK

SEQ ID NO: 4105 - protein, 326 aa, Streptococcus pneumoniae
MNQDRNKLLSKIAYLYYIENLNQSQIAAKLGIYRTSISRMLTEARNVGIVKIEIENFDTNMFKLENYVKEKYSLESLEIIPNEFDDTPTILSERISQVAAGVLRNLIDDNMKIGFSWGKSLSNLVDLIHSKSVRNVHFYPLAGGPSHIHAKYHVNTLIYEISRKFHGECTFMNATIVQENKLLADGILQSRYFENLKNSWKDLDIAVVGIGDFSNKGKHQWLDMLTEDDFKELTKVKTVGEICCRFFDSKGKEVYENLQERTIAISLEDLKNIPQSLAVAYGDTKVSSILSVLRANLVNHLITDKNTILKVLEEDGDLTFREILGE

SEQ ID NO: 4106 - protein, 248 aa, Streptococcus pneumoniae
MKRLEQIIKLVSEHEKIDVNTLSEKLNVSKVTIRKDLDKLESKGLLHREHGYAVLNSGDDLNVRLSINYEIKRKIVQEAVKLVSDNETIMIESGSTCALLAEEICKQKRNVTIVTNSFFIANFVRAYDSCRIIVLGGEFQKDSQVTVGPLLKEMIQTFHVRQAFVGTDGYDKEMGFTGKDLMRSEVVQYISAASDKVIVLTDSSKFDKRGTVRRFALSQVYEVITDEKLSKQNIATLENAGIMVKVVS

SEQ ID NO: 4107 - protein, 258 aa, Streptococcus pneumoniae
MEISKGIIFNIQHFSIHDGPGIRTTVFLKGCPLRCPWCSNPESQRMKPEKMKDAQREKFTLVGEEKTVEEIITEVLKDKEFYEESGGGLTLSGGEIFAQFEFAKAILKSAKEHHIHTAIETTAFVDHEKFIDLIQYVDFIYTDLKHYNSIKHKKVTGVFNQMIIKNIHYAFSQNKTIVLRIPVIPNFNNSLEDAEKFATLFNSLNIDQVQLLPFHQFGENKYRLLNRKYEMDGINALHPEDLIDYQKVFLNHHINCYF

SEQ ID NO: 4108 - protein, 82 aa, Streptococcus pneumoniae
LFADNKHLYKVIKEDFPMTLNEYILQYRLKQAIDKMAESPNSPLSAISDQVGFSDYKYFAKVFKKHLHISPKELKLLGRIVK

SEQ ID NO: 4109 - protein, 64 aa, Streptococcus pneumoniae
MNIEGYSDLLKPELKGKIATADPANSSSAFAQLTNMLQAQGGYKDDKAWSYVKDLFTLIDGIVK

SEQ ID NO: 4110 - protein, 122 aa, Streptococcus pneumoniae
MTVGLSYEDPAVKLLNDGANIKVVYPKEGTVFLPASAAIVKKSKNMENAKKFIDFIISQEVQDTLGTTTTNRPVRKNAKTSENMKPIDKIKTLTEDYDYVIKNKSDIVKKYNEVFTDIQSKQ

SEQ ID NO: 4111 - protein, 317 aa, Streptococcus pneumoniae
MSEIEIINAKKIYHDVSVIENLNITIPKGSLFTLLGASGCGKTTLLRMIAGFNSIKDGEFYFDDTKINNMEPSKRNIGMVFQNYAIFPHLTVRDNVAFGLMQKKVPKEELIQQTNKYLELMQIAQYADRKPDKLSGGQQQRVTLACALAVNPSVLLMDEPLSNLEAKLRLDMRQAIREIQHEVGITTVYVTHDQEEAMAISDQIAVMKDGVIQQIGRPKELYHKPANEFVATFIGRTNIIPANLEKRSDGAYIVFSDGYALRMPALDQVEEQAIHVSIRPEEFIKDESGDIEGTISDSVYLGLNTKYFIETGFASKI

SEQ ID NO: 4112 - protein, 208 aa, Streptococcus pneumoniae
MECKKLNIWTASSFFIFLTYLVFLVYPIVTVLKQALIHEGQFSLANFVTFFSKVYYSETLVNSFKVSITATVTSLVVGTLLAYLFSMYDFKGKKFLQILIIIASMSAPFVGAYSWVLLLGRNGVITKFLTNALHLPAIDIYGFKGIVLVFTLQLFPLVFLYVAETMNSIDNSLLEAAESMGSFGFKPIVTVVLPLLVPTLLAAPCLYL

SEQ ID NO: 4113 - protein, 256 aa, Streptococcus pneumoniae
MAAIYATVYGIIFISVLPQIYLIYTSFLKTSGMVFVKGYSPNSYKLAFNRMGSAIFNTIRIPLIALVLVVLFATFISYLAVRKRNLFTNLIDNLSMVPYIVPGTVLGIAFISSFNTGLFGSGFLMITGTAFILIMSLSVRRLPYTIRSSVASLQQIAPSIEEAAESLGSSRLNTFAKITTPMMLSGIISGAILSWVTLISELSTSILYPPLQCQNKNNDCSYLYRGSQRKLRCSRSLVNYPDCSNSRFLALVYENL

SEQ ID NO: 4114 - protein, 65 aa, Streptococcus pneumoniae
FQNSLLLSSILLYNVKTRTMTVAIYTEVLRGNYGVAAALSTILTVLTVGSLLLFMKISKSNSITL

SEQ ID NO: 4115 - protein, 249 aa, Streptococcus pneumoniae
MGGFYFIIHDIIEANGGRKMVKVRLYLVRHGKTMFNTIGRAQGWSDTPLTAEGERGIQELGIGLRESDLQFERAYSSDSGRTIQTMGIILEELGLQGKIPYRMDKRIREWCFGSFDGAYDGDLFMGIIPRIFNVDHVHQLSYAELAEGLVEVDTAGWAEGWEKLSGRIKEGFEIIAKEMEDQGGGNALVVSHGMTIGTIVYLINGMHPHGLDNGSVTILEYEDGQFRVEVVGDRSYRELGREKMEEGSI

SEQ ID NO: 4116 - protein, 445 aa, Streptococcus pneumoniae
MDIRQVTETIAMIEEQNFDIRTITMGISLLDCIDPDINRAAEKIYQKITTKAANLVAVGDEIAAELGIPIVNKRVSVTPISLIGAATDATDYVVLAKALDKAAKEIGVDFIGGFSALVQKGYQKGDEILINSIPRALAETDKVCSSVNIGSTKSGINMTAVADMGRIIKETANLSEIGVAKLVVFANAVEDNPFMAGAFHGVGEADVIINVGVSGPGVVKRALEKVRGQSFDVVAETVKKTAFKITRIGQLVGQMASERLGVEFGIVDLSLAPTPAVGDSVARVLEEMGLETVGTHGTTAALALLNDQVKKGGVMACNQVGGLSGAFIPVSEDEGMIAAVQNGSLNLEKLEAMTAICSVGLDMIAIPEDTPAETIAAMIADEAAIGVINMKTTAVRIIPKGREGDMIEFGGLLGTAPVMKVNGASSVDFISRGGQIPAPIHSFKN

SEQ ID NO: 4117 - protein, 119 aa, Streptococcus pneumoniae
LSIFVRIMLYYLKRILFNVKVSYFKKNWSLLMKAIITVVGKDKSGIVAGVSGKIAELGLNIDDISQTVLDEYFTMMAVVSSDEKQDFTYLRNEFEAFGQTLNVKINIQSAAIFEAMYNI

SEQ ID NO: 4118 - protein, 128 aa, Streptococcus pneumoniae
MAYRKLGRTSSQRKAMLRDLTTDLLINESIVTTEARAKEIRKTVEKMITLGKRGDLHARRQAAAFVRNEIASENYDEATDKYTSTTALQKLFSEIAPRYAERNGGYTRILKTEPRRGDAAPMAIIELV

SEQ ID NO: 4119 - protein, 311 aa, Streptococcus pneumoniae
MIEFEKPNITKIDENKDYGKFVIEPLERGYGTTLGNSLRRVLLASLPGAAVTSINIDGVLHEFDTVPGVREDVMQIILNIKGIAVKSYVEDEKIIELDVEGPAEVTAGDILTDSDIEIVNPDHYLFTIGEGSSLKATMTVNSGRGYVPADENKKDNAPVGTLAVDSIYTPVTKVNYQVEPARVGSNDGFDKLTLEILTNGTIIPEDALGLSARILTEHLDLFTNLTEIAKSTEVMKEADTESDDRILDRTIEELDLSVRSYNCLKRAGINTVHDLTEKSEAEMMKVRNLGRKSLEEVKLKLIDLGLGLKDK

SEQ ID NO: 4120 - protein, 133 aa, Streptococcus pneumoniae
MSQLLLVEKLEVHDEESYQELYRSHVQVVRLQTCHNLYFHQFLLYLVFQTRSFSYSLLNEKQCNAMIIHGDVLEDEHHCVGTGVTSRIAVTSRPAAASARIADSRPEPGPFTVTSTDLRPCSCADLAAASEAI

SEQ ID NO: 4121 - protein, 140 aa, Streptococcus pneumoniae
LAKPTRKRRVKKNIESGIAHIHATFNNTIVMITDVHGNAIAWSSAGALGFKGSRKSTPFAAQMASEAAAKSAQEHGLKSVEVTVKGPGSGRESAIRALAAAGLEVTAIRDVTPVPTQWCSSSKTSPCIIIALHCFSFKRE

SEQ ID NO: 4122 - protein, 121 aa, Streptococcus pneumoniae
MARIAGVDIPNDKRVVISLTYVNGIGLATSKKILAAAGISEDVCVRDLTSDQEDAIRREVDAIKVEGDLRRKVNLNIKRLMEIGSYRGIRHRRGLPVRGQNTKNNARTRKGKAVAIAGKKK

SEQ ID NO: 4123 - protein, 55 aa, Streptococcus pneumoniae
VAKDYVIEVEGKVVDTMPNAMFTVELENGHQILATVSGKMRKNYIRVLAGDRVTV

SEQ ID NO: 4124 - protein, 212 aa, Streptococcus pneumoniae
MNLLIMGLPGAGKGTQAAKIVEQFHVAHISTGDMFRAAMANQTEMGVLAKSYIDKGELVPDEVTNGIVKERLSQDDIKETGFLLDGYPRTIEQAHALDKTLAELGIELEGVINIEVNPDSLLERLSGRIIHRVTGETFHKVFNPPVDYKEEDYYQREDDKPETVKRRLDVNIAQGEPIIAHYRAKGLVHDIEGNQDINDVFSDIEKVLTNLK

SEQ ID NO: 4125 - protein, 436 aa, Streptococcus pneumoniae
MFFKLLREALKVKQVRSKILFTIFIVLVFRIGTSITVPGVNANSLNALSGLSFLNMLSLVSGNALKNFSIFALGVSPYITASIVVQLLQMDILPKFVEWGKQGEVGRRKLNQATRYIALVLAFVQSIGITAGFNTLAGAQLIKTALTPQVFLTIGIILTAGSMIVTWLGEQITDKGYGNGVSMIIFAGIVSSIPEMIQGIYVDYFVNVPSSRITSSIIFVIILIITVLLIIYFTTYVQQAEYKIPIQYTKVAQGAPSSSYLPLKVNPAGVIPVIFASSITAAPAAILQFLSATGHDWAWVRVAQEMLATTSPTGIAMYALLIILFTFFYTFVQINPEKAAESLQKSGAYIHGVRPGKGTEEYMSKLLRRLATVGSLFLGVISILPIAAKDVFGLSDVVAFGGTSLLIIISTGIEGIKQLEGYLLKRKYVGFMDRTE

SEQ ID NO: 4126 - protein, 146 aa, Streptococcus pneumoniae
MKLHELKPAEGSRKVRNRVGRGTSSGNGKTSGRGQKGQKARSGGGVRLGFEGGQTPLFRRLPKRGFTNINAKEYAIVNLDQLNVFEDGAEVTPVVLIEAGIVKAEKSGIKILGNGELTKKLTVKAAKFSKSAEEAITAKGGSVEVI

SEQ ID NO: 4127 - protein, 60 aa, Streptococcus pneumoniae
MAQIKITLTKSPIGRIPSQRKTVVALGLGKLNSSVIKEDNAAIRGMITAVSHLVTVEEVN

SEQ ID NO: 4128 - protein, 164 aa, Streptococcus pneumoniae
MAFKDNAVELEERVVAVNRVTKVVKGGRRLRFAALVVVGDHNGRVGFGTGKAQEVPEAIRKAVDDAKKNLIEVPMVGTTIPHEVLSEFGGAKVLLKPAVEGSGVAAGGAVRAVVELAGVADITSKSLGSNTPINIVRATVEGLKQLKRAEEIAALRGISVSDLA

SEQ ID NO: 4129 - protein, 118 aa, Streptococcus pneumoniae
VISKPDKNKLRQKRHRRVRGKLSGTADRPRLNVFRSNTGIYAQVIDDVAGVTLASASTLDKEVSKGTKTEQAVAVGKLVAERANAKGISEVVFDRGGYLYHGRVKALADAARENGLKF

SEQ ID NO: 4130 - protein, 174 aa, Streptococcus pneumoniae
MSRIGNKVIVLPAGVELANNDNVVTVKGPKGELTREFSKDIEIRVEGTEVTLHRPNDSKEMKTIHGTTRALLNNMVVGVSEGFKKELEMRGVGYRAQLQGSKLVLAVGKSHPDEVEAPEGITFELPNPTTIVVSGISKEVVGQTAAYVRSLRSPEPYKGKGIRYVGEFVRRKAR

SEQ ID NO: 4131 - protein, 132 aa, Streptococcus pneumoniae
MVMTDPIADFLTRIRNANQAKHEVLEVPASNIKKGIAEILKREGFVKNVEIIEDDKQGVIRVFLKYGPNGEKVITNLKRVSKPGLRVYKKREDLPKVLNGLGIAILSTSEGLLTDKEARQKNVGGEVIAYVW

SEQ ID NO: 4132 - protein, 78 aa, Streptococcus pneumoniae
DIKGVKTPSKNRKLDEETKVSRKVYLFHTEFSPGSIGLANLNTSYSFGKKDQFALEHCFCIKLSIFARAVTLFVSCIN

SEQ ID NO: 4133 - protein, 89 aa, Streptococcus pneumoniae
MAKKSMVAREAKRQKIVDRYAEKRAALKAAGDYEGLSKLPRNASPTRLHNRCRVTGRPHSVYRKFGLSRIAFRELAHKGQIPGVTKASW

SEQ ID NO: 4134 - protein, 180 aa, Streptococcus pneumoniae
MANRLKEKYLNEVVPALTEQFNYSSVMAVPKVDKIVLNMGVGEAVSNAKSLEKAAEELALISGQKPLITKAKKSIAGFRLREGVAIGAKVTLRGERMYEFLDKLVSVSLPRVRDFHGVPTKSFDGRGNYTLGVKEQLIFPEINFDDVDKTRGLDIVIVTTANTDEESRALLTGLGMPFAK

SEQ ID NO: 4135 - protein, 101 aa, Streptococcus pneumoniae
MFVKKGDKVRVIAGKDKGTEAVVLTALPKVNKVIVEGVNIVKKHQRPTNELPQGGIIEKEAAIHVSNVQVLDKNGVAGRVGYKFVDGKKVRYNKKSGEVLD

SEQ ID NO: 4136 - protein, 122 aa, Streptococcus pneumoniae
MIQTETRLKVADNSGAREILTIKVLGGSGRKFANIGDVIVASVKQATPGGAVKKGDVVKAVIVRTKSGARRADGSYIKFDENAAVIIREDKTPRGTRIFGPVARELREGGFMKIVSLAPEVL

SEQ ID NO: 4137 - protein, 109 aa, Streptococcus pneumoniae
MKPPSRNSRATGPKIRVPRGVLSSRMITAAFSSNLMYEPSARRAPDLVRTITALTTSPFLTAPPGVACFTDATITSPMFANLRPEPPRTLIVKISRAPLLSATFKRVSV

SEQ ID NO: 4138 - protein, 86 aa, Streptococcus pneumoniae
MERNNRKVLVGRVVSDKMDKTITVVVETKRNHPVYGKRINYSKKYKAHDENNVAKEGDIVRIMETRPLSATKRFRLVEVVEEAVII

SEQ ID NO: 4139 - protein, 132 aa, Streptococcus pneumoniae
LNCFDTSDLFFNFFQASCLFQLTSSSLETKFKQFFFQFVFALREFFLRKTTKFFNKFFYFIKFHAFSLFCFTFYEFTFNWQFVASKSKRFTCNLFRYTSDFEHHFTTFNWCYPTFRCPFTRSHTHTDSFSSV

SEQ ID NO: 4140 - protein, 68 aa, Streptococcus pneumoniae
MKLNEVKEFVKELRGLSQEELAKRENELKKELFELRFQAATGQLEQTARLKEVKKQIARIKTVQSEAK

SEQ ID NO: 4141 - protein, 137 aa, Streptococcus pneumoniae
MLVPKRVKHRREFRGKMRGEAKGGKEVAFGEYGLQATTSHWITNRQIEAARIAMTRYMKRGGKVWIKIFPHKSYTAKAIGVRMGSGKGAPEGWVAPVKRGKVMFEIAGVSEEIAREALRLASHKLPVKCKFVKREAK

SEQ ID NO: 4142 - protein, 208 aa, Streptococcus pneumoniae
MRVGIIRDWDAKWYAEKEYADYLHEDLAIRKFVQKELADAAVSTIEIERAVNKVNVSLHTAKPGMVIGKGGANVDALRAKLNKLTGKQVHINIIEIKQPDLDAHLVGEGIARQLEQRVAFRRAQKQAIQRAMRAGAKGIKTQVSGRLNGADIARAEGYSEGTVPLHTLRADIDYAWEEADTTYGKLGVKVWIYRGEVLPARKNTKGGK

SEQ ID NO: 4143 - protein, 74 aa, Streptococcus pneumoniae
TFTLNKAAEIILKVLNSAVANAENNFGLDKANLVVSEAFANEGPTMKRFRPRAKGSASPINKRTAHITVAVAEK

SEQ ID NO: 4144 - protein, 81 aa, Streptococcus pneumoniae
LLIGEAEPFARGRKRFIVGPSFANASDTTKLALSKPKLFSALATAEFKTFKMISAALFRVNVQDCDCIGYAFTTDVIKNKT

SEQ ID NO: 4145 - protein, 93 aa, Streptococcus pneumoniae
MGRSLKKGPFVDEHLMKKVEAQANDEKKKVIKTWSRRSTIFPSFIGYTIAVYDGRKHVPVYIQEDMVGHKLGEFAPTRTYKGHAADDKKTRRK

SEQ ID NO: 4146 - protein, 277 aa, Streptococcus pneumoniae
VGIRVYKPTTNGRRNMTSLDFAEITTSTPEKSLLVALKSKAGRNNNGRITVRHQGGGHKRFYRLVDFKRNKDNVEAVVKTIEYDPNRSANIALVHYTDGVKAYIIAPKGLEVGQRIVSGPEADIKVGNALPLANIPVGTLIHNIELKPGRGGELVRAAGASAQVLGSEGKYVLVRLQSGEVRMILGTCRATVGVVGNEQHGLVNLGKAGRSRWKGIRPTVRGSVMNPNDHPHGGGEGKAPVGRKAPSTPWGKPALGLKTRNKKAKSDKLIVRRRNEK

SEQ ID NO: 4147 - protein, 98 aa, Streptococcus pneumoniae
MNVYDVIKKPVITDSSMAQLEAGKYVFEVDTRANKLLIKQAVEAALEGVKVANVNTINVKPKAKRVGRYTGFTNKTKKAIITLTADSKAIELFAAEAE

SEQ ID NO: 4148 - protein, 207 aa, Streptococcus pneumoniae
MANVTLFDQTGKEAGQVVLSDAVFGIEPNESVVFDVIISQRASLRQGTHAVKNRSAVSGGGRKPWRQKGTGRARQGSIRSPQWRGGGVVFGPTPRSYGYKLPQKVRRLALKSVYSEKVAENKFVAVDALSFTAPKTAEFAKVLAALSIDSKVLVILEERNEFAALSARNLPNVKVATATTASVLDIANSDKLLVTQAAISKIEEVLA

SEQ ID NO: 4149 - protein, 208 aa, Streptococcus pneumoniae
MTKGILGKKVGMTQIFTEAGELIPVTVIEATPNVVLQVKTVETDGYNAIQVGFDDKREVLSNKPAKGHVAKANTAPKRFIREFKNVEGLEVGAEITVETFAAGDVVDVTGTSKGKGFQGVIKRHGQSRGPMAHGSRYHRRPGSMGPVAPNRVFKGKNLAGRMGGDRVTIQNLEVVQVVPEKNVILIKGNVPGAKKSLITIKSAVKAGK

SEQ ID NO: 4150 - protein, 102 aa, Streptococcus pneumoniae
MANKKIRIRLKAYEHRTLDTAAAKIVESATRTGAQVAGPIPLPTERSLYTIIRATHKYKDSREQFEMRTHKRLIDIVNPTQKTVDALMKLDLPSGVNVEIKL

SEQ ID NO: 4151 - protein, 205 aa, Streptococcus pneumoniae
MKKKDLVDQLVSEIETGKVRTLGIYGHGASGKSTFAQELYQALDSTTVNLLETDPYITSGRHLVVPKDAPNQKVTASLPVAHELESLQRDILALQASMDVLTIEEPWKASEVLSGAKPILIVEGMSVGFLPKELFEKTICFYTDEETELKRRLARDTTVRNRDASFILASHQMRREQYLRYYKETESKADILVDQSEDKFDVKRT

SEQ ID NO: 4152 - protein, 196 aa, Streptococcus pneumoniae
MNNPKPQEWKSEELSQGRIIDYKAFNFVDGEGVRNSLYVSGCMFHCEGCYNVATWSFNAGIPYTAELEEQIMADLAQPYVQGLTLLGGEPFLNTGILLPLVKRIRKELPDKDIWSWTGYTWEEMMLETPDKLEFLSLIDILVDGRYDRTKRNLMLQFRGSSNQRIIDVQKSLKSGQVVIWDKLNDGKESYEQVKRE

SEQ ID NO: 4153 - protein, 68 aa, Streptococcus pneumoniae
QEFQFIWSFQHHFFPSVAGPGPDVLVWQFLPNPLNKWQENPSIKKRLPSQQSQTLNIGLSKICHDLLF

SEQ ID NO: 4154 - protein, 168 aa, Streptococcus pneumoniae
MELRRPRLADKKAVLDMMTEFEKSQSAHDGGFWDVEDFSYEEWLEGNRNKEMGIWLPENRVPSIQFVLFGESGCALGFLNLRLRLNEGLLNYAGHIGYSIRPSERGKGYAKETLRQGLQVAKEKNIKKALVTCSVNNLASRAVILANGGIFEDARNGVERYWIEVANE

SEQ ID NO: 4155 - protein, 154 aa, Streptococcus pneumoniae
LHNPCLFQMDGWSSQCGQHNSVTPHSVSIADSKILEHNLIHQTIRTVSMERDFQVAIFPFLYYGYLLATPRKKNPQHPKILHHGLIGSFQTLSSYLKQLSYPLILVCVIPSLPPTMRKARAGSHFYFFLFLFKNCSLKLSKRSFLPAPPLECFS

SEQ ID NO: 4156 - protein, 737 aa, Streptococcus pneumoniae
MHMIALEEKITILPTLFVEKRDGRRVVFDVDKIDKALHKAADKVMDVTPLVEKRLNDLTERIITEIHSRFPQGIKIYEIQNIVEHELLEAKEYALAEEYITYRTQRDFERSKATDINFSIHKLLNKDQTVVNENANKDSDVFNTQRDLTAGIVGKSIGLQMLPKHVANAHQKGDIHYHDLDYSPYTPMTNCCLIDFKGMLENGFKIGNAEVESPKSIQTATAQISQIIANVASSQYGGCSADRIDEILAPYAEKNYQKHLKDAEEWVLPEKREDYAWKKTQKDIYDAMQSLEYEINTLFTSNGQTPFTSLGFGLGTSRFEREIQKAILNIRIKGLGSEHRTAIFPKLIFTLKRGLNLEEGTPNYDIKQLALECATKRMYPDVLSYDKIVDLTGSFKVPMGCRSFLQGWKDENGVEVNSGRMNLGVVTVNLPRIALESEGDMNKFWEIFNERMNIAEDALVYRVERTKEATPANAPILYQYGAFGHRLGKEESVDQLFKNRRATVSLGYIGLYEVATVFFGNSWESNPDAKEFTLDIIHDMKRRVEEWSDQYGYHFSIYSTPSESLTDRFCRLDIDKFGSIPDITDKEYYTNSFHYDVRKNPTPFEKLDFEKVYPEAGASGGFIHYCEYPVLQQNPKALEAVWDYAYDRVGYLGTNTPIDRCYKCDFEGDFEPTERGFACPNCGNSDPKTVDVVKRTCGYLGNPQARPMVNGRHKEIAARVKHMNGSTIKIAGHQVTN

SEQ ID NO: 4157 - protein, 518 aa, Streptococcus pneumoniae
LNRRNDMSVYGRVEEVHKENREPLEYQIEQESHHRESSRLPLVKILLWSTLVTGITLGVPLLLDLMSAQEVQDFYAGWALHQTGKIYSDYYGSQGLLYYLLTYVSQGGFFFAIFEWLALVAGGFFLFRSADTLTEQGDQAGHLVTIFYMLVTGLAFGGGYATLLALPFLFAAFSLVAAYLSNPSHDKGFVRIGLALAGGFFFAPLSSLLFIAVVSLGLLVFNLGHRRFAHGFYQFLAVALGFSLVFYPTAYYSAATGSFGDAISGIRYPIDSIRFDFTSKILENMFFYGLLSLGLGFVVCIFLGLFQSKPFKLYVISVPASLVVILGLILLFFSQEPLHASYLMVVFPVFLLLLVTNIKSQQRGRSARRNRRETPVSLWSRFFKGNLYLLVFEFVYLLSVPFLMKFVLYPVPYQERNRLADLVKEETNTEDAIYAWDDTATLYRKSERLSPSAILSPLHYTATEENRNKLLNDLKEKQPKVIVVNDKVVVWSEVETLLKENYQQVKTDYSEFKVYKIK

SEQ ID NO: 4158 - protein, 491 aa, Streptococcus pneumoniae
MLLELCLVFGLFLYLGRMAPILWITVLILLSIITIISIVNRNTTPENKVTWLLVAFVPVFGPLLYLMFGERRLSKKEIKQLKKLGSMHFQEANSQLLKEKLKESDKAAYGVIKSLLSMDTNADIYDQTASTFFPNGEAMWKKMVEDLKKAEKFIFLEYYIIEEGLMWNRILDILEQKVAQGVEVKMLYDDIGCMATLTGDYAHRLRQLGIEAHKFNKVIPRLTVAYNNRDHRKILIVDGQIAYTGGVNLADEYINHVERFGYWKDSGIRLDGLAVKALTRLFLTTWYINRGEISDFDQYHLENHSIPSDGLTIPYGSGPKPIFRAQVGKKVYQSLINQATESVYITTPYLIIDYDLTETIKNAAMRGVDVRIITPYIPDKKFIQLVTRGAYPDLLSAGVRIYEYSPGFIHSKQMLVDEDFAVVGTINLDYRSLVHHYENAVLLYKTPSIREIARDFRNIFADSQEVYPHSIKTSWYQKLVKEIAQLFAPIL

SEQ ID NO: 4159 - protein, 185 aa, Streptococcus pneumoniae
LTPLFELVILGELLVRENFSKLVAERKFIMKLKRFTLSLASLASFSLLVACSQRAQQVQQPVAQQQVQQPAQQPAQQNTNTANAGGNQNQAAPVQNQPVAQPTDIDGTYTGQDDGDRITLVVTGTTGTWTELESDGDQKVKQVTFDSANQRMIIGDDVKIYTVNGNQIVVDDMDRDPSDQIVLTK

SEQ ID NO: 4160 - protein, 69 aa, Streptococcus pneumoniae
ALCEQATKRLKLAREARESVNLFNFMMNFLSATNLEKFSLTSNSPSITSSNKGVNLSAHGPAGSPVLLR

SEQ ID NO: 4161 - protein, 129 aa, Streptococcus pneumoniae
LERIRPQIYLDGAHNLPALTRLVEFIKEKEQEGYRPQILFGALKRKDYQGMLGYLTEKLPQVELKVTGFDYQGALDERDVTGYDIVSSYREFISDFEERADAQDLLFVTGSLYFISEVRGYLLDREQIN

SEQ ID NO: 4162 - protein, 160 aa, Streptococcus pneumoniae
LVAYLTRPMWVTGELAVITSIGLDHQETLGDSLEAIAEQKAGIFKAGKKAVIAKLPPEARLVCQKKAESLAVNLYQAGQDFLMLNGDFSSSLLNLSQLNIGLEGVYQQENAALALQTFLLFMGEGKEAVDEQAVRKALEQTHWGWSLGAYSPTDLLGWCS

SEQ ID NO: 4163 - protein, 164 aa, Streptococcus pneumoniae
MFEVEEWLHSRIGLNFRSCLGRMQQAVDLLGNPEQSYPIIHVTGTNGKGSTIAFMRELFMGHGKKVATFTSPHIVSINDRICINGQPIADADFIRLTDQVKEMEKTLLQTPAQLSFFELLTLVAFLYFREQEVDLVLLEVGIGGLLDTTNVGNWRACCHHLHWA

SEQ ID NO: 4164 - protein, 101 aa, Streptococcus pneumoniae
MSHDHNHDHEERELITLVDEQGNETLFEILLTIDGKEEFGKNYVLLVPVNAEEDEDGQVEIQAYSFIENEDGTEGELQPIPEDSEDEWNMIEEVFNSFMEE

SEQ ID NO: 4165 - protein, 139 aa, Streptococcus pneumoniae
MRIMGLDVGSKTVGVAISDPLGFTAQGLEIIQINEEQGQFGSDRVKELVDTYKVERFVVGLPKNMNNTSGPRVEASQAYGAKLEEFFGLPVDYQDERLTTVAAERMLIEQADISRNKRKKVIDKLAAQLILQNYLDRKF

SEQ ID NO: 4166 - protein, 88 aa, Streptococcus pneumoniae
MGFTEETVRFKLDDSNKKEISETLTDVYASLNDKGYNPINQIVGYVLSGDPAYVPRYNNARNQIRKYERDEIVEELVRYYLKGQGVDL

SEQ ID NO: 4167 - protein, 189 aa, Streptococcus pneumoniae
MKKIVLVSLAFLFVLVGCGQKKETGPATKTEKDTLQSALPVIENAEKNTVVTKTLVLPKSDDGSQQTQTITYKDKTFLSLTIQQKRPVSDELKTYIDQHGVEETQKALLEAEEKDKSIIEARKLAGFKLETKLLSATELQTTTSFDFQVLDVKKASQLEHLKNIGLENLLKNEPSKYISDRLANGATEQ

SEQ ID NO: 4168 - protein, 132 aa, Streptococcus pneumoniae
MIKIYTVSSCTSCKKAKTWLNAHQLSYKEQNLGKEGITREELLDILTKTDNGIASIVSSKNRYAKALGVDIEDLSVNEVLNLIMETPRILKSPILVDEKRLQVGYKEDDIRTFLPRSVRNVENAEARLRAAL

SEQ ID NO: 4169 - protein, 125 aa, Streptococcus pneumoniae; identical to SEQ ID NO: 3173

SEQ ID NO: 4170 - protein, 130 aa, Streptococcus pneumoniae
MMVNKKQVKVGISTIYYWFHNGHLGLTKADMLYPRKRKGVKKQASPNFKPAGKSIEERPDVINLRLENGHYEIDTVLLTKIKNYCLLVLTDRRSIQRIVRSSIISPPPPPPPPPPPPPPTGRLYSSAVKT

SEQ ID NO: 4171 - protein, 295 aa, Streptococcus pneumoniae
LVTIGATEALSATLTAILEEGDKVLLPAPAYPGYEPIVNLVGAEIVEIDTTENGFVLTPEMLEKAILEQGDKLKAVILNYPANPTGITYSREQLEALAAVLRKYEIFVVCDEVYSELTYTGEAHVSLGTMLRDQAIIINGLSKSHAMTGWRLGLIFAPAAFTAQLIKSHQYLVTAANTMAQHAAVEALTAGKNDAEPMKKEYIQRRDYIIEKMTALGFEIIKPDGAFYIFAKIPAGYNQDSFAFLKDFAQKKAVAFIPGAAFGRYGEGYVRLSYAASMETIKEAMKRLEEYMREA

SEQ ID NO: 4172 - protein, 61 aa, Streptococcus pneumoniae
VFDKKHAFANLLCKNFDELVILTKIAIVKHQALTRDRLNHASLMYSSSRFMASLIVSMLAA

SEQ ID NO: 4173 - protein, 256 aa, Streptococcus pneumoniae
MIQSITSQGLVLYNRNFREDDKLVKIFTEQVGKRMFFVKHAGQSKLAPVIQPLVLARFLLRINDDGLSYIEDYHEVMTFPKINSDLFVMAYATYVAALADASLQDNQQDAPLFAFLQKTLELMEAGLDYQVLTNIFEIQILTRFGISLNFNECVFCHRVGQAFDFSFKYGACLCPEHYHEDKRRCHLNPNIPYLLNQFQAIDFETLETISLKPGIKQELRQFMDQLYEEYVGIHLKSKKFIDSLADWGQLLKEEKK

SEQ ID NO: 4174 - protein, 330 aa, Streptococcus pneumoniae
MKKIAVDAMGGDYAPQAIVEGVNQALSDFSDIEVQLYGDEAKIKQYLTATERVSIIHTDEKIDSDDEPTRAIRNKKNASMVLAAKAVKDGEADAVLSAGNTGALLAAGFFIVGRIKNIDRPGLMSTLPTVDGKGFDMLDLGANAENTAQHLHQYAVLGSFYAKNVRGIAQPRVGLLNNGTESSKGDPLRKETYELLVADESLNFIGNVEARDLMNGVADVVVADGFTGNAVLKSIEGTAMGIMGLLKTAITGGGLRAKLGALLLKDSLRGLKKQLNYSDVGGAVLFGVKAPVVKTHGSSDAKAVYSTIRQIRTMLETDVVAQTAREFSGE

SEQ ID NO: 4175 - protein, 111 aa, Streptococcus pneumoniae
LELRLLFSLNDFNHISYVLELVNFFIADFDTKFIFQSQDKLHQVNRIRIQIVFQTQGFCHDKVLSLSLLDNGHNTVKNFFFCHLFYSPENSRAVWATTSVSSMVRIWRIVL

SEQ ID NO: 4176 - protein, 77 aa, Streptococcus pneumoniae
MTEKEIFDRIVTIIQERQGEDFVVTESLSLKDDLDADSVDLMEFILTLEDEFSIEISDEEIDQLQNVGDVVKIIQGK

SEQ ID NO: 4177 - protein, 97 aa, Streptococcus pneumoniae
MRNIGQAGKILADSGYQGLMKIYPQAQTPRKSSKLKPLTLEDKACNHALSKERSKVENIFAKVKTFKMFSTTYRNHRKRFGLRMNLIAGIINHELGF

SEQ ID NO: 4178 - protein, 76 aa, Streptococcus pneumoniae
MNTKKMSQFEIMDTEMLACVEGGGCNWGDFAKAGVGGGVARGLQLGIKTRTWQGAATGAAGGAILGGVAYAATCWW

SEQ ID NO: 4179 - protein, 68 aa, Streptococcus pneumoniae
MARCSNWCCGRSYTWRCGLCSDMLVVIMDFKSFIIGLVVGIFGPYMDDLIRKKFLKSSEKKTEKSIKK

SEQ ID NO: 4180 - protein, 719 aa, Streptococcus pneumoniae
MNMKFGKRHYRPQVDQMDCGVASLAMVFGYYGSYYFLAHLRELAKTTMDGTTALGLVKVAEEIGFETRAIKADMTLFDLPDLTFPFVAHVLKEGKLLHYYVVTGQDKDSIHIADPDPGVKLTKLPRERFEEEWTGVTLFMAPSPDYKPYKEQKNGLLSFIPILVKQRGLIANIVLATLLVTVINIVGSYYLQSIIDTYVPDQMRSTLGIISIGLVIVYILQQILSYAQEYLLLVLGQRLSIDVILSYIKHVFHLPMSFFATRRTGEIVSRFTDANSIIDALASTILSIFLDVSTVVIISLVLFSQNTNLFFMTLLALPIYTVIIFAFMKPFEKMNRDTMEANAVLSSSIIEDINGIETIKSLTSESQRYQKIDKEFVDYLKKSFTYSRAESQQKALKKVAHLLLNVGILWMGAVLVMDGKMSLGQLITYNTLLVYFTNPLENIINLQTKLQTAQVANNRLNEVYLVASEFEEKKTVEDLSLMKGDMTFKQVHYKYGYGRDVLSDINLIVPQGSKVAFVGISGSGKTTLAKMMVNFYDPSQGEISLGGVNLNQIDKKALRQYINYLPQQPYVFNGTILENLLLGAKEGTTQEDILRAVELAEIREDIERMPLNYQTELTSDGAGISGGQRQRIALARALLTDAPVLILDEATSSLDILTEKRIVDNLMALDKTLIFIAHRLTIAERTEKVVVLDQGKIVEEGKHADLLAQGGFYAHLVNS

SEQ ID NO: 4181 - protein, 449 aa, Streptococcus pneumoniae
MKPEFLESAEFYNRRYHNFSSSVIVPMALLLVFLLGFATVAEKEMSLSTRATVEPSRILANIQSTSNNRILVNHLEENKLVKKGDLLVQYQEGAEGVQAESYASQLDMLKDQKKQLEYLQKSLQEGENHFPEEDKFGYQATFRDYISQAGSLRASTSQQNETIASQNAAASQTQAEIGNLISQTEAKIRDYQTAKSAMETGASLASQNLAYSLYQSYKSQGEENPQTKVQAVAQVEAQISQLESSLATYRVQYAGSATQQAYASGLSSQLESLKSQHLAKVGQELTLLAQKILEAESGKKVQGNLLDKGKITASEDGVLHLNPETSDSSMVAEGALLAQLYPSLEREGKAKLTAYLSSKDVARIKVGDSVRYTTTHDAGNQLFLDSTITSIDATATKTEKGNFFKIEAETNLTSEQAEKLRYGVEGRLQMITGKKSYLRYYLDQFLNKE

SEQ ID NO: 4182 - protein, 249 aa, Streptococcus pneumoniae
VVKCAQVIRKANFKMSKQLIYSGKAKDIYTTEDENLIISTYKDQATAFNGVKKEQIAGKGVLNNQISSFIFEKLNAAGVATHFVEKLSDTEQLNKKVKIIPLEVVLRNYTAGSFSKRFGVDEGIALETPIVEFYYKNDDLDDPFINDEHVKFLQIAGDQQIAYLKEETRRINELLKVWCTEIGLKLIDFKLEFGFDKDGKIILADEFSPDNCRLWDADGNHMDKDVFRRGLGELTDVYEIVWEKLQELK

SEQ ID NO: 4183 - protein, 253 aa, Streptococcus pneumoniae
MDKRIFVEKKADFQVKSESLVRELQHNLGLSSLKSIRIVQVYDVFDLAEDLFAPAEKHIFSEQGTDHVLDEVSVQADLANYAFFAIESLPGQFDQRAASSQEALLLLGSSSDVTVNTAQLYLVNKDIDATELEAVKNYLLNPVDSRFKDITTGIAKQEFSESDKTIPKLTFFESYTAEDFARYKAEQGMAMEVDDLLFIQDYFKSIGRVPTDTELKVLDTYWSDHCRHTTLETELKHIDFSAFKFPKQLAGNL

SEQ ID NO: 4184 - protein, 94 aa, Streptococcus pneumoniae
LFQSKTLSLLVTLSTSSNWQLALSGYLNAINPFDPPSVEAYKRNLLALLGKPGMENWSKGLTARLLLKKKGVGPLFLIFFSLRNWTHPGFVIYF

SEQ ID NO: 4185 - protein, 456 aa, Streptococcus pneumoniae
VAFYANVGILIKIGEIRQKNLKKTKVSVMIEKKKYWRKNMSHIKFDYSKVLDKFVAPHEVEYMQSQVTAADELIRKGTGAGSDFLGWLDLPEKYDREEFDRILKAAEQIKSDSDVLVVIGIGGSYLGAKAAIDFLNHHFANLQTKEERKAPQILYAGNSISSTYLADLVEYVADKDFSVNVISKSGTTTEPAIAFRVFKELLVKKYGQEEANKRIYATTDRQKGAVKVEADANGWGTFVVPDDIGGRFSVLTAVGLLPIAASGADIKALMEGANAARKDYTSDKISENEAYQYAAVRNILYRKGYATEILVNYEPSLQYFSEWWKQLAGESEGKDQKGIYPTSANFSTDLHSLGQFIQEGTRIMFETVVRVDKPRKNVLIPTLEEDLDGLGYLQGKDVDFVNKKATDGVLLAHTDGDVPNMYVTLPEQDAFTLGYTIYFFELAIGPFRLLECYQPI

SEQ ID NO: 4186 - protein, 245 aa, Streptococcus pneumoniae
LSDMIGLSLAFERRGIMARTVVGVAANLCPVDAEGKIIHSSVSCRFAEIIRQVGGLPLVIPVGDESVVRDYVEMIDKLILTGGQNVHPQFYGEKKTVESDDYNLVRDEFELALLKEALRQNKPIMAICRGVQLVNVAFGGTLNQEIEGHWQGLPFGTSHSIETVEGSVVAKLFGKESQVNSVHRQSIKDLAPNFRVTAIDSRDQTIEAIESIDEHRIIGLQWHSEFLVNEEDGNLELFEYLLNEL

SEQ ID NO: 4187 - protein, 603 aa, Streptococcus pneumoniae
LAVANCAKYNIRRSKMKTVQFFWHYFKVYKFSFVVVILMIVLATFAQALFPVFSGQAVTQLANLVQAYQNGNPELVWQSLSGIMVNLGLLVLVLFISSVIYMCLMTRVIAESTNEMRKGLFGKLAQLTVSFFDRRQDGDILSHFTSDLDNILQAFNESLIQVMSNIVLYIGLILVMFSRNVTLALITIASTPLAFLMLIFIVKMARKYTNLQQKEVGKLNAYMDESISGQKAVIVQGIQEDMMAGFLEQNERVRKATFKGRMFSGILFPVMNGMSLINTAIVIFAGSAVLLNDKSIETSTALGLIVMFAQFSQQYYQPIIQVAASWGSLQLAFTGAERIQEMFDAEEEIRPEKAPTFTKLQESVEISHIDFSYLPDKPILKDVSISAPKGQMTAVVGPTGSGKTTIMNLINRFYDVDAGGIYFDGKDIRGYDLDSLRSKVGIVLQDSVLFSGTIRDNIRFGVPDASQEMVEVAAKATHIHDYIESLPDKYDTLIDDDQSIFSAGQKQLISIARTLMTDPEVLILDEATSNVDTVTESKIQHAMEVVVAGRTSFVIAHRLKTILNADQIIVLKDGEVIERGNHHELLKLGGFYSELYHNQFVFE

SEQ ID NO: 4188 - protein, 71 aa, Streptococcus pneumoniae
TIPNPSNRRYDRVELSHQVIDTCFRLVNEPLVMFDVFITRDKTFMRYQTHDQLKQKAVVRSFRKLSSDWRK

SEQ ID NO: 4189 - protein, 107 aa, Streptococcus pneumoniae
LFQLVMSLITHKRFISCNENIKHYKRLIDKAETCVNDLMAEFNSIITTVTGIGNRLGAVILAEIRNIHAFDNPAQLQAFAGLDSSIYQSGQIDLAGRMVKRGSPHLR

SEQ ID NO: 4190 - protein, 195 aa, Streptococcus pneumoniae
LAQLIPRLFDPQNGAIKIGGTDIRDVSEGNLRQTVSSFSKRSILFSVTVADNLRQGKGNATLFEMERARNIAQASEFIHRMEKNFESPVEERGTNFSGGQKQRMSIARGIVSNPRILIFDDSTSALDAKSERLVQEALNKDLKGTTTIIIAQKISSVVHADKILVLNQGRLIGQGTHADLVANNAVYREIYETQK

SEQ ID NO: 4191 - protein, 360 aa, Streptococcus pneumoniae
MLIQKIKTYKWQALASLLMTGLMVASSLLQPRYLQEVLDALLTGKYEAIYSIGAWLIGVAVVGLVAGGLNVVLAAYIAQGVSSDLREDAFRKIQTFSYADIEQFNAGNLVVRMTNDINQIQNVVMMTFQILFRLPLLFIGSFILAVQTLPSLWWVIVLMVVLIFGLTAVMMGMMGPRFAKFQTLLERINAIAKENLRGVRVVKSFVQEKEQFAKFTEISDELFGQNLYIGYAFSVVEPFMMLVGYGAVFLSIWLVAGMVQSDPSVVGSIASFVNYLSQIIFTIVMVGFLGNSVSRAMISMRRIREILDAEPAMTFKDIPDEELVGSLSFENVTFTYPMDKEPMLKDVSFTIEPCQMVGVV

SEQ ID NO: 4192 - protein, 654 aa, Streptococcus pneumoniae
MNLVLSYEKESFEDLHLLDLRLATVEQTASSKLLQYVHRTQMRELNHLKPVIRYEIKDFLQMDYATKASLDLVENARSGKKQGSLFWLLDETKTAMGMRLLRSWIHRPLIDKERIVQRQEVVQVFLDHFFERSDLTDSLKGVYDIERLASRVSFGKTNPKDLLQLATTLSSVPRIRAILEGMEQPTLAYLIAQLDAIPELESLISAAIAPEAPHVITDGGIIRTGFDETLDKYRCVLREGTSWIAEIEAKERENSGISTLKIDYNKKDGYYFHVTNSQLGNVPAHFFRKATLKNSERFGTEELARIEGDMLEAREKSANLEYEIFMRIREEVGKYIQRLQALAQGIATVDVLQSLAVVAETQHLIRPEFGDDSQIDIRKGRHAVVEKVMGAQTYIPNTIQMAEDTSIQLVTGPNMSGKSTYMRQLAMTAVMAQLGSYVPAESAHLPIFDAIFTRIGAADDLVSGQSTFMVEMMEANNAISHATKNSLILFDELGRGTATYDGMALAQSIIEYIHEHIGAKTLFATHYHELTSLESSLQHLVNVHVATLEQDGQVTFLHKIEPGPADKSYGIHVAKIAGLPADLLARADKILTQLENQGTESPPPMRQTSAVTEQISLFDRAEEHPILAELAKLDVYNMTPMQVMNVLVELKQKL

SEQ ID NO: 4193 - protein, 181 aa, Streptococcus pneumoniae
LLSRLIFEKERQKMAIEKLSPGMQQYVDIKKQYPDAFLLFRMGDFYELFYEDAVNAAQILEISLTSRNKNADNPIPMAGVPYHSAQQYIDVLIEQGYKVAIAEQMEDPKQAVGVVKREVVQVITPGTVVDSSKPDSQNNFLVSIDREGNQFGLAYMDLVTGDFYVTGLLDFTLVCGEIRNL

SEQ ID NO: 4194 - protein, 148 aa, Streptococcus pneumoniae
MRKRDRHQLIKKMITEEKLSTQKEIQDRLEAHNVCVTQTTLSRDLREIGLTKVKKNDMVYYVLVNETEKIDLVEFLSHHLEGVARAEFTLVLHTKLGEASVLANIVDVNKDKWILGTVAGANTLLVICRDQHVAKLMEDRLLDLMKDK

SEQ ID NO: 4195 - protein, 563 aa, Streptococcus pneumoniae
MNTKELIASKLSSIIDSLDQEAILKLLETPKNSEMGDIAFPAFSLAKVERKAPQMIAAELAEKMNSQAFEKVVATGPYVNFFLDKSAISAQVLQAVTTEKEHYADQNIGKQENVVIDMSSPNIAKPFSIGHLRSTVIGDSLSHIFQKIGYQTVKVNHLGDWGKQFGMLIVAYKKWGDEEAVKAHPIDELLKLYVRINAEAENDPSLDEEAREWFRKLENGDEEALALWQWFRDESLVEFNRLYNELKVEFDSYNGEAFYNDKMDAVVDILSEKGLLLESEGAQVVNLEKYGIEHPALIKKSDGATLYITRDLAAALYRKNEYQFAKSIYVVGQEQSAHFKQLKAVLQEMGYDWSDDITHVPFGLVTKEGKKLSTRKGNVILLEPTIAEAVSRAKVQIEAKNPELENKDQVAHAVGVGAIKFYDLKTDRTNGYDFDLEAMVSFEGETGPYVQYAYARIQSILRKADFKPETSGNYSLNDTESWEIIKLIQDFPRIINRAADNFEPSIIAKFAISLAQSFNKYYAHTRILDESPERDSRLALSYATAVVLKEALRLLGVEAPEKM

SEQ ID NO: 4196 - protein, 149 aa, Streptococcus pneumoniae
KSIALKKQLANDFGKKKFHAMKAQAIVTSQGRIVSLDIAVNYCHDMKLFKMSRRNIGQAGKILADSGYQGPMKIYPQAQTPRKSSKLKPLTVEDKACNHALSKERSKVENIFAKVKTFKMFSTTYRNHRKRFGLRMNLIAGIINHELGF

SEQ ID NO: 4197 - protein, 67 aa, Streptococcus pneumoniae
LIFTSVASIIIVSSELRGVLEIVTPPLNKSYFNPLAPTDKEDLIRTLELAPHVEGGYFRQTKKLQTL

SEQ ID NO: 4198 - protein, 94 aa, Streptococcus pneumoniae
LTADEIWYFHAGSPLTVHMITADGHYEAVTLGLDISKGQQLHYCVPKGTIWGSTVDKDYALVSCLVAPGFEFEDFELFERVDLTGDLSRAQGDD

SEQ ID NO: 4199 - protein, 235 aa, Streptococcus pneumoniae
MTKQVLLVDDEEHILKLLDYHLSKEGFSTQLVTNGRKALALAETEPFDFILLDIMLPQLDGMEVCKRLRAKGVKTPIMMVSAKSDEFDKVLALELGADDYLTKPFSPRELLARVKAVLRRTKGEQEGDDSDNIADDSWLFGTLKVYPERHEVYKANKLLSLTPKEFELLLYLMKHPNMTLTRERLLERIWGYDFGQETRLVDVHIGKLREKIEDNPKAPQFIRTIRGYGYKFKEL

SEQ ID NO: 4200 - protein, 443 aa, Streptococcus pneumoniae
MKRYLQFWLVNLSVSLILIAGMALTWISKGIGLFLLALSLGQGGYWLFCLWKWEVAFETLHQPLLTNSEYFLEKGQEDLKSLAQYVSALKTKVSQQDQQYKDLPETMEVLLSHLTMGTFLVSAQGQMLLSSRSLPHYFPDVDGDISSLDDLKRMDIRNLVHQAFDQKTRLKQKVSGFHEGDLILEVTAVPVFSPTQSVEAVLVLLYDLTTIRTYEKLNLAFVSNASHELRTPVTSIKGFAETIKGMSAEEEALKDDFLDIIYKESLRLEHIVEHLLTLSKAQQMPIQWTTLSLAEFVQDLTQSLQPQLKKKDLQLKVQVPDDVTLVSDSQLLSQILLNLLSNAIRYTEQGGKIEVKTQKVNEGIKISVSDTGIGISQLEQDRIFERFYRVNKGRSRQTGGTGLGLAIVKELSQLLGGQVTVTSQLGRGSCFTIFLPNQSFAQD

SEQ ID NO: 4201 - protein, 291 aa, Streptococcus pneumoniae
MKFKKMLTLAAIGLSGFGLVACGNQSAASKQSASGTIEVISRENGSGTRGAFTEITGILKKDGDKKIDNTAKTAVIQNSTEGVLSAVQGNANAIGYISLGSLTKSVKALEIDGVKASRDTVLDGEYPLQRPFNIVWSSNLSKLGQDFISFIHSKQGQQVVTDNKFIEAKTETTEYTSQHLSGKLSVVGSTSVSSLMEKLAEAYKKENPEVTIDITSNGSSAGITAVKEKTADIGMVSRELTPEEGKSLTHDAIALDGIAVVVNNDNKASQVSMAELADVFSGKLTTWDKIK

SEQ ID NO: 4202 - protein, 271 aa, Streptococcus pneumoniae
MSATVAVVAILLICFFIFSNGLPFMANYGFARFLLGSDWSPTNIPASYGILPMIVGSLLITLGAIVIGVPTGILTSVFMVYYCPKPVYGFLKSAINLMAAIPSIVYGFFGLQLLVPWIRTFLGNGMSVLTASLLLGIMILPTIISLSESAIRTVPKTYYSGSLALGASHERSIFSVILPAARSGILSAVILGIGRAVGETMAVILVAGNQPIIPSGLFSGTRTLTTNIVLEMAYASGQHREALIATSAVLFFLILLINAYFAYLKGKSSYE

SEQ ID NO: 4203 - protein, 271 aa, Streptococcus pneumoniae
MSKYLLKLLVYCFSALTFGSLFLIIGFILIKGLPHLSLSLFSWTYTSENISLMPAIISTVILVFGALLLALPIGIFAGFYLVEYTKKDSLCVKIMRLASDTLSGIPSIVFGLFGMLFFVVFLGFQYSLLSGILTSVIMVLPVIIRSTEEALLSVSDSMRQASYGLGAGKLRTVFRIVLPVAMPGILAGVILAIGRIVGETAALMYTLGTSTNTPSSLMSSGRSLALHMYMLSSEGLHVNEAYATGVILIITVLMINTLSSLLSRKLVKGAS

SEQ ID NO: 4204 - protein, 250 aa, Streptococcus pneumoniae
MGTFSVRHLDLFYGDFQALKNISIQLPERQITALIGPSGCGKSTFLKTLNRMNDLVPSCHIEGQVLLDEQDIYSSKFNLNQLRKRVGMVFQQPNPFAMSIYDNVAYGPRTHGIRDKKQLDALVEKSLKGAAIWEEVKDDLKKSAMSLSGGQQQRLCIARALAVEPDILLMDEPTSALDPISTLKIEDLIQQLKKDYTIIIVTHNMQQASRISDKTAFFLTGEICEFGDTVDVFTNPKDQRTEDYISGRFG

SEQ ID NO: 4205 - protein, 216 aa, Streptococcus pneumoniae
MRNQFDLELHELEQSFLGLGQLVLETASKALLALASKDKEMAELIINKDHAINQGQSAIELACARLLALQQPQVSDLRFVISIMSSCSDLERMGDHMAGIAKAVLQLKENQLAPDEEQLHQMGKLSLSMLADLLVAFPLHQASKAISIAQKDEQIDQYYYALSKEIIGLMKDQETSIPNGTQYLYIIGHLERFADYIANICERLVYLETGELVDLN

SEQ ID NO: 4206 - protein, 141 aa, Streptococcus pneumoniae
LNNLSSVDSEELFQFYRERGNAENFIKERKAGFFGDKTDSSTMIKNEVRMMMGCLAYNLYLFLKQLAGDEVKALTIKRFRRLFLHIAGKYVSTARRHILKFSSLYAYSKQFQALFDTICQINLILPVPYRARGQGKTCLTE

SEQ ID NO: 4207 - protein, 72 aa, Streptococcus pneumoniae
MPNRISHLILKIEHQTKGGVYPFLGKNQDKSPQLCLEHQKLSKITRRTVFQLAFLVIFELCSSLVPDMNNLG

SEQ ID NO: 4208 - protein, 152 aa, Streptococcus pneumoniae
VRRNLIDSLIQYMLIIGVNNSGGSCRLREFGEKIKRLRLAKKISRSEFCGDESELSIRQLIRIENGESRPTLTKLKYIAERLGVEDYKLMPSYIELDKEYLELKYFLMRTPTYEDETIAQKKESVLIRFLKSIMIGYLRKKDLSSQIIHIWH

SEQ ID NO: 4209 - protein, 338 aa, Streptococcus pneumoniae
MEKQTVAVLGPGSWGTALSQVLNDNGHEVRIWGNLPEQINEINTHHTNKHYFKDVVLDENIIAYTDLAETLKDVDAILFVVPTKVTRLVAQQVAQTLDHKVIIMHASKGLEPDSHKRLSTILEEEIPEHLRSDIVVVSGPSHAEETIVRDLTLITAASKDLQTAQYVQELFSNHYFRLYTNTDVIGVETAGALKNIIAVGAGALHGLGFGDNAKAAIIARGLAEITRLGVALGASPLTYSGLSGVGDLIVTGTSIHSRNWRAGDALGRGESLADIEANMGMVIEGISTTRAAYELAQELGVYMPITQAIYQVIYHGTNIKDAIYDIMNNEFKAENEWS

SEQ ID NO: 4210 - protein, 299 aa, Streptococcus pneumoniae
MTSKVRKAVIPAAGLGTRFLPATKALAKEMLPIVDKPTIQFIVEEALKSGIEDILVVTGKSKRSIEDHFDSNFELEYNLKEKGKTDLLKLVDETTGMRLHFIRQTHPRGLGDAVLQAKAFVGNEPFVVMLGDDLMDITDEKAVPLTKQLMDDYERTHASTIAVMPVPHDEVSAYGVIAPQGEGKDGLYSVETFVEKPAPEDAPSDLAIIGRYLLTPEIFEILEKQAPGAGNEIQLTDAIDTLNKTQRVFAREFTGARYDVGDKFGFMKTSIDYALKHPQVKDDLKNYLIQLGKELTEKE

SEQ ID NO: 4211 - protein, 224 aa, Streptococcus pneumoniae
MKKDKAFFEPYLFILFLLSQFFSKLDEVILQIIFDLWVFEGVVNRCFHKAKLIPNVVTSSCKFTGKNTLCFIKSIDCISKLDFISSTRSLLFENLKNFRREEVASDNSKVARSVLWSWFFNKGFNTVKTIFSFALRSNNPVSRYFVMRDWHDSDSRRVGTLVVIHELFGKWNSLFVCDIHQVITKHNDKRFISDESLGLQNSISETAWMSLADKMQTHASCFIN

SEQ ID NO: 4212 - protein, 226 aa, Streptococcus pneumoniae
LMKEIFDRRYPVTSFFLLVTTLVFLLMLVTTGGNFDRADTLFRFGAMYGPAIRLFPEQVWRLLSAIFVHIGWEHFIVNMLSLYYLGRQVEEIFGSKQFFFLYLLSGMMGNLFVFVFSPKSLAAGASTSLYGLFAAIIVLRYATRNPYIQQLGQSYLTLFVVNIIGSVLIPGISLAGHIGGAVGGAFLAVIFPVRGEKRMYNTSQRLGAVVLFVGLAILLFYKGMGM

SEQ ID NO: 4213 - protein, 181 aa, Streptococcus pneumoniae
LYMKSELRKQVLHEMKALSQEQKQAIDQALTERILQHPFYQEAKVIATYLSFSHEFQTRELIEQALKDGKKVLIPKTYPKGRMDFVVYDPQQLVKTAFALLEPQGDLEVVDVSQIDLIHVPGLAFTTDGYRIGYGGGYYDRYLEHFSGHTLSTVHPCQIQDFIPENHDIPVQEVLIDEGNL

SEQ ID NO: 4214 - protein, 376 aa, Streptococcus pneumoniae
MLDLIQTRRDLHQIPEIGLEEFKTQAYLLDVIEKLTTGKDFVQIRTWRTGILVYLQGSQPERTIGWRTDIDGLPIVEQTGLPFASQHQGRMHACGHDFHMTIALGCLERALEEQPKNNLLFLFQPAEENEAGGMLMYEDGAFGDWLPNQFYGLHVRPDLKVGQIATNTHTLFAGTCEVKIRFKGKGGHAAFPHEANDALVAASYFVTQVQSVVSRNVNPIEGAVVTFGVFQAGTTNNVITDTAFLHGTIRALTQDMSLLVQKRVKTVAEGVAAAFDMEVEVELKQGGYLPVENNPALARELMDFFDEKDGIELIDIEPAMTGEDFGYLLSKVDGVMFWLGIDSPYALHHPQMSPKEEVLAIGVAAVSSFLKKKAAE

SEQ ID NO: 4215 - protein, 232 aa, Streptococcus pneumoniae
MTATKMNAQEIIQFIANAEKKTSVKVTFEGQLATAVPSSVVKLGNVLFGDWKDVAPLLEGLVENQDYVVEQDARNSAVPLLDKRAINARIEPGAIIRDQVEIGDNAVIMMGAVINIGAEIGAGTMIDMGAILGGRAIVGKNSHVGAGAVLAGVIEPASAEPVRVGDNVLIGANAVVIEGVQIGSGSVVAAGAIVTQDVPENVVVAGVPARIIKEIDAQTQQKTALEDALRTL

SEQ ID NO: 4216 - protein, 152 aa, Streptococcus pneumoniae
VWASISLIIRAGTPATTTFSGTSWVTIAPAATTEPLPIWTPSITTALAPIRTLSPTRTGSALAGSITPAKTAPAPTWLFFPTMARPPRMAPMSIMVPAPISAPILITAPIMITALSPISTWSRIIAPGSIRALIARLSSKGTAELRASCSTT

SEQ ID NO: 4217 - protein, 71 aa, Streptococcus pneumoniae
MILAGLFSNVLSPVYELSFTLDIWSILICLIIAFFGTAFAFFISMKAVSLVSPLVGFPLTQCAVNLSLLLS

SEQ ID NO: 4218 - protein, 277 aa, Streptococcus pneumoniae
LLLVEVMRIIRMLGLVLWGVYQLHPAPAVQVVVLAIAVTQVLHDLLQGRDDNSLNEVANQWIATFFLSCYNKGMNQYQKKIVNGKIYSLLSGLIWGICGILGKYFFTHYQVSSGWITSMRLTLAGSLVLIWSAIQLKSQVLDIWRDKKNYLPFLAYAILGIFSVQYFFYLCVEYSNATTATILQFISPVFILFYNRLVYQKRASKSAVFYVLVAMLGVCLMATKGDLSQLSMTPLALITGLLSAMGVMFNVILPQPFAKRYGFVLTSLLGDDFGRFV

SEQ ID NO: 4219 - protein, 820 aa, Streptococcus pneumoniae
MQNQLNELKRKMLEFFQQKQKNKKSARPGKKGSSTKKSKTLDKSVIFPAILLSIKALFNLLFVLGFLGGMLGAGIALGYGVALFDKVRVPQTEELVNQVKDISSISEITYSDGTVIASIESDLLRTSISSEQISENLKKAIIATEDEHFKEHKGVVPKAVIRATLGKFVGLGSSSGGSTLTQQLIKQQVVGDAPTLARKAAEIVDALALERAMNKDEILTTYLNVAPFGRNNKGQNIAGARQAAEGIFGVDASQLTVPQAAFLAGLPQSPITYSPYENTGELKSDEDLEIGLRRAKAVLYSMYRTGALSKDEYSQYKDYDLKQDFLPSGTVTGISRDYLYFTTLAEAQERMYDYLAQRDNVSAKELKNEATQKFYRDLAAKEIENGGYKITTTIDQKIHSAMQSAVADYGYLLDDGTGRVEVGNVLMDNQTGAILGFVGGRNYQENQNNHAFDTKRSPASTTKPLLAYGIAIDQGLMGSETILSNYPTNFANGNPIMYANSKGTGMMTLGEALNYSWNIPAYWTYRMLREKGVDVKGYMEKMGYEIPEYGIESLPMGGGIEVTVAQHTNGYQTLANNGVYHQKHVISKIEAADGRVVYEYQDKPVQVYSKATATIMQGLLREVLSSRVTTTFKSNLTSLNPTLANADWIGKTGTTNQDENMWLMLSTPRLTLGGWIGHDDNHSLSRRAGYSNNSNYMAHLVNAIQQASPSIWGNERFALDPSVVKSEVLKSTGQKPGKVSVEGKEVEVTGSTVTSYWANKSGAPATSYRFAIGGSDADYQNAWSSIVGSLPTPSSSSSSSSSSSDSSNSSTTRPSSRARR

SEQ ID NO: 4220 - protein, 418 aa, Streptococcus pneumoniae
MHIFDELKDRGLIFQTTDEEALRKALEEGQVSYYTGYDPTADSLHLGHLVAILTSRRLQLAGHKPYALVGGATGLIGDPSFKDAERSLQTKDTVDGWVKSIQGQLSRFLDFENGENKAVMVNNYDWFGSISFIDFLRDIGKYFTVNYMMSKESVKKRIETGISYTEFAYQIMQGYDFFVLNQDHNVTLQIGGSDQWGNMTAGTELLRRKADKTGHVITVPLITDATGKKFGKSEGNAVWLNPEKTSPYEMYQFWMNVMDADAVRFLKIFTFLSLDEIEDIRKQFEAAPHERLAQKVLAREVVTLVHGEEAYKEALNITEQLFAGNIKNLSVKELKQGLRGVPNYQVQADENNNIVELLVSSGIVNSKRQAREDVQNGAIYVNGDRIQELDYVLSDADKLENELTVIRRGKKKYFVLTY

SEQ ID NO: 4221 - protein, 690 aa, Streptococcus pneumoniae
VNNMSFKVLHRGYQHIRLSSSFSLTLDIQDYLRSLARDEKGIESIQFYMDQQHFTLRIKEGFSVLDNAEAFLKRIDKGKVSELMTLPIRREESAYSIVSGAAVKRVLFRSFVPYPIRYIWTCYQALGYIREAYQTLARKELTMEVLDCSAILLSLFMNQSKTASNIMFMLDLGNHLDQWSLKKTATDLEQSLLAKESDVFLVQGDTVVSIKSSDVQIGDVLILSQGNEILFDGQVVSGLGMVNESSLTGESFPVEKRESDLVCANTVLETGELRIRVTDNQMNSRILQLIELMKKSEENKKTKQRYFIKMADKVVKYNFLGAGLTYLLTGSFSKAISFLLVDFSCALKISTPVAYLTVIKEGLNREMVIKDGDVLEKYLEVDTFLFDKTGTITTSYPIVEKVLPFGDYSEEDILRISACLEEHIYHPIANAIVKQAEIEGIEHEEMHGKLQYIASKGIKSHIDGQPVLIGNYVLMQDEQIHISSEQNALIEEYKSHYNLLFLAYQNELIGMFCIHTPLRKEAKTALDKLKAQGKKLILATGDTLIRTEELVKDLPFDQVYTDLKPDGKFELVEKLQKAGHTILMVGDGLNDSAALTLSDIGVVMNESADISKQMSDILLLDNRLDFFQELDSLSSSLQTLIKKNIQDTVVVNSSLIGFGLFNWFSPSNLSILHNLTTLRIVLRSLSIKNR

SEQ ID NO: 4222 - protein, 64 aa, Streptococcus pneumoniae
LKILASKEAKKGYSKALAKAYKLKDELDASVSVVKQHGDDVLQDAKYLYEQEKKEEQLDSLIGE

SEQ ID NO: 4223 - protein, 87 aa, Streptococcus pneumoniae
MNTNLKPKLQRFASATAFACPICQENLTLLETNFKCCNRHSFDLAKFGYVNLAPQIKQSANYDKENFQNRQQIRRSRLLPSYLRCCI

SEQ ID NO: 4224 - protein, 196 aa, Streptococcus pneumoniae
MTRKIFKTVNKSVEAGFYQAILDAVSDLLASSKTTITILDIGCGEGFYSRKLQESHSEKTFYAFDISKDSVQIAAKSEPNWAVNWFVGDLARLPIKDASMDILLDIFSPANYGEFRRVLSKDGILIKVIPTENHLKEIRQRVQDQLTNKEYSNQDIKEHFQEHFTILSSQTASLTKTITAEQLQALLSMNSSPLAR

SEQ ID NO: 4225 - protein, 56 aa, Streptococcus pneumoniae
LSLLFIILNLFILYKIYSLRREKSKYLIYTAYIIFGVNVVYGIQWLLKELISTISP

SEQ ID NO: 4226 - protein, 190 aa, Streptococcus pneumoniae
MNKLMKFISVFLTSIVLIVSAIPSVSAVYASEQVSQIETNMELQPVTSLTEEQINTLANEIQSFHPDVSQQWIKEVINRQLQGDYTIPPTYSPFRAAWQGITVNQMGALLDTAIALALGGTTAGLANLIKVKGKHAAKSAIRSAISRYLGSWFVNDVALEFAMNLLSPGTYLAQLWDKNDAIPNNRRINF

SEQ ID NO: 4227 - protein, 752 aa, Streptococcus pneumoniae
MLSLQEFVQNRYNKTIAECSNEELYLALLNYSKLASSQKPVNTGKKKVYYISAEFLIGKLLSNNLINLGLYDDVKKELAAAGKDLIEVEEVELEPSLGNGGLGRLAACFIDSIATLGLNGDGVGLNYHFGLFQQVLKNNQQETIPNAWLTEQNWLVRSSRSYQVPFADFTLTSTLYDIDVTGYETATKNRLRLFDLDSVDSSIIKDGINFDKTDIARNLTLFLYPDDSDRQGELLRIFQQYFMVSNGAQLIIDEAIEKGSNLHDLADYAVVQINDTHPSMVIPELIRLLTARGIDLDEAISIVRSMTAYTNHTILAEALEKWPLEFLQEVVPHLVPIIEELDRRVKAEYKDPAVQIIDESGRVHMAHMDIHYGYSVNGVAALHTEILKNSELKAFYDLYPEKFNNKTNGITFRRWLMHANPRLSHYLDEILGDGWHHEADELEKLLSYEDKAAVKEKLESIKAHNKRKLARHLKEHQGVEINPNSIFDIQIKRLHEYKRQQMNALYVIHKYLDIKAGNIPARPITIFFGGKAAPAYTIAQDIIHLILCMSEVIANDPAVAPHLQVVMVENYNVTAASFLIPACDISEQISLASKEASGTGNMKFMLNGALTLGTMDGANVEIAELVGDENIYIFGEDSETVIDLYAKAAYKSSEFYAREAIKPLVDFIVSDAVLAAGNKERLERLYNELINKDWFMTLLDLEDYIKVKEQMLADYEDRDAWLDKVIVNISKAGFFSSDRTIAQYNEDIWHLN

SEQ ID NO: 4228 - protein, 505 aa, Streptococcus pneumoniae
MKKRQSGVLMHISSLPGAYGIGSFGQSAYDFVDFLVRTKQRYWQILPLGATSYGDSPYQSFSAFAGNTHFIDLDILVEQGLLEASDLEGVDFGSDASEVDYAKIYYARRPLLEKAVKRFFEVGDVKDFEKFAQDNQSWLELFAEYMAIKEHFDNLAWTEWPDADARARKASALESYREQLADKLVYHRVTQYFFFQQWLKLKAYANDNHIEIVGDMPIYVAEDSSDMWANPHLFKTDVNGKATCIAGCPPDEFSVTGQLWGNPIYDWEAMDKDGYKWWIERLRESFKIYDIVRIDHFRGFESYWEIPAGSDTAAPGEWVKGPGYKLFAAVKEELGELNIIAEDLGFMTDEVIELRERTGFPGMKILQFAFNPEDESIDSPHLAPANSVMYTGTHDNNTVLGWYRNEIDDATREYMARYTNRKEYETVVHAMLRTVFSSVSFMAIATMQDLLELDEAARMNFPSTLGGNWSWRMTEDQLTPAVEEGLLDLTTIYRRINENLVDLKK

SEQ ID NO: 4229 - protein, 423 aa, Streptococcus pneumoniae
MSSKFMKSTAVLGTVTLASLLLVACGSKTADKPADSGSSEVKELTVYVDEGYKSYIEEVAKAYEKEAGVKVTLKTGDALGGLDKLSLDNQSGNVPDVMMAPYDRVGSLGSDGQLSEVKLSDGAKTDDTTKSLVTAANGKVYGAPAVIESLVMYYNKDLVKDAPKTFADLENLAKDSKYAFAGEDGKTTAFLADWTNFYYTYGLLAGNGAYVFGQNGKDAKDIGLANDGSIVGINYAKSWYEKWPKGMQDTEGAGNLIQTQFQEGKTAAIIDGPWKAQAFKDAKVNYGVATIPTLPNGKEYAAFGGGKAWVIPQAVKNLEASQKFVDFLVATEQQKVLYDKTNEIPANTEARSYAEGKNDELTTAVIKQFKNTQPLPNISQMSAVWDPAKNMLFDAVSGQKDAKTAANDAVTLIKETIKQKFGE

SEQ ID NO: 4230 - protein, 430 aa, Streptococcus pneumoniae
MEKQQPSKAALLSIIPGLGQIYNKQKAKGFIFLGVTIVFVLYFLALATPELSNLITLGDKPGRDNSLFMLIRGAFHLIFVIVYVLFYFSNIKDAHTIAKRINNGIPVPRTLKDMIKGIYENGFPYLLIIPSYVAMTFAIIFPVIVTLMIAFTNYDFQHLPPNKLLDWVGLTNFTNIWSLSTFRSAFGSVLSWTIIWALAASTLQIVIGIFTAIIANQPFIKGKRIFGVIFLLPWAVPAFITILTFSNMFNDSVGAINTQVLPILAKFLPFLDGALIPWKTDPTWTKIALIMMQGWLGFPYIYVLTLGILQSIPNDLYEAAYIDGANAWQKFRNITFPMILAVAAPTLISQYTFNFNNFSIMYLFNGGGPGSVGGGAGSTDILISWIYRLTTGTSPQYSMAAAVTLIISIIVISISMVAFKKLHAFDMEDV

SEQ ID NO: 4231 - protein, 280 aa, Streptococcus pneumoniae
MNNSIKLKRRLTQSLTYLYLIGLSIVIIYPLLITIMSAFKAGNVSAFKLDTNIDLNFDNFKGLFTETLYGTWYLNTLIIALITMAVQTSIIVLAGYAYSRYNFLARKQSLVFFLIIQMVPTMAALTAFFVMALMLNALNHNWFLIFLYVGGGIPMNAWLMKGYFDTVPMSLDESAKLDGAGHFRRFWQIVLPLVRPMVAVQALWAFMGPFGDYILSSFLLREKEYFTVAVGLQTFVNNAKNLKIAYFSAGAILIALPLCILFFFLQKNFVSGLTSGGDKG

SEQ ID NO: 4232 - protein, 266 aa, Streptococcus pneumoniae
MLPYPFSFFSSIWGFRKPLSKRFELNWFQLLFTSIFLISLSMVPIAIQNSSQETYPLETFIDNVYEPLTDKVVQDLSEHATIVDGTLTYTGTVSQASSIVIGPSQIKELPKDLQLHFDTNELVISKESKELTRISYRAIQTESFKSKDSLTQAISKDWYQQNRVYISLFLVLGASFLFGLNFFIVSLGASLLLYITKKSRLFSFRTFKECYHFILNCLGLPTLITLILGLFGQNMTTLITVQNILFVLYLVTIFYKTHFRDPNYHK

SEQ ID NO: 4233 - protein, 328 aa, Streptococcus pneumoniae
MPVTIKDVAKAAGVSPSTVTRVIQNKSTISDETKKRVRKAMKELNYHPNLNARSLVSSYTQVIGLVLPDDSDAFYQNPFFPSVLRGISQVASENHYAIQIATGKDEKERLNAISQMVYGKRVDGLIFLYAQEEDPLVKLVAEEQFPFLILGKSLSPFIPLVDNDNVQAGFDATEYFIKKGCKRIAFIGGSKKLFVTKDRLTGYEQALKHYKLTTDNNRIYFADEFLEEKGYKFSKRLFKHDPQIDAIITTDSLLAEGVCNYIAKHQLDVPVLSFDSVNPKLNLAAYVDINSLELGRVSLETILQIINDNKNNKQICYRQLIAHKIIEK

SEQ ID NO: 4234 - protein, 113 aa, Streptococcus pneumoniae
LKKLDTMRFIVGRFTSFSTEIESFPKIFLYSMKIKVQTRKLAAGCSKHCFEVVDRTDEVSSKHGFEVVDETDEVSSKHGFEVADETDEVSSKHGFEVADRTDEVSNIYTVRRR

SEQ ID NO: 4235 - protein, 126 aa, Streptococcus pneumoniae
LIVFENLFKPRQRRLTVYMLLTSSVLSATSKPCFELTSSVSSATSKPCFELTSSVSSTTSKPCFELTSSVLSTTSKQCFEQPAASFLVCTLIFIEYKKILGKDSISVEKEVNLPTIKRIVSSFFNT

SEQ ID NO: 4236 - protein, 313 aa, Streptococcus pneumoniae
MKQTKRIKRWRYYLRRFAYQIKILRVLQSISREKYDEKISASLVYGFLSAVAVNFFFQPGHVYSSGATGLAQIISALSNHWFGFHIPISLTFYAINFPLMVLAWYQIGHKFTVFTFITVSMSSFFIQFVPVATLTEDPIINALFGGVVMGLGIGFALRNNISSGGTDIVSLTIRKKTGKNVGSISFLVNGTIMLIAGLTFGWKYALYSMITIFVSSRVTDAVFTKQKRMQAMIVTNHPEKVIEKIHKKLHRGATMIHDAEGTYNHERKAVLITVITRAEFNEFKQIMTQVDPSSFVSVSENVHILGRFVEIDN

SEQ ID NO: 4237 - protein, 587 aa, Streptococcus pneumoniae
MKRSMYAGRVREEHIGQEITLKGWVGRRRDLGGLIFIDLRDREGIMQLVINPEKVSAEVMATAESLRSEFVIEVTGQVAAREQANDKLPTGAVELNVTALIVLNTAKTTPFEIKDGIEANDDTRLRYRYLDLRRPEMLENLKLRAKVTHSIRNYLDELEFIDVETPFLSKSTPEGARDYLVPSRVNKGHFYALPQSPQITKQLLMNAGFDRYYQIVKCFRDEDLRGDRQPEFTQVDLETSFLTEQEIQDITEGLIARVMKETKGIEVTLPFPRMKYDDAMALYGSDKPDTRFDMLLQDLTEVVKGVDFKVFSEAPAVKAIVVKEAADNYSRKDIDKMTEVAKQYGAKGLAWVKVVDGELNGPVAKFLTGIQEELTTALALEDKDLVLFVADTLEVANATLGALRGRIAKELGLIDNDKFNFLWVVDWPMFEWSEEEGRYMSAHHPFTLPQEETVHELEGDLAKVRAIAYDIVLNGYELGGGSLRINQKDLQERMFKALGFSTEEANDQFGFLLEAMDYGFPPHGGLAIGLDRFVMLLAGEENIREVIAFPKNNKATDPMTQAPSTVALKQLEELSLQVEEDETNKTN

SEQ ID NO: 4238 - protein, 143 aa, Streptococcus pneumoniae
LLTRSDLTSHLNNKFATKAFSCCHNLCRYFFRVDNQLHDSFTVTKIDKDQTTKVTTTANPSFQGYFLSDVFLTNTTSIHTTFHYFSPLLFCYYFTIKAQALHENHQKSLPVFKSQVKALKISANTLRKSLQTTSASPYRRYCY

SEQ ID NO: 4239 - protein, 63 aa, Streptococcus pneumoniae
MKIKVQTRKLAAGCSKHCFEVVDRTDEVSSKHGFEVVDETDEVSNNTYGKATLTWFEEIFEEY

SEQ ID NO: 4240 - protein, 76 aa, Streptococcus pneumoniae
MKRVILLAVIQAVVLFFIIGALAYAFKGDFFYNYLAVVFAPIAGVLRFGTAYITEIVLPRKAAEIAEKRKAGKNSK

SEQ ID NO: 4241 - protein, 213 aa, Streptococcus pneumoniae
MKLLKNLGWFLLALLSFFFIYGFIQGLATASLALGASPYAVTLLYVVLAGVYVYGIYKWYQKAPVHIEKSGFNRFIWLPALVWFLSLVVQFFLPDDPSVNQQIATDLTLSQPLFSFFAVVIFAPLTEEIVFRGMLARYLFPKQDNSKRTLIFLLVSSLLFALIHFPGDVQQFFVYFSLGFSLGLAYISRKGLVYSISLHALNNLVGFLMILML

SEQ ID NO: 4242 - protein, 246 aa, Streptococcus pneumoniae
MNMKKKRRLLFLMSIVLGGFLGMFVGMFKARVESHEIILDVKALMPWISAICLLIGFISMFLTFNFLKKSRKFHSLYQEEMDDDLNETYYVQMYRNLEFGTIAFNITGVAIPLAIFISLSEVIILHTNPQTFFLSFLLFVVFLVAQKSLFKTIAIVRQFDLEFFATPKDVLNYINSYDEGERQANLEQSFRILFQLHQYVLPALYIFLIIISFLTGEIQLLAFLLVGAIHVYINVMQLPMVKRYFK

SEQ ID NO: 4243 - protein, 66 aa, Streptococcus pneumoniae
VMNKYKVIYYVVVIALLVSVFLLIGMDLSWFNPYQSDQFVWVYFALIPVIEWIEKKSKNLASEKGE

SEQ ID NO: 4244 - protein, 154 aa, Streptococcus pneumoniae
MIDKVVRNLLLTFFFCKMTKIINFLTTILVKKKKMCYNVSKLREKKKGAMMWVLGFILFLIFFYSNDSKKIKKLEKKIKRLERKEKGNAEMSRLLQEMIGKEPIITGVYIGPDNWEVVDVDEEWVKLRRVDNTGKEKFKLQRIEDIQTVEFDGE

SEQ ID NO: 4245 - protein, 61 aa, Streptococcus pneumoniae
SGQELTPDLFLLQNDKNHKLFDNYTCQKEKDVLQCKQVKRKEERSYDVGTRVYTISDFLLF

SEQ ID NO: 4246 - protein, 63 aa, Streptococcus pneumoniae
MKIKEQTRKLAAGCSKHCFEVVDRTDEVSSKHGFEVVDETDEVSNHTYGKVKLTWFEDILEEY

SEQ ID NO: 4247 - protein, 62 aa, Streptococcus pneumoniae
VWLLTSSVSSTTSKPCFELTSSVLSTTSKQCFEQPAASFLVCSLIFIEYKILVFQRFLRSFG

SEQ ID NO: 4248 - protein, 429 aa, Streptococcus pneumoniae
MKLQKPKGTQDILPAESAKWQYVEGFAREIFKRYNYAEVRTPIFEHYEVISRSVGDTTDIVTKEMYDFYDKGDRHITLRPEGTAPVVRSYVENKLFAPEVQKPSKFYYMGPMFRYERPQAGRLRQFHQIGVECFGSSNPATDVETISMAAYFLKEIGIQGVKLHLNTLGNPESRAAYRQALIDYLTPLKETLSKDSQRRLEENPLRVLDSKEKEDKVAVENAPSILDFLDEESQTHFDAVRQMLENLGVDYIIDTNMVRGLDYYNHTIFEFITEIEGNDLTVCAGGRYDGLVAYFGGPETAGFGFGLGVERLLLILEKQGVALPIENALDVYIAVLGDGANVKALELVQALRQQGFKAERDYLNRKLKAQFKSADVFAAKTLITLGESEVESGQVTVKNNQTREEVQVSLETISQNFSEIFEKLGFYTQ

SEQ ID NO: 4249 - protein, 306 aa, Streptococcus pneumoniae
LFFKDEKQALYTKPKTKSSSFRASKVSNQTIVATTRTDCQVIALNLCDKLENGVVVVVQTTHHIGIDDVIYSKIFQHLTHSIKMSLAFFIKKVQDRRRILYCHLVFFFLRVQDTKRIFLQATLAILRQGLLERCQIVNQGLAVGCTALRISKSVEVQFDTLNTDFLQKIGCHRDCFHIGSWIARAKTLNTNLVELAQAPCLWTLITEHRSHIVELAWLLHFWGEEFIFHIGTDNGRSSFWTEGNMTVTLVIKIVHFLGYDIRCISDRATDNLVMLKNRRAHFCIVIALENLTGKALNILPLSRFSR

SEQ ID NO: 4250 - protein, 415 aa, Streptococcus pneumoniae
MKLLFRNPAYRILTLSRFFNAFGASIFNLVFIVYASTLSQASFAVAMANIVMLLPTLFTVFAGIRADYTRAKVKWMVYSGLFQAVLFFLAALVVQQASLFAFSSLCLINVISDIISDFAGGLRMPLIKEKVAEDDLMEAYSFSQFITYISAIGGQAFGVWLLALSVNNFSLVAGINACFFLVSATILFLGKSKLSLSMSSADGEKLKNEKLSIKDQFLTIYRNLRLVFLKSGQKNFGFMLCAVLLVNALGGALGGIYNIFFLSHSLLNFSYTEALFINQVCVLLAIIISSLTGNDYFGKQSLPRLMMWETVGLSLVGLANLFNQVVLGLLFLFFTLYVSGKVQPKISAMLMKNLAPEVLARTSNFLGLLFTLSIPVGTACFSLVAVWNIQLTWMLFVGLSLLAIFLTILNLKNDI

SEQ ID NO: 4251 - protein, 132 aa, Streptococcus pneumoniae
LSVKNLPMPIILNVLSKSISTRKMRPISELFICGQKVSLIASKVESRKARKRWRMLSVFLRCLAVINLPNTIEIRPNVEYLQTKKKFEAIELLPSLRSLQKFYRFFAHFICCIYSKESFRKFISAILKLFLM

SEQ ID NO: 4252 - protein, 283 aa, Streptococcus pneumoniae
MEQIGKVFRQLRESRNISLRQATGGQFSPSMLSRFETGQSELSVEKFLFALENISASVEEILFLARGFQYDTDSELRKEITDVLEPKNIAPLEDLYRREYQKHAHSHNKQKHILNAIIIKSYMKSIDERVELTAEEGKVLHDYLFSTEIWGIYELNLFSVSSPFLSVSLFTRYVREMVRKSDFLMEMSGNRNLFHTILLNGFLASIECEEFTNAYYFKRVIEEHFYKENETYFRIVYLWAEGLLDSKQGRVKEGQKKMEDAVRIFEMLGCNKSAEYYRNTTEC

SEQ ID NO: 4253 - protein, 113 aa, Streptococcus pneumoniae
MRDDIKINDRALALQDQIIEKLEKVFDTDVELDVYNLGLIYEINLDETGLCKIVMTFTDTACDCAESLPIEIVAGLKQIEGIKDIKVEVTWSPAWKITRISRYGRIALGLPPR

SEQ ID NO: 4254 - protein, 567 aa, Streptococcus pneumoniae
MTELDKRHRSSIYDSMVKSPNRAMLRATGMTDKDFETSIVGVISTWAENTPCNIHLHDFGKLAKEGVKSAGAWPVQFGTITVADGIAMGTPGMRFSLTSRDIIADSIEAAMSGHNVDAFVAIGGCDKNMPGSMIAIANMDIPAIFAYGGTIAPGNLDGKDIDLVSVFEGIGKWNHGDMTAEDVKRLECNACPGPGGCGGMYTANTMATAIEVLGMSLPGSSSHPAESADKKEDIEAAGRAVVKMLELGLKPSDILTREAFEDAITVTMALGGSTNATLHLLAIAHAANVDLSLEDFNTIQERVPHLADLKPSGQYVFQDLYEVGGVPAVMKYLLANGFLHGDRITCTGKTVAENLADFADLTPGQKVIMPLENPKRADGPLIILNGNLAPDGAVAKVSGVKVRRHVGPAKVFDSEEDAIQAVLTDEIVDGDVVVVRFVGPKGGPGMPEMLSLSSMIVGKGQGDKVALLTDGRFSGGTYGLVVGHIAPEAQDGGPIAYLRTGDIVTVDQDTKEISMAVSEEELEKRKAETTLPPLYSRGVLGKYAHIVSSASRGAVTDFWNMDKSGKK

SEQ ID NO: 4255 - protein, 310 aa, Streptococcus pneumoniae
MMRSTKELRHVYRDFLLEANQSYSDIVVLEADLSSSMATHNLEKDFGDRYVNVGIMEAEMVGLAAGLSIQGFRPYLHTFGPFASRRVFDQLFISLGYAQLDATVIGSDAGVTAEMNGGTHMPFEEIGLLRLIPKSIIFEATDDIQFREILNQTLDLKGLKYIRTIRKAPVPVYQGGEDFSKGYIELRHGEDLVIVASGIMVAPSIRVADELSKLGYSVSVIDLFRIKPIPEQIKTMLSGKTIFTVENHNQIGGIGSALCELFSDDGITKIHRMGVQERFGQVGKMDYLLNEYGLSESNIKEKVLEIYNAR

SEQ ID NO: 4256 - protein, 285 aa, Streptococcus pneumoniae
MILSKNREDGLRKFATNIRLNTLRTLNHLGFGHYGGSLSIVEVLAVLYGEIMPMTPEIFAARDRDYFILSKGHGGPALYSTLYLNGFFDKEFLYSLNTNGTKLPSHPDRNLTPGIDMTTGSLGQGISVATGLAYGQRIRKSPFYTYAIVGDGELNEGQCWEAIQFASHQQLSNLIVFVDDNKKQLDGFTKDICNPGDFVEKFSAFGFESIRVKGSDIREIYEGIVQLKQSHNSSPKCIVLDTIKGQGVQELEEMKSNHHLRPTVEERQMLTSVVERLSQELEETE

SEQ ID NO: 4257 - protein, 448 aa, Streptococcus pneumoniae
MMKFILDIVSTPAILVALIAILGLVLQKKKLPDIIKGGIKTFVGFLVVSGGAGIVQNSLNPFGTMFEHAFHLSGVVPNNEAIVAVALTTYGSATAMIMFAGMVFNILIARFTRFKYIFLTGHHTLYMACMIAVILSVAGFTSLPLILLGGLALGIIMSISPAFVQKYMVQLTGNDKVALGHFSSLGYWLSGFTGSLIGDKSKSTEDIKFPKSLAFLRDSTVSITLSMAVIYIIVAIFAGSEYIEKEISSGTSGLVYALQLAGQFAAGVFVILAGVRLILGEIVPAFKGISERLVPNSKPALDCPIVYTYAPNAVLIGFISSFIGGLVSMAIMIASGTVVILPGVVPHFFCGATAGVIGNASGGVRGATIGAFLQGILISFLPVFLMPVLGGLGFQGSTFSDADFGLSGIILGMLNQFGSQAGIVIGLVLILAVMFGVSFIKKPSAKEE

SEQ ID NO: 4258 - protein, 94 aa, Streptococcus pneumoniae
MLKIGTACGSGLGSSFMVQMNIESVLSDLNVSDVEVEHYDLGGADPNAADIWIVGRDLADSASHLGDVRILNSIIDMDELRELITKICEEKGLI

SEQ ID NO: 4259 - protein, 676 aa, Streptococcus pneumoniae
MFDYRALVILMTLMDHCELSLYELSVKVSLPIKEVKEGIDYLVPYLANKGIVLDKKQGRYSLSNRTKQSLTDIIKSDELVLPKSTRLALIYLYTFCRLDFISNNHYQDFLKVSKNTTLSDIQSLRKIMLDNDLELGYSRAKGYTLHGSEWNKHRLAFQMVSELLESSIGIWGLDYVLSSWGYSLTYDLIDQVVKDYYEKLQLVPIVNQLKVYLFGLVFILCRYQRDVERVCLSETLVSPVIQDITTILLDTVVDLGIIDTVFSEDDYRYITVLLSSCFEGEVDVAPVYFNQLTEAIISRMEDISLLHFKQREGLRENLRRHLIPAYYRLKFGLPSSNEYVLHVKEHYPDLFELVKDSLMPLMDAIDNPIPDSETAYFVIHFGGYLKKADTLPQKWYKAAIICPNGVSSSLMLKENLLALFPQIEFIGTSKIDDLQVKASSDYDMVFSTIKVETEKPNYLVSVMMTEEQAIQLVELVLKDFPNLEYGDFEIEQILNIVKRYGIITQELELRLALKNYLYQKNDRKEIVPVLEQLITKETYQVSSQKLGWKEAIRLAAKPLLDQDKITENYPEAMIQKVEEFGPFINLGKGVAIPHARPDEGVNEIGMSMLVLEEPIYLLDNPEQEVRLLICIAAIDNESHLKALSHLTTILRDKNHVQTLISSKNYDDIKMIIKQED

SEQ ID NO: 4260 - protein, 335 aa, Streptococcus pneumoniae
MTEKLINSKPNGVFALILIELTIVLGVFIFIMGVGSENIFGIIIGPLLIVIAALTHAGLKVVKPQEALVLTLFGNYTGTIKEPGFYFVNPFSVAVNPANHTRLGQSGDVSTKSPFLGAKSSNDNDVNLEIGKKHISLKVMTLSNSRQKINDCLGNPVEIGIAVTWRVVDTAKAVFNVDNYKEYLSLQCDSALRNIVRIYPYDVSPNVDTTGERQADERSLRGSSEIVANRIREEIQSRVEDAGLEILEARITYLAYAPEIAAVMLQRQQASAIIDARKMIVDGAVGMVEMALERLNEGELVELDEERKAAMVSNLLVVLCGNHDAQPIVNTGSLY

SEQ ID NO: 4261 - protein, 66 aa, Streptococcus pneumoniae
MAEAKKKQIPLRLSTKLYAALASWAEDDFRSVNGQIEYLLTECVKQRKKDGKYVSETIDEPFEIDI

SEQ ID NO: 4262 - protein, 60 aa, Streptococcus pneumoniae
MAVPARRTSKAKKNKRRTHYKVTAPSVNFDETTGDYSRSHRVSLKGYYKGRKITKAASAE

SEQ ID NO: 4263 - protein, 641 aa, Streptococcus pneumoniae
MKKTTILSLTTAAVILAAYVPNEPILADTPSSEVIKETKVGSIIQQNNIKYKVLTVEGNIRTVQVGNGVTPVEFEAGQDGKPFTIPTKITVGDKVFTVTEVASQAFSYYPDETGRIVYYPSSITIPSSIKKIQKKGFHGSKAKTIIFDKGSQLEKIEDRAFDFSELEEIELPASLEYIGTSAFSFSQKLKKLTFSSSSKLELISHEAFANLSNLEKLTLPKSVKTLGSNLFRLTTSLKHVDVEEGNESFASVDGVLFSKDKTQLIYYPSQKNDESYKTPKETKELASYSFNKNSYLKKLELNEGLEKIGTFAFADAIKLEEISLPNSLETIERLAFYGNLELKELILPDNVKNFGKHVMNGLPKLKSLTIGNNINSLPSFFLSGVLDSLKEIHIKNKSTEFSVKKDTFAIPETVKFYVTSEHIKDVLKSNLSTSNDIIVEKVDNIKQETDVAKPKKNSNQGVVGWVKDKGLWYYLNESGSMATGWVKDKGLWYYLNESGSMATGWVKDKGLWYYLNESGSMATGWVKDKGLWYYLNESGSMATGWVKDKGLWYYLNESGSMATGWVKDKGLWYYLNESGSMATGWVKDKGLWYYLNESGSMATGWFTVSGKWYYTYNSGDLLVNTTTPDGYRVNANGEWVG

SEQ ID NO: 4264 - protein, 75 aa, Streptococcus pneumoniae
VLSFENKTPSTEANDSFPSSTSTCFKLVVSLNRLLPNVLTDFGNVSFSKFDKLAKASCDINSNFELEEKVSFFNF

SEQ ID NO: 4265 - protein, 191 aa, Streptococcus pneumoniae
MDLKFEGVDLEYKKAKNNLPESFWETYSAFANTNGGKIILGIDEKNIDTYQRVNRLPAKQNYEASKQLTDARFKRLVGVQRTTFEEMLAVLKTAYQLKHAKGGRKPKLSLEDLLMATLQYVREYRTYEEIAADFGIHESNLIRRSQWVEVTLVQSGVTISRTLLSSEDTVMIDATEVKINRPKKTISESFW

SEQ ID NO: 4266 - protein, 125 aa, Streptococcus pneumoniae
KSIALKKQLANHSGKKKFHAMKAQAIVTSQGRIVSLDITVNYCHDMKLFKMSCRNIGQAGKILADSGYQGLMKIYPQAQTPRKSSKLKPLTAEDKAYNHALSKERSKVENIFAKVKTFKMFSTTY

SEQ ID NO: 4267 - protein, 108 aa, Streptococcus pneumoniae
VILWSFDFVNAHAHAFFMDNVEWSHADSYFLSFVSDDVEERYTENVYLDSLSVKQKFKFLFDFGDEWRFECQVLREIETEDEEAYLVRSVGTSPEQYPDYDGFDYEEW

SEQ ID NO: 4268 - protein, 626 aa, Streptococcus pneumoniae
MVRFTGLSPKQTQAIEVLKGHISLPDVEVAVTQSDQASISIEGEEGHYQLTYRKPHQLYRALSLLVTVLAEADKVEIEEQAAYEDLAYMVDCSRNAVLNVASAKQMIEILALMGYSTFELYMEDTYQIEGQPYFGYFRGAYSAEELQEIEAYVQQFDMTFVPCIQTLAHLSAFVKWGVKEVQELRDVEDILLIGEEKVYDLIDGMFATLSKLKTRKVNIGMDEAHLVGLGRYLILNGVVDRSLLMCQHLERVLDIADKYGFHCQMWSDMFFKLMSADGQYDRDVEIPEETRVYLDRLKDRVTLVYWDYYRDSEEKYNRNFRNHHKISHDLAFAGGAWKWIGFTPHNHFSRLVAIEANKACRANQIKEVIVTGWGDNGGETAQFSILSSLQIWAELSYRNDLDSLSAHFKTNTGLTVEDFMQIDLANLLPDLPGNLSGINPNRYVFYQDVLCPILDRHMTPEQDKPHFAQAAETLANIKEKAGNYAYLFETQAQLNAILSSKVDVGRRIRQAYQEDDKESLQQIARQELPELRSQIEDFHALFSHQWLKENKVFGLDTVDIRMGGLLQRIKRAESRIEVYLAGQLDRIDELEVEILPFTDFYADKDFAATTANQWHTIATASTIYTT

SEQ ID NO: 4269 - protein, 289 aa, Streptococcus pneumoniae
MTIATIDIGGTGIKFASLTPDGKILYKTSISTPENLEDLLAWLDQRLSEQDYSGIAMSVPGAVNQETGVIDGFSAVPYIHGFSWYEALSSYQLPVHLENDANCVGLSELLAHPDLENAACVVIGTGIGGAMIINGRLHRGRHGLGGEFGYMTTLAPAEKLNNWSQLASTGNMVRYVIEKSGHTDWDGRKIYQEAAAGNALCQEAIERMNRNLAQGLLNIQYLIDPDVISLGGSISQNPDFIQDVKKAVDNFVDTYEEYTVAPVIQTCTYHADANLYGALVNWLQEEKQW

SEQ ID NO: 4270 - protein, 886 aa, Streptococcus pneumoniae
MRFYFMENVVVHIISHSHWDREWYLPFESHRMQLVELFDNLFDLFENDPEFKSFHLDGQTIVLDDYLQIRPENRDKVQRYIDEGKLKIGPFYILQDDYLISSEANVRNTLIGQQEAAKWGKSTQIGYFPDTFGNMGQAPQILQKSGIHVAAFGRGVKPIGFDNQVLEDERFTSQFSEMYWQGVDGSRVLGILFANWYSNGNEIPVDKDEALIFWKQKLSDVRAYASTNQWLMMNGCDHQPVQKNLSEAIRVANELFPDVIFVHSSFDEYVQAVEGALPEHLSTVTGELTSQETDGWYTLANTSSSRIYLKQAFQENSNLLEQVVEPLTIITGGHNHKDQLTYAWKTLLQNAPHDSICGCSVDEVHREMETRFAKVNQVGNFVKSNLLNEWKGKIATDKAQSDYLFTVINTGLHDKVDTVSTVIDVATCDFKELHPTEGYKKMAALILPSYRVEDLDGRPVEATIEDLGANFEYDLPKDKFRQARIARQVRVTIPVHLAPLSWTTFQLLEGKQEHREGIYQNGVIDTPFVTVSVDDNITVYDKTTHEAYEDFIRFEDRGDIGNEYIYFQPKGTEPIFAELKGHEVLENTACYAKILLKHELTVPVSADEKLEEEQQGIIEFMKREAGRSEELTNIPLETELTVFVDNPQIRFKTRFTNTAKDHRIRLLVKTHNTRPSNDSESIYEVVTRPNKPAASWENPENPQHQQAFVSLYDDEKGVTVSNKGLNEYEILGDNTIAVTILRASGELGDWGYFPTPEAQCLREFEVEFALECHQAQERFSAYRRAKALQTPFTSLQLARQEGSVVATGSLLSHSVLSIPQVCPTAFKVAENEEGYVLRYYNMSQENVRISEHQQTILDLLERPYPVHSGLLAPQEIRTEFIKKEEI

SEQ ID NO: 4271 - protein, 434 aa, Streptococcus pneumoniae
LFERGNCTMIYSKEIVREWLDEVAERAKDHPEWVDVFERCYTDTLDNTVEILEDGSTFVLTGDIPAMWLRDSTAQLRPYLHVAKRDALLRQTIAGLVKRQMTLVLKDPYANSFNIEENWKGHHETDHTDLNGWIWERKYEVDSLCYPLQLAYLLWKETGETSQFDEIFVVATKEILHLWTVEQDHKNSPYRFVRDTDRKEDTLVNDGFGPDFAVTGMTWSAFRPSDDCCQYSYLIPSNMFAVVVLGYVQEIFAALNLADSQSVIADAKRLQDEIQEGIENYAYTTNSKGEKIYAFEVDGLGNASIMDDPNVPSLLAAPYLGYCSIDDEVYQATRRTILSSENSYFYQGEYASGLGSSHTFYRYIWPIALSIQGLTTRDKAEKKFLLDQLVACDGGTGVMHESFHVDDPTLYSREWFSWANMMFCELVLDYLDIR

SEQ ID NO: 4272 - protein, 694 aa, Streptococcus pneumoniae
MKPLLETIDTRFGTTNKHAFSRGNTLPYTGVPFGMNYFVPQTSDQDGAWFFDPHLPIFQGIRLTHQPSPWIGDYSWLLLTPVTSQLGEDSLFHRQSSYNRDKASFQPHYLKIFSLRYQIETQLTPTCYGASIRLKQKQGKALSLYLHATDELTVEQVDKRTLALRQEGKTETNKNSLTMFTALQMNTDILAISQEAGDWRIDLVSSQTEMQLATSFISPSQALINLPQEDFDSCKASAQADWENLLHRFDVIETGEANRTFFDHCLYRLFLFPQTFYEVDESGQAIHMDLATGTVKPGVLFSNNGFWDTFRTTFPLFALIIPEHYQRFLEGFLNSYRDTGFLPKWLAPDERGMMPGTLLDGIIADSACKDMAPDLEGELFQAMLETASKADPLGINGRHGLAQYQELGYLSTDHHESVSHTLDYAYSDFCIASCAKKLENIEIAETYKAASQNYRQLFDAETGYMRARDNQGNFHPDFSPYSWGRDYAECSAIQATLGVLHDIPGLIQLMGGKETFSNYLLKACQDAPLFETTGYGYEIHEMSEMATAPFGQIAISNQPSFHIPYLFRYSDYPDYTALLIKTLRQKAFHPSWEAYPGDEDNGSLSAWYIWSALGFYPTCPGKPSYDLGIPLFDHLRVYLAKEDKWLDIHTKQNHNHFNFVKECRLDKTLVSTIQHQDLLKAEQLTFTLSWLPSH

SEQ ID NO: 4273 - protein, 559 aa, Streptococcus pneumoniae
MKKIKPHGPLPSQTQLAYLGDELAAFIHFGPNTFYDQEWGTGQEDPERFNPSQLDAREWVRVLKETGFKKLILVVKHHDGFVLYPTAHTDYSVKVSPWRRGKGDLLLEVSQAATEFDMDMGVYLSPWDAHSPLYHVDREADYNAYYLAQLKEILSNPNYGNAGKFAEVWMDGARGEGAQKVNYEFEKWFETIRDLQGACLIFSTEGTSIRWIGNERGYAGDPLWQKVNPDKLGTEAELNYLQHGDPSGTIFSIGEADVSIRPGWFYHEDQDPKSLEELVEIYFHSVGRGTPLLLNIPPNQAGLFDAKDIERLYEFATYRNELYKEDLALGAEVSGPALSADFACRHLTDGLETSSWANDAALPIQLELDLGSPKTFDVIELREDLKLGQRIAAFHVQVEVDGVWQEFGSGHTVGYKRLLRGAVVEAQKIRVVITESQVLPLLTKISLYKTPRLSQTVAVQGLAFAEKSLAVAKGETLHFRIERSESSSSLEAKISIQPGTGVHGVAYQDEIQVLQFQAGESKKDLHLPTLYFAGDKTLDFYLNLTVDGQLVDQLQVQVS

SEQ ID NO: 4274 - protein, 409 aa, Streptococcus pneumoniae
MSSHPIQVFSEIGKLKKVMLHRPGKELENLLPDYLERLLFDDIPFLEDAQKEHDAFAQALRDEGIEVLYLEQLAAESLTSPEIRDQFIEEYLDEANIRDRQTKVAIRELLHGIKDNQELVEKTMAGIQKVELPEIPDEAKDLTDLVESEYPFAIDPMPNLYFTRDPFATIGNAVSLNHMFADTRNRETLYGKYIFKYHPIYGGKVDLVYNREEDTRIEGGDELILSKDVLAVGISQRTDAASIEKLLVNIFKKNVGFKKVLAFEFANNRKFMHLDTVFTMVDYDKFTIHPEIEGDLHVYSVTYENEKLKIVEEKGDLAELLAQNLGVEKVHLIRCGGGNIVAAAREQWNDGSNTLTIAPGVVVVYDRNTVTNKILEEYGLRLIKIRGSELVRGRGGPRCMSMPFEREEV

SEQ ID NO: 4275 - protein, 338 aa, Streptococcus pneumoniae
MTNSVFQGRSFLAEKDFTRAELEYLIGLSAHLKDLKKRNIQHHYLAGKNIALLFEKTSTRTRAAFTTAAIDLGAHPEYLGANDIQLGKKESTEDTAKVLGRMFDGIEFRGFSQRMVEELAEFSGVPVWNGLTDEWHPTQMLADYLTVQENFGRLEGLTLVYCGDGRNNVANSLLVTGAILGVNVHIFSPKELFPEKEIVELAEGFAKESGAHVLITEDADEAVKDADVLYTDVWVSMGEEDKFAERVALLKPYQVNMDLVKKAGNENLIFLHCLPAFHDTHTVYGKDVAEKFGVEEMEVTDEVFRSKYARHFDQAENRMHTIKAVMAATLGNLYIPKV

SEQ ID NO: 4276 - protein, 315 aa, Streptococcus pneumoniae
MANRKIVVALGGNAILSSDPSAKAQQEALVETAKHLVKLIKNGDDLIITHGNGPQVGNLLLQHLASDSEKNPAFPLDSLVAMTEGSIGFWLKNALQNALLDEGIEKNVASVVTQVIVDKNDPAFVNLSKPIGPFYSEEEAKAEAEKSGATFKEDAGRGWRKVVASPKPVDIKEIETIRTLLNNGQVVVAAGGGGIPVVKENNGHLTGVEAVIDKDFASQRLAELVDADLFIVLTGVDYVFVNYNKPNQEKLEHVNVAQLEEYIKQDQFAPGSMLPKVEAAIAFVNGRPEGKAVITSLENLGALIESESGTIIEKG

SEQ ID NO: 4277 - protein, 503 aa, Streptococcus pneumoniae
MSEKAKKGFKMPSSYTVLLIIIAIMAVLTWFIPAGAFIEGIYETQPQNPQGIWDVLMAPIRAMLGTHPEEGSLIKETSAAIDVAFFILMVGGFLGIVNKTGALDVGIASIVKKYKGREKMLILVLMPLFALGGTTYGMGEETMAFYPLLVPVMMAVGFDSLTGVAIILLGSQIGCLASTLNPFATGIASATAGVGTGDGIVLRLIFWVTLTALSTWFVYRYADKIQKDPTKSLVYSTRKEDLKHFNVEESSSVESTLSSKQKSVLFLFVLTFILMVLSFIPWTDLGVTIFDDFNAWLTGLPVIGNIVGSSTSALGTWYFPEGAMLFAFMGILIGVIYGLKEDKIISSFMNGAADLLSVALIVAIARGIQVIMNDGMITDTILNWGKEGLSGLSSQVFIVVTYIFYLPMSFLIPSSSGLASATMGIMAPLGEFVNVRPSLIITAYQSASGVLNLIAPTSGIVMGALALGRINIGTWWKFMGKLVVAIIVVTIALLLLGTFLPFL

SEQ ID NO: 4278 - protein, 443 aa, Streptococcus pneumoniae
MKIDITNQVKDEFLISLKTLISYPSVLNEGENGTPFGQAIQDVLEKTLEICRDIGFTTYLDPKGYYGYAEIGQGAELLAILCHLDVVPSGDEADWQTPPFEATIKDGWVFGRGVQDDKGPSLAALYAVKSLLDQGIQFKKRVRFIFGTDEETLWRCMARYNTIEEQASMGFAPDSSFPLTYAEKGLLQVKLHGPGSDQLELEVGGAFNVVPDKANYQGPLYEQVCNDLKEAGYDYQSTEQTVTVLGVPKHAKDASQGINAVIRLATILAPLQEHPALSFLATQAGQDGTGRQIFGDIADEPSGHLSFNVAGLMINHERSEIRIDIRTPVLADKEELVKLLTRCAQNYQLRYEEFDYLAPLYVAKDSKLVSTLMQIYQEKTGDNSPAISSGGATFARTMPNCVAFGALFPGAKQTEHQANECAVLEDLYRAMDIYAEAVYRLAT

SEQ ID NO: 4279 - protein, 63 aa, Streptococcus pneumoniae
FQHTIKSGNTTAKKFEFIEIPVQKLKKAIYKAHLKDSDDFRPETSTPNLFESCLKLCPCFLSS

SEQ ID NO: 4280 - protein, 78 aa, Streptococcus pneumoniae
YKNQAEEDKPLSDKYIFEKILGKTYAAFKKDQINERVEKLGKLKPITINYNGKSEVIDSKEKLQELMNKAVKDEVAQI

SEQ ID NO: 4281 - protein, 88 aa, Streptococcus pneumoniae
MMGDGMKEFQFERKQRFSLRPYAIGACSVLLGTSLFFAGMGAQPVQDTETSSALISSHYLDEQDLSEKLKSELQWLELENKLLNLWEH

SEQ ID NO: 4282 - protein, 51 aa, Streptococcus pneumoniae
LRLLRKTKNIDIHLTKNYCMLSPLIRNDKGITRKICEYKLFLIYKIYSNNE

SEQ ID NO: 4283 - protein, 71 aa, Streptococcus pneumoniae
TNTLRKSLQTTSASPCRISATSKQCFELTSSVLSTTSKRCFEQPVASFLVCSLIFIEYKELGNRLFLYCVY

SEQ ID NO: 4284 - protein, 54 aa, Streptococcus pneumoniae
LPSSLYSMKIKEQTRKLATGCSKHRFEVVDKTDEVSSKHCFEVADIRQGDADVV

SEQ ID NO: 4285 - protein, 299 aa, Streptococcus pneumoniae
MAIFFMIFLIVCVLLLVIVTLSTVYVVRQQSVAIIERFGKYQKVANSGIHIRLPFGIDSIAARIQLRLLQSDIVVETKTKDNVFVMMNVATQYRVNEQSVTDAYYKLIRPESQIKSYIEDALRSSVPKLTLDELFEKKDEIALEVQHQVAEEMTTYGYIIVKTLITKVEPDAEVKQSMNEINAAQRKRVAAQELAEADKIKIVTAAEAEAEKDRLHGVGIAQQRKAIVDGLAESITELKEANVGMTEEQIMSILLTNQYLDTLNTFASKGNQTIFLPNTPNGVDDIRTQILSALRAEKK

SEQ ID NO: 4286 - protein, 63 aa, Streptococcus pneumoniae
HFRKNRSKNGTAFFKCAIILEKYLWRFHYGNIFHDFSDCLCAPIGDSHTEYSLCGSSAVGGDY

SEQ ID NO: 4287 - protein, 383 aa, Streptococcus pneumoniae
MATFYVPAVNLIGKGVVNEVGPYIKELGYKKALLVTDKYIEGSDILPKVLKPLDTEGIEYVIFSDVEPNPTCKNVTDGVAALQEHGCDFIISLGGGSPQDAASCISIMATNGGKPQDYEGLHKSAKKGLPVVAINTTAGTSAEITINYVITDEERKVKMVMVDKNSLALISVNDPELMLSKPKGLTAATGMDALTHAVEALVTPGAYDVTKKLSIGAIELIKEYLPRAVENGHDIEAREGMVNAIFLGGMSFNNAGLGYVHSMAHQLGAVYNLPHGVCCAMLLPVIERENAKRVPEAFRNVAKALGLHVEGKSDQECADYAIVEIEKLSETVGIPKKLTELGIEEKDFDFEYLSKNALIDACAPGNPFMPTLEETIAFYKELF

SEQ ID NO: 4288 - protein, 588 aa, Streptococcus pneumoniae
MIQHPRIGIRPTIDGRRQGVRESLEVQTMNMAKSVADLISSTLKYPDGEPVECVISPSTIGRVPEAAASHELFKKSNVCATITVTPCWCYGSETMDMSPDIPHAIWGFNGTERPGAVYLAAVLASHTQKGIPAFGIYGRDVQEANDTAIPEDVKEKLLRYARAALATGLMRDTAYLSMGSVSMGIGGSIVNPDFFQEYLGMRNESVDMTEFTRRMDRGIYDPEEFERALKWVKENVKEGFDHNREDLVLSREEKDRQWEFVIKMFMIGRDLMVGNPRLAELGFEEEAVGHHALVAGFQGQRQWTDHFPNGDFMETFLNTQFDWNGIRKPFVFATENDSLNGVSMLFNYLLTNTPQIFADVRTYWSPEAVERVTGYTLEGRAAAGFLHLINSGSCTLDGTGQATRDGKPVMKPFWELDESEVQAMLENTDFPPANREYFRGGGFSTRFLTKGDMPVTMVRLNLLKGVGPVLQIAEGYTLELPEDVHHTLDNRTDPGWPTTWFAPRLTGKGAFKSVYDVMNNWGANHGAITYGHIGADLITLASMLRIPVNMHNVPEEDIFRPKNWSLFGTEDLESADYRACQLLGPLHK

SEQ ID NO: 4289 - protein, 242 aa, Streptococcus pneumoniae
MSQDEKLIREQICDVCHKMWQLGWVAANDGNVSVRLDEDTILATPTGISKSFITPEKLVKLNLKGEILEAEGDYCPSSEIKMHIRCYEEREDVRSVVHAHPPIATGFALAHIPLDTYSLIESAIVVGAIPITPFGVPSTMEVPEAITPYLPDHDVMLLENHGALTVGSDVITAYYRMETLELVAKTTFHGRMLLSTKGIEEQEIARPTLERLFSMRENYKVTGRHPGYRKYNGDGSIKETKK

SEQ ID NO: 4290 - protein, 1028 aa, Streptococcus pneumoniae
VFQNILQNYLLLRKLYVNNEEIKMENKKIAKQILIATAVLTSFLGSNLVYADVVQSNSNNRASTETARVTGNNLEKLITKDKEIDKEMTYLSDMDWSSATHGDIDKTKTVQKDAPFTTGNKGEHTKISLLTSDDKVKYFDKGIGTVADSPSVISYDISGQGFEKFETYIGIDQSANSSRSDHAVVDRIEIEIDGKVVYSSSVTNPEGFRYNTQAQFISVTIPQNAKKISLKSFAGEHTWGDEVVFADAKLIKTVSTQTITPDLLNKGINGGVYLSDLEWVDATHGDDDKSKTVQKDKPFTPGNNGSNNKIKLLIDGKEVEFNKGLGTVASNPSSIKYDVSGANVTRFISYVGIDRSANHLNSDYADIQKFEVVADGKVIYSSDSKYPKGIKYDISAFLVDVEIPKDTQTIELKSYSGKYTWADELVLGGALFMANGKFKNPNDWSEVDKRREINNEHPLLMMPLYANGEEFNQGKYTFWGGDTLTGKWENIPDDLKPYTVIQLHPDDLPKRDGAARDFYEHMLEEAAKYVNPKTGKNEPIPVILTVYTAGNMPYYTSAHWLSTSWIDKMYQKYPNLHGIFSTENYWIWANDIENKAADYLKVSAKNGGYFIWAEQNNGSAIEKAFGKNGKIAFQKSVDKYWKNLIFMFKNTPAAEGNDSTTESYMKGLWLSNHTYQWGGLMDTWKWYETGKWKLFASGNIGKSQGDRQWLTEPESMLGEEALGVYLNGGVVYNFEHPAYTYGVNNKESLLFSEVIKEFFRYVIAHPAPSKEKVLEDTKVFIHGDYSNKGNGKFFVNVNTDREQTPLYMTGRYNVIPAIPGVLKTDKLKESVSGSRIQIKEITSPEFSSTQARKEYLNKLYPMNYEGDIFAQKLDNRWFVYNYKVNENVKQTGKLKFNSLEMDVEFEPHTYGIFERISNGLKVNLNNFRTNKDSLWSNAQDANQAKKLPQLTKKGAIKWIEEHYIKDTQFGEKRVTKIVLRGIDKLPTIHSLSGTNNSYDQPSLNFDQKNHMVTITINSNGNLEFELHF

SEQ ID NO: 4291 - protein, 737 aa, Streptococcus pneumoniae
MTIYINKDETVFHLAMKDSSYIFRILENGELQHLHFGKRIHVKENYNQLMAYEKRGFEVSFSEEFEDIQQSMIQNEYSSYGKGDFRHPAFQVQGMNGSRITTLKYQGFELEKGKNRLNSLPSTFDDIGQCAETLTIILTDSILDLTVRLNYTIFPEYNVLVRNTEFLNNSNNKLTLLKAMSLQLDLPDSQYDFIQFSGAWLRERQLYRTSLRPGIQAIDSLRYSSSPQQNPFFMLSRRETTEHSGEVYGFNFIYSGNFQNMIEVDHFDTARVTVGINPVEFRFLLNPAESFVTPEAIVIYSDQGMNQMSQQLSDFYRHHLVNPNFSQASRPIILNSWETFYFDLGTEKILDLAKAAKDLGIELFVLDDGWFGHRKDDKSSLGDWVTDRSRLPEGIGFLADEIHKIGLQFGLWFEPEMISIDSDLYKNHADWTIHLLDREKSVGRNQYVLDLTRQEVVDYLFDSISKIIIKTNLDYIKWDMNRHITDIYSIELDSEQQMEFGHRYILGLYQLLDRLITKFPSVLFESCSSGGGRFDLGLMYYAPQAWTSDDTDPIERLKIQHGTSYGYSPSMMTAHVSISPNEQSRRQTSLDTRTNVAYFSSFGYELDVTRLSVEEKEQVREQIQFYKKYRSLFQYGDFYRINSPFSCDSASWQVVSKDKCQSILLYAQLNSKLNPGYTRVYFSGLDKDKCYSVSGFDEFFYGDELMNAGIKVSLSNLALCVPEYLTKLFVIEEVVCK

SEQ ID NO: 4292 - protein, 623 aa, Streptococcus pneumoniae
MKIENKNVRRNFFWGDGRFYTTDIVNKRAGVMIENVSKEEFTITLENGIRLSSNHFSAIVREEGDTRIQVSFVCPSIRLRLIFESRDDVLSKQLVLESSTEVIKSVEVESFEFETEDNIFYPKRQDCIKEMANFSGHYVELGQPVYANSLFLGMEFPMSENKVDGRHYVSRYYLGTVVNQEKSLWSCIIGGACSYKKEEIQEAFFEYVEGIAQPSYFRKQYNSWYDHMTDITEEGILKSFSEIRDGFENHGVHLDAYVVDDGWTNYQSVWEFNHKFPNGLRNIKHLVNGFGSSLGLWIGPRGGYNGTEIIMSDWLEAHPELNIGSKNLISNDVNVADFNYLNQMKKKMLEYQKEFDISYWKIDGWLLQPDKPDKSGPHGMYTMTAVYEFLIQLLIDLRKERGGKDCWLNLTSYVNPSPWFLQWVNSLWIQISQDVGFTENAGNDINRMITYRDSQYQEFLEKREIQLPMWSLYNHEPIYAVSANTWYMDHQMFASIPDFEAYLLFISTRGNAFWEFHYSFDMFDEERWKANARAVKWIEENYQTLKYSKKIGGSPEKFEIYGYKCHNQKTSTEILSLRNPAQIKQKIKIENLSIENFTRVIGDFTIQEDEIELAPYSIVILKK

SEQ ID NO: 4293 - protein, 439 aa, Streptococcus pneumoniae
MKHTLETINSRTQWFREARFGMFIHWGLYSIPGKGEWIRSHQKLSIEDYEPYFRAFDPKEYNPREWAKQAKAAGMKYMVLTAKHHDGFCLFDSKFTDYKATNTPAGRDLVKEFVDAVRAEGLKVGLYFSLIDWHHPDFPKYADLNHPMRGNEAYRDEKINFDSYLEYLHNQVKEIVTGYGQIDILWFDYSYEDMVGEKWGASKLIDMVRHYQPNVIVDNRLETSGEGFGSIVTDEITSYAGDFVSPEQIVPHEGIRNFKGEPVPWELCLTMNNNWAYNPTDYLYKSSQTLIRKLVECVSKNGNMILNVGPDALGRINDSSKKILDNFHRWMSRNGEAIYGCSGDENLPKPDWGYYTRNGNTVYAHVFEQPIGPLALLGISKENVKRMSFLHDGSEVKISESWTTNAYKGICFAQFGEVPHFTYPLPDLIDSVIKIELRE

SEQ ID NO: 4294 - protein, 61 aa, Streptococcus pneumoniae
MNEHPKSCFSKPLSSTIDSFKCMFHPFTAPPPKASMKYLLVNANRMIGGNTITTIAENRPL

SEQ ID NO: 4295 - protein, 294 aa, Streptococcus pneumoniae
YFIQRKKKTERWEMIMNTHINGISKKGKVLIYGYMLLTILISIFPIAWIFLSSLKADPMKNPGISLPTDFTLEGYINVFTKLHVFTYFWNSFKVVSISVIISIVMISMSSYVIARMEFRGKKLVTSMLYSTLFIPATAMTFPVYRLVNELGIYNTPVALILVYSCSGIAMSFFIIKNYFEIIPKELEEAAEIDGATYAQTFWKVMLPIARPGILTAAVLAFINNWNEYYWASMLVIDKNELTVPALLGQFTTSFNTNYNGLFSAIVVIVLPPIILFAFTSKYFIEALGGGAVKG

SEQ ID NO: 4296 - protein, 309 aa, Streptococcus pneumoniae
MAQKIMSLQNRKNQKRRFIFLFLLPTLICFFLFYFYSVVTIFLTSFAKWDYTNLNTPEFLGFDKLFENYRYVFKEYPFFTEALINSVRWAVIGVIIQVPLAVSVAITLSKKLKGWKISRNLYIVPSIISSAAMGLIFLQIYNPNYGVVNQIIHLFNPSFKDSVLLTPGLNIVAMTGAYIFFAGASTIMILGQIFAIPEEVQEAAILDNITGWRKEWYITIPMIKGTIKTVSIMAATSGFLLYNEVFFLTNGAAGTKSISFVIRELAVASSRTQYARANTIGVIQILGGMLIIVCINILFRERKRLKGGK

SEQ ID NO: 4297 - protein, 430 aa, Streptococcus pneumoniae
MNKKSLLKCAVIGLVATFGLAACGTSKDASGGSSSGKEVLEFYHGYHHSEDEWPVAKTMRDLYDKFAEEHKDSGVEFKPTPVNGDLKDIMNNKVASGEFPDVIDLAGNAVSLAAIEQKLVLDLKPYIDSNKLEKNVGLNYKQNQKDGKIYTVHEQLFTMGLWYNKDIFAKAGAKTPDQWNTWDDFTQAMASIRKQDGVYAFGAGEPSIRLFNTVLGTTENGRKLLDKPLTKEGIESKEFADALKMVMKEIQANGSKNAGGDANAYSKDFQEGKSAVFFNGVWASGEMSKNPSLAPGIYPAGVAISSSGGGITISSKMSEAKQKLALEFLKYMTSDDVQKVIFEKVGANPSNENVNVKELSEKSSEATTKILGQAITQVKNAKAVVPTVSDVWGGDVHTAIINALTESAAENVDVDQKVKSTQDVLKSLIG

SEQ ID NO: 4298 - protein, 467 aa, Streptococcus pneumoniae
MEAVLAIDLGATSGRAIVGYLSENKLVMEEINRFSNLPIRVKGHLSWDIDFLLAKILESIRLANTSYKILSIGIDTWGVDFGLIDNEGKLLLQPVHYRDERTKGVLKEISEMTELEKLYSETGNQIMEINTLFQLFKARQESPDSFYKTNKILLMPDLFNYLLTGKFATEKSIASTTQLFDPRSQNWNQNILKLFELDSSLLPEIVSEGNVLGRIKEEYGLGDIPVVNVCSHDTASAIVSVPKTEGSLFISSGTWSLVGVELTSPILTTESFSYGFTNEVGKDGVITFLKNCTGLWIIEELRRSFERRGKAYSFDDIRTMVEKEKENLPLIDTESTEFATESDMHKTLTEYLAYHHETREWTDGQLFKIVYESLAETYRKAIELLEELTHKVYKRIYVIGGGARASYFNQMIADRTGKEVLTGSTEGTAVGNIVVQLLSQGKINEDTELKDIMTNIADTQYYYPQLS

SEQ ID NO: 4299 - protein, 58 aa, Streptococcus pneumoniae
MNIGLTFEHYSSKRSHIEKIKRGDYNKVNQGRREKKNGSGFSNRFRCDFWKSNRWLPF

SEQ ID NO: 4300 - protein, 257 aa, Streptococcus pneumoniae
MIKDERVLELIEIIIKKKRIAVKELAEITFSSTSTLRRDLIFLENQGLIKRKHGYVTLSSMNTIELSHQIREGESTRQKRLIASLAKDFIRSGMCIYLDSSTTVYELCPYLSELDNLIIFTNGLHTAQTLSETVKDSSKIFITSGEVKHQSCSVVNYDKENSLLDHFNIDLAFCSARGIDDQYVYEASLSQAISKKNIIDKAHETILLIDSSKFYKTGFFKINPLSKYTTFISDTLPDQKLLDAVELFDGEWVSDIQ

SEQ ID NO: 4301 - protein, 72 aa, Streptococcus pneumoniae
RLCRLDPIFQELSDLDDLNVLWYTIFVIGYRLRSYGFVRGGETNEPYHRARSYYYSGCYSWNYLVFRLQMAR

SEQ ID NO: 4302 - protein, 68 aa, Streptococcus pneumoniae
STIVQVLSEVDDLNLVWYTIFVIGYRLRSYGFVRGGETNEPYTRACSYYYSRCYSWNYLVFRLQMARW

SEQ ID NO: 4303 - protein, 501 aa, Streptococcus pneumoniae
VKKISLLLASLCALFLVACSNQKQVDGKLNIVTTFYPVYEFTKQVAGDTANVELLIGAGTEPHEYEPSAKAVAKIQDADTFVYENENMETWVPKLLDTLDKKKVKTIKATGDMLLLPGGEEEEGDHDHGEEGHHHEFDPHVWLSPVRAIKLVEHIRDSLSADYPDKKETFEKNAAAYIEKLQSLDKAYAEGLSQAKQKSFVTQHAAFNYLALDYGLKQVAISGLSPDAEPSAARLAELTEYVKKNKIAYIYFEENASQALANTLSKEAGVKTDVLNPLESLTEEDTKDGENYISVMEKNLKALKQTTDQEVPAIEPEKAEDTKTVQNGYFEDAAVKDRTLSDYAGNWQSVYPFLEDGTFDQVFDYKAKLTGKMTQAEYKAYYTKGYQTDVTKINITDNTMEFVQGGQSKKYTYKYVGKKILTYKKGNRGVRFLFEATDADAGQFKYVQFSDHNVAPVKAEHFHIFFGGTSQEALFEEMDNWPTYYPDNLSGQEIAQEMLAH

SEQ ID NO: 4304 - protein, 268 aa, Streptococcus pneumoniae
MLSLLSYDFIQRAFLAVIAMSLFSPVLGTFLILRRQSLMSDTLSHVSLSGVAFGLVLGISPTVSTIAIVLIAAVFLEYLRTVYKSFMEIGTAILMSTGLAVSLIVMSKGKSSSSMSLDQYLFGSIVTISEEQVISLFVIAAVVLILTFLFLRPMYILTFDEDTAFVDGLPVRTMSILFNMVTGVAIALMIPAAGALLVSTIMVLPASIALRLGKNFKSVMLLASAIGFLGMVAGLYISYYAETPASASITIIFVTVFILISLVRRFIK

SEQ ID NO: 4305 - protein, 234 aa, Streptococcus pneumoniae
MRYITVEDLSFYYDKEPVLEHINYCVDSGEFVTLTGENGAAKTTLIKASLGILQPRIGKVAISKTNTQGKKLRIAYLPQQIASFNAGFPSTVYEFVKSGRYPRKGWFRRLNAHDEEHIKASLDSVGMWEHRDKRLGSLSGGQKQRAVIARMFASDPDVFILDEPTTGMDAGSKNEFYELMHHSAHHHGKAVLMITHDPEEVKDYADRNIHLVRNQDSPWRCFNVHENGQEVGHA

SEQ ID NO: 4306 - protein, 63 aa, Streptococcus pneumoniae
NSFLLPASIPVVGSSRINTSGSEANIRAITARCFCPPDRDPKRLSRCSHMPTESRLALICSSS

SEQ ID NO: 4307 - protein, 166 aa, Streptococcus pneumoniae
MSKNSIFLLKKRSLKGKESDMRQLAKDINAFLNEVILQAENQHEILIGHCTSEVALTNTQEHILMLLSEESLTNSELARRLNVSQAAVTKAIKSLVKEGMLETSKDSKDARVIFYQLTDLARPIAEEHHHHHEHTLLTYEQVATQFTPNEQKVIQRFLTALVGEIK

SEQ ID NO: 4308 - protein, 427 aa, Streptococcus pneumoniae
LWSYKMLKRLWMIFGPVLIAGLLVFLLIFFYPTEMHHNLGAEKRSAVATTIDSFKERSQKVRALSDPNVRFVPFFGSSEWLRFDGAHPAVLAEKYNRSYRPYLLGQGGAASLNQYFGMQQMLPQLENKQVVYVISPQWFSKNGYDPAAFQQYFNGDQLTSFLKHQSGDQASQYAATRLLQQFPNVAMKDLVQKLASKEELSTADNEMIELLARFNERQASFFGQFSVRGYVNYDKHVAKYLKILPDQFSYQAIEDVVKADAEKNTSNNEMGMENYFYNEQIKKDLKKLKDSQKSFTYLKSPEYNDLQLVLTQFSKSKVNPIFIIPPVNKKWMDYAGLREDMYQQTVQKIRYQLESQGFTNIADFSKDGGEPFFMKDTIHLGWLGWLAFDKAVDPFLSNPTPAPTYHLNERFFSKDWATYDGDVKEFQ

SEQ ID NO: 4309 - protein, 79 aa, Streptococcus pneumoniae
MDIKSEVIEIIDELFMEDVSDMMDEDLFDAGVLDSMGTVELIVEIENRFDIRVPVTEFGRDDWNTANKIIAGIVELQNA

SEQ ID NO: 4310 - protein, 414 aa, Streptococcus pneumoniae
MMEFFQQLPHLEPYGNPQYFVYVIAATLPIFIGLFFKKRFAWYEVLVSLFFIVTMLVGGKTNQLAALGIYLCWEILLLLFYKHYRKSKDGKWVFYLVSFLSLLPIIFVKVQPAINGTQSLLGFLGISYLTFRSVGIIIELRDGVIKDFTLWEFLRFLLFMPTFSSGPIDRFKRFNENYQAIPERDELMDMLDESVRYIMRGFLYKFILAHVLGETLLPPLKNLALQSGGFFNLYALAVMYTFGLELFFDFAGYSMFALAISNLMGIRSPINFNKPFLSRDLKEFWNRWHMSLSFWFRDFVFMRMVMVLTRKKVFKNRNVTSSMAYIVNMLIMGFWHGVTWYYIAYGLFHGLGLVINDAWVRKKKTLNKKRKKAGKAALPENRWIQFLGMVVTFHVVMLSFLIFSGFLNNLWFKK

SEQ ID NO: 4311 - protein, 516 aa, Streptococcus pneumoniae
VSNKPIADMIETIEHFAQTQPSYPVYNVLGQEHTYGDLKADSDSLAAVIDQLGLPEKSPVVVFGGQEYEMLATFVALTKSGHAYIPIDSHSALERVSAILEVAEPSLIIAISAFPLEQVSTPMINLAQVQEAFAQGNNYEITHPVKGDDNYYIIFTSGTTGKPKGVQISHDNLLSFTNWMITDKEFATPSRPQMLAQPPYSFDLSVMYWAPTLALGGTLFTLPSVITQDFKQLFAAIFSLPIAIWTSTPSFADMAMLSEYFNSEKMPGITHFYFDGEELTVKTAQKLRERFPNARIINAYGPTEATVALSAVAVTDEMLATLKRLPIGYTKADSPTFIIDEEGNKLPNGEQGEIIVSGPAVSKGYMNNPEKTAEAFFEFENLPAYHTGDVGTMTDEGLLLYGGRMDFQIKFNGYRIELEDVSQNLNKSRFIESAVAVPRYNKDHKVQNLLAYVILKDGVREQFERDIDITKAIKEDLTDIMMSYMMPSKFLYRDSLPLTPNGKIDIKGLINEVNKR

SEQ ID NO: 4312 - protein, 65 aa, Streptococcus pneumoniae
KNKLVRITLILAKNYRNEWFFLMKQRKELYLFLGRTALYFLIFLGLLYFFSYLGQGQGSFIYNEF

SEQ ID NO: 4313 - protein, 173 aa, Streptococcus pneumoniae
LEIFSNTIWVSSIILVFVTELLNKTESYWGYSNTAYSIGIIISGLIAFRLSEKFLAAKWESILFPLVAMAIVTLTILYFPNAQMFLLFSALVGMLSQLKEVPESVFLQETVEENHLVNVYSVLEVISTLAFSVFVLLMSYITESFGISISFWLSAICLMIEAILIYIRRDYFK

SEQ ID NO: 4314 - protein, 236 aa, Streptococcus pneumoniae
MSNSFVKLLVSQLFANLADIFFRVTIIANIYIISKSVIATSLVPILIGISSFVASLLVPLVTKRLALNRVLSLSQFGKTILLAILVGMFTVMQSVAPLVTYLFVVAISILDGFAAPVSYAIVPRYATDLGKANSALSMTGEAVQLIGWGLGGLLFATIGLLPTTFIILVLYIISSFLMLFLPNAEVEVLESETNLEILLKGWKLVARNPRLRLLYQQIYWKFFQIRFGFLPLYLFL

SEQ ID NO: 4315 - protein, 61 aa, Streptococcus pneumoniae
GFIFISIWKDYIIGDTGRNVYRNAIRSAFGDLSICCCNFHTRWFCSTRFLCYCATLCDRFG

SEQ ID NO: 4316 - protein, 62 aa, Streptococcus pneumoniae
DKDKTLFSANLLVTNGTKRLATKEDIPIKIGTSDVAITDFEIMYMLAMIVTLKKISAKFANN

SEQ ID NO: 4317 - protein, 330 aa, Streptococcus pneumoniae
MSPICEPHFSDTSYGFRPNRSCEKAIMKLLEYLNDGYEWIVDIDLEKFFDTVPQDRLMSLVHNIIEDGDTESLIRKYLHSGVIINGQRYKTLVGTPQGGNLSPLLSNIMLNELDKELEKRGLRFVRYADDCVITVVSEAAAKRMMYSVSRFIEKRLGLKVNMTKTKITRPRELKYLGFGFWKSSDGWKSRPHQDSVRRFKLKLKKLTQRKWSIDLTRRIEQLNLSIRGWINYFSLGNMKSIVASIDERLRTRLRVIIWKQWKKKSRRLWGLLKLGVPKWIADKVSGWGDHYQLVAQKSVLKRAISKPVLEKRGLVSCLDYYLERHALKVS

SEQ ID NO: 4318 - protein, 93 aa, Streptococcus pneumoniae
MSKLLDKILSRENMLEAYNQVKSNKGSAGIDGMTIEEMDNYLRQNWRLTKELIKQRKYKPQPVLRVEIPKPDGGIRQLGIPTVMDRMIQQAIV

SEQ ID NO: 4319 - protein, 81 aa, Streptococcus pneumoniae
SLLIRYIRLTITFLFVEPRFRYPFLSLLPHDSQAWESLLGSPVAGAHRGLTPQIYDMPVVLQKNDDLNRRFAKINMHFFFF

SEQ ID NO: 4320 - protein, 65 aa, Streptococcus pneumoniae
MLNAKIFYIFLCLIVIETTGLLLLKRGLEMGYLDTEAIILAVFSFAFYNLCSFAWVCSTIKNNKK

SEQ ID NO: 4321 - protein, 195 aa, Streptococcus pneumoniae
LFVFADDSLSANSKVVSGEAQFENGSSVRFGDTQVNILSDEVLEVVNPDGSVDTIERRADGVYINGAFYMAYQKNEIDLNISFRSYDPNVWNYVNTIHGNKQANTFANFMTGAGISYMIGRIGALLGGPWGAIIGGAYFGIQAYQSYLDSQSPYPYYITSTYIHVAQRKWKFITEYYRNSNYTGYVKTVTTYVNF

SEQ ID NO: 4322 - protein, 67 aa, Streptococcus pneumoniae
VPKWSNPDYVNELDPKIVDMLVEFHKSQGTLETPEAQAEIAQKREEIEQRRAELEGKKQELLNRLNK

SEQ ID NO: 4323 - protein, 252 aa, Streptococcus pneumoniae
VEGSIPCRPSLLFNGDRKMMNELFGEFLGTLILILLGNGVVAGVVLPKTKSNSSGWIVITMGWGIAVAVAVFVSGKLSPAHLNPAVTIGVALKGGLPWASVLPYILAQFAGAMLGQILVWLQFKPHYEAEENAGNILATFSTGPAIKDTVSNLISEILGTFVLVLTIFALGLYDFQAGIGTFAVGTLIVGIGLSLGGTTGYALNPARDLGPRIMHSILPIPNKGDGDWSYAWIPVVGPVIGAALAVLVFSLF

SEQ ID NO: 4324 - protein, 608 aa, Streptococcus pneumoniae
MEFSKKTRELSIKKMQERTLDLLIIGGGITGAGVALQAAASGLETGLIEMQDFAEGTSSRSTKLVHGGLRYLKQFDVEVVSDTVSERAVVQQIAPHIPKPDPMLLPVYDEDGATFSPFRLKVAMDLYDLLAGVSNTPTANKVLSKKEVLERQPNLKKEGLVGGGVYLDFRNNDARLVIENIKRANQDGALIANHVKAEGFLFDESGKITGVVARDLLTDQVFEIKARLVINTTGPWSDKVRNLSNKGTQFSQMRPTKGVHLVVDSSKIKVSQPVYFDTGLGDGRMVFVLPRENKTYFGTTDTDYTGDLEHPKVTQEDVDYLLGIVNNRFPESNITIDDIESSWAGLRPLIAGNSASDYNGGNNGTISDESFDNLIATVESYLSKEKTREDVESAVSKLESSTSEKHLDPSAVSRGSSLDRDDNGLLTLAGGKITDYRKMAEGAMERVVDILKAEFDRSFKLINSKTYPVSGGELNPANVDSEIEAFAQLGVSRGLDSKEAHYLANLYGSNAPKVFALAHSLEQAPGLSLADTLSLHYAMRNELALSPVDFLLRRTNHMLFMRDSLDSIVEPVLDEMGRFYDWTEEEKATYRADVEAALANNDLAELKN

SEQ ID NO: 4325 - protein, 99 aa, Streptococcus pneumoniae
QIFTVQMHRRSLHLLTAWNKRQDSAWQILCPFTMQCATSWLLAQLTSFFVVPTICSLCVIAWIASLSQFWMKWDDSMTGQKKKKQLTVLMSKQLSLTTI

SEQ ID NO: 4326 - protein, 502 aa, Streptococcus pneumoniae
MSQEKYIMAIDQGTTSSRAIIFNKKGEKVSSSQKEFTQIFPQAGWVEHNANEIWNSVQSVIAGAFIESGVKPNQIEAIGITNQRETTVVWDKKTGLPIYNAIVWQSRQTAPLAEQLKSQGYVEKFHEKTGLIIDAYFSATKVRWILDHVEGAQERAEKGELLFGTIDTWLVWKLTDGAAHVTDYSNAARTMLYNIKELKWDDEILEILNIPKAILPEVRSNSEIYGKTAPFHFYGGEVPISGMAGDQQAALFGQLAFEPGMVKNTYGTGSFIIMNTGEEMQLSENNLLTTIGYGINGKVYYALEGSIFIAGSAIQWLRDGLRMVENSPESEKYARDSHNNDEVYVVPAFTGLGAPYWNQNARGSVFGLTRGTSKEDFIKATLQSIAYQVRDIIDTMQVDTQTAIQVLKVDGGAAMNNFLMQFQADILGIDIARAKNLETTALGAAFLAGLSVGYWKNLDELKLLNETGELFEPSMNESRKEQLYKGWKKAVKATQVFAEVDD

SEQ ID NO: 4327 - protein, 475 aa, Streptococcus pneumoniae
MYLGDLMEKAECGQFSILSFLLQESQTTVKAVMEETGFSKATLTKYVTLLNDKALDSGLELTIHSEDENLRLSIGAATKGRDIRSLFLDSAVKYQILVYLLYHQQFLAHQLAQELVISEATLGRHLAGLNQILSEFDLSIQNGRWRGPEHQIRYFYFCLFRKVWSSQEWEGHMQKPERKQEIANLEEICGASLSAGQKLDLVLWAHISQQRLRVNACQFQVIEEKMRGYFDNIFYLRLLRKVPSFFAGQHIPLGVEDGEMMIFFSFLLSHRILPLHTMEYILGFGGQLADLLTQLIQEMKKEELLGDYTEDHVTYELSQLCAQVYLYKGYILQDRYKYQLENRHPYLLMEHDFKETAEEIFHALPAFQQGTDLDKKILWEWLQLIEYMAENGGQHMRIGLDLTSGFLVFSRMAAILKRYLEYNRFITIEAYDPSRHYDLLVTNNPIHKKEQTPVYYLKNDLDMEDLAGIRQLLFT

SEQ ID NO: 4328 - protein, 65 aa, Streptococcus pneumoniae
YSFNNFIHSYYFSIKMPKGGAVCLLIFRIMDQEISMKIKRETDYFSICKIYAMLKVENERGNKCI

SEQ ID NO: 4329 - protein, 290 aa, Streptococcus pneumoniae
MDKIIKTISESGAFRAFVLDSTETVRTAQEKHQTQASSTVALGRTLIASQILAANEKGNTKLTVKVLGSSSLGAIITVADTKGNVKGYVQNPGVDIKKTATGEVLVGPFVGNGQFLVITDYGTGNPYNSITPLISGEIGEDLAFYLTESQQTPSAVGLNVLLDEEDKVKVAGGFLVQVLPGAKKEEIARFEKRIQEMPAISTLLESDDHIEALLKTIYGDEAYKRLSEEEIRFQCDCSHERFMNALASLPSSDLQEMKEEDHGVEITCQFCQTTYNFDEKDLEELIRDKS

SEQ ID NO: 4330 - protein, 326 aa, Streptococcus pneumoniae
VTNLNTPFMIGNVEIPNRTVLAPMAGVTNSAFRTIAKELGAGLVVMEMVSDKGIQYNNEKTLHMLHIDEGENPVSIQLFGSDEDSLARAAEFIQENTKTDIVDINMGCPVNKIVKNEAGAMWLKDPDKIYSIINKVQSVLDIPLTVKMRTGWADPSLAVENALAAEAAGVSALAMHGRTREQMYTGHADLETLYKVAQALTKIPFIANGDIRTVQEAKQRIEEVGADAVMIGRAAMGNPYLFNQINHYFETGEILPDLTFEDKMKIAYEHLKRLINLKGENVAVREFRGLAPHYLRGTSGAAKLRGAISQASTLAEIEALLQLEKV

SEQ ID NO: 4331 - protein, 62 aa, Streptococcus pneumoniae
DKSIILNIKSEQNQLSDTQNSVLFAFLSNLSILKIYNKEFLKSKSFYPRLFSFKPNTFYKHF

SEQ ID NO: 4332 - protein, 221 aa, Streptococcus pneumoniae
INHYFILFLARMVAPAKVRRPAISSARFEIDPVDGNDFFGLFVAFSFVEAWLEGCLSLLKLFVVDGFLSSACGLLLSGFGFSGCGLTSGFGFSGCGLTSGFGFSGCGLTSGFGFSGCGLTSGFGFSGCGLTSGFGFSGCGLTSGFGFSGCGLTSGFGFSGCGLTSGFGFSGCGLTSGFGFSGCGLTSGFGFSGCGLTSGFGFSGCGLTSGFGFSSCGLTSG

SEQ ID NO: 4333 - protein, 450 aa, Streptococcus pneumoniae
MKAVSEYVGKMVRDAYVKSDRKRHKNTVALVNQLGNIKNRYLNEIVHSTSKSQLQELMMKSQSEVDEAVSKFEKDSFSSSSSGSSTKPETPQPENPEHQKPTTPSPDTKPSPQPEGKKPSVPDINQEKEKAKLAVVTYMSKILDDIQKHHLQKEKHRQIVALIKELDELKKQALSEIDNVNTKVEIENTVHKIFADMDAVVTKFKKGLTQDTPKEPGNKKPSAPKPGMQPSPQPEVKPQLEKPKPEVKPQPEKPKPEVKPQPEKPKPEVKPQPEKPKPEVKPQPEKPKPEVKPQPEKPKPEVKPQPEKPKPEVKPQPEKPKPEVKPQPEKPKPEVKPQPEKPKPEVKPQPEKPKPEVKPQPEKPKPEVKPQPEKPKPDNSKPQADDKKPSTTNNLSKDKQPSNQASTNEKATNKPKKSLPSTGSISNLALEIAGLLTLAGATILAKKRMK

SEQ ID NO: 4334 - protein, 182 aa, Streptococcus pneumoniae
QKNQVTKNHLLQNQVCNQVLNQRLNRSWKNQNQRLNRNQKNQNQRLNRSRKNQNQRLNRSRKNQNQRLNRSRKNQNQRLNRSRKNQNQRLNRSRKNQNQRLNRSRKNQNQRLNRSRKNQNQRLNRSRKNQNQRLNRSRKNQNQRLNRNQKNQNQRLNRNQKNQNQIIASHKQMIRSHQLQII

SEQ ID NO: 4335 - protein, 175 aa, Streptococcus pneumoniae
LWLAIIWFWFFWLRFNLWFWFFWLRFNLWFWFFRLRFNLWFWFFRLRFNLWFWFFRLRFNLWFWFFRLRFNLWFWFFRLRFNLWFWFFRLRFNLWFWFFRLRFNLWFWFFRLRFNLWFWFFRLRFNLWFWFFWLRFNLWFWFFQLRFNLWLRTWLHTWFWSRWFFVTWFFWCVLS

SEQ ID NO: 4336 - protein, 181 aa, Streptococcus pneumoniae; identical to SEQ ID NO: 3390

SEQ ID NO: 4337 - protein, 250 aa, Streptococcus pneumoniae; identical to SEQ ID NO: 3931

SEQ ID NO: 4338 - protein, 64 aa, Streptococcus pneumoniae; identical to SEQ ID NO: 3389

SEQ ID NO: 4339 - protein, 54 aa, Streptococcus pneumoniae
MFKSNHERRMRYSIRKFSVGVASVAVASLFMGSVVHATEKEGSTQAANVIKLVI

SEQ ID NO: 4340 - protein, 418 aa, Streptococcus pneumoniae; identical to SEQ ID NO: 2954

SEQ ID NO: 4341 - protein, 231 aa, Streptococcus pneumoniae
MWYFYNTDGSMATGWLQNNGSWYYLNSNGAMATGWLQNNGSWYYLNANGSMATGWLQNNGSWYYLNANGSMATGWLQNNGSWYYLNANGDMATGWLQYNGSWYYLNANGDMATGWLQYNGSWYYLNANGDMATGWLQYNGSWYYLNSNGAMVTGWLQNNGSWYYLNANGSMATGWVKDGDTWYYLEASGAMKASQWFKVSDKWYYVNGSGALAVNTTVDGYGVNANGEWVN

SEQ ID NO: 4342 - protein, 109 aa, Streptococcus pneumoniae
MNHCFGAILSPLNHQYCRSTTYRFLVSSLFLVQELVALVFAVAVESIDYILHLIYQHSLLQLVDHLFFLLLVVQLASLVLVRELDSQALQLVFLVEEPALVVVVQLVFL

SEQ ID NO: 4343 - protein, 104 aa, Streptococcus pneumoniae
KKSRQIVKKQKKKLNEKQQKKIKLKKNQLNNHNQRRLLNQKNQLKSLRIQLPHQNQRSQLNNQKQKKQMINKLKKTMLVDQMKNIIDRLNSNRKNQSNQLLHQK

SEQ ID NO: 4344 - protein, 216 aa, Streptococcus pneumoniae
TKGGGENEEFLREQATPDKKENDAKSSDSSVGEEALPSPSLKPEKKVAEAEKKVAEAEKKAKAQKEEDRRNYPTNTYKTLELEIAESDVKVKEAELELVKEEAKESRNEEKVNQAKAKVESKKAEATRLEKIKTDRKKAEEEAKRKAAEEDKVKEKPAEQPQPAPAPQPEKPTEEPENPAPAPKPEKPAEQPKAEKTDDQQAEEDYAGRSDEEYNR

SEQ ID NO: 4345 - protein, 72 aa, Streptococcus pneumoniae
LLIICFFCFWLFSWLLWFWCGSWILRLFSWFFWLRSRRWLWLFSWFFFNFIFFCCFSFSFFFCFFTICLDFF

SEQ ID NO: 4346 - protein, 104 aa, Streptococcus pneumoniae
LLALSETLRFLRPFGLSCSEVATFFSTASFNLASALRLASSSAFSRSVLMFSNLVASAFLLSTFASACLIFSSSRDSLASSFTSSSSAFLTSTSDSAISSSSVL

SEQ ID NO: 4347 - protein, 275 aa, Streptococcus pneumoniae
MFASKSERKVHYSIRKFSIGVASVAVASLVMGSVVHATEKEVTTQVATSSNRANESQAGHRKAAEQFDEYIKTMIQLDRRKHTQNFALNIKLSRIKTEYLRKLNVLEEKSKAELPSETKKEIDAAFEQFKKDTNRTKKTVAEAEKKVEEAKKKAKAQKEEDHRNYPTNTYKTLELEIAESDVEVKKAELELVKEEAKESRDDEKIKQAEAKVESKKAEATRLENIKTDREKAEEEAKRRAEAKLKEAVEKNVATSEQDKPKGRRKRRVSERASNT

SEQ ID NO: 4348 - protein, 175 aa, Streptococcus pneumoniae
MVLAIILVTFLIRLIFLKRSIENEKRILSNGGKEFGVENTKRLTLAHIVFYLSCLVEAMVHKTMFDGMSMVGLVLLIFSMLMLMLVIHLLGDIWTVKLMLVNNHKYVDHILFRTVKHPNYFLNILPELIGLTLLSHAYMTFVLVFPVYAVILYRRIAEEEKLLHEVIIPNGSIKR

SEQ ID NO: 4349 - protein, 446 aa, Streptococcus pneumoniae
MIKNPKLLTKSFLRSFAILGGVGLVIHIAIYLTFPFYYIQLEGEKFNESARVFTEYLKTKTSDEIPSLLQSYSKSLTISAHLKRDIVDKRLPLVHDLDIKDGKLSNYIVMLDMSVSTADGKQVTVQFVHGVDVYKEAKNILLLYLPYTFLVTIAFSFVFSYFYTKRLLNPLFYISEVTSKMQDLDDNIRFDESRKDEVGEVGEVGKQINGMYEHLLKVIHELESRNEQIVKLQNQKVSFVRGASHELKTPLASLRIILENMQHNIGDYKDHPKYIAKSINKIDQMSHLLEEVLESSKFQEWTECRETLTVKPVLVDILSRYQELAHSIGVTIENQLTDATRVVMSLRALDKVLTNLISNAIKYSDKNGRVIISEQDGYLSIKNTCAPLSDQELEHLFDIFYHSQIVTDKDESSGLGLYIVSNILESYQMDYSFLPYEHGMEFKISL

SEQ ID NO: 4350 - protein, 217 aa, Streptococcus pneumoniae
MNILVADDEEMIREGIAAFLTEEGYHVIMAKDGQEVLEKFQDLPIHLMVLDLMMPRKSGFEVLKEINQKHDIPVIVLSALGDETTQSQVFDLYADDHVTKPFSLVLLVKRIKALIRRYYVIEDLWRYQDVTVDFTSYKAHYKNEEIDLKPKELLVLKCLIQHKNQVLSREQILEEISKDVADLPCDRVVDVYIRTLRKKLALDCIVTVKNVGYKISL

SEQ ID NO: 4351 - protein, 74 aa, Streptococcus pneumoniae
LIFIEFHSTVTYGQMLILLFFYAISNFNWPALTPILSVLPATKSPLRRSSANLSSTSVCRVLRSGRAPISGSYP

SEQ ID NO: 4352 - protein, 810 aa, Streptococcus pneumoniae
MNYSKALNECIESAYMVAGHFGARYLESWHLLIAMSNHSYSVAGATLNDYPYEMDRLEEVALELTETDYSQDETFTELPFSRRLQVLFDEAEYVASVVHAKVLGTEHVFYAILHDGNALATRILERAGFSYEDKKDQVKIAALRRNLEERAGWTREDLKALRQRHRTVADKQNSMANMMGMPQTPSGGLEDYTHDLTEQARSGKLEPVIGRDKEISRMIQILSRKTKNNPVLVGDAGVGKTALALGLAQRIASGDVPAEMAKMRVLQLDLMNVVAGTRFRGDFEERMNNIIKDIEEDGQVILFIDELHTIMGSGSGIDSTLDAANILKPALARGTLRTVGATTQEEYQKHIEKDAALSRRFAKVTIEEPSVADSMTILQGLKATYEKHHRVQITDEAVETAVKMAHRYLTSRHLPDSAIDLLDEAAATVQNKAKHVKADDSDLSPADKALMDGKWKQAAQLIAKEEEVPVYKDLVTESDILTTLSRLSGIPVQKLTQTDAKKYLNLEAELHKRVIGQDQAVSSISRAIRRNQSGIRSHKRPIGSFMFLGPTGVGKTELAKALAEVLFDDESALIRFDMSEYMEKFAASRLNGAPPGYVGYEEGGELTEKVRNKPYSVLLFDEVEKAHPDIFNVLLQVLDDGVLTDSKGRKVDFSNTIIIMTSNLGATAFRDDKTVGFGAKDIRFDQENMEKRMFEELKKAYRPEFINRIDEKVVFHSLSSDHMQEVVKIMVKPLVASLAEKGIDLKLQASALKLLANQGYDPEMGARPLRRTLQTEVEDKLAELLLKGDLVAGSTLKIGVKAGQLKFDIA

SEQ ID NO: 4353 - protein, 173 aa, Streptococcus pneumoniae
MRKFRYNSQTRSRFKERGGFVMRFKNTSDHIEAYIKAILDQSGIVELQRSQLADTFQVVPSQINYVIKTRFTESRGYLVESKRGGGGYIRIGRIEFSSHHEMLRELLYSIGERVSQEIYEDILQLLVEQELMTKQEMNLLESVALDRVLGEEAPVVRANMLRQIIQEVDRKGK

SEQ ID NO: 4354 - protein, 242 aa, Streptococcus pneumoniae
MTEIRLEHVSYAYGQERILEDINLQVTSGEVVSILGPSGVGKTTLFNLIAGILEVQSGRIVLDGEENPKGRVSYMLQKDLLLEHKTVLGNIILPLLIQKVDKAEAISRADKILATFQLTAVRDKYPHELSGGMRQRVALLRTYLFGHKLFLLDEAFSALDEMTKMELHAWYLEIHKQLQLTTLIITHSIEEALNLSDRIYILKNRPGQIVSEIKLDWSEDEDKEVQKIAYKRQILAELGLDK

SEQ ID NO: 4355 - protein, 335 aa, Streptococcus pneumoniae
MKKTWKVFLTLVTALVAVVLVACGQGTASKDNKEAELKKVDFILDWTPNTNHTGLYVAKEKGYFKEAGVDVDLKLPPEESSSDLVINGKAPFAVYFQDYMAKKLEKGAGITAVAAIVEHNTSGIISRKSDNVSSPKDLVGKKYGTWNDPTELAMLKTLVESQGGDFEKVEKVPNNDSNSITPIANGVFDTAWIYYGWDGILAKSQGVDANFMYLKDYVKEFDYYSPVIIANNDYLKDNKEEARKVIQAIKKGYQYAMEHPEEAADILIKNAPELKEKRDFVIESQKYLSKEYASDKEKWGQFDAARWNAFYKWDKENGILKEDLTDKGFTNEFVK

SEQ ID NO: 4356 - protein, 135 aa, Streptococcus pneumoniae
LISSFLFQKRSILSTFPFNHIFFTDIDQLHTQKTDNRHQNNNGKHGIILKQFFRLNHINTKTFKTSQPLRYHSCDKGVGDTDPQTCIKVRQANRDFKMPQDLPRVCSHQTKQSQHILVTMPKTVQNTNDDGKGCC

SEQ ID NO: 4357 - protein, 249 aa, Streptococcus pneumoniae
LKSILRRHISLLGFLGVLSIWQLAGFLKLLPKFILPTPLEILQPFVRDREFLWHHSWATLRVALLGLILGVLIACLMAVLMDSLTWLNDLIYPMMVVIQTIPTIAIAPILVLWLGYGILPKIVLIILTTTFPIIVSILDGFRHCDKDMLTLFSLMRANPWQILWHFKIPVSLPYFYAGLRVSVSYAFITTVVSEWLGGFEGLGVYMIQSKKLFQYDTMFAIIILVSIISLLGMKLVDISEKYVIKWKRT

SEQ ID NO: 4358 - protein, 96 aa, Streptococcus pneumoniae
MKASIALQVLPLAQGIDRIAVIDQVIAYLQTQEVTMVVTPFETVLEGEFDELMRILKEALEVAGQEADNVFANVKINVGEILSIDEKLEKYTETTH

SEQ ID NO: 4359 - protein, 283 aa, Streptococcus pneumoniae
MTGFIHFKDLDGASVGNSHPSTSPGGTHYFKTKSAIKTEPLASGTVIDYYYPGEKVHYDQILEKDGYKWLSYTAYNGSYRYVQLEAVNKNPLGNSVLSSTGGTHYFKTKSAIKTEPLVSATVIDYYYPGEKVHYDQILEKDGYKWLSYTAYNGSRRYIQLEGVTSSQNYQNQSGNISSYGSNNSSTVGWKKINGSWYHFKSNGSKSTGWLKDGSSWYYLKLSGEMQTGWLKENGSWYYLGSSGAMKTGWYQVSGKWYYSYSSGALAVNTTVDGYRVNSDGERV

SEQ ID NO: 4360 - protein, 137 aa, Streptococcus pneumoniae
MKILPFIARGTSYYLKMSVKKLVPFLVVGLMLAAGDSVYAYSRGNGSIARGDDYPAYYKNGSQEIDQWRMYSRQCTSFVAFRLSNVNGFEIPAAYGNANEWGHRARREGYRVDNTPTIGSITCSTPGTNVHGAWVSK

SEQ ID NO: 4361 - protein, 88 aa, Streptococcus pneumoniae
MSDAFTDVAKMKKIKEEIKAHEGQVVEMTLENGRKRQKNRLGKLIEVYPSLFIVEFGDVEGDKQVNVYVESFTYSDILTEKNLIHYLD

SEQ ID NO: 4362 - protein, 450 aa, Streptococcus pneumoniae
MAEVEELRVQPQDILAEQSVLGAIFIDESKLVFVREYIESRDFFKYAHRLIFQAMVDLSDRGDAIDATTVRTILDNQGDLQNIGGLSYLVEIVNSVPTSANAEYYAKIVAEKAMLRRLIAKLTESVNQAYEASQPADEIIAQAEKGLIDVSENANRSGFKNIRDVLNLNFGNLEARSQQTTDITGIATGYRDLDHMTTGLHEEELIILAARPAVGKTAFALNIAQNIGTKLDKTVAIFSLEMGAESLVDRMLAAEGLVESHSIRTGQLTDEEWQKYTIAQGNLANASIYIDDTPGIRITEIRSRSRKLAQETGNLGLIVIDYLQLITGTGRENRQQEVSEISRQLKILAKELKVPVIALSQLSRGVEQRQDKRPVLSDIRESGSIEQDADIVAFLYRDDYYERGGEEEEGIPNNKVEVIIEKNRSGARGTVELIFQKEYNKFSSISKREA

SEQ ID NO: 4363 - protein, 150 aa, Streptococcus pneumoniae
MKVIFLADVKGKGKKGEIKEVPTGYAQNFLIKKNLAKEATAQAVGELRGKQKSEEKAHAEMIAEGKAIKAQLEAEETVVEFVEKVGPDGRTFGSITNKKIAEELQKQFGIKIDKRHIQVQAPIRAVGLIDVPVKIYQDITSVINLRVKEG

SEQ ID NO: 4364 - protein, 657 aa, Streptococcus pneumoniae
MKKFYVSPIFPILVGLIAFGVLSTFIIFVNNNLLTVLILFLFVGGYVFLFKKLRVHYTRSDVEQIQYVNHQAEESLTSLLEQMPVGVMKLNLSSGEVEWFNPYAELILTKEDGDFDLEAVQTIIKASVGNPSTYAKLGEKRYAVHMDASSGVLYFVDVSREQAITDELVTSRPVIGIVSVDNYDDLEDATSESDISQINSFVANFISEFSEKYMMFSRRVSMDRFYLFTDYTVLEGLMNDKFSVIDAFREESKQRQLPLTLSMGFSYGDGNHDEIGKVALLNLNLAEVRGGDQVVVKENDETKNPVYFGGGSAASIKRTRTRTRAMMTAISDKIRSVDQVFVVGHKNLDMDALGSAVGMQLFASNVIENSYALYDEEQMSPDIERAVSFIEKEGVTKLLSVKDAMGMVTNRSLLILVDHSKTALTLSKEFYDLFTQTIVIDHHRRDQDFPDNAVITYIESGASSASELVTELIQFQNSKKNRLSRMQASVLMAGMMLDTKNFTSRVTSRTFDVASYLRTRGSDSIAIQEIAATDFEEYREVNELILQGRKLGSDVLIAEAKDTKCYDTVVISKAADAMLAMSGIEASFVLAKNIQGFISISARSRSKLNVQRIMEELGGGGHFNLAAAQIKDVTLSEAGEKLTEIVLNEIKEKEKEE

SEQ ID NO: 4365 - protein, 182 aa, Streptococcus pneumoniae
MIKYSIRGENLEVTEAIRDYVVSKLEKIEKYFQPEQELDARINLKVYREKTAKVEVTIPLGSITLRAEDVSQDMYGSIDLVTDKIERQIRKNKTKIERKNKNKVATGQLFTDALVEDSNVVQSKVVRSKQIDLKPMDLEEAILQMDLLGHDFFIYVDVEDQTTNVIYRREDGEIGLLEVKES

SEQ ID NO: 4366 - protein, 220 aa, Streptococcus pneumoniae
MKCLLCGQTMKTVLTFSSLLLLRNNDSCLCSDCDSTFERIGEENCPNCMKTELSTKCQDCQLWCKEGVEVSHRAIFTYNQAMKDFFSRYKFDGDFLLRKVFASFLSEELKKYKEYQFVVIPLSPDRYANRGFNQVEGLVEAAGFEYLDLLEKREERASSSKNRSERLGTELPFFIKSGVTIPKKILLIDDIYTTGATINRVKKLLEEAGAKDVKTFSLVR

SEQ ID NO: 4367 - protein, 432 aa, Streptococcus pneumoniae
MKVNLDYLGRLFTENELTEEERQLAEKLPAMRKEKGKLFCQRCNSTILEEWYLPIGAYYCRECLLMKRVRSDQTLYYFPQEDFPKQDVLKWRGQLTPFQEKVSEGLLQAVDKQKPTLVHAVTGAGKTEMIYQVVAKVINAGGAVCLASPRIDVCLELYKRLQQDFSCGIALLHGESEPYFRTPLVVATTHQLLKFYQAFDLLIVDEVDAFPYVDNPMLYHAVKNSVKENGLRIFLTATSTNELDKKVRLGELKRLNLPRRFHGNPLIIPKPIWLSDFNRYLDKNRLSPKLKSYIEKQRKTAYPLLIFASEIKKGEQLAEILQEQFPNEKIGFVSSVTEDRLEQVQAFRDGELTILISTTILERGVTFPCVDVFVVEANHRLFTKSSLIQIGGRVGRSMDRPTGDLLFFHDGLNASIKKAIKEIQMMNKEAGL

SEQ ID NO: 4368 - protein, 211 aa, Streptococcus pneumoniae
MEFRTIKEDGQVQEEIKKSRFICHAKRVYSEEEARDFITAIKKEHYKATHNCSAFIIGERSEIKRTSDDGEPSGTAGVPMLGVLENHNLTNVCVVVTRYFGGIKLGAGGLIRAYAGSVALAVKEIGIIEIKEQAGIAIQMSYAQYQEYSNFLKEHDLMELDTNFTDQVDTMIYVDKEEKETIKAALVEFFNGKVTLTDQGLREVEVPVNLV

SEQ ID NO: 4369 - protein, 308 aa, Streptococcus pneumoniae
MSIYNNITELIGQTPIVKLNNIVPEGAADVYIKLEAFNPGSSVKDRIALSMIEKAEQDGILKPGSTIVEATSGNTGIGLSWVGAAKGYKVVIVMPETMSVERRKIIQAYGAELVLTPGSEGMKGAIAKAQEIAAERDGFLPLQFDNPANPEVHERTTGAEILAAFGKDGLDAFVAGVGTGGTISGVSHALKSENSNIQVYAVEADESAILSGEKPGPHKIQGISAGFIPDTLDTKAYDGIVRVTSDDALALGREIGGKEGFLVGISSAAAIYGAIEVAKKLGTGKKVLALAPDNGERYLSTALYEFEV

SEQ ID NO: 4370 - protein, 346 aa, Streptococcus pneumoniae
MAEITAKLVKELREKSGAGVMDAKKALVETDGDIEKAIELLREKGMAKAAKKADRVAAEGLTGVYVNGNVAAVIEVNAETDFVAKNAQFVELVNTTAKVIAEGKPANNEEALALIMPSGETLEAAYVSATATIGEKISFRRFALIEKTDAQHFGAYQHNGGRIGVISVVEGGDEALAKQLSMHIAAMKPTVLSYKELDEQFVKDELAQLNHVIDQDNESRAMVNKPALPHLKYGSKAQLTDDVIAQAEADIKAELAAEGKPEKIWDKIIPGKMDRFMLDNTKVDQAYTLLAQVYIMDDSKTVEAYLESVNASVVEFARFEVGEGIEKAANDFEAEVAATMAAALNN

SEQ ID NO: 4371 - protein, 128 aa, Streptococcus pneumoniae
LSVFCNEVSFSVYFNNCCNITVNINTSQTFCSNTVSFLSCLSHTFFTKQFNRFFDVTVCFYKRFFSVHNTGTRFFTQLFYKFSCNFCHFNSPIFFENRRAGLSPALLGNYYLYKLSVVTFYNFNDFFN

SEQ ID NO: 4372 - protein, 287 aa, Streptococcus pneumoniae
LMNCEAVALGSFCELKSRRGKKQKGEILMAVISMKQLLEAGVHFGHQTRRWNPKMAKYIFTERNGIHVIDLQQTVKYADQAYDFMRDAAANDAVVLFVGTKKQAADAVAEEAVRSGQYFINHRWLGGTLTNWGTIQKRIARLKEIKRMEEDGTFEVLPKKEVALLNKQRARLEKFLGGIEDMPRIPDVMYVVDPHKEQIAVKEAKKLGIPVVAMVDTNTDPDDIDVIIPANDDAIRAVKLITAKLADAIIEGRQGEDAVAVEAEFAASETQADSIEEIVEVVEGDNA

SEQ ID NO: 4373 - protein, 74 aa, Streptococcus pneumoniae
LLQLLNQQHVSKYQNQIMQVIVQLEITVDGSIQQQLLKVLLHIFMQINLQRDSNRALFSGFTVTIPIKNYIKIA

SEQ ID NO: 4374 - protein, 392 aa, Streptococcus pneumoniae
MKKKILASLLLSTVMVSQVAVLTTAHAETTDDKIAAQDNKISNLTAQQQEAQKQVDQIQEQVSAIQAEQSNLQAENDRLQAESKKLEGEITELSKNIVSRNQSLEKQARSAQTNGAVTSYINTIVNSKSITEAISRVAAMSEIVSANNKMLEQQRADKKAISEKQVANNDAINTVIANQQKLADDAQALTTKQAELKAAELSLAAEKATAEGEKASLLEQKAAAEAEARAAAVAEAAYKEKRASQQQSVLASANTNLTAQVQAVSESAAAPVRAKVRPTYSTNASSYPIGECTWGVKTLAPWAGDYWGNGAQWATSAAAAGFRTGSTPQVGAIACWNDGGYGHVAVVTAVESTTRIQVSESNYAGNRTIGNHRGWFNPTTTSEGFVTYIYAD

SEQ ID NO: 4375 - protein, 79 aa, Streptococcus pneumoniae
FYYLEQQFCHQSFLHAQLLKQLLEKPLLYLIKVTLRFFSSYYVDTPSFKDNTSIPKKGLINITPLLHLYVVLIDNIFQK

SEQ ID NO: 4376 - protein, 164 aa, Streptococcus pneumoniae
MRQLKRVGVFLLLPFFVLIDAHISQLLGSFFPHVHLASHFLFLFLLFETIEVSEYLYLVYCFVIGLVYDVYFFHLIGITTLLFILLGAFLHKLNSVILLIRWTRMLAMIVLTFLFEMGSYLLAFMVGLTVDSMSIFIVYSLVPTMILNFLWITVFQFIFEKYYL

SEQ ID NO: 4377 - protein, 272 aa, Streptococcus pneumoniae
MNRFKKSKYVIIVFVTVLLVSALLATTYSSTIVTKLGDGISLVDRVVQKPFQWFDSVKSDLAHLTRTYNENESLKKQLYQLEVKSNEVESLKTENEQLRQLLDMKSKLQATKTLAADVIMRSPVSWKQELTLDAGRSKGASENMLAIANGGLIGSVSKVEEKSTIVNLLTNTENADKISVKIQHGSTTIYGIIIGYDKENDVLKISQLNSNSDISAGDKVTTGGLGNFNVADIPVGEVVATTHSTDYLTREVTVKLSADTHNVDVIELVGNS

SEQ ID NO: 4378 - protein, 264 aa, Streptococcus pneumoniae
MDSMILGRYIPGDSIVHRLDPRSKLLAMMLLILIVFWANNPLTNLILFIATGIFIALSGVSLSFFIQGLKSMFFLIAFTTIFQLFFISNGNVLFEFSFVRITDYALQQAGIIFCRFVLIIFFSTLLTLTTMPLSLASAVEALLAPLKRVKVPVHEIGLMLSMSLRFVPTLMDDTTRIMNAQKARGVDFGEGSIVQKVKAMIPILIPLFATSLKRADSLAIAMEARGYQGGKGRSQYRQLKWTLKDTLTILVILVLGCCLFFLKS

SEQ ID NO: 4379 - protein, 56 aa, Streptococcus pneumoniae
VDPIGEQSNPLGYNALKSYYPFSDSLNSSILTGNRLNDTPLSANRLQKAVILGTPN

SEQ ID NO: 4380 - protein, 279 aa, Streptococcus pneumoniae
MGIALENVNFTYQEGTPLASAALSDVSLTIEDGSYTALIGHTGSGKSTILQLLNGLLVPSQGSVRVFDTLITSTSKNKDIRQIRKQVGLVFQFAENQIFEETVLKDVAFGPQNFGVSEEDAVKTAREKLALVGIDESLFDRSPFELSGGQMRRVAIAGILAMEPAILVLDEPTAGLDPLGRKELMTLFKKLHQSGMTIVLVTHLMDDVAEYANQVYVMEKGRLVKGGKPSDVFQDVVFMEEVQLGVPKITAFCKRLADRGVSFKRLPVKIEEFKESLNG

SEQ ID NO: 4381 - protein, 115 aa, Streptococcus pneumoniae
AYSATSSIKCVTKTMVIPDWWSFLNRVINSFLPRGSRPAVGSSKTNIAGSMASMPAMATRLICPPDSSNGLRSKSDSSIPTRASFSRAVFTASSSETPKFCGPKATSFKTVSSKI

SEQ ID NO: 4382 - protein, 261 aa, Streptococcus pneumoniae
MKSIIDVKNLSFRYKENQNYYDVKDITFHVKRGEWLSIVGHNGSGKSTTVRLIDGLLEAESGEIVIDGQRLTEENVWNIRRQIGMVFQNPDNQFVGATVEDDVAFGLENQGLSRQEMKKRVEEALALVGMLDFKKREPARLSGGQKQRVAIAGVVALRPAILILDEATSMLDPEGRRELIGTVKGIRKDYDMTVISITHDLEEVAMSDRVLVMKKGEIESTSSPRELFSRNDLDQIGLDDPFANQLKKSLTRMAMIYLKII

SEQ ID NO: 4383 - protein, 74 aa, Streptococcus pneumoniae
SFRIPFTVPISSLRPSGSNILVASSKIKIAGLRATTPAMATRCFWPPDRRAGSLFLKSNMPTKARASSTLFFIS

SEQ ID NO: 4384 - protein, 181 aa, Streptococcus pneumoniae
MKKEQIPNLLTIGRILFIPIFIFILTIGNSIESHIVAAIIFAVASITDYLDGYLARKWNVVSNFGKFADPMADKLLVMSAFIMLIELGMAPAWIVAVIICRELAVTGLRLLLVETGGTILAAAMPGKIKTFSQMFAIIFLLLHWTLLGQVLLYVALFFTIYSGYDYFKGSAYVFKGTFGSK

SEQ ID NO: 4385 - protein, 276 aa, Streptococcus pneumoniae
MTSMRKKTIGEVLRLARINQGLSLDELQKKTEIQLDMLEAMEADDFDQLPSPFYTRSFLKKYAWAVELDDQIVLDAYDSGSMITYEEVDVDEDELTGRRRSSKKKKKKTSFLPLFYFILFALSILIFVTYYVWNYIQTQPEEPSLSNYSVVQSTSSTSSVPHSSSSSSSSIESAISVSGEGNHVEIAYKTSKETVKLQLAVSDVTSWVSVSESELEGGVTLSPKKKSAEATVATKSPVTITLGVVKGVDLTVDNQTVDLSKLTAQTGQITVTFTKN

SEQ ID NO: 4386 - protein, 427 aa, Streptococcus pneumoniae
MTKVVFEEKYYPAVKEMVYRTRLANGLTVALLPKKEFKEVYGSVTVQFGSVDTFVTEVDGDVKQYPGGIAHFLEHKLFEREDSSDLMSAFTSLGADSNAFTSFTKTNYLFSATDYFLENLDLLDELVTSAHFTEASILTEQDIIQQEREMYQDDPDSCLFFSTLANLYPGTPLATDIVGSEESISQINLTNLQENFTKFYKPVNMSLFLVGNFDVERVQDYFESKELKDSDFQEVAREKLFLQPVKLTDSMRMEVSSPKLAIGVRGKREVSEADCYRHHILLKLLFAMMFGWTSDRFQKCYESGKIDASLSLEVEITSRFHFVMLTMDTKEPVALSHQFRKAIRNFTKDLDITEEHLDIIKREMFGEFFSSMNSLEFIATQYDAFENGETIFDLPKILQEITLEDVLDAGHHLIDDGDIVDFTIFPS

SEQ ID NO: 4387 - protein, 416 aa, Streptococcus pneumoniae
MELVHGISTHFIQSKKFKTNKITVRFTAPLSLDTIAGHMLSASMLETANQMYPTSQDLRRHLASLYGTDMSTNCFRRGQSHIIELTFTYVRDEFLSRKNVLTSQILELVKETLFSPVVVDNGFDPALFEIEKKQLLASLAADMDDSFYFAHKELDKLFFHDERLQLEYSDLRNRILAETPQSSYSCFQEFLANDRIDFFFLGDFNEVEIQNVLESFGFKGRKGDVKVQYCQPYSNILQEGMVRKNVGQSILELGYHYRSKYGDEQHLPMIVMNGLLGGFAHSKLFTNVRENAGLAYTISSELDLFSGFLRMYAGINRENRNQARKMMNNQLLDLKKGYFTEFELNQTKEMIRWSLLLSQDNQSSLIERAYQNALFGKSSADFKSWIAKLEQIDKDAICRVANNVKLQAIYFMEGIE

SEQ ID NO: 4388 - protein, 122 aa, Streptococcus pneumoniae
MEYKLFEEFITLQALLKELGITHSGGAIKSFLSEHSVYFNRELESRRGKKLRIGDKVDIPDMNIDILLTQPTSEEQDEYQADKVEKERIAKLVKKMNKGVKKDKSKPASSPKSQQAPRFPGR

SEQ ID NO: 4389 - protein, 365 aa, Streptococcus pneumoniae
MWLQHLSLKTFRNYKETKIDFNPKLNVFLGRNAQGKTNMLEAIYFLALTRSHRTRTDKNLIHFDEEQLHLSGLVQKKTGSIPLEIELTQKGRVTKVNHLKQARLSDYVGHMNVVLFAPEDLQLIKGAPSIRRKFIDMELGQIKPIYLSDLTNYNHILKQRNTYLKSAQKIDETFLSVLDDQLVDYGCRVMNHRLDFIKKLESFGRKKHFELSNQIEELSISYQSSVNITDKQNLSESFKIALEKSRSRDLFKKNTGVGPHRDDISFYINGMDASFGSQGQHRSLVLSIKLAEIELMESITTESPILLLDDVMSELDNTRQLKLLETISQSIQTFITTTSLDHLQNLPENLSIFTIQDGKAAVNGN

SEQ ID NO: 4390 - protein, 492 aa, Streptococcus pneumoniae
MSNWDTKFLKKGFTFDDVLLIPAESHVLPNDADLTTKLADNLTLNIPIITAAMDTVTESQMAIAIARAGGLGVIHKNMSIAQQADEVRKVKRSENGVIIDPFFLTPEHTIAEADELMGRYRISGVPVVETLENRKLVGILTNRDLRFISDYNQPISNHMTSENLVTAPVGTDLATAESILQEHRIEKLPLVDEEGSLSGLITIKDIEKVIEFPNAAKDEFGRLLVAGAVGVTSDTFERAEALFEAGADAIVIDTAHGHSAGVLRKIAEIRAHFPDRTLIAGNIATAEGARALYEAGVDVVKVGIGPGSICTTRVIAGVGVPQVTAIYDAAAVAREYGKTIIADGGIKYSGDIVKALAAGGNAVMLGSMFAGTDEAPGETEIFQGRKFKTYRGMGSIAAMKKGSSDRYFQGSVNEANKLVPEGIEGRVAYKGAAADIVFQMIGGIRSGMGYCGAANLKELHDNAQFIEMSGAGLKESHPHDVQITNEAPNYSM

SEQ ID NO: 4391 - protein, 48 aa, Streptococcus pneumoniae
TAPATRRRPNSSLAAFGNSITFSISLIVIKPERLPSSSTNGSFSIRCS

SEQ ID NO: 4392 - protein, 341 aa, Streptococcus pneumoniae
MTKPIILTGDRPTGKLHIGHYVGSLKNRVLLQEEDKYDMFVFLADQQALTDHAKDPQTIVESIGNVALDYLAVGLDPNKSTIFIQSQIPELAELSMYYMNLVSLARLERNPTVKTEISQKGFGESIPTGFLVYPIAQAADITAFKANYVPVGTDQKPMIEQTREIVRSFNNAYNCDVLVEPEGIYPDNERAGRLPGLDGNAKMSKSLNNGIYLADDADTLRKKVMSMYTDPDHIRVEDPGKIEGNMVFHYLDVFGRPEDAQEIADMKERYQRGGLGDVKTKRYLLEILERELGPIRERRIEFAKDMGEVYNMIQKGSERAREVAGQTLSEVKGAMGLHYFN

SEQ ID NO: 4393 - protein, 540 aa, Streptococcus pneumoniae
LLTVSDVSLRFSDRKLFDDVNIKFTEGNTYGLIGANGAGKSTFLKILAGDIEPTTGHISLGPDERLSVLRQNHFDYEDERAIDVVIMGNEKLYSIMKEKDAIYMKEDFSDEDGVRAAELEGEFAELGGWEAESEASQLLQNLNIPEELHYQNMSELANGEKVKVLLAKALFGKPDVLLLDEPTNGLDIQSITWLEDFLIDFDNTVIVVSHDRHFLNKVCTHMADLDFGKIKLYVGNYDFWKESSELAAKLLADRNAKAEEKIKQLQEFVARFSANASKSRQATSRKKMLDKIELEEIVPSSRKYPFINFKAEREIGNDLLTVENLTVKIDGETILDNISFILRPDDKTALIGQNDIQTTALIRAIMGDIDYEGTVKWGVTTSQSYLPKDNSADFAGGESILDWLRQFASKEDDDNTFLRGFLGRMLFSGDEVNKPVNVLSGGEKVRVMLSKLMLLKSNVLVLDDPTNHLDLESISSLNDGLKNFKESIIFASHDHEFIQTLANHIIVLSKNGVIDRIDETYDEFLENAEVQAKVKELWKD

SEQ ID NO: 4394 - protein, 850 aa, Streptococcus pneumoniae
MKSFLKTYRTYFISFIIPVVIMSGVYLSQGIYWNSDNSPLLGDGFHQYVIFDIALRNILHGNSSLFYTFTSGLGLNFYALSSYYLGSFLAPLVYFFDLTNMPDAIYLTTLLKFGLIGLSTFFSLNKLFQSIPQTLKLALSTSYALMSFTVSQLEIKTWLDVFILIPLIITGLHLLITEKKLLLYFTSLSILFIQNYYFGYMTVLFLIFWYLCQISWDFKTRKSSVLDFIVISFLAGMASLIMTLPTLFDLQTHGEKLTEVTKFQTESSWYLDLFAKQFIGSFDTTKYGAIPMIFVGLLPFILTILFFTLKSIKFHVKLIYVIFFAFLIASFYIEALDLFWQGMHTPNMFLHRYAWIFSTLLIYTAAEVLKRLKELKVWNFLVSLFLVVAGFLATIYLKSHYSFLTDLNILLTLEFLVVYSLLLLAVIKKFISVNLFAILISLFILVEMSLNASSQMDGIAKEWGFASRSAYSRDIPAMESFSTYIGNQFTRTEKLQTQTGNDSMKFNYNGISQFSSVRNRSSSSTLDKLGFKSSGTNLNLRYANNSILADSLFGIQYNISDSPIDKYGFKDIYQKDNLTLYENQYSLPIAVASQSVYNDVKFNEHTLDNQASFLNQLANVNFDYFSPIPYEKTEKIENTNDLISVTSSSNEDAAIQYQIEVPENSQVYLSFINLHFSNDKQKKVDILVNGEKKTFTTDNVFSFFNLGYTKEKKTFNINVSFPGNSQVSFESPTFYRLDTKTFTEAIQKIKEQPVTVSTSKNKVFATYDVQQDTSIFFTIPYDKGWSAYQDGKKIEIKQAQTGFMKVDIPKGKGTITLSFIPYGFITGAICSFTSLLLFGIYNHRRKSSKA

SEQ ID NO: 4395 - protein, 104 aa, Streptococcus pneumoniae
LAGILVYGGVQLIGLTANHEMRIFILIILTSLVFMSMVTTLATWNSRIGAFFSLILLLLQLASSAGTYPLALTNDFFRSINPWLPMSYSVSGLRQTISINKSFS

SEQ ID NO: 4396 - protein, 112 aa, Streptococcus pneumoniae
LADGSRKLAEGGTKLTSGLEDLQTGLASLGQGLGNASDQLKSVSTESKNAEILSNPLNLSKTDNDQVPVNGIAIAPYMISVALFVAAISTNMIFAKLPSGRHPESRWAWLKS

SEQ ID NO: 4397 - protein, 255 aa, Streptococcus pneumoniae
MIGISLIPDLYNIIFLSSMWDPYGQLSDLPVAVVNNDKEASYNGNTMAIGKDMVSNLKENKTLDFHFVDEEEGKKGLEDGDYYMVVTLPSDLSDKTTTLSNIQSTAAYQSLTSEQQTEISDSVSQNSTDSIQSAQSIVALVQDLQGSLENLQNQSSNLSTLKNQANQVSPITSTSLIGLSSGLTEIQGDVTSKLVPASQSIASGVNAYTTGVDKVSQGASQLSEKNATLTGSLDKLVSGSNTLTQKSSRLTAGVG

SEQ ID NO: 4398 - protein, 180 aa, Streptococcus pneumoniae
MQESNKRLKTKRTIENAMVQLLMEQPFDKISTVKLVEKAGISRSSFYTHYKDKYDMIEHYQSKLFHTFEYIFQKHAHHKRDAILEVFEYLESEPLLAVLLSENGTKEIQNFLRNKLHIMLSTDLQKRFMQLNLNTTELEYSSIYLTHALFGVCQTWIAHGKKESSQEITDFLMKMLGDTN

SEQ ID NO: 4399 - protein, 250 aa, Streptococcus pneumoniae
MKVLILEDVIEHQVRLERILDEISKESNIPISYKTTGKVREFEEYIENDEVNQLYFLDIDIHGIEKKGFEVAQLIRHYNPYAIIVFITSRSEFATLTYKYQVSALDFVDKDINDEMFKKRIEQNIFYTKSMLLENEDVVDYFDYNYKGNDLKIPYHDILYIETTGVSHKLRIIGKNFAKEFYGTMTDIQEKDKHTQRFYSPHKSFLVNIGNIREIDRKNLEIVFYEDHRCPISRLKIRKLKDILEKKSQK

SEQ ID NO: 4400 - protein, 441 aa, Streptococcus pneumoniae
MDLFGFGTVIVHFLIISHSYHFICKGQINRKELFVFGAYTLLTEIVFDFPLYILYLDGLGIERFLFPLGLYSYFRWMKQYERDRGLFLSLLLSLLYESTHNFLSVTFSSITGDNFVLQYHFPFFFVVTVLTYFVTLKIIYYFHLELAYFDEDYLYPFLKKVFFALLLLHIVSFVSDMVSTIKHLNSFGSILSSIVFISLLLTFFAMNSHKVQMEKEIALKQKKFEQKHLQNYTDEIVGLYNEIRGFRHDYAGMLVSMQMAIDSGNLQEIDRIYNEVLVKANHKLRSDKYTYFDLNNIEDSALRSLVAQSIVYARNNGVEFTLEVKDTITKLPIELLDLVRIMSVLLNNAVEGSADSYKKQMEVAVIKMETETVIVIQNSCKMTMTPSGDLFALGFSTKGRNRGVGLNNVKELLDKYNNIILETEMEGSTFRQIIRFKREFE

SEQ ID NO: 4401 - protein, 159 aa, Streptococcus pneumoniae
MKIKVVTVGKLKEKYLKDGIAEYSKRISRFAKFEMIELSDEKTPDKASESENQKILEIEGQRILSKIADRDFVIVLAIEGKTFFSEEFSKQLEETSIKGFSTLTFIIGGSLGLSSSVKNRANLSVSFGRLTLPHQLMRLVLVEQIYRAFTIQQGFPYHK

SEQ ID NO: 4402 - protein, 397 aa, Streptococcus pneumoniae
MEANMKHLKTFYKKWFQLLVVIVISFFSGALGSFSITQLTQKSSVNNSNNNSTITQTAYKNENSTTQAVNKVKDAVVSVITYSANRQNSVFGNDDTDTDSQRISSEGSGVIYKKNDKEAYIVTNNHVINGASKVDIRLSDGTKVPGEIVGADTFSDIAVVKISSEKVTTVAEFGDSSKLTVGETAIAIGSPLGSEYANTVTQGIVSSLNRNVSLRSEDGQAISTKAIQTDTAINPGNSGGPLINIQGQVIGITSSKIATNGGTSVEGLGFAIPANDAINIIEQLEKNGKVTRPALGIQMVNLSNVSTSDIRRLNIPSNVTSGVVVRSVQSNMPANGHLEKYDVITKVDDKEIASSTDLQSALYNHSIGDTIKITYYRNGKEETTSIKLNKSSGDLES

SEQ ID NO: 4403 - protein, 252 aa, Streptococcus pneumoniae
MEKFEMISITDIQKNPYQPRKEFDREKLDELAQSIKENGVIQPIIVRQSPVIGYEILAGERRYRASLLAGLRSIPAVVKQISDQEMMVQSIIENLQRENLNPIEEARAYESLVEKGFTHAEIADKMGKSRPYISNSIRLLSLPEQILSEVENGKLSQAHARSLVGLNKEQQDYFFQRIIEEDISVRKLEALLTEKKQKKQQKTNHFIQNEEKQLRKLLGLDVEIKLSKKDSGKIIISFSNQEEYSRIINSLK

SEQ ID NO: 4404 - protein, 453 aa, Streptococcus pneumoniae
LKEKQFWNRILEFAQERLTRSMYDFYAIQAELIKVEENVATIFLPRSEMEMVWEKQLKDIIVVAGFEIYDAEITPHYIFTKPQDTTSSQVEEATNLTLYNYSPKLVSIPYSDTGLKEKYTFDNFIQGDGNVWAVSAALAVSEDLALTYNPLFIYGGPGLGKTHLLNAIGNEILKNIPNARVKYIPAESFINDFLDHLRLGEMEKFKKTYRSLDLLLIDDIQSLSGKKVATQEEFFNTFNALHDKQKQIVLTSDRSPKHLEGLEERLVTRFSWGLTQTITPPDFETRIAILQSKTEHLGYNFQSDTLEYLAGQFDSNVRDLEGAINDITLIARVKKIKDITIDIAAEAIRARKQDVSQMLVIPIDKIQTEVGNFYGVSIKEMKGSRRLQNIVLARQVAMYLSRELTDNSLPKIGKEFGGKDHTTVIHAHAKIKSLIDQDDNLRLEIESIKKKIK

SEQ ID NO: 4405 - protein, 378 aa, Streptococcus pneumoniae
MIHFSINKNLFLQALNTTKRAISSKNAIPILSTVKIDVTNEGITLIGSNGQISIENFISQKNEDAGLLITSLGSILLEASFFINVVSSLPDVTLDFKEIEQNQIVLTSGKSEITLKGKDSEQYPRIQEISASTPLILETKLLKKIINETAFAASTQESRPILTGVHFVLSQHKELKTVATDSHRLSQKKLTLEKNSDDFDVVIPSRSLREFSAVFTDDIETVEIFFANNQILFRSENISFYTRLLEGNYPDTDRLIPTDFNTTITFNVVNLRQSMERARLLSSATQNGTVKLEIKDGVVSAHVHSPEVGKVNEEIDTDQVTGEDLTISFNPTYLIDSLKALNSEKVTISFISAVRPFTLVPADTDEDFMQLITPVRTN

SEQ ID NO: 4406 - protein, 64 aa, Streptococcus pneumoniae
MYQVGNFVEMKKSHACTIKSTGKKANRWEITRVGADIKIKCSNCEHVVMMGRYDFERKMNKIID

SEQ ID NO: 4407 - protein, 374 aa, Streptococcus pneumoniae
MRNMALTAGIVGLPNVGKSTLFNAITKAGAEAANYPFATIDPNVGMVEVPDERLQKLTEMITPKKTVPTTFEFTDIAGIVKGASKGEGLGNKFLANIREVDAIVHVVRAFDDENVMREQGREDAFVDPLADIDTINLELILADLESVNKRYARVEKMARTQKDKESVAEFNVLQKIKPVLEDGKSARTIEFTDEEQKVVKGLFLLTTKPVLYVANVDEDVVSEPDSIDYVKQIREFAATENAEVVVISARAEEEISELDDEDKKEFLEAIGLTESGVDKLTRAAYHLLGLGTYFTAGEKEVRAWTFKRGMKAPQAAGIIHSDFEKGFIRAVTMSYEDLVKYGSEKAVKEAGRLREEGKEYIVQDGDIMEFRFNV

SEQ ID NO: 4408 - protein, 189 aa, Streptococcus pneumoniae
MTKLLVGLGNPGDKYFETKHNVGFMLIDQLAKKQNVTFTHDKIFQADLASFFLNGEKIYLVKPTTFMNESGKAVHALLTYYGLDIDDLLIIYDDLDMEVGKIRLRAKGSAGGHNGIKSIIQHIGTQVFNRVKIGIGRPKNGMSVVHHVLSKFDRDEYIGILQSVDKVDDSVNYYLQEKNFEKTMQRYNG

SEQ ID NO: 4409 - protein, 1169 aa, Streptococcus pneumoniae
MVTLLDLFSENDQIKKWHQNLTDKKRQLILGLSTSTKALAIASSLEKEDRIVLLMSTYGEAEGLVSDLISILGEELVYPFLVDDAPMVEFLMSSQEKIISRVEALRFLTDSSKKGILVCNIAASRLILPSPNAFKDSIVKISVGEEYDQHAFIHQLKENGYRKVTQVQTQGEFSLRGDILDIFEISQLEPCRIEFFGDEIDGIRSFEVETQLSKENKTELTIFPASDMLLREKDYQRGQSALEKQISKTLSPILKSYLEEILSSFHQKQSHADSRKFLSLCYDKTWTVFDYIEKDTPIFFDDYQKLMNQYEVFERELAQYFTEELQNSKAFSDMQYFSDIEQIYKKQSPVTFFSNLQKGLGNLKFDKIYQFNQYPMQEFFNQFSFLKEEIERYKKMDYTIILQSSNSMGSKTLEDMLEEYQIKLDSRDKTNICKESVNLIEGNLRHGFHFVDEKILLITEHEIFQKKLKRRFRRQHVSNAERLKDYNELEKGDYVVHHIHGIGQYLGIETIEIKGIHRDYVSVQYQNGDQISIPVEQIHLLSKYISSDGKAPKLNKLNDGHFKKAKQKVKNQVEDIADDLIKLYSERSQLKGFAFSADDDDQDAFDDAFPYVETDDQLRSIEEIKRDMQASQPMDRLLVGDVGFGKTEVAMRAAFKAVNDHKQVVILVPTTVLAQQHYTNFKERFQNFAVNIDVLSRFRSKKEQTATLEKLKNGQVDILIGTHRVLSKDVVFADLGLMIIDEEQRFGVKHKETLKELKKQVDVLTLTATPIPRTLHMSMLGIRDLSVIETPPTNRYPVQTYVLEKNDSVIRDAVLREMERGGQVYYLYNKVDTIVQKVSELQELIPEASIGYVHGRMSEVQLENTLLDFIEGQYDILVTTTIIETGVDIPNANTLFIENADHMGLSTLYQLRGRVGRSNRIAYAYLMYRPEKSISEVSEKRLEAIKGFTELGSGFKIAMRDLSIRGAGNLLGKSQSGFIDSVGFELYSQLLEEAIAKRNGNANANTRTKGNAELILQIDAYLPDTYISDQRHKIEIYKKIRQIDNRVNYEELQEELIDRFGEYPDVVAYLLEIGLVKSYLDKVFVQRVERKDNKITIQFEKVTQRLFLAQDYFKALSVTNLKAGIAENKGLMELVFDVQNKKDYEILEGLLIFGESLLEIKESKEENSI

SEQ ID NO: 4410 - protein, 98 aa, Streptococcus pneumoniae
LPKRISTWSLTFKSVELLAKIPLTLILPLSATSFATVRRLIIRDTFKYLSNLILITSIYYCTIFIYFIEEKYQMEFSSLDSFISNKLSPKISKPSKIS

SEQ ID NO: 4411 - protein, 88 aa, Streptococcus pneumoniae
MRLDKYLKVSRIIKRRTVAKEVADKGRIKVNGILAKSSTDLKVNDQVEIRFGNKLLLVKVLEMKDSTKKEDAAGMYEIISETRVEENV

SEQ ID NO: 4412 - protein, 122 aa, Streptococcus pneumoniae
MSKNIVQLNNSFIQNEYQRRRYLMKERQKRNRFMGGVLILIMLLFILPTFNLAQSYQQLLQRRQQLADLQTQYQTLSDEKDKETAFATKLKDEDYAAKYTRAKYYYSKSREKVYTIPDLLQR

SEQ ID NO: 4413 - protein, 73 aa, Streptococcus pneumoniae
MKIMLLNIHERSTIILSRGKKFIRFLTCFKGDKMENLLDVIEQFLSLSDEKLEELADKNQLLRLQEEKERKNA

SEQ ID NO: 4414 - protein, 445 aa, Streptococcus pneumoniae
MKSWKNWLIKINYCVYKKKRKGRMRKFLIILLLPSFLTISKVVSTEKEVVYTSKEIYYLSQSDFGIYFREKLSSPMVYGEVPVYANEDLVVESGKLTPKTSFQITEWRLNKQGIPVFKLSNHQFIAADKRFLYDQSEVTPTIKKVWLESDFKLYNSPYDLKEVKSSLSAYSQVSIDKTMFVEGREFLHIDQAGWVAKESTSEEDNRMSKVQEMLSEKYQKDSFSIYVKQLTTGKEAGINQDEKMYAASVLKLSYLYYTQEKINEGLYQLDTTVKYVSAVNDFPGSYKPEGSGSLPKKEDNKEYSLKDLITKVSKESDNVAHNLLGYYISNQSDATFKSKMSAIMGDDWDPKEKLISSKMAGKFMEAIYNQNGFVLESLTKTDFDSQRIAKGVSVKVAHKIGDADEFKHDTGVVYADSPFILSIFTKNSDYDTISKIAKDVYEVLK

SEQ ID NO: 4415 - protein, 425 aa, Streptococcus pneumoniae
MREPDFLNHFLKKGYFKKHAKAVLALSGGLDSMFLFKVLSTYQKELEIELILAHVNHKQRIESDWEEKELRKLAAEAELPIYISNFSGEFSEARARNFRYDFFQEVMKKTGATALVTAHHADDQVETILMRLIRGTRLRYLSGIKEKQVVGEIEIIRPFLHFQKKDFPSIFHFEDTSNQENHYFRNRIRNSYLPELEKENPRFRDAILGIGNEILDYDLAIAELSNNINVEDLQQLFSYSESTQRVLLQTYLNRFPDLNLTKAQFAEVQQILKSKSQYRHPIKNGYELIKEYQQFQICKISPQADEKEDELVLHYQNQVAYQGYLFSFGLPLEGESIQQIPVSRETSIHIRHRKTGDVLIQNGHRKKLRRLFIDLKIPMEKRNSALIIEQFGEIVSILGIATNNLSKKTKNDIMNTVLYIEKIDR

SEQ ID NO: 4416 - protein, 180 aa, Streptococcus pneumoniae
MLENDIKKVLVSHDEITEAAKKLGAQLTKDYAGKNPILVGILKGSIPFMAELVKHIDTHIEMDFMMVSSYHGGTASSGVINIKQDVTQDIKGRHVLFVEDIIDTGQTLKNLRDMFKAREAASVKIATLLDKPEGRVVEIEADYTCFTIPNEFVVGYGLDYKENYRNLPYIGVLKEEVYSN

SEQ ID NO: 4417 - protein, 652 aa, Streptococcus pneumoniae
MKKQNNGLIKNPFLWLLFIFFLVTGFQYFYSGNNSGGSQQINYTELVQEITDGNVKELTYQPNGSVIEVSGVYKNPKTSKEGTGIQFFTPSVTKVEKFTSTILPADTTVSELQKLATDHKAEVTVKHESSSGIWINLLVSIVPFGILFFFLFSMMGNMGGGNGRNPMSFGRSKAKAANKEDIKVRFSDVAGAEEEKQELVEVVEFLKDPKRFTKLGARIPAGVLLEGPPGTGKTLLAKAVAGEAGVPFFSISGSDFVEMFVGVGASRVRSLFEDAKKAAPAIIFIDEIDAVGRQRGVGLGGGNDEREQTLNQLLIEMDGFEGNEGIIVIAATNRSDVLDPALLRPGRFDRKVLVGRPDVKGREAILKVHAKNKPLAEDVDLKLVAQQTPGFVGADLENVLNEAALVAARRNKSIIDASDIDEAEDRVIAGPSKKDKTVSQKERELVAYHEAGHTIVGLVLSNARVVHKVTIVPRGRAGGYMIALPKEDQMLLSKEDMKEQLAGLMGGRVAEEIIFNVQTTGASNDFEQATQMARAMVTEYGMSEKLGPVQYEGNHAMLGAQSPQKSISEQTAYEIDEEVRSLLNEARNKAAEIIQSNRETHKLIAEALLKYETLDSTQIKALYETGKMPEAVEEESHALSYDEVKSKMNDEK

SEQ ID NO: 4418 - protein, 207 aa, Streptococcus pneumoniae
RPTASISSIKMIAGAAFLASSKRERTRLAPTPTNISTKSEPEILKNGTPASPATALASKVLPVPGGPSKRTPAGIRAPSFVNRFGSFKNSTTSTSSCFSSSAPATSENLTLISSLFAALALLRPKLIGLRPLPPPIFPIIENRKKNRIPNGTMDTSRLIHIPLELSCLTVTSALWSVASFCNSDTVVSAGRIVLVNFSTLVTDGVKN

SEQ ID NO: 4419 - protein, 35 aa, Streptococcus pneumoniae
MTIIPSFPSKPSISIKSWFKVCSRSSLPPPRPTPR

SEQ ID NO: 4420 - protein, 159 aa, Streptococcus pneumoniae
MIKELYEEVQGTVYKCRNEYYLHLWELSDWDQEGMLCLHELISREEGLADDIPRLRKYFKTKFRNRILDYIRKQESQKRRYDKEPYEEVGEISHRISEGGLWLDDYYLFHETLRDYRNKQSKEKQEELERVLSNERFRGRQRVLRDLRIVFKEFTIRTH

SEQ ID NO: 4421 - protein, 81 aa, Streptococcus pneumoniae; identical to SEQ ID NO: 3696

SEQ ID NO: 4422 - protein, 49 aa, Streptococcus pneumoniae; identical to SEQ ID NO: 3697

SEQ ID NO: 4423 - protein, 61 aa, Streptococcus pneumoniae; identical to SEQ ID NO: 3698

SEQ ID NO: 4424 - protein, 86 aa, Streptococcus pneumoniae; identical to SEQ ID NO: 3699

SEQ ID NO: 4425 - protein, 135 aa, Streptococcus pneumoniae
FIGIRSLSEIGNPGWTPHPNSALPPRISNVDASPKAISERTSYLQVRLEFLRYPQVIQALFNVPWFGPPVRLTAPSTCSWVGHMVSGLRHDTKAPYSDSVSLRLRLFNLTSHHNVTRRFILQKARSHPLTGSNLL

SEQ ID NO: 4426 - protein, 51 aa, Streptococcus pneumoniae
MRSSTPHGIPSSHIERSPTIPIKVSTASVNCFSPGTFSAQGHSTSELLRTL

SEQ ID NO: 4427 - protein, 51 aa, Streptococcus pneumoniae; identical to SEQ ID NO: 2933

SEQ ID NO: 4428 - protein, 81 aa, Streptococcus pneumoniae; identical to SEQ ID NO: 2934

SEQ ID NO: 4429 - protein, 77 aa, Streptococcus pneumoniae; identical to SEQ ID NO: 2935

SEQ ID NO: 4430 - protein, 68 aa, Streptococcus pneumoniae
MDNARFHRMGKLELLCEEFGHKLLPLLPYSPEYNPIEKTWAHIKKNLKKVLPRCHTFYEALLSCSCFN

SEQ ID NO: 4431 - protein, 81 aa, Streptococcus pneumoniae
NTTIISISSCFSTLFKTFLKDKEKIVNALQLPYSNAKLEATNNLIKLIKHNAFGFRNFENFKKERTKFVLSRSSLSSTHYS

SEQ ID NO: 4432 - protein, 47 aa, Streptococcus pneumoniae
MSFIAQDFDKLNIITVLESRTQAIIRNPMNTRLSSDTESSFNKIVRN

SEQ ID NO: 4433 - protein, 90 aa, Streptococcus pneumoniae
YKKIQTRILLRKGRFKCYHCSKMEVAETSIVKKNHQIPCIINQKIDQKLIEKTSMTDIDHQLSISTSTVIRKINDFHFEHDFSRLPEIMS

SEQ ID NO: 4434 - protein, 80 aa, Streptococcus pneumoniae
LIMLQKIYEQMTNFYDSIEEEYGPTFGDNFDWEHVHFKFLIYYLVRYGIGCRKDFIVYHYRVAYRLYLEKLVMNRGFISC

SEQ ID NO: 4435 - protein, 442 aa, Streptococcus pneumoniae
MYVRKEEPEGSDKIMTSVVVVGTQWGDEGKGKITDFLSANAEVIARYQGGDNAGHTIVIDGKKFKLHLIPSGIFFPEKISVIGNGMVVNPKSLVKELSYLHEEGVTTDNLRISDRAHVILPYHIELDRLQEEAKGDNKIGTTIKGIGPAYMDKAARVGIRIADLLDKDIFRERLERNLAEKNRLFEKLYDSKAIVFDDIFEEYYEYGQQIKKYVIDTSVILNDALDNGKRVLFEGAQGVMLDIDQGTYPFVTSSNPVAGGVTIGSGVGPSKIDKVVGVCKAYTSRVGDGPFPTELFDEVGERIREVGHEYGTTTGRPRRVGWFDSVVMRHSRRVSGITNLSLNSIDVLSGLDTVKICVAYDLDGQRIDYYPASLEQLKRCKPIYEELPGWSEDITGVRNLEDLPENARNYVRRVSELVGVRISTFSVGPGREQTNILESVWS

SEQ ID NO: 4436 - protein, 140 aa, Streptococcus pneumoniae
LREAEIALEHDEIPIGCVIVKDGEIIGRGHNAREELQRAVMHAEIMAIEDANLSEESWRLLDCTLFVTIEPCVMCSGAIGLARIPNVVYGAKNQKFGGAGSLYNILTDERLNHRVEVEIGILEDECAAIMQDFFRNRRKK

SEQ ID NO: 4437 - protein, 147 aa, Streptococcus pneumoniae
MKIRGFELVSSFTDENLLPKRETAHAAGYDLKVAVRTVVAPGEIVLVPTGVKAYMQPTEVLYLYDRSSNPRKKGLVLINSVGVIDGDYYGNPGNEGHIFAQMKNITDQEVVLEVGERIVQAVFATFLIADGDAADGVRTGGFGSTGH

SEQ ID NO: 4438 - protein, 185 aa, Streptococcus pneumoniae
MAFELVDLDRQGTRMKIIFVRHGEPDYRELEERSYIGFGIDLAPLSEMGRQQVQKLSKNPLLSSAEIIVSSAVTRALETASYVVCATGFPLRVEPLLHEWQVYKTGIENFETARRLFLENKGELLPNSPIQYETATEMKSRFLECMSKYREHQTVVVVAHRMLMRQFVPNEKIDFCQVIECELEI

SEQ ID NO: 4439 - protein, 67 aa, Streptococcus pneumoniae
TCHSCNKGSTLKGKPVAQTTYEAVSKALVTAEDTIISADESKGFLLNFWTCCRPISDKGAKSIPNPI

SEQ ID NO: 4440 - protein, 454 aa, Streptococcus pneumoniae
VIAKKKATFVCQNCGYNSPKYLGRCPNCGSWSSFVEEVEVAEVKNARVSLTGEKTKPMKLAEVTSINVNRTKTEMEEFNRVLGGGVVPGSLVLIGGDPGIGKSTLLLQVSTQLSQVGTVLYVSGEESAQQIKLRAERLGDIDSEFYLYAETNMQSVRAEVERIQPDFLIIDSIQTIMSPEISGVQGSVSQVREVTAELMQLAKTNNIAIFIVGHVTKEGTLAGPRMLEHMVDTVLYFEGERHHTFRILRAVKNRFGSTNEIGIFEMQSGGLVEVLNPSQVFLEERLDGATGSSIVVTMEGTRPILAEVQALVTPTMFGNAKRTTTGLDFNRASLIMAVLEKRAGLLLQNQDAYLKSAGGVKLDEPAIDLAVAVAIASSYKDKPTNPQECFVGELGLTGEIRRVNRIEQRINEAAKLGFTKIYVPQNSLTGITLPKEIQVIGVTTIQEVLKKVFA

SEQ ID NO: 4441 - protein, 206 aa, Streptococcus pneumoniae
LHKLFKIRHDSLLENLIVKYFSYLIIFKRICHGLCKDLFQDFLNRCHANDLNFLRQSDSCQGILRYINLSKAQFSSFVDALLNTIHAPNLSCQAQFSDKTFLRISWLVFVARSNSNCNSQVNGRFIQFNTTSRFEIGILILQEKPCPFFQNSHNQASTVKIKSCRSTLGISKHGRCYQSLNLRQNRTRPFHGYNDGGTSRPIQTLF

SEQ ID NO: 4442 - protein, 165 aa, Streptococcus pneumoniae
VSYFEQFMQANQAYVALHGQLNLPLKPKTRVAIVTCMDSRLHVAQALGLALGDAHILRNAGGRVTEDMIRSLVISQQQMGTREIVVLHHTDCGAQTFENEPFQEYLKEELGVDVSDQDFLPFQDIEESVREDMQLLIESPLIPDDVIISGAIYNVDTGSMTVVEL

SEQ ID NO: 4443 - protein, 263 aa, Streptococcus pneumoniae
VYEEKQYFIFILLLCIGLQYETIYYTDGSRSGAEYGLMGVSIFLALFYMIPALYFLFRIGKKWELPKKVLILSLLGGMFLAGWLSSFANTYIHDLLGVLFPDSPFLNAFESAIVAPLVEEPLKLLPLVFVLALIPVRKLKFLFLLGIASGLGFQMIEDIGYIRTDLPEGFDFTISRILERIISGIASHWTFSGLAVVGVYLLYRAYKGQKVGKKQGLIFLGLALGTHFLFNSPFCGVGNRVAFSDSSGYGYCSLWFLSCLLLC

SEQ ID NO: 4444 - protein, 322 aa, Streptococcus pneumoniae
MSFSDLKLFALSSNKELAERVAQEIGIELGKSSVRQFSDGEIQVNIEESIRGKHVFILQSTSSPVNDNLLEILIMVDALKRASAESVNVVMPYYGYARQDRKARAREPITSKLVANMLEVAGVDRLLTIDLHAAQIQGFFDIPVDHLMGAPLIADYFERRGMVGSDYVVVSPDHGGVTRARKLAEFLKTSIAIIDKRRSVDKMNTSEVMNIIGKVEGKTCILIDDMIDTAGTICHAADALAEAGAVEVYASCTHPVLSGPATDNIQKSAIKKLVVLDTIYLPEERLIDKIEQISIAHLLGDAIVRIHEKRPLSPLFDIEKKI

SEQ ID NO: 4445 - protein, 159 aa, Streptococcus pneumoniae
MEQLHFITKLLDIKDPNVQILNIINKDTHKEIIAKLDYDAPSCPECGNQLKKYDFQKPSKIPYLETTGIPTRILLRKRRFKCYHCSKMMVAETSDDVQSYFFSFYYITVLNLALLDSPLLSIYSEKRRKNLRIISGLVIKFFSQYRKVEKVVVFHEYVR

SEQ ID NO: 4446 - protein, 112 aa, Streptococcus pneumoniae
LEFFGNKPFTQQPQRAISQANQLLDYKSWSEEDRKMFSQLHMREEQVLLAQDYALETARAEDLEQGLERGKVEGRAERKLFAFLDIVRQGLLTSEVASQQLGMSVSEFEALL

SEQ ID NO: 4447 - protein, 121 aa, Streptococcus pneumoniae
IYKHIAPVYVIAIVDSNYFSDDLAFHSFSMREDTTGEVLAITNNGQENHLVKMAFLELKNTEKPAKTRFASHGWSFSATSPLPSNRNEPLAKQINCWTTRAGPRRTGKCLVNYICEKNKSC

SEQ ID NO: 4448 - protein, 130 aa, Streptococcus pneumoniae
VFVDLVSITFSLMNFFKILINLTAQVSPQVIDEKILMMDLNLNNYLSTVIQLRQDVYTGIKILHRVGHGRQDMNVTSLQNSHIFGWQVQHIADKLTSDFWVAENFLSNQVIGRANSQMSENHPFPPSIVN

SEQ ID NO: 4449 - protein, 117 aa, Streptococcus pneumoniae
MILRHLGISPTNDLVAKKIFSNPEITCQFIRDMLDLPAKNVTILEGSNIHVLPSMPYSVQDFYTSIDVLAELDNGTQVIIEIQVHHQNFFINHLWAYLCSQVNQNLEKIHQREGDTH

SEQ ID NO: 4450 - protein, 889 aa, Streptococcus pneumoniae
MVFFDSFLYNGCMDKKKLLLIDGSSVAFRAFFALYQQLDRFKNAAGLHTNAIYGFQLMLSHLLERVEPSHILVAFDAGKTTFRTEMYADYKGGRAKTPDEFREQFPFIRELLDHMGIRHYELAQYEADDIIGTLDKLAEQDGFDITIVSGDKDLIQLTDEHTVVEISKKGVAEFEAFTPDYLMEEMGLTPAQFIDLKALMGDKSDNIPGVTKVGEKTGIKLLLEHGSLEGIYENIDGMKTSKMKENLINDKEQAFLSKTLATIDTKAPIAIGLEDLVYSGPDVENLGKFYDEMGFKQLKQALNVSSADVAKGLDFTIVDQISQDMLSEESIFHFELFGENYHTDNLVGFAWSCGDKLYATDKLELLQDPIFKDFLEKTSLRVYDFKKVKVLLQRFGVDLQAPAFDIRLAKYLLSTVEDNEIATIASLYGQTYLVDDETFYGKGVKKAIPEREKFLEHLACKLAVLVETEPILLEKLSENGQLELLYDMEQPLAFVLAKMEIAGIVVKKETLLEMQAENELVIEKLTQEIYELAGEEFNVNSPKQLGVLLFEKLGLPLEYTKKTKTGYSTAVDVLERLAPIAPIVKKILDYRQIAKIQSTYVIGLQDWILADGKIHTRYMQDLTQTGRLSSVDPNLQNIPARLEQGRLIRKAFVPEWEDSVLLSSDYSQIELRVLAHISKDEHLIKAFQEGADIHTSTAMRVFGIERPDNVTANDRRNAKAVNFGVVYGISDFGLSNNLGISRKEAKAYIDTYFERFPGIKNYMDEVVREARDKSYVETLFKRRRELPDINSRNFNIRGFAERTAINSPIQGSAADILKIAMIQLDKALVAGGYQTKMLLQVHDEIVLEVPKSELVEMKKLVKQTMEEAIQLSVPLIADENEGATWYEAK

SEQ ID NO: 4451 - protein, 123 aa, Streptococcus pneumoniae
LLWWVCLTVKKTTSNRVTKEMQARGYKIIPVNPKTAGGEILGEKAYASLAEIPFPVDIVNVYRRSEFLPDVARDFLKADAKIFWAQLGLESLEAKEILRDGGCDDIVMNRCIKREHTRLIEEA

SEQ ID NO: 4452 - protein, 136 aa, Streptococcus pneumoniae; identical to SEQ ID NO: 4068

SEQ ID NO: 4453 - protein, 104 aa, Streptococcus pneumoniae
LRKHKKKVADGLPFVLYSMKIKEQTRKLAAGCSKHCFEVADRTDEVSSKHRFEVVDRTDEVSSKHRFEVVDRTDEVSSKHCFEVADRTDEAYPPHLRQSESEVV

SEQ ID NO: 4454 - protein, 238 aa, Streptococcus pneumoniae
MKVFQHVNIVTCDQDFHVYLDGILAVKDSQIVYVGQDKPAFLEQAEQIIDYQGAWIMPGLVNCHTHSAMTGLRGIRDDSNLHEWLNDYIWPAESEFTPDMTTNAVKEALTEMLQSGTTTFNDMYNPNGVDIQQIYQVVKTSKMRCYFSPTLFSSETETTAETISRTRSIIDEILKYKNPNFKVMVAPHSPYSCSRDLLEASLEMAKELNIPLHVHVAETKEESGIILKRYCKRPPCFS

SEQ ID NO: 4455 - protein, 170 aa, Streptococcus pneumoniae
LLTGSNLNEREIERLASSQVAIAHNHISNLKLASGIAPIIQLQKAGVAVGIATDSVASNNNLDMFEEERIAVLLQKIKSGNASQFPIETALKVLTIEGAKVFGMKNQIESLKVGKQADFLVIQPQGKIHLQPQENMLSHLVYAVKSSDVDDVYIAGEQVVKQGQVLTVEL

SEQ ID NO: 4456 - protein, 125 aa, Streptococcus pneumoniae
MQDFCKLFLKFFVIFLLKFYCQDLTLLNNLFSGDINIIYITRFNCINQVRQHIFLRLEMNFPLWLNDQKICLLADFQTFYLIFHSKDLSPFDCQYLESCFDWKLAGIPTFYLLKKNCNPFFLKHI

SEQ ID NO: 4457 - protein, 166 aa, Streptococcus pneumoniae
MSEAIIAKKAELVDVVAEKMKAAASIVVVDARGLTVEQDTVLRRELRGSEVEYKVIKNSILRRAAEKAGLEDLASVFVGPSAVAFSNEDVIAPAKILNDFSKNAEALEIKGGAIEGAVASKEEILALATLPNREGLLSMLLSVLQAPVRNVALAVKAVAESKEDAA

SEQ ID NO: 4458 - protein, 122 aa, Streptococcus pneumoniae
MALNIENIIAEIKEASILELNDLVKAIEEEFGVTAAAPVAVAAADAADAGAAKDSFDVELTSAGDKKVGVIKVVREITGLGLKEAKELVDGAPALVKEGVATAEAEEIKAKLEEAGASVTLK

SEQ ID NO: 4459 - protein, 114 aa, Streptococcus pneumoniae
LISSASAVATPSLTSAGAPSTSSLASLRPRPVISRTTLITPTFLSPADVNSTSNESLAAPASAASAAATATGAAAVTPNSSSIAFTRSFNSRIEASLISAIMFSMFNAIVISSK

SEQ ID NO: 4460 - protein, 195 aa, Streptococcus pneumoniae
MKRIIPVYIFQQVNVLLVSLYLLKFLCIGELTILQILYGSSLISFLWMYGQRKQAHKVNMKSRMKWLGIGFVSLLIISLCFSLIHAQESTNQANLIGLQHQVPWFSFLLFLINASMVEEFLYREILWNLVRKLDIRVALTSVLFALAHHPGTIIAWCLYVSLGMFLGLVRYKLDLWGSMGLHLVWSLLVYSLLLF

SEQ ID NO: 4461 - protein, 504 aa, Streptococcus pneumoniae
MDYNFNLEHPFFFTNNDYSTDTSIKYQVSLPFNWHEVMNNDEWVYQYPIGKFVERQGWKIHISSEYNSSHELLQDVAKICHEMRIPFKHLSTEDKFIMRNGKLVSRGFSGKFITCYPNQNELESVLQRLESALKQYNGPYILSDKRWDEAPIYLRYGVFRPSRDDEKKVAIDELIVGDEVVKDERLPVFKIPKGIVPPDFLNKWLDKKDKKQGDFPFIIDNAIRFSNSGGIYNARLKEDGKKIILKEARPYTGLGFDGTYSSEKLASECKALKILNEWSETPKIYWHGKIWEHTFLGIEHMKGVPLNRWVTNNFPLYEVVDKTKDYLLRVSKIVEKLIDLTNKFHSENVYHQDLHLGNILVKDEDEISIIDWEQAVFSNDEKVVHKVAAPGFRAWRETLPSEIDWYGIRQIAHYLYMPLVTTSDLTYNYVSQTRIEGKKLFESLGYTREHIDYVESLLSYLDSKCPQIENISRKKVLKPMHEIRTIESEQDIQDFIIKAFLLVN

SEQ ID NO: 4462 - protein, 197 aa, Streptococcus pneumoniae
VIHMKDVVYSITPENKLSIDFSFKSPFRVLLTGTSGSGKTTILNLINGSLKPQKGYVNLLSHGKKSSDSIPTVDQTPYIFDTTIRENVTLFQNEYFSDDQIIEVLKKVNLYEELEKIDILNYQCGENGSNLSGGQKQKIALARALIRNNKVYLFDEISANLDNDNSNSIHDILFNLGISFIEVSHHYDLNDKRYTDI

SEQ ID NO: 4463 - protein, 96 aa, Streptococcus pneumoniae
PFCGFKEPLIKFKIVVFPLPEVPVNNTLNGDLNEKSILNLFSGVIEYTTSFMCITSIDEVYSPLLSCSASIKFFSPLKYFKNGFLKSLVVFILFNE

SEQ ID NO: 4464 - protein, 246 aa, Streptococcus pneumoniae
MDKDYILKVKGLYHQFLLGNNKTLQVLKNVSLSASRGEFISILGISGSGKSTLLKCISSLLEPTSGEVILNGINPYKIRNAKLSSIRRNEVSFIFQAYNLIPSLPVIENIALPLRLSQKKLTIKNVENLLKRMKFNAGLNDFVGTLSGGEQQKVAIARAVIADSDIIFADEPTGALDSVSREVIFELLRELVGAGKCVIMVTHDIELASKTDRALILKDGKIFKELHRPSGEELYKILEVQSTTEE

SEQ ID NO: 4465 - protein, 60 aa, Streptococcus pneumoniae
GLIPFKITSPLVGSSKLEIHFNKVDFPEPLIPRILINSPLEAERETFFSTCNVLLFPSKN

SEQ ID NO: 4466 - protein, 128 aa, Streptococcus pneumoniae
LKIFPSFNINARSVFEANSISCVTIITHLPAPTNSLNNSKITSRETLSKAPVGSSANIISLSAITALAIATFCCSPPDRVPTKSFKPALNFILLSKFSTFLIVNFFCDNRKGSAIFSITGREGIKLYA

SEQ ID NO: 4467 - protein, 439 aa, Streptococcus pneumoniae
MLRLVYYQFLHNKKQWLGVSPVIFVSSLVMGLAVNGVINVENNSQVFVGLPDPKPIFMFPIVFGGVTLFFVLSNIINMLVEIFRDDYELLEVLGASRLQLSFLVGGQIFIISSIISFIAYLCSIFVTSNYYYFLQYFFGENILPDIQFQMSAVGCIITVVLISFLAFLSGCFYTFKKIRNRKSSKIRHVLSIVKRILLLAGFSVIWLLSLQQIFQDSTILAKAQIIFNIVILDIVIIYQLSPFIQSCFIKLLSIIIFRNNFMFIVSKWNLLYRKPYIKSISAAITGAILLISSFQMISQNILSQFQDDSDLELKVAFIVYVGAPILIVLANIISIAFLSSHQERIEIQQFEILGTSNYQMVKIKVGEAIFLTFVTSLIAFLLNIKIMVLIYYSLEDILIDDMNLLGLILPNFIVSIILFILIFITKSSYFIFKNAKIIS

SEQ ID NO: 4468 - protein, 59 aa, Streptococcus pneumoniae
VSGIKVSFSLFSTNLTGQDLYTGGVFGAERSILILCVVFILTVVLLQRACREELAHKGD

SEQ ID NO: 4469 - protein, 73 aa, Streptococcus pneumoniae
MKVVNLYDLKQMGNKGGCTIQLIHHFPFGMGLGHLKKDYIEFKRVGIFDGKAVEVTLREPYSRDLLQVVKSIK

SEQ ID NO: 4470 - protein, 45 aa, Streptococcus pneumoniae
MIIFYSLWTMLMDNAIWHKSSALKIPTNIGFAFIPPYTPEMNPIE

SEQ ID NO: 4471 - protein, 87 aa, Streptococcus pneumoniae
LADSGYQGLMKIYLQAQTPRKSSKLKPLTAEDKAYNHALSKGRSKVENIFAKVKTFKMFSTTYRNHRKRFGLRMNLIADIINHELGF

SEQ ID NO: 4472 - protein, 232 aa, Streptococcus pneumoniae
MSQISKEALIEQIKDGIIVSCQALPHEPLYTEAGGVIPLLVKAAEQGGAVGIRANSVRDIKEIKEVTKLPIIGIIKRDYPPQEPFITATMKEVDELAELDIEVIALDCTKRERYDGLEIQEFIRQVKEKYPNQLLMADTSIFEEGLAAVEAGIDFVGTTLSGYTSYSPKVDGPDFELIKKLCDAGVDVIAEGKIHTPEQAKQILEYGVRGIVVGGAITRPKEITERFVAGLK

SEQ ID NO: 4473 - protein, 307 aa, Streptococcus pneumoniae
MKIDVINHLDSPGLAGMICRRINNRILVYGGSYFPNNDPLKSSKVQSNKIRVYDEKFNLLYEQDGKISPDKGITIEVENEIYYILGSSIYRITIGESVEETCIGNFDFQLESGYGCYFDGHLFFGFQESYLFNIETQELFKKSDFPVSGRGQGLSVKYQNELYYLGGANNEAYLDGYKYSLKKDKWEKLEFELPSSVLGASSIQINESGLLILGGFNEIVYNKAVIDLATPGYREEYFSKGRDFFNWNRSMRILDLETGKVKIIANDERFALCGAGFLKTDNGYYVVSGECSPGRRTSDILLLEEEM

SEQ ID NO: 4474 - protein, 542 aa, Streptococcus pneumoniae
MKKIVKLALTAAAVLIAVVGLVACSSGSKKSDFSESGKEKVFYLSGLLQGTGDRIPYVWQNGDGLVPYLLYRTLLMADSKYEKSTPDLAKDWKKSDDEKTYEFTLKDGLKWSDGEALTASDVEFSVKLALKASVINGIFPSTFTKIEGAKDFKDDKADKISGLTVDGNKVTFKLTAPVGDFEQMMTQFFILPKHKLESENPLELNNSSFWTAPVTSGMYKVKEISAGNFLEYDKNENYENEKPKFDKVVFNYISDPVLALQDGKSYFYSTNKPQEISQLDAVSTLTKKPIDILFYRYFIANLAGVEGNGDSLIANPKVREAILYAINRDELAKSVFSGIADVNNTGVPSSLEAHLKSANKFEYNPEKAKQLLKEAKYDNSRNLILAYYYKDQASQDFMQAVSYQLNEVGIKNEVVQITSDATTGLFKTRKYDLAYKGLSSFGYETWYGEYSSTNTNFKNITNGETSFDELSKKLSETSDVKERNKILASLQKLEQEKLLKLNLFTFKNFLYLNTEKVLIPDDVQFGNPFYKFDYKFEKWDAK

SEQ ID NO: 4475 - protein, 316 aa, Streptococcus pneumoniae
MKKYILKKVLFMIPMLLIISFLVFIALDLTPADPLTYMVSPDMASSAEQIEKLRQQLGLNDPVLVRYGRWLWQLLHGDFGYSIVNGNPISKIVGQALPATFELAFVSLIISTIVGIVIGVISAVKQNGIIDNVARFLAVIGTAIPQFFFGILILNFFAIQLRILPIGGRFASGDFTFINRVEHLILPVMAMSIALVAALMRYTRNSMLDVFNADYVKTARAKGVPEWKVYFKHIFRNAMRPILVLLIFRLPMLIGGSVIIESVFSWPGIGSIILSSVTAGDYPVIMITTLMISVVVLFASLLVDIMAAILDPRIRY

SEQ ID NO: 4476 - protein, 295 aa, Streptococcus pneumoniae
THVFVIRKEVNVMKPMPLWKRNLKKFYNNKLAFIGFICFMLILLACILAPLLTTYSPDVVDLGSMNRPPSAKHILGTDKLGRDVFARILYGGRVSIQVGMYGAICGAVIGTVLGGIAGYFGGKIDALLVRLAELFLTFPNMIVILLLSSIFGQGVFNLIFVFSVMGWMTTFRMVRNEFMSLKQETYVDVCRAFGFSDSRIIFNNILRNAISPVIVSLSLNVAGFILSEAGLSFLGVGVPSDIPTWGNIINAAKTADVIKNSWWLWLVPGSIITLFVLSINFIGDGLRDIMDPKQQ

SEQ ID NO: 4477 - protein, 203 aa, Streptococcus pneumoniae
LSTSYCCFGSIISRNPSPIKLIERTKRVMIDPGTNHNHQLFLITSAVLAAFMIFPQVGISEGTPTPKKLRPASLRMKPATFKDNDTITGEIAFLKILLKIIRLSEKPKALHTSTYVSCFKDMNSLRTIRNVVIQPITENTKIRLNTPCPKILESKRMTIIFGNVKNNSARRTRRASIFPPKYPAIPPSTVPITAPQIAPYIPT

SEQ ID NO: 4478 - protein, 660 aa, Streptococcus pneumoniae
MNQTVLDVKNLKTEFITDKKAFPIIKDVNFTLERGKVLGIVGESGCGKSVTVNTVLNLLPKNGRIAEGEITYFDEDKPIELQKLKQYGKEFRKLRGENISMIFQDPMSALNPVYTIGNQITEVLHEHYDISKEEANKRAIEMLEKLGIHNAAERMNDYPHQFSGGQRQRIVIAIAMVCNPDILIADEPTTALDVTIQAQILDLLDDLRKEHGTSIILITHDLGVIAQIADEVAVMYAGEVVEVGTVAQIFDQPKHPYTRSLLRSIPNPENMDKKLHVIQGSVPSISEISEKGCRFANRIPWLEKEHHEEEPQLHDLGDGHFVRCSCYKHFFFEDKEEETLAEKHVGNVVLEVKNIKKYYYPKKQLFKPLGSPLKALDDVSLELRKGTTIGIVGESGSGKSTIAKSLMKLHDITDGEINIDLNGKTQNIYGIKRKEDLDFRKKVQMVFQDPYASLNPTKKIYNSFDEPMIVHNIGNKEERFERMKEALKMVNVPVEYLERYPHEFSGGQRQRLCIARALCMKPEILILDEPVSALDLSVQAQVLNYLVEIQNKEDLTYVFISHDLGVVKYMCDYLYVIHKGRIVEAGSREDIYNNPMHIYTKKLLAAIPEVDYHFKEALATKRKENEVEFKAQYHEFYDEDGRAYDLKQVSPTHFVALKPE

SEQ ID NO: 4479 - protein, 65 aa, Streptococcus pneumoniae
VFPFKSILISPSVISWSFINDFAIVLLPLPDSPTIPIVVPFLNSRDTSSSAFNGEPSGLNSCFLG

SEQ ID NO: 4480 - protein, 469 aa, Streptococcus pneumoniae
MKLNKKIYFFDKGIFNPYRMSNVKLKVNQAVKDKEIFFTEEKPWEIRFDNSYPNVFFDDLAGVYRCYYSTFTDDEESEKYSLEERKERQYLPRAKRIVSLCYAESKDGVNWVKPNLGITEFRGSTENNIIGHFLHGTSVFLDKHDADENRRYKMFTKIDYGNGVHFIAVAFSKDGLHFDEYIKVPNFNPRADTHNHIIYDEALNRYVLITRTWRDSLRLPCVSTSADFINWTPIQEILNVCDYENQIYSMPIFKRGDYILGLASVFHEGDQLNKNYDTVDLQLTYSYRHVGWHYLNTDTPLIPRGKGQYGDGEFDCGCIYSSAPVTIGDRTYFYYMGGNGQHTNFRETSLSRAYIEKDHFAYWDTKRPEYPGVLYTNGFIFLNDQVYLDADIAAGGFVTIELFENNHTPMEITASLEKIEDGRYQVLFSEPLPRTQTRLKISFKNAKIYAIEGNLDIFRIESDNALLRG

SEQ ID NO: 4481 - protein, 162 aa, Streptococcus pneumoniae
MKYDLYDNCIELLKEREVTIEDMAALVIFSQQKYYPELTLDDASYAIQRVLKKREVQNVIMTGIELDKLAEAQKLSPEFQKIMEKDNPLYGIDEVIVLSILNLYGSIAFTNYGYLDKLKPLILERLNENHEGVCNVFLDDIVGAIAAAACSKIAHNHASDEI

SEQ ID NO: 4482 - protein, 135 aa, Streptococcus pneumoniae
MTVINKFVLMEQAKKVLKNAYCPYSKFPVGAAILFKDGKVITGANIENVSFGVTNCAERSAIFYGASQGYRKGDILAIAVAGETEDYLPPCNICRQVMVEFCEPDTLVFLLNGKGNILELRLEELVPYSFSSLEM

SEQ ID NO: 4483 - protein, 94 aa, Streptococcus pneumoniae
MASKFHTIFSIIASNMGNNGQFTFGYRHDFFQNQLAIFNALVDTFTRRTIDIKTLNTFINEVLNLGTRTLWTYFSLLIITCVEGWNDTFVFFQI

SEQ ID NO: 4484 - protein, 273 aa, Streptococcus pneumoniae
VQYFIDKGVQGLYVNGSSGECIYQSVEDRKLILEEVMAVAKGKLTIIAHVACNNTKDSMELARHAESLGVDAIATIPPIYFRLPEYSVAKYWNDISSAAPNTDYVIYNIPQLAGVALTPSLYTEMLKNPRVIGVKNSSMPVQDIQTFVSLGGEDHIVFNGPDEQFLGGRLMGARAGIGGTYGAMPELFLKLNQLIADKDLETARELQYAINAIIGKLTSVHGNMYGVIKEVLKINEGLTIGSVRSPLTPVTEEDRPVVEEAAALIRETKERFL

SEQ ID NO: 4485 - protein, 67 aa, Streptococcus pneumoniae
MTHYVANPEVVILEGGIMGQEAILKPKIRAALKEVLVPSLAENTRLEFAHHQNTAGMLGAYYHFKIK

SEQ ID NO: 4486 - protein, 172 aa, Streptococcus pneumoniae
MHIHYNTNQTTLPLEINSFLPQDHLVFTIEKVVNTDEKEVNHLIKYAMFDKEQKRGYKQSARNLANWHYNDKEDSYTHPDGWYYRFHHTKYQKTQTDFQQEIKVYYADEPESAPQKGLYMNERYQNLKAKECQALLSPQGRQIFAQRKIDVEPVFGQIKASLGYKRCNLRGK

SEQ ID NO: 4487 - protein, 213 aa, Streptococcus pneumoniae
LTIEPGQRIALVGQSGSGKSTLSKIPSGLYKIDTGKVLFDGVNINQIDKKILSQNLGVVPQDSFLLNRSILDNITLKHEVTSQKIEEVCKAVQIYDEIMAMPMKFNTIISEMGSNISGGQRQRIALARALINNPSIVILDEATSALDTINEKRITKYIQSQGCTQIIIAHRLSTIKDADIIFVMKGGKIVESGNHKYLMTLGGEYYSLYTKRK

SEQ ID NO: 4488 - protein, 62 aa, Streptococcus pneumoniae
TISEPNTIPFNKPKEIPYSTGKSKKIANTIPIITPSEAIVKITYSFSFFIFFTPHFLFVYKL

SEQ ID NO: 4489 - protein, 448 aa, Streptococcus pneumoniae
MTSAKEYIQSVFETVKARNGHEAEFLQAVEEFFNTLEPVFEKHPEYIEENILARITEPERVVSFRVPWVDRDGKIQVNRGYRVQFNSAVGPYKGGLRFHPTVNQGILKFLGFEQIFKNVLTGLPIGGGKGGSDFDPKGKTDAEVMRFCQSFMTELQKHIGPSLDVPAGDIGVGGREIGYLYGQYKRLNQFDAGVLTGKPLGFGGSLIRPEATGYGLVYYTEEMLKANGNSFAGKKVVISGSGNVAQYALQKATELGATVISVSDSNGYVIDENGIDFDLLVDVKEKRRARLTEYAAEKATATYHEGTVWTYAGNYDIALPCATQNEINGEAAKRLVAQGVICVSEGANMPSDLDAIKVYKENGILYGPAKAANAGGVAVSALEMSQNSLRLSWTREEVDDRLKDIMTNIFNTAKTTSETYGLDKDYLAGANIAAFENVANAMIAQGIV

SEQ ID NO: 4490 - protein, 137 aa, Streptococcus pneumoniae; identical to SEQ ID NO: 3410

SEQ ID NO: 4491 - protein, 56 aa, Streptococcus pneumoniae
MDNAIWHKSSTLNIPTNIDFTFIPPYTPEMNPLNKCGKRFVNVDLRIKPFELWKIS

SEQ ID NO: 4492 - protein, 217 aa, Streptococcus pneumoniae; identical to SEQ ID NO: 2811

SEQ ID NO: 4493 - protein, 72 aa, Streptococcus pneumoniae
MSISPRFETLEQAIASKDLEKVREAFKKMNSTWTINESVVRDNSTAHYGRVETAISFLPSSMETEPTDESGT

SEQ ID NO: 4494 - protein, 94 aa, Streptococcus pneumoniae
MARKETMAERKYCKMKKDIHPEYRPVVFMDTTTGYQFLSGSTKRSNETVEFEGETYPLIRVEISSDSHPFYTGRQKFTQADGRVDRFNKKYGLK

SEQ ID NO: 4495 - protein, 311 aa, Streptococcus pneumoniae
MEICQQILEKIKEYDTIIIHRHMKPDPDALVSQVGLKALLEHHFPEKTIKAVGFDEPTLTWMAEMDLVEDRAYQGALVIVCDTANTARIDDKRYSQGDFLIKIDHHPNDDVYGDLSWVDTSSSSASEMITLFAQTTQLALADRDAELLFAGIVGDTGRFLYPSTTARTLRLAAYLREHNFDFAALTRKMDTMSYKIAKLQGYIYNHLEVDENGAARVILSQKILKQYNVTDAETATIVGAPGRIDRVSLWGIFVHRADGHYRVRLRSKVHPINEIAKEHDGGGHPLASGANSYSLKENEIIYQKLKNLLKN

SEQ ID NO: 4496 - protein, 144 aa, Streptococcus pneumoniae
MALAKIVFASMTGNTEEIADIVADKLRDLGLDVDVDECTTVDASDFLEADIAIVATYTYGDGELPDEMMDFYEDLADLNLNGKIYGVVGSGDTFYDEFCKAVDDFDRVFVSTGAEKGSECVKVDLSAEEEDIERLEQFSEKLVA

SEQ ID NO: 4497 - protein, 88 aa, Streptococcus pneumoniae
VDLDIIRQEIDQIDDQIVKLLEERMHLVEGVVAYKKASGKPILDTKREAVIFEKVRSRVEDKRYQETIVATFSDILKRSRDYQDQNIK

SEQ ID NO: 4498 - protein, 124 aa, Streptococcus pneumoniae
MKKEQFYPLGIFLAAMLGGLVRYLVSTWLPASPDFPWGTLFVNYLGIFCLIYLVKGYLVYKGTSKGLILALGTGFCGGLTTFSSLMLDTVKLLDTGRYLSLILYLLLSIGGGLLLAYYLGRKKW

SEQ ID NO: 4499 - protein, 109 aa, Streptococcus pneumoniae
MVIVYLAIACGLGALVRYFFSRYNQASKLPLGTLIANLLGCFLIGVFYNHVESKEVYAILATGFCGGLTTFSTLNDELQRLLSDKKVFYSYLTLTYIGGLVAIFLGILL

SEQ ID NO: 4500 - protein, 115 aa, Streptococcus pneumoniae
MNPLIQSLTEGQLRTDIPSFRPGDTVRVHAKVVEGNRERIQIFEGVVIARKGAGISENYTVRKISNGVGVERIFPIHTPRVEKIEVVRYGKVRRAKLYYLRALQGKAARIKEIRR

SEQ ID NO: 4501 - protein, 268 aa, Streptococcus pneumoniae
MSIKLIAVDIDGTLVNSQKEITPEVFSAIQDAKEAGVKVVIATGRPIAGVAKLLDDLQLRDQGDYVVTFNGALVQETATGHEIISESLTYEDYLDMEFLSRKLGVHMHAITKDGIYTANRNIGTYTVHESTLVSMPIFYRTPEEMAGKEIVKCMFIDEPEILDAAIEKIPAEFYERYSINKSAPFYLELLTKNVDKGSAITHLAEKLGLTKDETMAIGDEENDRAMLEVVGNPVVMENGNPEIKKIAKYITKTNDESGVAHAIRTWVL

SEQ ID NO: 4502 - protein, 447 aa, Streptococcus pneumoniae
MLPKRAGFCYNGHMNEKVFRDPVHNYIHVNNQIIYDLINTKEFQRLRRIKQLGTSSYTFHGGEHSRFSHCLGVYEIARRITEIFEEKYPEEWNPAESLLTMTAALLHDLGHGAYSHTFEHLFDTDHEAITQEIIQNPETEIHQVLLQVAPDFPEKVASVIDHTYPNKQVVQLISSQIDADRMDYLLRDSYFTGASYGEFDLTRILRVIRPVENGIAFQRNGMHAIEDYVLSRYQMYMQVYFHPATRAMEVLLQNLLKRAKELYPEDKNFFARTSPHLLPFFEKNVTLTDYLALDDGVMNTYFQLWMTSPDKILADLSQRFVNRKVFKSITFSQEDQDQLTSMRKLVEDIGFDPDYYTAIHKNFDLPYDIYRPESQNPRTQIEILQKNGELAELSSLSPIVQSLAGSRHGDNRFYFPKEMLDQNSIFASITQQFLHLIENDHFTPNKN

SEQ ID NO: 4503 - protein, 125 aa, Streptococcus pneumoniae
VKIRMRNTIQFDEQLEVIDQLYDVEVHEKGDYSYLLFYNEEKEKVVIKFHGQELVMSRFSNPKTIMRFLKDSDSLAYIPTPMGMQEFIIQTSRYQVDRQKIELAYQLQNQEGHPFASYQLEITWG

SEQ ID NO: 4504 - protein, 110 aa, Streptococcus pneumoniae
MEIEKTNRMNALFEFYAALLTDKQMNYIELYYADDYSLAEIAEEFGVSRQAVYDNIKRTEKILEDYEMKLHMYSDYIVRSQIFDQILERYPKDDFLQEQIEILTSIDNRE

SEQ ID NO: 4505 - protein, 184 aa, Streptococcus pneumoniae
LSLLANLPAKVVLPAPCKPTIMMMVGILGDLIISAVSEPKTAVSSSSTILIICCAGLSVSMTSCPTARSRTFLIKSFTTGKATSASSKAKRISLVASWTSDSEIFPFLRRFLKTFCKRSVKLSNAIFLPLILYYQCLLKFLSAPAENHPWDSAPRFGQKSDYGQCSPSTCAISSHNLPESFLFA

SEQ ID NO: 4506 - protein, 523 aa, Streptococcus pneumoniae
MAFESLTERLQNVFKNLRKKGKISESDVQEATKEIRLALLEADVALPVVKDFIKKVRERAVGHEVIDTLNPAQQIIKIVDEELTAVLGSDTAEIIKSPKIPTIIMMVGLQGAGKTTFAGKLANKLKKEENARPLMIAADIYRPAAIDQLKTLGQQIDVPVFALGTEVPAVEIVRQGLEQAQTNHNDYVLIDTAGRLQIDELLMNELRDVKTLAQPNEILLVVDAMIGQEAANVAREFNAQLEVTGVILTKIDGDTRGGAALSVRHITGKPIKFTGTGEKITDIETFHPDRMSSRILGMGDMLTLIEKASQEYDEQKALEMAEKMRENTFDFNDFIDQLDQVQNMGPMEDLLKMIPGMANNPALQNMKVDERQIARKRAIVSSMTPEERENPDLLNPSRRRRIAAGSGNTFVEVNKFIKDFNQAKQLMQGVMSGDMNKMMKQMGINPNNLPKNMPNMGGMDMSALEGMMGQGGMPDLSALGGAGMPDMSQMFGGGLKGKIGEFAMKQSMKRMANKMKKAKKKRK

SEQ ID NO: 4507 - protein, 162 aa, Streptococcus pneumoniae
LSYLRFFFAFFILLAIRFMDCFIANSPILPFKPPPNIWLISGIPAPPRADKSGIPPCPIIPSRADISIPPIFGIFLGRLFGLIPICFIILFISPDITPCMSCLAWLKSLMNLLTSTNVFPEPAAIRRRRLGFNKSGFSRSSGVIEDTMARLRAIWRSSTFMF

SEQ ID NO: 4508 - protein, 256 aa, Streptococcus pneumoniae
LLPLSIQKGKGFLRIIPFLFAIIGGYLFALTLGLVDFTPVLKANWFESPGFYLPFSTGGAFKEYNLYFGPEAIAILPIAIVTISEHIGDHTVLGQICGRQFLKEPGLHRTLIGDGIATSVSAFLGGPANTTYGENTGVIGMTRIASVSVIRNAAFIAIALSFLGKFTALISTIPNAVLGGMSILLYGVIASNGLKVLIKERVDFAQMRNLIIASAMLVLGLGGAILKLGPVTLSGTALSAMTGIILNLILPYENKD

SEQ ID NO: 4509 - protein, 146 aa, Streptococcus pneumoniae
  UNSURE (139): Xaa at each above location is unknown.
MTQESTVDLLLDVNQGPSDGKGILLSFLHVFAMFGATILVPLILGMPVSVALFASGVGTLIYMIATGFKVPVYLGSSFAFITAMSLAMKEMGGDVSAAQTGVILTGLVYVLVATSIRFVGPKCLDKLLPPIIIGPMIIXIGLGLAR

SEQ ID NO: 4510 - protein, 237 aa, Streptococcus pneumoniae
MKPETFYNLLAEQNLPLSNQQKEQFERYFELLVEWNEKINLTAITDKEEVYLKHFYDSIAPILQGLIPNETIKLLDIGAGAGFPSLPMKILYPELDVTIIDSLNKRINFLQLLAQELDLNGVHFYHGRAEDFAQDKNFRAQYDFVTARAVARMQVLSELTIPYLKVGGKLLALKASNAPEELLEAKNALNLLFSKVEDNLSYALPNRDPRYITVVEKKKETPNKYPRKAGMPNKRPL

SEQ ID NO: 4511 - protein, 186 aa, Streptococcus pneumoniae
MTWIILGVIALIVIFVIVSYNGLVKNRMQTKEAWSQIDVQLKRRNDLLPNLIETVKGYAKYEGSTLEKVAELRNQVAAATSPAEAMKASDALTRQVSGIFAVAESYPDLKASANFVKLQEELTNTENKISYSRQLYNSVVSNYNVKLETFPSNIIAGMFGFKAADFLQTPEEEKSVPKVDFSGLGD

SEQ ID NO: 4512 - protein, 302 aa, Streptococcus pneumoniae
VTKMLFDQIASNKRKTWILLLVFFLLLALVGYAVGYLFIRSGLGGLVIALIIGFIYALSMIFQSTEIVMSMNGAREVDEQTAPDLYHVVEDMALVAQIPMPRVFIIDDPALNAFATGSNPQNAAVAATSGLLAIMNREELEAVMGHEVSHIRNYDIRISTIAVALASAITMLSGMAGRMMWWGGAGRRRSDDDRDGNGLEIIMLVVSLLAIVLAPLAATLVQLAISRQREFLADASSVELTRNPQGMINALDKLDNSKPMSRHVDDASSALYINDPKKGGGFQKLFYTHPPISERIERLKQM

SEQ ID NO: 4513 - protein, 519 aa, Streptococcus pneumoniae
MHYEHSRKGNHMIKINHLTITQNKDLRDLVSDLTMTIQDGEKVAIIGEEGNGKSTLLKILMGEALSDFTIKGNIQSDYQSLAYIPQKLPEELKKKTLHDYFFLDSIDLDYSILYRLAEELHFDSNRFASDQEIGSLSGGEALKIQLIHELAKPFEILFLDEPSNDLDLETVDWLKGQIQKTRQTVIFISHDEDFLSETADTIVHLRLVKHRKEAETLVEHLDYDSYSEQRKANFAKQSQQAANNQRAYDKTMEKHRRVKQNVETALRATKDSTAGRLLAKKMKTVLSQEKRYEKTAQSMTQKPLEEEQIQLFFSDIQPLPASKVLVQLEKENLSIDDRVLVQKLQLTVRGQEKIGIIGPNGVGKSTLLAKLKQLLNDKREISLGFMPQDYHKKLQLDLSPIAYISKTGEKEELQKIHSHLASLNFSYPEMQHQIRSLSGGQQGKLLLLDLVLRKPNFLLLDEPTRNFSPTSQPQIKKLFATYPGGLITVSHDRRFLKEVCSIIYRMTEHGLELVNLEDL

SEQ ID NO: 4514 - protein, 91 aa, Streptococcus pneumoniae
CITKSSTLPSRAQSLCQKNSINMPEKEHKRAHKKRQKQDLLNKGSLFDRLSCSCLPYLRVLVSLYYTFKEILSTENWKFYALKSKNRSIET

SEQ ID NO: 4515 - protein, 121 aa, Streptococcus pneumoniae
VLYYRERVHQIKEDAHMEDKKLIQLLSKLNKSYQNCKQGTADDIRLQELLNTTMQELKKTEQLNNSILIDLEKFYQPTSPLIGLGSLKLNNQARTAWRNYDKIHYEHVKHVLSLYGPVFGF

SEQ ID NO: 4516 - protein, 180 aa, Streptococcus pneumoniae
MKLNIQEIRKQSEGLNFEQTLDLVDDLRARNQEILDVKDILAVGKVQYEDRMYFLDYQLSYTIVLASSRSMEPVELVESYPVTEVFMEGATNHLNQEILDDDLVLPIENGALDLAESVSDNILLNIPIKVLTAEEEAGQGFVSGNDWQIMTEEEYQAQQAVKKEENSPFAGLQGLFDGDE

SEQ ID NO: 4517 - protein, 61 aa, Streptococcus pneumoniae
LVKSRLGLASGKRAMISSSTFRARFFDKTIIHLRQIVLVSQQKDCFLLSLLLVELGILPLS

SEQ ID NO: 4518 - protein, 209 aa, Streptococcus pneumoniae
MVLSKKRARKVLEEIIALFPDAKPSLDFTNHFELLVAVMLSAQTTDAAVNKATPGLFVAFPTPQAMSVATESEIASHISRLGLYRNKAKFLKKCAQQLLDDFDGQVPQTREELESLAGVGRKTANVVMSVGFGIPAFAVDTHVERICKHHDIVKKSATPLEVEKRVMDILPPEQWLDAHQAMIYFGRAICHPKNPECDQYPQLYDFSNL

SEQ ID NO: 4519 - protein, 173 aa, Streptococcus pneumoniae
MKTKEVVDELTVKRAITRITYEIIERNKDLNKIVLAGIKTRGVFIAHRIQERLKQLENLSVPVVELDTKPFRDDVKSGEDTSLVSVDVTDREVILVDDVLYTGRTIRAAIDNIVGHGRPARVSLAVLVDRGHRELPIRPDYVGKNIPTSRSEEIIVEMTELDDQDRVLITEEA

SEQ ID NO: 4520 - protein, 307 aa, Streptococcus pneumoniae
MSENQQALNHVVSMEDLTVDQVMKLIKRGIEFKNGAQLPYEDHPIVSNLFFEDSTRTHKSFEVAEIKLGLERLDFDVKTSSVNKGETLYDTILTLSALGVDVCVTRHPEVDYYRELIDSPTITTSIINGGDGSGQHPSQSLLDLMTIYEEFGHFEGLKVAIAGDLDHSRVAKSNMQILKRLGAELFFAGPEEWRSQEFADYGKFVTIDEIIDQVDVMMFLRVQHERHDSGAVFSKEDYHAQHGLTQERYDRLKETAILMHPAPINRDVEIADHLVEAPKSRIVQQMTNGVFVRMAILESVLASRNAN

SEQ ID NO: 4521 - protein, 359 aa, Streptococcus pneumoniae
MTKRILVLEDGTVFEGKAFGADIDVTGEIVFNTGMTGYQESITDQSYNGQILTFTYPLVGNYGINRDDYESIIPTCKGVVVFEEARRASNWRNQMTLDEFLKAKKIPGISGIDTRALTKIIRKHGTMRATLTHVGDSMDHVTDQLQATVLPTDNIKQVSTKTSYPAPGVGLSVVLVDFGLKHSILRELSKRNCNVTVVPYSTTAEEILHLNPDGVMLSNGPGNPEDVPQALDMIRGVQGKIPIFGICMGHQLFAMANGAKTYKMKFGHRGFNHAVREIATGRVDFTSQNHGYAVSREDLPEHLIITHEEINDKSVEGVRHRYQPAFSVQYHPDAAPGPHDASYLFDEFIEMMEIFKQSN

SEQ ID NO: 4522 - protein, 1058 aa, Streptococcus pneumoniae
MPKRTDIQKIMVIGSGPIIIGQAAEFDYAGTQACLSLKEEGYEVVLVNSNPATIMTDKEIADKVYIEPITLEFVTRILRKERPDALLPTLGGQTGLNMAMELSKNGILDELGVELLGTKLSAIDQAEDRDLFKQLMEELEQPIPESEIVNTVEEAIAFAATIGYPVIVRPAFTLGGTGGGMCANEKELREITENGLKLSPVTQCLIERSIAGFKEIEYEVMRDSADNALVVCNMENFDPVGIHTGDSIVFAPAQTMSDYENQMLRDASLSIIRALKIEGGCNVQLALDPNSFKYYVIEVNPRVSRSSALASKATGYPIAKLAAKIAVGLTLDEVINPVTGSTYAMFEPALDYVVAKIPRFPFDKFEKGERRLGTQMKATGEVMAIGRNIEESLLKACRSLEIGVHHNEIPELAAVSDDALIEKVVKAQDDRLFYVSEAIRRGYTPEEIAELTKIDIFYLDKLLHIFEIEQELGAHPQDLEVLKTAKLNGFSDRKIAELWGTTDDQVRQLRLENKIIPVYKMVDTCAAEFDSETPYFYSTYGWENESIRSDKESVLVLGSGPIRIGQGVEFDYATVHSVKAIQAAGYEAIIMNSNPETVSTDFSVSDKLYFEPLTFEDVMNVIDLEQPKGVIVQFGGQTAINLAEPLAKAGVTILGTQVADLDRAEDRDLFEQALKELDIPQPPGQTATNEEEAALAARKIGFPVLVRPSYVLGGRAMEIVENEEDLRSYMRTAVKASPDHPVLVDSYIVGQECEVDAISDGKNVLIPGIMEHIERAGVHSGDSMAVYPPQTLSQKVQETIADYTKRLAIGLHCLGMMNIQFVIKDEKVYVIEVNPRASRTVPFLSKVTNISMAQVATKLILGQSLSELGYQNGLYPESTRVHIKAPVFSFTKLAKVDSLLGPEMKSTGEVMGSDATLEKALYKAFEASYLHLPTFGNVVFTIADDAKEEALNLARRFQNIGYGILATEGTAAFFASHGLQAQPVGKIGDDDKDIPSFVRKGRIQAIINTVGTKRTADEDGEQIRRSAIEHGVPLFTALDTANAMLKVLESRSFVTEAI

SEQ ID NO: 4523 - protein, 69 aa, Streptococcus pneumoniae
KKVFKIIKRIISSFFKNLDMMRFIVGIFISFSTKIMFLNNLYLSSLYNPPQSAFTISFNTMTIPFLHFF

SEQ ID NO: 4524 - protein, 280 aa, Streptococcus pneumoniae
MNFTLINWRIRMQYLEKKEIKEIQLALLDYIDETCKKYDIPYFLSYGTMLGAIRHKGMIPWDDDIDISLYREDYERLLKIIEEENHPRYKVLSYDTSSWYFHNFASILDTSTVIEDHVKYKRHDTSLFIDVFPIDRFTDLSIVDKSYKYVALRQLAYIKKSRAVHGDSKLKDFLRLCSWYALRFVNPRYFYKKIDQLVKNAVTNTPQYEGGVGIGKEGMKEIFPVDTFKELILTEFEGRMLPVPKKYDQFLTQMYGDYMTPPSKEMQEWYSHSIKAYRKS

SEQ ID NO: 4525 - protein, 267 aa, Streptococcus pneumoniae
MKQLTVEDAKQIELEILDYIDTLCKKHNINYIINYGTLIGAVRHEGFIPWDDDIDLSMPREDYQRFINIFQKEKSKYKLLSLETDKNYFNNFIKITDSTTKIIDTRNTKTYESGIFIDIFPIDRFDDPKVIDTCYKLESFKLLSFSKHKNIVYKDSLLKDWIRTAFWLLLRPVSPRYFANKIEKEIQKYSRENGQYMAFIPSKFKEKEVFPSGTFDKTIDLPFENLSLPAPEKFDTILTQFYGDYMTLPPEEKRFYSHEFHAYKLED

SEQ ID NO: 4526 - protein, 495 aa, Streptococcus pneumoniae
MKSIKLNALSYMGIRVLNIIFPILTGTYVARVLDRTDYGYFNSVDTILSFFLPFATYGVYSYGLRAISNVKDNKKDLNRTFSSLFYLCIACTILTTAVYILAYPLFFTDNPIVKKVYLVMGIQLIAQIFSIEWVNEALENYSFLFYKTAFIRILMLVSIFLFVKNEHDIVVYTLVMSLSTLINYLISYFWIKRDIKLVKIHLSDFKPLFLPLTAMLVFANANMLFTFLDRLFLVKTGIDVNVSYYTIAQRIVTVIAGVVTGAIGVSVPRLSYYLGKGDKEAYVSLVNRGSRIFNFFIIPLSFGLMVLGPNAILLYGSEKYIGGGILTSLFAFRTIILALDTILGSQILFTNGYEKRITVYTVFAGLLNLGLNSLLFFNHIVAPEYYLLTTMLSETSLLVFYIIFIHRKQLIHLGHIFSYTVRYSLFSLSFVAIYFLINFVYPVDMVINLPFLINTGLIVLLSAISYISLLVFTKDSIFYEFLNHVLALKNKFKKS

SEQ ID NO: 4527 - protein, 235 aa, Streptococcus pneumoniae
MIYAGILAGGTGTRMGISNLPKQFLELGDRPILIHTIEKFVLEPSIEKIVVGVHGDWVLHAEDLVDKYLPLHKERIIITKGGADRNTSIENIIEAIDAYRPLTPEDIVVTHDSVRPFITLRMIQDSIKLAQNHDAVDTVVEAVDTIVESTNGQFITGIPNRAHLYQGQTPQTFRCKDFMDLYGSLSDEEKEILTDACKIFVIKGKDVALAKGEYSNLKITTVTDLKIAKSMIEKD

SEQ ID NO: 4528 - protein, 346 aa, Streptococcus pneumoniae
LRKTSKMINQIYQLTKPKFINVKYQEEAIDQENHILIRPNYMAVCHADQRYYQGKRDPKILNKKLPMAMIHESCGIVISDPSGTYEVGQKVVMIPNQSPMQSDEEFYENYMTGTHFLSSGFDGFMREFVSLPKDRVVAYDAIEDTVAAITEFVSVGMHAMNRLLTLAHSKRERIAVIGDGSLAFVVANIINYTLPEAEIVVIGRHWEKLELFSFAKECYITDNIPEELAFDHAFECCGGDGTGPAINDLIRYIRPQGTILMMGVSEYKVNLNTRDALEKGLLLVGSSRSGRIDFENAIQMMKVKKFANRLKNILYLEEPVREIKDIHRVFATDLNTAFKTVFKWEV

SEQ ID NO: 4529 - protein, 289 aa, Streptococcus pneumoniae
VEKIIKEKISSLLSQEEEVLSVEQLGGMTNQNYLAKTTNKQYIVKFFGKGTEKLINRQDEKYNLELLKDLGLDVKNYLFDIEAGIKVNEYIESAITLDSTSIKTKFDKIAPILQTIHTSAKELRGEFAPFEEIKKYESLIEEQIPYANYESVRNAVFSLEKRLADLGVDRKSCHIDLVPENFIESPQGRLYLIDWEYSSMNDPMWDLAALFLESEFTSQEEETFLSHYESDQTPVSHEKIAIYKILQDTIWSLWTVYKEEQGADFGYYGVNRYQRAVKGLASYGGSDEK

SEQ ID NO: 4530 - protein, 292 aa, Streptococcus pneumoniae
MKSKNGVPFGLLSGIFWGLGLTVSAYIFSIFTDLSPFVVAAAHDFLSIFILLAFLLVKEGKVRLSIFLNIRNVSVIIGALLAGPIGMQANLYAVKYIGSSLASSVSAIYPAISVLLAFFFLKHKISKNTVFGIVLIIGGIIAQTYKVEQVNSFYIGILCALVCAIAWGSESVLSSFAMESELSEIEALLIRQVTSFLSYLVIVLFSHQSFTAVVNGQLLGLMIVFAAFDMISYLAYYIAINRLQPAKATGLNVSYVVWTVLFAVVFLGAPLDMLTIMTSLVVIAGVYIIIKE

SEQ ID NO: 4531 - protein, 229 aa, Streptococcus pneumoniae
VKAIILAAGLGTRLRPMTENTPKALVQVNQKPLIEYQIEFLKEKGINDIIIIVGYLKEQFDYLKEKYGVRLVFNDKYADYNNFYSLYLVKEELANSYVIDADNYLFKNMFRNDLTRSTYFSVYREDCTNEWFLVYGDDYKVQDIIVDSKAGRILSGVSFWDAPTAEKIVSFIDKAYASGEFVDLYWDNMVKDNIKELDVYVEELEGNSIYEIDSVQDYRKLEEILKNEN

SEQ ID NO: 4532 - protein, 282 aa, Streptococcus pneumoniae
MKITNYEIYKLKKSGLTNQQILKVLEYGENVDQELLLGDIADISGCRNPAVFMERYFQIDDAHLSKEFQKFPSFSILDDCYPWDLSEIYDAPVLLFYKGNLDLLKFPKVAVVGSRACSKQGAKSVEKVIQGLENELVIVSGLAKGIDTAAHMAALQNGGKTIAVIGTGLDVFYPKANKRLQDYIGNDHLVLSEYGPGEQPLKFHFPARNRIIAGLCRGVIVAEAKMRSGSLITCERAMEEGRDVFAIPGSILDGLSDGCHHLIQEGAKLVTSGQDVLAEFEF

SEQ ID NO: 4533 - protein, 170 aa, Streptococcus pneumoniae
LIICVFSKWISRVEDFSHIILFENLCKLRQLPSATSKQYFELTSSVLSATSKQYFELTSSVLSATSKQYFELTSSVLSATSKQYFELTSSVLSATSKQYFELTSSVLSATSKQYFELTSSVLSATSKQYFELTSSVLSTTSKQCFEQPVASFLVCALIFIEYKGKYSELK

SEQ ID NO: 4534 - protein, 151 aa, Streptococcus pneumoniae
LTFLIELFTSYFNSLYFPLYSMKIKAQTRKLATGCSKHCFEVVDKTDEVSSKYCFEVADKTDEVSSKYCFEVADKTDEVSSKYCFEVADKTDEVSSKYCFEVADKTDEVSSKYCFEVADKTDEVSSKYCFEVADKTDEVSSKYCFEVADGS

SEQ ID NO: 4535 - protein, 68 aa, Streptococcus pneumoniae
NGYYKKWSEIDDDTFRKSFYVSSALPCCVLSKLRLASEFDFHLLEMKLMRDISRHLSQDIMENDKKSS

SEQ ID NO: 4536 - protein, 347 aa, Streptococcus pneumoniae
VTNNKLYSLIEFRNKIYEELELSRSDLAILLCAMLIASIGLNMDSTPVIIGAMLISPLMTPILGVGLSLAIFDFKLLRKSFKILAIQILASLIASTLYFYLSPISYASSEIVARTSPTIWDVLIAFVGGIAGIIGARKKETNNIVPGVAIATALMPPLCTVGYAIASANLKFIIGSSYLFLINCSFIVIATYIGVRLMMVKKHYFKDNEEDSKMRRILLLVAVLLMIPSFISATTLVRETLKKESLKKFISEQFQGHNILKKTYSKKTHTLKLTISGNYLTEEELDMISSKRGDYGLSDVSVQVSQLSDSEQLSKEELVEYFFQYIKDKEAKEKEKANKFYTESEEQ

SEQ ID NO: 4537 - protein, 701 aa, Streptococcus pneumoniae
LKRCDTVATVTKKKKSTVKKNLVIVESPAKAKTIEKYLGRNYKVLASVGHIRDLKKSSMSVDIENNYEPQYINIRGKGPLINDLKKEAKKANKVFLASDPDREGEAISWHLAHILNLDENDANRVVFNEITKDAVKNAFKEPRKIDMDLVDAQQARRILDRLVGYSISPILWKKVKKGLSAGRVQSIALKLIIDRENEINAFQPEEYWTVDAVFKKGTKQFHASFYGVDGKKMKLTSNDEVKEVLSRLTSKDFSVDQVDKKERKRNAPLPYTTSSMQMDAANKINFRTRKTMMVAQQLYEGINIGSGVQGLITYMRTDSTRISPVAQNEAASFITDRFGSKYSKHGSKVKNASGAQDAHEAIRPSSVFNTPESIAKYLDKDQLKLYTLIWNRFVASQMTAAVFDTMAVKLSQKGVQFAANGSQVKFDGYLAIYNDSDKNKMLPDMVVGDVVKQVNSKPEQHFTQPPARYSEATLIKTLEENGVGRPSTYAPTIETIQKRYYVRLAAKRFEPTELGEIVNKLIVEYFPDIVNVTFTAEMEGKLDDVEVGKEQWRRVIDAFYKPFSKEVAKAEEEMEKIQIKDEPAGFDCEVCGSPMVIKLGRFGKFYACSNFPDCRHTQAIVKEIGVECPSCHQGQIIERKTKRNRLFYGCNRYPECEFTSWDKPVGRDCPKCGNFLMEKKVRGGGKQVVCSKGDYEEEKIK

SEQ ID NO: 4538 - protein, 119 aa, Streptococcus pneumoniae
MRLIYLIIGFLSLALAIVGVVLPLLPTTPFLLLSIACFSRSSKRFEDWLYHTKLYQTYVADFRETKSITRERKKKIIVSIYVLMGISIYFAPLLPVKIGLGALTIFITYYLFKVIPDKE

SEQ ID NO: 4539 - protein, 210 aa, Streptococcus pneumoniae
MIYEFCAENVTLLEKAMQAGARRIELCDNLAVGGTTPSYGVTKAAVELAANYDTTIMTMIRPRGGDFVYNDLEIAIMLEDICLTAQAGSQGVVFGALTADKKLDKPNLEKLIAASKGMEIVFHMAFDELSDEDQPEAIDWLSQAGVTRILTRAGVSGDSLEKRFVHYHRILEYAKGKIEILPGGGIDLDNRQTFIDQVGVTQLHGTKVVF

SEQ ID NO: 4540 - protein, 218 aa, Streptococcus pneumoniae
MFEIFKSYQFNQEKAHDYGFIENSEVWTYSCQILQGDFVMTVSITADNVNFQVFDQETGDLYPHVHMESMRGSFVGNVREACLEILYQIRKACFDVQDFICHQTKRIMTQVQEKYGNQLEYLWEKSPDTAVLRHEGNQKWYAVLMKISWNKLEKGREGQVEAVNLKHDQVANLLSQKGIYPAFHMSKRYWISVSLDDTLSDEEVLELIEKSWNLTSKK

SEQ ID NO: 4541 - protein, 210 aa, Streptococcus pneumoniae
MNFQLAKYSLLKKFLENIGFTTLEEYGAIFKYLIENVKTDRQIICSPHCHDDLGMAVANSLAAVKNGAGRVEGTINGIRERAENAALEEIAVALNIRQDYYQVETSIVLNETINTSEMVSRFSGIPVPKNKAVVGGNTFSHESGIHQDGVLKNPLTYEIITPELVGVKIPLGELSGRHAFVEKLRELALDFTEEDIKPLFAKFKALADKK

SEQ ID NO: 4542 - protein, 69 aa, Streptococcus pneumoniae
MVPATKARVSASVISYFLSASALNLAKSGLISSSVKSRANSLSFSTKAWRPDNSPSGILTPTNSGVMIS

SEQ ID NO: 4543 - protein, 144 aa, Streptococcus pneumoniae
LVAGTMVENPEGFHFDDLQLQTHADNDIEALVSLANMDGEKVEFNATGQGSVQAIFNAIDKFFNQSVRLVSYTINAVTDGIDAQDRVLVTVENRDTETIFNAAGLDFDVLKASAIAYINANTFVQKENAGEMGRSVSYHDMPSV

SEQ ID NO: 4544 - protein, 345 aa, Streptococcus pneumoniae
MAKKIVALVGDGIGPEIMEAGLEVLEALAEKTGFDYEIDRRPFGGADIDAAGPPLPDETLKASREADAILLAAIGSPQYDGAAVRPEQGLMALRKELNLYANIRPVKIFDSLKYLSPLKPERISGVDFVVVRELTGEIYFGDHILEERKARDINDYSYEEVERIIRKAFEIARNRRKIVTSIDKQNVLATSKLWRKVAEEVAQDFPDVTLEHQLVDSAAMLMITNPAKFDVIVTENLFGDILSDESSVLSGTLEVMPSASHSENGPSLYEPIHGSAPDIAGQGIANPISMILLVVMMLRDSFGRYEDTERIKRAVETSLAAGILTRDIGGQASTKEMMEAIIARL

SEQ ID NO: 4545 - protein, 89 aa, Streptococcus pneumoniae
MKLDEKITLVLLIWNVIIFLIYGIDKFKARRRAWRIPEKILLILALTCGGFGAWLAGITFHHKTRKWYFKTVWFLGMVTTLVALYFIWR

SEQ ID NO: 4546 - protein, 119 aa, Streptococcus pneumoniae
MVGSSREHAAWALADYGFKVVIAGSFGDIHYNNELNNGMLPIVQPREVREKLAQLKPTDQVTVDLEQQKIISPVEEFTFEIDSKWKHKLLNSLDDIGITLQYEELIAAYEKQRPAYWQD

SEQ ID NO: 4547 - protein, 78 aa, Streptococcus pneumoniae
NYDKTHSQEGYDILKGEGGCIVCPTKVGYIIMTSNKAGLERKFAAKERKRNKPGVVLCGSMDELRALAQLNPEIEAFY

SEQ ID NO: 4548 - protein, 88 aa, Streptococcus pneumoniae
LDEDILLGCILPWKPEAFEKLKAYGDGREELMTDVRGTSCFVIKFGKAGEQLAAKLWEEGKMVYASYASMTKRLKLAMRARCNGVYGR

SEQ ID NO: 4549 - protein, 644 aa, Streptococcus pneumoniae
LMNKRKVSLEDFYKWYSLNKEELLNKATVGEKFNDKLKEEFLQEWPLDRILTMSIDEYVIGKGQQNKSLCYALEKGKYKNLFLGISGGSASKFGIYWNKKTNKYKDQANNEISELDQRFSKLKSDLYEIIKEGIRFNFENPIFDMKRSTNEFIGRSAMVTKLLCIYTEGDPFFGVNINSQKEFWNHFVSQTNQGGPYLQNHKIIELVSKTYPELEPSKLGTMLFEYSKLFMENKEDNSTMDSSNNFSHQLTQSLLKSPNLILRGAPGTGKTYLAKEIAKELTDGNEDQIGFVQFHPSYDYTDFVEGLRPVSNGDGAIEFRLQDGIFKDFCQKAKETQLIGGQDNFDEAWDSYLEYINVAEEKEYITKTSYLSVNSRQNLSVNYDSGVPGWSLPSKYVYELYKDKNYNKQEYYKSGGKTVLETLRKRFGLKDYVSPTEIDTDKKFVFIIDEINRGEISKIFGELFFSIDPGYRGEKGSVSTQYANLHETDEKFYIPENVYIIGTMNDIDRSVDTFDFAMRRRFRFVEVTAEGQVGMLDKELNIHAEEAKIRLRNLNAAIENVQELNSHYHIGPSYFLKLKDVDFDYELLWSDYIKPLLEDYLRGSYDEVETLETLKKAFELTNNEQKDQAVADDNESDENDDADY

SEQ ID NO: 4550 - protein, 447 aa, Streptococcus pneumoniae
MTMKAMKTMMRITDNQHKIIKEKFVEEYPKLSNLLLDRTLESLSQDERIFIFPNDLTHTPDLDKKQKILETINQEIKTGNVIGFLGYGQERLTISSRFSDESNDHFLHYLLNKVLHINLTSLDVALSREERLYQLLMYLFPKYLQAAIRKGLYKEYHRFSHNDSHVKGVIDVRNHLKKNLPFTGNIAYTTREFTYDNPLMQLVRHTIEYIKNQKSIGQGVLDNLSTSRENVSEIVRVTPSYKLADRAKIIRGNQSKPIRHAYFHEYRNLQELCLMILNQEKHGLGYQDQKIYGILFDVAWLWEEYVYTLLPKGFVHPRNKDKTDGISVFSVGKRKVYPDFYDRERKIVLDAKYKKLELTEKGINREDLFQLISYSYILKAEKAGLIFPSMEQSVNSEIGKVAGYGAQLKKWSIRIPQNASSYSAFCKMMENSEENFKAIIDEEVGRK

SEQ ID NO: 4551 - protein, 328 aa, Streptococcus pneumoniae
MLNEFPIFDYEDIQLIPNKCVIKSRAEADTSVTLGNHTFKLPVVPANMQTILDENVAEQLAKGGYFYIMHRFDEAGRIPFIKRMHDQGLIASISVGVKDYEYDFVSQLKTDAPEYITIDIAHGHADSVISMIQHIKKELPDTFVIAGNVGTPEAVRELENAGADATKVGIGPGKVCITKVKTGFGTGGWQLAALRWCAKAARKPIIADGGIRTHGDIAKSIRFGASMIMIGSLFAGHIESPGKTIEVDGEQFKEYYGSASQYQKGAYKNVEGKRILLPAKGHLQDTLTEMEQDLQSAISYAGGRQVADLKHVDYVIVKNSIWNGDASH

SEQ ID NO: 4552 - protein, 77 aa, Streptococcus pneumoniae
PPSAIIGLRAALAHQRRAANCQPPVPKPVLTLVIQTLPGPIPTLVASAPAFSNSRTASGVPTFPAMTKVSGNSFLMC

SEQ ID NO: 4553 - protein, 66 aa, Streptococcus pneumoniae
FFHTNLFLTDNSPFYYIKKSPLSHSKTGLESIWEFFRQRFSVLAANLGQDKEKSPIKGFLGCLHPP

SEQ ID NO: 4554 - protein, 232 aa, Streptococcus pneumoniae
MKELQTVLKNHFAIEFTDKKLLETAFTHTSYANEHRLLKISHNERLEFLGDAVLQLLISEYLYKKYPKKPEGDLSKLRAMIVREESLAGFARDCQFDQFIKLGKGEEKSGGRNRDTILGDAFEAFLGALLLDKDVAKVKEFIYQVMIPKVEAGEFEMITDYKTHLQELLQVNGDVAIRYQVISETGPAHDKVFDVEVLVEGKSIGQGQGRSKKLAEQEAAKNAVEKGLDSCI

SEQ ID NO: 4555 - protein, 736 aa, Streptococcus pneumoniae
MYLKEIEIQGFKSFADKTKVVFDQGVTAVVGPNGSGKSNITESLRWALGESSVKSLRGGKMPDVIFAGTESRKPLNYASVVVTLDNHDGFIKDAGQEIRVERHIYRSGDSEYKIDGKKVRLRDIHDLFLDTGLGRDSFSIISQGKVEEIFNSKPEERRAIFEEAAGVLKYKTRRKETESKLQQTQDNLDRLEDIIYELDNQIKPLEKQAENARKFLDLEGQRKAIYLDVLVAQIKENKAELESTEEELAQVQELLMSYYQKREKLEEENQTLKKQRQDLQAEMAKDQGSLMDLTSLISDLERKLALSKLESEQVALNQQEAQARLAALEDKRNSLSKEKYDKESSLALLEGNLVQNNQKLNRLEAELLAFSDDPDQMIELLRERFVALLQEEADVSNQLTRIENELENSRQLSQKQADQLEKLKEQLATAKEKASQQKDELETAKVQVQKLLADYQAIAKEQEEQKTSYQAQQSQLFDRLDSLKNKQARAQSLENILRNHSNFYAGVKSVLQEKDRLGGIIGAVSEHLTFDVYYQTALEIALGASSQHIIVEDEESATKAIDFLKRNRVGRATFLPLTTIKARTISSQNQDAIAVSPGFLGMADELVTFDTRLEAIFKNLLATTAIFDTVEHAREAARQVRYQVRMVTLDGTELRTGGSYAGGANRQNNSIFIKPELEQLQKEIAADEASLGSEEAALKTLQDQMAALTERLEAIKLSRRAGTYSGARLVPRLSAN

SEQ ID NO: 4556 - protein, 216 aa, Streptococcus pneumoniae
LSLAYQQTSQQVEELETLWKLQEEEIDRLSEGDWQADKEKCQESLATIASDKQNLEAEIEEIKSNKNAIQERYQNLQEEVAQARLLKTKLQGQKRYEVADIERLGKELDNLNIEQEEIQRMLQEKVDNLEKVDTELLSQQAEESKTQKTNLQQGLIRKQFELDDIEGQLDDIASHLDQARQQNEEWIRKQTRAEAKKEKVSERAPSTKSINRPVPD

SEQ ID NO: 4557 - protein, 101 aa, Streptococcus pneumoniae
MILPVTWIKLASRMRSGFASKHVLKPRKKRSASVRHLQNQLTDQYQISYTEALEKAHELENLNLAEQEVQDLEKAIRSLGPVNLEAIDQYEEVHNRSGLSK

SEQ ID NO: 4558 - protein, 195 aa, Streptococcus pneumoniae
LTSTKKFTTGLDFLNSQRDDILSAKNLLLETITEMNDEVKERFKSTFEAIRESFKVTFKQMFGGGQADLILTEGDLLTAGVEISVQPPGKKIQSLNLMSGGEKALSALALLFSIIRVKTIPFVILDEVEAALDEANVKRFGDYLNRFDKDSQFIVVTHRKGTMAAADSIYGVTMQESGVSKIVSVKLKDLESIEG

SEQ ID NO: 4559 - protein, 264 aa, Streptococcus pneumoniae
MTIKLVATDMDGTFLDGNGRFDMDRLKSLLASYKEKGIYFAVASGRGFLSLEKLFAGVRDDIIFIAENGSLVEYQGQDLYEATMSRDFYLATFEKLKTSPYVDINKLLLTGKKGSYVLDTVDETYLKVSQHYNENIQKVASLEDITDDIFKFTTNFTEETLEAGEAWVNDNVPGVKAMTTGFESIDIVLDYVDKGVAIVELVKKLGITMDQVMAFGDNLNDLHMMQVVGHPVAPENARPEILELAKTVIGHHKDQSVIACMEGL

SEQ ID NO: 4560 - protein, 272 aa, Streptococcus pneumoniae
MADIKLIALDLDGTLLTTDKRLTDRTKETLKAARDRGIKVVLTTGRPLKAMDFFLHELGTDGQEEEYTITFNGGLVQKNTGEILDKTVFSYDDVARLYEETEKLSLPLDAISEGTVYQIQSDQESLYAKFNPALTFVPVDFEDLSNQMTYNKCVTAFAQEPLDAAIQKISPELFDQYEIFKSREMLLEWSPKNVHKATGLAKLISHLGIDQSQVMACGDEANDLSMIEWAGLGVAMQNAVPEVKAVANVVTPMTNDEEAVAWAIEEYVLKEN

SEQ ID NO: 4561 - protein, 429 aa, Streptococcus pneumoniae
MGLFDRLFGKKEEPKIEEVVKEALENLDLSEDIEPAFTEAEEVSQEEAEVESSEESVFQEEDSQDTVEENLDLEPVVEVSQEEVEEFPNSQEVTEEEKLEHEGTVEENNFEVLEPEAPQTEETVQEKYDRSLKKTRTGFGARLNAFFANFRSVDEEFFEELEELLIMSDVGVQVASNLTEELRYEAKLENAKKPDALRRVIIEKLVELYEKDGSYDESIHFQDNLTVMLFVGVNGVGKTTSIGKLAHRYKRAGKKVMLVAADTFRAGAVAQLAEWGRRVDVPVVTGPEKADPASVVFDGMERAVAEGIDILMIDTAGRLQNKDNLMAELEKIGRIIKRVVPEAPHETFLALDASTGQNALVQAKEFSKITPLTGIVLTKIDGTARGGVVLAIREELNIPVKLIGFGEKIDDIGEFNSENFMKGLLEGLI

SEQ ID NO: 4562 - protein, 418 aa, Streptococcus pneumoniae; identical to SEQ ID NO: 2954

SEQ ID NO: 4563 - protein, 84 aa, Streptococcus pneumoniae
AQAETVSQTVSLPNAKIVLDRFHIVQHLSRAMSRVRVQIMNQFHRKSHEYKAIKRYWKLIQQDSRKLSDKRFYRPTFRMHLTNK

SEQ ID NO: 4564 - protein, 108 aa, Streptococcus pneumoniae
NSPGSDCFNREMEMSFIAQDFNNLNIITVLEGRTQAIIRNHFLRYDRAVRCRVKIITMDMFSPYYDLAKQLRFQISRLRLKQSPRLFHSRMLKSFLIAFTLYNILAVL

SEQ ID NO: 4565 - protein, 172 aa, Streptococcus pneumoniae
MEQLHFITKLLDIKDPNIQILDIINKDTHKEIIAKLDYEAPSCPECGSQMKKYDFQKPSKIPYLETIGMPSRILLRKRRFKCYHCSKMMVAETPLVKKNHQIPRIINQKIAQKLIEKISMTDIAHQLSISTSTVIRKLNDSHFEHDFSRLPEIMSWDVETVRGVTVSIGRWR

SEQ ID NO: 4566 - protein, 495 aa, Streptococcus pneumoniae
MSSKVIVTIFGASGDLAKRKLYPSLFRLYQSGNLSKHFAVIGTARRPWSKEYFESVVVESILDLADSTEQAQEFASHFYYQSHDVNDSEHYIALRQLQAELNEKYQAEHNKLFFLSMAPQFFGTIAKHLKSENIVDGKGFERLIVEKPFGTDYATANKLNDELLATFDEEQIFRIDHYLGKEMIQSIFAVRFANLIFENVWNKDFIDNVQITFAERLGVEERGGYYDQSGALRDMVQNHTLQLLSLLAMDKPASFTKDEIRAEKIKVFKNLYHPTDEELKEHFIRGQYRSGKIDGMKYISYRSEPNVNPESTTETFTSGAFFVDSDRFRGVPFFFRTGKRLTEKGTHVNIVFKQMDSIFGEPLAPNILTIYIQPTEGFSLSLNGKQVGEEFNLAPNSLDYRTDATATGASPEPYEKLIYDVLNNNSTNFSHWDEVGASWKLIDRIEELWAENGAPLHDYKAGSMGPQASFDLLEKFGAKWTWQPDIAYRQDGRFE

SEQ ID NO: 4567 - protein, 246 aa, Streptococcus pneumoniae
MAKLKIDVNDLHKHYGKNEVLKGITTKFYEGDVVCIIGPSGSGKSTFLRSLNLLEEVTSGHITVNGYDLTEKTTNVDHVRENIGMVFQHFNLFPHMSVLDNITFAPIEHKLMTKEEAEKLGMELLEKVGLADKANANPDSLSGGQKQRVAIARGLAMNPDIMLFDEPTSALDPEMVGDVLNVMKELAEQGMTMIIVTHEMGFARQVANRVIFTADGEFLEDGTPDQIFDNPQHPRLKEFLDKVLNV

SEQ ID NO: 4568 - protein, 492 aa, Streptococcus pneumoniae
MKKDGSLDKIIKKWTASSSSAVPTTTTLAGLKAIPVKAKYIIASDSSFAPFVFQNSSNQYTGIDMELIKAIAKDQGFEIEITNPGFDAAISAVQAGQADGIIAGMSVTDARKATFDFSESYYTANTILGVKESSNIASYEDLKGKTVGVKNGTASQTFLTENQSKYGYKIKTFADGSSMYDSLNTGAIDAVMDDEPVLKYSISQGQKLKTPISGTPIGETAFAVKKGANPELIEMFNNGLANLKANGEFQKILDKYLASESSTASTSTVDETTLWGLLQNNYKQLLSGLGITLALALISFAIAIVIGIIFGMFSVSPYKSLRVISEIFVDVIRGIPLMILAAFIFWGIPNFIESITGQQSPINDFVAGTIALSLNAAAYIAEIVRGGIQAVPVGQMEASRSLGISYGKTMRKIILPQATKLMLPNFVNQFVIALKDTTIVSAIGLVELFQTGKIIIARNYQSFKMYAILAIFYLVIITLLTRLAKRLEKRIR

SEQ ID NO: 4569 - protein, 236 aa, Streptococcus pneumoniae
MKNKRIFKDFQASKMNLNIYTSPLLAFVFVFIGEFVAYTLYGISLLALIGLARNFGEAGQNLASYLQTLHQSLTDKTSDFRLILGLLAFGFILNTVFRWTRKVEKRPIRTLGFYIENFLSNLLKGFSLGLALFLLTLLGLVVLGQYRLESIHLNPYSLAFVVFTIPFWILQGTAEEVVARAWLLPQLASRTNLKLAILISSLFFTLLHMGNSGLTPLSLVNLFLFGVCHGSLPSQN

SEQ ID NO: 4570 - protein, 89 aa, Streptococcus pneumoniae
MALYLLKTDTVWGVAGIHGAWNFAQGNLFGILVSGQPSGTSLMTFLPQGNQDWLSGGSFGIEGSIMTSLVLLLLIVYLANKLKKENERM

SEQ ID NO: 4571 - protein, 662 aa, Streptococcus pneumoniae
MINHITDNQFKLVSKYQPSGDQPQAIEQLVDNIEGGEKAQILMGATGTGKTYTMSQVISKVNKPTLVIAHNKTLAGQLYGEFKEFFPENAVEYFVSYYDYYQPEAYVPSSDTYIEKDSSVNDEIDKLRHSATSALLERNDVIVVASVSCIYGLGSPKEYADSVVSLRPGLEISRDKLLNDLVDIQFERNDIDFQRGRFRVRGDVVEIFPASRDEHAFRVEFFGDEIDRIREVEALTGQVLGEVDHLAIFPATHFVTNDDHMEVAIAKIQAELEEQLAVFEKEGKLLEAQRLKQRTEYDIEMLREMGYTNGVENYSRHMDGRSEGEPPYTLLDFFPDDFLIMIDESHMTIGQIKGMYNGDRSRKEMLVNYGFRLPSALDNRPLRREEFESHVHQIVYVSATPGDYENEQTETVIEQIIRPTGLLDPEVEVRPTMGQIDDLLGEINARVEKNERTFITTLTKKMAEDLTDYFKEMGIKVKYMHSDIKTLERTEIIRDLRLGVFDVLVGINLLREGIDVPEVSLVAILDADKEGFLRNERGLIQTIGRAARNSEGHVIMYADTVTQSMQRAIDETARRRKIQMAYNEEHGIVPQTIKKEIRDLIAVTKAVAKEEDKEVDINSLNKQERKELVKKLEKQMQEAVEVLDFELAAQIRDMMLEVKALD

SEQ ID NO: 4572 - protein, 187 aa, Streptococcus pneumoniae
MIYLRKLKREDLMSLWEMAYSQLNPVWKQYDAPYYDDYQYFSNFKEFELQKSESILSNSNRLGIFVDDKLVGTVSRYWVCKQTRWMELGIGIYDKKFWNTGIGKVAMLQWIDRTFQDYLELEHLGLTTWSGNLGMMKLAEKLRMKKEAHIPKVRYYQGKYFDSIKYGILREDWEKMNDGYYQINGNS

SEQ ID NO: 4573 - protein, 129 aa, Streptococcus pneumoniae
MTLERCRFFSQKYPENTLIAIGDLKVVGFISYGNFRDETIQAGEIIALYVLKDYYGKGIAQKLMKAALTALNHFSEIFLWVLKDNKRAIAFYQKMGFTFDGQEKILELGKPIKEKRMVFYSKIILKSRS

SEQ ID NO: 4574 - protein, 155 aa, Streptococcus pneumoniae
MSRSQLTILTNICLIEDLETQCVVMQYRAPETNRWSGYAFPGGHVENGEAFAESVIREIYEETGLTIQNPQLVGVKNWPLDTGGRYIVFCYKATEFTGTLQSSDEGEVSWVQKDQIPNLNLAYDMLPLMEMMEAPDKSEFFYPRRTEDDWEKKIF

SEQ ID NO: 4575 - protein, 171 aa, Streptococcus pneumoniae
MTKDRKQALLQLLKEAPKALNGQSLAEHFHVTRQVIVQDIAILRADGAPILSTNRGYIYKQIDTNPYVHKLFKVKHEVEEIGQELLAIVDNGGHVQNTLIDHPVYGEIETLLKLSCRRDVQHFLEQVEHSDFRPLSELTDGIHYHLVEAETQQDLHYIEEALDQLGYLVKD

SEQ ID NO: 4576 - protein, 193 aa, Streptococcus pneumoniae
LSGLLYHTSVYAVKKEILVNTRKKTQFMTMTALLTAIAILIPIVMPFKIVIPPASYTLGSHIAIFIAMFLSPLMAVFVILASSFGFLMAGYPMVIVFRAFSHISFGALGALYLQKFPDTLDKPKSSWVFNFVLAVVHALAEVLACVLFYATSGTNVENMFYVLFVLVGFGTIIHSMVDYTLALAVYKVLRKRR

SEQ ID NO: 4577 - protein, 166 aa, Streptococcus pneumoniae
MKKRSNIAPIAIFFATMLVIHFLSSVIFNLFPFPIKPTIVHIPVIIASIIYGPRVGVTLGFLMGLLSLTVNTITILPTSYLFSPFVPNGNIYSAIIAIVPRILIGLTPYLVYKLMKNKTGLILAGALGSLTNTIFVLGGIFFLFGNVYNGNIQLLLANRYLNKFNC

SEQ ID NO: 4578 - protein, 183 aa, Streptococcus pneumoniae
MANILLAVTGSIASYKSADLVSSLKKQGHQVTVLMTQAATEFIQPLTLQVLSQNPVHLDVMKEPYPDQVNHIELGKKADLFIVVPATANTIAKLAHGFADNMVTSTALALPSHIPKLIAPAMNTKMYDHPVTQNNLKTLETYGYQLIAPKESLLACGDHGRGALADLTIILERIKETLDEKTL

SEQ ID NO: 4579 - protein, 252 aa, Streptococcus pneumoniae
IFVFTKNLSLSFYLPLIFVYNSAMKILVTSGGTSEAIDSVRSITNHSTGHLGKIITETLLSAGHEVCLITTKRALKPEPHPNLSIREITNTKDLLIEMQERVQDYQVLIHSMAVSDYTPVYMTGLEEVQASSNLKEFLSKQNHQAKISSTDEVQVLFLKKTPKIISLVKEWNPTIHLIGFKLLVDVTEDHLVDIARKSLIKNQADLIIANDLTQISANQHRAIFVEKNQLQTVQTKEEIAELLLEKIQAYHS

SEQ ID NO: 4580 - protein, 180 aa, Streptococcus pneumoniae
MAERTVVQVHNAFPEDTTLINSQLIPLVQVVVNQGRKGIVGSCNSMHISSKVEVDVFHWQNLCIPTTSSTTLDPHDWTKRRFADSNHGFLANLVQGIRKTNGKRRLSFTCRCWVDGSNQDQFTDWIALNCPNFIKAEFSLVLSVQLQIVVRNTKFLYNINNWLQLNTLCDFNICFHSKFL

SEQ ID NO: 4581 - protein, 556 aa, Streptococcus pneumoniae
MKTDIEIAQSIELKPIVDVVEKLGISYDDLELYGKYKAKLSFDKIRAVESNPVGKLILVTAINPTPAGEGKSTLTIGLADALNKIGKKTMIAIREPSLGPVMGIKGGAAGGGYAQVLPMEDINLHFTGDMHAITTANNALSALIDNHLHQGNELGIDQRRILWKRVVDLNDRALRHVTVGLGGPLNGIPREDGFDITVASEIMAILCLATDIEDLKRRLANIVIGYRYDRTPVSVGDLQVEGALALILKDAIKPNLVQTIYGTPAFVHGGPFANIAHGCNSVLATTTALHLADYTVTEAGFGADLGAEKFLDIKTPNLPTSPDAVVIVATLRALKMNGGVAKDALTEENVEAVRAGFANLKRHVENIRKFGIPAVVAINEFVSDTEAEIAVLKELCASIDVPVELASVWADGAEGGVALAETVVKTIAENPANYKRLYDNDLSVQEKIEKIVTEIYRGSKVNFEKKSQTQIAQIVQNGWDKLPICMAKTQYSFSDNPNALGAPENFEITIRELVPKLGAGFIVALTGDVMTMPGLPKRPAALNMDVESDGTVLGLF

SEQ ID NO: 4582 - protein, 79 aa, Streptococcus pneumoniae
LKLTLSEFGNNIQAHFFSDCKQFINKIYTLRKSLQTTSASPCRRYMILTLSVLSTTSKQCFEQPAASFLVCSLIFIEYK

SEQ ID NO: 4583 - protein, 391 aa, Streptococcus pneumoniae
MLDLKEYGIVMWPEEKVISFREKLLAWYDENKRDLPWRRSKNPYHIWVSEIMLQQTRVDTVIPYYERFLDWFPTVESLATAPEESLLKAWEGLGYYSRVRNMQAAAQQIMTDFGGQFPNTYEGISSLKGIGPYTAGAISSIAFNLPEPAVDGNVMRVLARLFEVNHDIGIPSNRKIFQAMMEILINPDRPGDFNQALMDLGSDIESPVNPRPEESPVKDFSAAYQNGTMDRYPIKSPKKKPVPIYLKALVVKNSQGQFLLEKNESEKLLAGFWHFPFIEVDNFSQEEQFDLFHQVAEESVNFGPSPEESFQQDYDLDVDWLDVCFDTVQHVFSHRKWHVQIVAGQVSDFHDFSDREVRWLSPEEFKNYPLAKPQQKIWQAYAQANLDSSQD

SEQ ID NO: 4584 - protein, 234 aa, Streptococcus pneumoniae
MKKILIVDDEKPISDIIKFNMTKEGYEVVTAFNGREALEQFEAEQPDIIILDLMLPEIDGLEVAKTIRKTSSVPILMLSAKDSEFDKVIGLELGADDYVTKPFSNRELQARVKALLRRSQPMPVDGQEADSKPQPIQIGDLEIVPDAYVAKKYGEELDLTHREFELLYHLASHTGQVITREHLLETVWGYDYFGDVRTVDVTVRRLREKIEDTPSRPEYILTRRGVGYYMRNNA

SEQ ID NO: 4585 - protein, 451 aa, Streptococcus pneumoniae
EIMLDLLKQTIFTRDFIFILILLGFILVVTLLLLENRRDNIQLKQINQKVKDLIAGDYSKVLDMQGGSEITNITNNLNDLSEVIRLTQENLEQESKRLNSILFYMTDGVLATNRRGQIIMINDTAKKQLGLVKEDVLNRRILELLKIEENYELRDLITQSPELLLDSQDINGEYLNLRVRFALIRRESGFISGLVAVLHDTTEQEKEERERRLFVSNVSHELRTPLTSVKSYLEALDEGALCETVAPDFIKVSLDETNRMMRMVTDLLHLSRIDNATSHLDVELINFTAFITFILNRFDKMKGQEKEKKYELVRDYPINSIWMEIDTDKMTQVVDNILNNAIKYSPDGGKITVRMKTTEDQMILSISDHGLGIPKQDLPRIFDRFYRVDRARSRAQGGTGLGLSIAKEIIKQHKGFIWAKSEYGKGSTFTIVLPYDKDAVKEEVWEDEVED

SEQ ID NO: 4586 - protein, 269 aa, Streptococcus pneumoniae
MSEIGFKYSILASGSSGNSFYLETSKKKLLVDAGLSGKKITSLLAEINRKPEDLDAILITHEHSDHIHGVGVLARKYGMDLYANEKTWQAMENSKYLGKVDSSQKHIFEMGKTKTFGDIDIESFGVSHDAVAPQFYRFMKDDKSFVLLTDTGYVSDRMAGIVENADGYLIEANHDVEILRSGSYAWRLKQRILSDLGHLSNEDGAEAMIRTLGNRTKKIYLGHLSKENNIKELAHMTMVNQLAQADLGVGVDFKVYDTSPDTATPLTEI

SEQ ID NO: 4587 - protein, 80 aa, Streptococcus pneumoniae
MTTITLKVSEADKTFMKAMAKFEGVSLSELIRTKTLEALEDEYDARVADLAYQEYLEDLEKGVEPITWEEMMHDLGLKDE

SEQ ID NO: 4588 - protein, 87 aa, Streptococcus pneumoniae
MNNLYKLVPTRRFIKQLKKLDRYTQKLITNYLQTNVLEDPRRHGKALVGNRVGQWRYRIGNYRVIVQIVDDELVVATLEVGHRRDIY

SEQ ID NO: 4589 - protein, 257 aa, Streptococcus pneumoniae
LKKKWFFADYYDTTIILLALISVILVLLGFAEMIDLDNPPYSIIDLVIWGVFVIDYSWRFFTTKRKWRFILENIFDLLAILPLNAIFTVFRLGRIFRLAKLTKLLKLTRLLRIIGLTGKLERKISRFLRTNGLIYILYVNIFIVLVGSSILSVVEEKSFSDSLWWALVTVTTVGYGDIVPASIFGKWLAVLLMLVGIGTIGMLTSALTNFFVKDNPDEQIKLDKLKDELSSQRILLEKQSTKIEELHKMIQDLIEKT

SEQ ID NO: 4590 - protein, 169 aa, Streptococcus pneumoniae
LICSDFILFLYKTHSIKFLYLIICVLLCQNLLDFSSAQTLSHLYFYYVFSIKSCIILCSSSIFVDCFSSNILWLDNSSLSLSSFICSSGLSFTKKFVKALVNIPIVPIPTSISKTASHFPKMEAGTISPYPTVVTVTRAHQRLSEKDFSSTTDKIELPTRTIKILTYKI

SEQ ID NO: 4591 - protein, 332 aa, Streptococcus pneumoniae
MFKTMTSTKQHKKVILVGDGAVGSSYAFALVNQGIAQELGIIEIPQLHEKAVGDALDLSHALAFTSPKKIYAAQYSDCADADLVVITAGAPQKPGETRLDLVGKNLAINKSIVTQVVESGFKGIFLVAANPVDVLTYSTWKFSGFPKERVIGSGTSLDSARFRQALAEKLDVDARSVHAYIMGEHGDSEFAVWSHANIAGVNLEEFLKDTQNVQEAELIELFEGVRDAAYTIINKKGATYYGIAVALARITKAILDDENAVLPLSVFQEGQYGVENVFIGQPAVVGAHGIVRPVNIPLNDAETQKMQASAKELQAIIDEAWKNPEFQEASKN

SEQ ID NO: 4592 - protein, 315 aa, Streptococcus pneumoniae
MQDKNLVNVNLTKEMKASFIDYAMSVIVARALPDVRDGLKPVHRRILYGMNELGVTPDKPHKKSARITGDVMGKYHPHGDSSIYEAMVRMAQWWSYRYMLVDGHGNFGSMDGDSAAAQRYTEARMSKIALEMLRDINKNTVDFVDNYDANEREPLVLPARFPNLLVNGATGIAVGMATNIPPHNLGETIDAVKLVMDNPEVTTKDLMEVLPGPDFPTGALVMGKSGIHKAYETGKGSIVLRSRTEIETTKTGRERIVVTEFPYMVNKTKVHEHIVRLVQEKRIEGITAVRDESNREGVRFVIEVKRDASANVILI

SEQ ID NO: 4593 - protein, 118 aa, Streptococcus pneumoniae
QNFLTWSIKPRCMSILFAWFRKNALRVSQQYVMSQTVKVFDLLLKSSATPQPMLFSYNLFKMTQMQTNFGFNMLAIQNGIPKILSLRQILDAYIEHQKEWLFVVHVLIRKKRKRALIS

SEQ ID NO: 4594 - protein, 506 aa, Streptococcus pneumoniae
PLQNDPNANQFWFQYARYPKWYTENFVSSSDFGCLYRAPKRVVVRRTRFDKEKAEARAHILEGLLIALDHIDEVIRIIRASETDAEAQAELMSKFKLSERQSQAILDMRLRRLTGLERDKIQSEYDDLLALIADLADILAKPERVSQIIKDELDEVKRKFSDKRRTELMVGQILSLEDEDLIEESDVLITLSNRGYIKRLDQDEFTAQKRGGRGVQGTGVKDDDFVRELVSTSTHDHLLFFTNKGRVYRLKGYEIPEYGRTAKGLPVVNLLKLDEDESIQTVINVESDRSDDAYLFFTTRHGIVKRTSVKEFANIRQNGLKALNLKDEDELINVLLAEGDMDIIIGTKFGYAVRFNQSAVRGMSRIATGVKGVNLREGDTVVGASLITDQDEVLIITEKGYGKRTVATEYPTKGRGGKGMQTAKITEKNGLLAGLMTVQGDEDLMIITDTGVMIRTNLANISQTGRATMGVKVMRLDQDAQIVTFTTVAVAEKEEVGTENETEGEA

SEQ ID NO: 4595 - protein, 247 aa, Streptococcus pneumoniae
MSQKNNKKKNKRKNLLTNILAGFLILLSLALIFNTQIRNIFIVWNTNKYQVSQVSKEKLEENQDTEGNFDFDSVKAISSEAVLTSQWNAQKLPVIGGIAIPELEMNLPIFKGLDNVNLFYGAGTMKREQVMGEGNYSLASHHIFGVDNANKMLFSPLDNAKNGMKIYLTDKNKVYTYEIREVKRVTPDRVDEVDDRDGVNEITLVTCEDLAATERIIVKGDLKETKDYSQTSDEILTAFNQPYKQFY

SEQ ID NO: 4596 - protein, 265 aa, Streptococcus pneumoniae
MVSSEFISKIEFACNKKESLYSQSKFKYAIRSMFAGAFLTFSTAAGAVGADLINKIAPGSGRFLFPFVFAWGLAYIVFLNAELVTSNMMFLTAGSFLKKISWRKTAEILLYCTLFNLIGALIAGWGFAHSAAYANLTHDSFISGVVEMKLGRSNELVLLEAILANIFVNIAILSFILVKDGGAKLWLVLSAIYMFVFLTNEHIAANFASFAIVKFSVAADSIANFGVGNMLRHWGVTFIGNFIGGGLLMGLPYAFLNKNEDTYVD

SEQ ID NO: 4597 - protein, 371 aa, Streptococcus pneumoniae
LRKPGNIYTRITNPTTAALEGGVEALATASGMTAVTYTILALAHAGEHVVAASTIYGGTFNLLKEPLPRYGITTTFVDVDNLEEVEAAIKDNTKLVLIETLGNPLINIPDLEKLAEIAHKHQIPLVSDNTFATPYLINVFSHGVDIAIHSATKFIGGHGTTIGGIIVDSGRFDWTASGKFPQFVDESPSCHNLSYTHDVGAAAFIIAVRVQLRRDTGAALSPFNAFLLLQRLETLSLRVERHVQNAETIVDFLVNHPKVEKVNYPKLADSPYYALAEKYLPKGVGSIFTFHVKGDEEEARKVIDNLEIFSDLANAADAKSLVVHPATITHGQLSEKDLEAAGVTPNQIHLSIGLENVEDLIEDLRLALEKI

SEQ ID NO: 4598 - protein, 424 aa, Streptococcus pneumoniae
MNEIKCPNCGEVFTVNESQYAELLSQVRTAEFDKELHDRMRQELALAEQKAMNEQQTKLAQKDQEIAQLQSQIQNFDTEKELAKKEVEQTSHQALLAKDKEVQALENQLATLRLEHENQLQKTLSDLEKERNQVKNQLLLQEKENELSLASVKQNYEAQLKAASEQVEFYKNFKAQQSTKAIGESLEQYAESEFNKVRSFAFPNAYFEKDNKVSSRGSKGDFIFRECDENGVEIISIMFEMKNEADGTEKKHKNADFYKELDKDRREKNCEYAVLVTMLEADNDYFNTGIVDVSHEYEKMYVVRPQFFIQLIGLLRNAALNSLKYKQELALVREQNIDITHFEEDLDAFKLAFAKNYNSASTNFGKAIDEIDKAIKRMEEVKKFLTTSENQLRLANNKLEDVSVKKLTRKNPTMKAKFEALKGE

SEQ ID NO: 4599 - protein, 292 aa, Streptococcus pneumoniae
MNGIINLKKEAGMTSHDAVFKLRKILGTKKIGHGGTLDPDVVGVLPIAVGKATRMVEFMQDEGKIYEGEITLGYSTTTEDASGEVVAETPVLSPLDEKLVDEAIASLTGPITQIPPMYSAVKVNGRKLYEYARAGQEVERPERQVTIYQFERTSPISYDGQLARFTFRVKCSKGTYIRTLSVDLGEKLGYAAHMSHLTRTSAAGLQLEDALSLEEIAEKVEAGQLDFLHPLEIGTGDLVKVFLTPEEATEVRFGRFIELDQTDKELAAFEDDKLLAILEKRGNLYKPRKVFS

SEQ ID NO: 4600 - protein, 100 aa, Streptococcus pneumoniae
MMRNEFRERVEQLLQQKEINENSELSHLFRLAIQNLDRNEKYQSVMANLSQGLSLYLMTHHYQAPKSVIDFGLWIAKAPSQERGRLAFLQMLAQTLQGFR

SEQ ID NO: 4601 - protein, 238 aa, Streptococcus pneumoniae
VFFADETINFVKNVIKYTTDKITEDSMQNKPIIIGVTGGSGGGKTSVSTTILSHFPDEKISMIEHDSYYKDQSHLTFEERVKTNYDHPFAFDTDLMIEQIKELLAGRPVDIPTYDYTEHTRSSKTYRQEPQDVFIVEGILVLEDKRLRDLMDIKIFVDTDDDVRIIRRIKRDMEERGRSLDSVINQYLGVVKPMYHQFIESTKRYADIVIPEGVSNTVAIDLLTTKIAKILEEARNSK

SEQ ID NO: 4602 - protein, 446 aa, Streptococcus pneumoniae
MEKYLSVTTLTKYLKMKFDKDPYLERVYLTGQVSNFRKRPTHQYFSLKDDHAVIQATIWSGIYQKLGFDLEEGMKINVIGRVQVYEPSGSYSIIIEKAEPDGVGALAIQFEQLKKKLTEEGLFQERFKQALPQFSKRIGVVTSRSGAVIRDIITTVSRRFPGVDILLYPTKVQGEGAAEEIARNIARANQWDDLDLLIIGRGGGSIEDLWAFNEEIVVRAIFESRLPVISSVGHETDVTLADFVADRRAATPTAAAELATPVTKLDVLAHLQNQEKRMVTAVRNVLSKKQEALKKCSQSVIFRQPERLYDGYLQRLDQLQLRLKQSLRTRISDNKQLVQARTHQLVQLSPVTKIQRYQDRLGQLDKLLGSKMALVYDAKVAEVKRLSEALLMLDTSRIVARGYAIVKKEESVVDSVESLKRKDQVTLLMRDGQVELEVKDVKTKEI

SEQ ID NO: 4603 - protein, 70 aa, Streptococcus pneumoniae
MSKQKKFEENLAELETIVQSLENGEIALEDAITAFQKGMVLSKELQATLDKAEKTLVKVMQEDGTESDFE

SEQ ID NO: 4604 - protein, 291 aa, Streptococcus pneumoniae
MKKQEKLALVESALEDFYGDQQFASSLRESVLYSIHAGGKRIRPFLLLEVLEALQVTIKPAHAQVATALEMIHTGSLIHDDLPAMDDDDYRRGRLTNHKKFGEAMAILAGDALFLDSYALIAQADLPSQIKVDLIANLSLASGSLGMVAGQVLDMEGEHQHLSLEELQTIHANKTGKLLAYPFQAAAIIAELSPEMQVKLKTVGELIGLAFQVRDDVLDVTASFEEIGKTPQKDLQAEKSTYPALLGLEESIAFCNQTLDQANEKLEEIAQQIPFETESIVSVVESLRING

SEQ ID NO: 4605 - protein, 245 aa, Streptococcus pneumoniae
MAGLVVAVLNGERFDKPGEKIPDDTELKLKGEKLKYVSRGGLKLEKALQVFDLSVDGATTIDIGASTGGFTDVMLQNSAKLVFAVDVGTNQLAWKLRQDPRVVSMEQFNFRYAEKTDFEQEPSFASIDVSFISLSLILPALHRVLADQGQVVALVKPQFEAGREQIGKNGIIRDAKVHQNVLESVTAMAVEVGFSVLGLDFSPIQGGHGNIEFLAYLKKEKSASNQILAEIKEAVERAHSQFKNE

SEQ ID NO: 4606 - protein, 143 aa, Streptococcus pneumoniae
MNKKERLEKIRRLVTDYQIGTQEEIVEHLKEAGITATQATVSRDIKELGIVKIPLRDNTYVYELPKSIVKSLQLAEDNIESAELMDKMINLQVIPGNTAFVKAQLIDTFADKIFSCLTDDSSILVIARSGSLAEEIFEQVKNW

SEQ ID NO: 4607 - protein, 298 aa, Streptococcus pneumoniae
MLLEISIKNFAIIEAISLNFEKGMTVLTGETGAGKSIIIDAMNMMLGARATTDVIRHGAPKAEIEGLFSVENSRLLQEIFDEQGLELGDEIIIRREILQNGRSISRVNGQMVNLSVLRAIGQHLVDIHGQHDHEELMRPQLHIQMLDEFGDAAFWDLKETYQTSFDAYRKMRKQVLEVKKNQQEHKARIEMLEFQMAEIEAANLQAGEDLDLNQERDKLLNHKNIADTLTNAYSMLDNEDFSSLANVRSAMNDMESVEEYDPEYREISSSLSETYYVLEDISKRLEAIIEDLDFDGNR

SEQ ID NO: 4608 - protein, 260 aa, Streptococcus pneumoniae
WQSLMQVENRLDLLHTITRKYGGTVDDVLLYFAKITEEYNLLTGNNLSSEDMEAELKKLEVNLVNLAGQLASARHNLAQQLEAEIKQELQDLYMEKAQFQVRFSKGKFSREGNEMVEFYISTNPGEDFKPLVKVASGGELSRLMLAIKSAFSRKEGKTSIVFDEVDTGVSGRVAQAIAQKIHKIGQYGQVLAISHLPQVIAIADYQFFIEKISNDHSTVSTVRLLTVEERVEEVAKMLAGDDVTEAALTQARELLRNREK

SEQ ID NO: 4609 - protein, 242 aa, Streptococcus pneumoniae
MTDYYVIGDVHGKAGMLEDLLKTWDGQTQLLFLGDLIDRGEDSHRVLEMVKDLVDNQGAICLSGNHEYMFLTWLDYPEESYDHYRRNGGDTTINSILGRPLDAPVDGVEDAKRVAAEAADLVEFIRQMPFVVETDKYIFVHAGIDLTLDDWHETTDYKKVWLRKPFHGAENHTGKTIVFGHTPVYGLLQQERGTSELWTTEDGKIGMDGGAVYGGVLHGIVFTDQGMTEHHFIENDGFVAED

SEQ ID NO: 4610 - protein, 344 aa, Streptococcus pneumoniae
MVLSKYQKQFIINRYPERKRIMNLEELKKRQRKIRNFSIIAHIDHGKSTLADRILEKTETVSSREMQAQLLDSMDLERERGITIKLNAIELNYTAKDGETYIFHLIDTPGHVDFTYEVSRSLAACEGAILVVDAAQGIEAQTLANVYLALDNDLEIMPIINKIDLPAADPERVRTEIEDVIGLDASEAVLASAKAGIGIEEILEQIVEKVPAPTGDVTAPLKALIFDSVYDAYRGVILQVRVMDGVVKPGDKIQLMSNSKTFDVAEVGIFTPKAVGRDFLATGDVGYIAASIKTVQDTRVGDTVTLATNPAAEPLHGYKQMNPMVFAGLYPIESNKYNDLREAA

SEQ ID NO: 4611 - protein, 303 aa, Streptococcus pneumoniae
LRVSTQSNQTNTMTCVKPLEKLQLNDASLQFEPETSQALGFGFRCGFLGLLHMDVIQERLEREFNIDLIMTAPSVIYKVNLTDGESMDVSNPSEFPDPTKIATIEEPYVKAQIMVPQEFVGAVMELAQRKRGDFVTMDYIDDNRVNVIYQIPLAEIVFDFFDKLKSSTRGYASFDYELSEYRPSKLVKMDILLNGDKVDALSFIVHKDFAYERGKLIVDKLKKIIPRQQFEVPIQAAIGHKIVARTDIKALRKNVLAKCYGGDVSRKRKLLEKQKAGKKRMKSIGSVEVPQEAFLSVLSMDEE

SEQ ID NO: 4612 - protein, 110 aa, Streptococcus pneumoniae
MKIKEQTRKLAAGCSKHSFEVVDETDEVSSKHGFEVVDETDEVSSKHGSEVVDETDEVSSKHGFEVVDETDEVSSKHGFEIVDETDEVSNHTYGKATLTWFEEIFEEYKN

SEQ ID NO: 4613 - protein, 111 aa, Streptococcus pneumoniae
LYSSKISSNHVSVALPYVWLLTSSVSSTISKPCFELTSSVSSTTSKPCFELTSSVSSTTSEPCFELTSSVSSTTSKPCFELTSSVSSTTSKLCFEQPAASFLVCSLIFIEY

SEQ ID NO: 4614 - protein, 95 aa, Streptococcus pneumoniae
GLGVKKQKACFSAIEEVIMYKHLFFLDSKTLDRLTPYILVLASDTIAFNVFVLTFVSAVVFNFLNSMLALMAIFIGAGYVVGFWLLILNENQRAN

SEQ ID NO: 4615 - protein, 229 aa, Streptococcus pneumoniae
MKKYQLLFKISAVFSYLFFVFGLSQLTLIVQNYWQFSSQIGNFVWIQNILSLLFSGVMIWILVKTGHGYLFRIPRKKWLWYSILTVLVVVLHISFNVQTAKHVQSTAEGWNVLIGYSGTNFAELGIYVTLFFLTPLMEELIYRGLLQHAFFKHSRFGLDLLLPSILFALPHFLSLPSLLDIFVFATFGIIFAGLTRYTKSIYPSYAVHVINNIVATFPFLLTFLHRVLG

SEQ ID NO: 4616 - protein, 59 aa, Streptococcus pneumoniae
MREDFYEKVSTSIQNKCSLLLLIFRIWSFSADAYRPKLLAIFFPDWQFRLDSKYLEFTI

SEQ ID NO: 4617 - protein, 81 aa, Streptococcus pneumoniae
VIYYMDTKMMSQFSVMDNEMLVRTEDGDVSDIYRGYANQRSPFASYPSILKNSGPFPVSGYCLRGYHDRGYIGAGFHLCGI

SEQ ID NO: 4618 - protein, 69 aa, Streptococcus pneumoniae
MKAIFFIILFAFQTYLIYLSISISDKKQKTIELTSLNCFVILFLIYDKLIFLFIAYVFLIIFILNLFRN

SEQ ID NO: 4619 - protein, 67 aa, Streptococcus pneumoniae
MNTYCNINETMLSEVYGGNSGGAAVVAALGCAAGGVKYGRLLGPWGAAIGGIGGAVVCGYLAYTATS

SEQ ID NO: 4620 - protein, 84 aa, Streptococcus pneumoniae
MDTKIMEQFHEMDITMLSSIEGGKNNWQTNVLEGGGAAFGGWGLGTAICAASGVGAPFMGACGYIGAKFGVALWAGVTGATSGF

SEQ ID NO: 4621 - protein, 55 aa, Streptococcus pneumoniae
MYPHAPINGAPTPLAAQIAVPNPQPPKAAPPPSKTLVCQLFLPPSILDNIVISIS

SEQ ID NO: 4622 - protein, 181 aa, Streptococcus pneumoniae
LMRRKYKSIALKKELANYSGKKKCHAMKAQAIVTSQGRIVSLDITVNYCHDMKLFKMSRRNIGQAGKILTDSDYQGPMKIYPQAQTPRKASKLKPLTAEDKACNHALSKDRSKVENILAKVKTFKMFSTTYRNHRKRFGLRMNLIAGIINHELGFWFRRKSNVIFAIQDVSMTIQDLDEKF

SEQ ID NO: 4623 - protein, 132 aa, Streptococcus pneumoniae
LIYPVLISFYYSSMNYEGSKQLTDARFKCLVGVQRTTFEEMLAVLKTAYQLKHAKGGRKPKLSLEDLLMATLHYVREYRTYEEIAADFGIHESNLLRRSQWVEVTLVQSGVTISRTPLSSEDTVMIIDATEV

SEQ ID NO: 4624 - protein, 54 aa, Streptococcus pneumoniae
MKKKILIIFILYLIMSIFLYPLRESIWYQLFYTIAYVIAVMIYFALTKKKGAKK

SEQ ID NO: 4625 - protein, 67 aa, Streptococcus pneumoniae
MEKIDYITLNEVELETISGGDDCFIGDIGCIGWGLLKSIGGMIKPAPYVPPVCIPKSSWNPAPPVPC

SEQ ID NO: 4626 - protein, 68 aa, Streptococcus pneumoniae
MLQVALLIQQLMILRINAGKILISGSVFVYRYSSVVLYKNLYNLMTYAVIETILLQTSRLFCYKFTCS

SEQ ID NO: 4627 - protein, 67 aa, Streptococcus pneumoniae
MNTKMMEQFSVMDNEMLDRIEGGIFGVDDALFWAGLGYVAGSIVDTAIDDFTNQCRKNPHQWFCVRV

SEQ ID NO: 4628 - protein, 72 aa, Streptococcus pneumoniae
LSCCNFDKFSISLFFNFFHPNLELASKRLELAFLFQATSKCLKKIISNHFFTIQEVLMTIQDFIKYELSFMA

SEQ ID NO: 4629 - protein, 717 aa, Streptococcus pneumoniae
MTSYKRTFVPQIDARDCGVAALASIAKFYGSDFSLAHLRELAKTNKEGTTALGIVKAADEMGFETRPVQADKTLFDMSDVPYPFIVHVNKEGKLQHYYVVYQTKKDYLIIGDPDPSVKITKMSKERFFSEWTGVAIFLAPKPSYQPHKDKKNGLLSFLPLIFKQKSLIAYIVLSSLLVTIINIGGSYYLQGILDEYIPNQMKSTLGIISVGLVITYILQQVMSFSRDYLLTVLSQRLSIDVILSYIRHIFELPMSFFATRRTGEIISRFTDANSIIDALASTILSLFLDVSILILVGGVLLAQNPNLFLLSLLSIPIYMFIIFSFMKPFEKMNHDVMQSNSMVSSAIIEDINGIETIKSLTSEENRYQNIDSEFVDYLEKSFKLSKYSILQTSLKQGTKLVLNILILWFGAQLVMSSKISIGQLITFNTLFSYFTTPMENIINLQTKLQSAKVANNRLNEVYLVESEFQVQENPVHSHFLMGDIEFDDLSYKYGFGRDTLTDINLTIKQGDKVSLVGVSGSGKTTLAKMIVNFFEPYKGHISINYQDIKNIDKKVLRRHINYLPQQAYIFNGSILENLTLGGNHMISQEDILRACELAEIRQDIERMPMGYQTQLSDGAGLSGGQKQRIALARALLTKAPVLILDEATSGLDVLTEKKVIDNLISLTDKTILFVAHRLSIAERTNRVIVLDQGKIIEVGSHQELMQAQGFYHHLFNK

SEQ ID NO: 4630 - protein, 82 aa, Streptococcus pneumoniae
MIFPWSRTMTRLVRSAILRRWATKRMVLSVRDIRLSITFFSVKTSRPLVASSSIKTGALVKRARARAIRCFCPPDRPAPSES

SEQ ID NO: 4631 - protein, 453 aa, Streptococcus pneumoniae
MNPNLFRSVEFYQRRYHNYATVFIIPLSLLFTFILIFSLVATKEITVTSQGEIAPTSVIASIQSTSDNPILANHLVANQVVEKGDLLIKYSETMEESQKTALATQLQRLEKQKEGLGILKQSLEKATDLFSSEDEFGYHNTFMNFTKQSHDIELGISKTNTEVSNQANLTNSSSSAIEQEITKVQQQIGEYQELRDAIINNRARLPTGNPHQSILNRYLIASQGQTQGTAEEPFLSQINQSIAGLESSIASLKIQQAGIGSVATYDNSLATKIEVLRTQFLQTASQQQLTVENQLTELKVQLDQATQRLENNTLTAPSKGIVHLNSEFEGKNRIPTGTEIAQIFPVITDTREVLITYYVSSDYLPLLDKGQTVRLKLEKIGNHGTTIIGQLQSIDQTPTRTEQGNLFKLTALAKLSNEDSKLIQYGLQGRVTSVTTKKTYFDYFKDKILTHSD

SEQ ID NO: 4632 - protein, 66 aa, Streptococcus pneumoniae
HSITIYYLIKKENHNMDKKQNLTSFQELTTTELNQIIGGGWWEDFLYRFNIIEQKNTKGFYQPIQL

SEQ ID NO: 4633 - protein, 109 aa, Streptococcus pneumoniae
LNKKIQKDFISQYNYKKTRPRERTLGLIFSSFYMYYSKYLTKNVILAGGIETGIGMTFHNFHNGIETNSSLLPFRTCSKGEDFRNIDSLFFDGIFNDKGLLCSIFKKGN

SEQ ID NO: 4634 - protein, 446 aa, Streptococcus pneumoniae
MNVAWILLYTLVTHGLKIVIFFKVDGISLTFERIFKAFLFKILLAVVFGMLGYMVGNVYLSYFMEPLYGIGLSFLLLRELPKKLLLFYGLFPMILVNLFYRGVSYFVLPFLGQGQVYDDYSFIWLCIIIFNFFISLAFLKWLDYDFTSLRKGILDKDFQKSLTQINWIMGAYYLVIQNLSYFEYEQGIQSTTVRHLILVFYLLFFMGIIKKLDTYLKDKLHERLNQEQDLRYREMERYSRHIEELYKEVRSFRHDYTNLLTSLRLGIEEEDMEQIKEIYDSVLKDSSEKLQDNKYDLGRLVNVRDRALKSLLAGKFIKARDKNIVFNVEVPEEIQVEGVSLLDFLTVVSILCDNAIEASVEACQPHVSIAFFKNGAQETFIIENSIKEEGIDISEIFSFGASSKGEERGVGLYTVMKIVESHPNTSLNTTCQDHVFRQVLTVIHIE

SEQ ID NO: 4635 - protein, 214 aa, Streptococcus pneumoniae
VLLKFLVSQINCWQRCMRRGAHQLFFLDIEIRNEEMKGLEVARKIRDRDPYALIVFVTTHSEFMPLSFRYQVSALDYIDKALSAEEFESRIETALLYANGQDSKSLAEDCFYFKSKFAQFQYPFKEVYYLETSTRPHRVILYTKTDRLEFTASLEEVLKQEPRFLQCHRSFLINPANVVHLDKKEKLLFFPNGGSCLIARYKVREVSEAINNLH

SEQ ID NO: 4636 - protein, 60 aa, Streptococcus pneumoniae
MRIFVLEDDFSQQTRIETTIEKLLKEHHITLSSFEVFGKPDQLLAEVHEKGGPSAILFGY

SEQ ID NO: 4637 - protein, 112 aa, Streptococcus pneumoniae
MKHMIIQTQKTVYKVNVDDVYYIQTHPTKAHTVKIVTEEASFNMVQNLSNLENQYGETLMRCHRNCLVNLDKVKSIDFQERILFLGEEGQYAVKYARRRYREIRQKWLKEGE

SEQ ID NO: 4638 - protein, 109 aa, Streptococcus pneumoniae
MTDTDPIKRAQTLITDLNKAYQACKQATADDVRFQEQLNSILGFLAKAETVDNRFLIELEKFYQTSSLLMGLSALDPDAPTRAAWRAYDRFHFDQVKTKLILNENQRAN

SEQ ID NO: 4639 - protein, 68 aa, Streptococcus pneumoniae
PQAVLEYGETTLTWFEEIFEEYKSLRTNHYPVVTKKKLRQTELNFFFSVVSAMLVLHLTFYLIRRIQD

SEQ ID NO: 4640 - protein, 323 aa, Streptococcus pneumoniae
PLCLVPACPVGLSSYQYSQLLQHFPENHWPILLFVGITSVLLLLWGGIATYMEAPDKLFLLVGEEEIKLHLKRQTGISLVFWLFVQTLFLLLFAPLFLAMGYGLPVFLLYVLLLGVGKYFHFRQKASKFFTETGLDWDYLISQESKRKQVLLRFFALFTQVKGISNSVKRRAYLDFILKAVQKVPGKIWQNLYLRSYLRNGDLFALSLRLLLLSVLAQVFIEQAWIATAVVVLFNYLLLFQLLALYHAFDYQYLTQLFPLDKGQKEKGLQEVVRGLTSFVLLVEVVVGLITSQEKLALLALLGAGLVLLVLYSPYQVKRQMQD

SEQ ID NO: 4641 - protein, 73 aa, Streptococcus pneumoniae
MIFTMAHDQRGGSMKDLFLKRKQAFRKECLGYLRYVLNDHFVLFLLVLLGFLATSTVNSYNIFLKIIGLSFCL

SEQ ID NO: 4642 - protein, 114 aa, Streptococcus pneumoniae
AKSGFRTSRALVKNVPFGQKLDWFPVHFSKGMKQKVMIICAFVVDPSLFIVDEPFLGLDPLAISDLIQLLEVEKQKGKSILMSTHVLDSAEKMCDAFVILHKGEVRANNSPATT

SEQ ID NO: 4643 - protein, 125 aa, Streptococcus pneumoniae
MLEIKNLTGGYVHVPVLKDVSFTVESGQLVGLIGLNGAGKSTTINEIIGLLAPYSGSININGLTLQGDATSYRKQIGYIPETPSLYEELTLREHIETVAMAYGIEQKVAFERVEPLLKMFRLDRN

SEQ ID NO: 4644 - protein, 136 aa, Streptococcus pneumoniae
MSDCIFCKIIAGEIPASKVYEDEQVLAFLDISQVTLGHTLVVPKEHYRNLLEMNATSASQLFAQVPKVAQKVMKVTKAAGMNIISNCEEVAGQTVFHTHVHLVPRYSADDDLKIDFIAHEPDFDKLAQVAETIKNA

SEQ ID NO: 4645 - protein, 95 aa, Streptococcus pneumoniae
MKLSNLLLFAGAAAGSYLVTKNRQTITDEVLNTTDRVQAIKDDVDIIQNSLQIIDQQKELIKEYQEDLTYKFKVLEKDIQTRLAVIKEMQGTEDK

SEQ ID NO: 4646 - protein, 84 aa, Streptococcus pneumoniae
LLEITLKSSYQFVHILFQSTIYIPSTMHHNLGNSYSIKIKKQTRKLGTDCSKHRFKVVDRTDEVSSKHCFEVVDTTHIYTTRQR

SEQ ID NO: 4647 - protein, 378 aa, Streptococcus pneumoniae
MNNTEFYDRLGVSKNASADEIKKAYRKLSKKYHPDINKEPGAEDKYKEVQEAYETLSDDQKRAAYDQYGAAGANGGFGGAGGFGGFNGAGGFGGFEDIFSSFFGGGGSSRNPNAPRQGDDLQYRVNLTFEEAIFGTEKEVKYHREAGCRTCNGSGAKPGTSPVTCGRCHGAGVINVDTQTPLGMMRRQVTCDVCHGRGKEIKYPCTTCHGTGHEKQAHSVHVKIPAGVETGQQIRLAGQGEAGFNGGPYGDLYVVVSVEASDKFEREGTTIFYNLNLNFVQAALGDTVDIPTVHGDVELVIPEGTQTGKKFRLRSKGAPSLRGGAVGDQYVTVNVVTPTGLNDRQKVALKEFAAAGGLKVNPKKKGFFDHIKDAFDGE

SEQ ID NO: 4648 - protein, 46 aa, Streptococcus pneumoniae
LREEPPPPKKLEKISSKPPKPPAPLKPPKPPAPPKPPLAPAAPYWS

SEQ ID NO: 4649 - protein, 118 aa, Streptococcus pneumoniae
MSVLDEEYLKNTRKVYNDFCNQADNYRTSKDFIDNIPIEYLARYREIILAEHDSCVKNDEAVRNFVTSVLLSAFVSAMVSAMISLEIQTYKFVIPFIIGMIWTVVVFLMINWNYIGKY

SEQ ID NO: 4650 - protein, 85 aa, Streptococcus pneumoniae
LIIRNTTTVQIIPIMNGITNLYVCISNDIIADTIADTNADNNTEVTKFLTASSFLTQLSCSANIISLYLAKYSIGILSIKSFDVL

SEQ ID NO: 4651 - protein, 607 aa, Streptococcus pneumoniae
MSKIIGIDLGTTNSAVAVLEGTESKIIANPEGNRTTPSVVSFKNGEIIVGDAAKRQAVTNPDTVISIKSKMGTSEKVSANGKEYTPQEISAMILQYLKGYAEDYLGEKVTKAVITVPAYFNDAQRQATKDAGKIAGLEVERIVNEPTAAALAYGLDKTDKEEKILVFDLGGGTFDVSILELGDGVFDVLSTAGDNKLGGDDFDQKIIDHLVAEFKKENGIDLSTDKMAMQRLKDAAEKAKKDLSGVTSTQISLPFITAGEAGPLHLEMTLTRAKFDDLTRDLVERTKVPVRQALSDAGLSLSEIDEVILVGGSTRIPAVVEAVKAETGKEPNKSVNPDEVVAMGAAIQGGVITGDVKDVVLLDVTPLSLGIETMGGVFTKLIDRNTTIPTSKSQVFSTAADNQPAVDIHVLQGERPMAADNKTLGRFQLTDIPAAPRGIPQIEVTFDIDKNGIVSVKAKDLGTQKEQTIVIQSNSGLTDEEIDRMMKDAEANAESDKKRKEEVDLRNEVDQAIFATEKTIKETEGKGFDAERDAAQAALDDLKKAQEDNNLDDMKAKLEALNEKAQGLAVKLYEQAAAAQQAQEGAEGAQATGNAGDDVVDGEFTEK

SEQ ID NO: 4652 - protein, 119 aa, Streptococcus pneumoniae
RTWISTAGWLSAAVEKTCDLDVGIVVLRSISFVNTPPIVSIPSDNGVTSRRTTSLTSPVITPPWIAAPIATTSSGFTDLFGSLPVSALTASTTAGIRVEPPTRITSSISDKLKPASERA

SEQ ID NO: 4653 - protein, 217 aa, Streptococcus pneumoniae
LYLSYTPLPLLGVGCGHGVCSLFERLGRWYLLGVHRLLGEFGWPYGSYGQIRHLLRFLQFLLLSKRESSFLAPSPSPSSHHLSNLQLQVHAQGCQEMVRLLLPSPGYDNVASFDVLHWHGVGYFAFLHEREDICFRTHLHVHLPSPTQTFQELFLQLFPQLPLLELLLLLHFLYLGPCSPPLMISILMYFIMITAEVAVKICQLHGQNTVDHIDLID

SEQ ID NO: 4654 - protein, 182 aa, Streptococcus pneumoniae
LKSLKEANMAQDIKNEEVEEVQEEEVVETAEETTPEKSELDLANERADEFENKYLRAHAEMQNIQRRANEERQNLQRYRSQDLAKAILPSLDNLERALAVEGLTDDVKKGLGMVQESLIHALKEEGIEEIAADGEFDHNYHMAIQTLPADDEHPVDTIAQVFQKGYKLHDRILRPAMVVVYN

SEQ ID NO: 4655 - protein, 355 aa, Streptococcus pneumoniae
VLIDQTERSDEMVTERQQDILNLIIDIFTKTHEPVGSKALQESINSSSATIRNDMAELEKQGLLEKAHTSSGRMPSVAGFQYYVKHSLDFDRLAENEVYEIVKAFDQEFFKLEDILQEAANLLTDLSGCTVVALDVEPSRQRLTAFDIVVLGQHTALAVFTLDESRTVTSQFLIPRNFLQEDLLKLKSIIQERFLGHTVLDIHYKIRTEIPQIIQRYFTTTDNVIDLFEHIFKEMFNENIVMAGKVNLLNFANLAAYQFFDQPQKVALEIREGLREDQMQNVRVADGQESCLADLAVISSKFLIPYRGVGILAITGPVNLDYQQLINQVNVVNRVLTMKLTDFYRYLSSNHYEVH

SEQ ID NO: 4656 - protein, 169 aa, Streptococcus pneumoniae
MNSRVEFRIFTIVDLDKEEEYLHEMHLKGWRYRTSRFGLFYFDQCQPDDVIYRIYDSRFLKKYKHELQDFRDRGWELIGAGSCSILRKSSSDLLPEDQVYMSKGLKWEVMRSRLRSCTTTFLGGLVVCTSLFREDLSMSFFLIFVLYAFLISYLIHGYFRLKRKYRVDE

SEQ ID NO: 4657 - protein, 777 aa, Streptococcus pneumoniae
MVEFIKSKKEMSEEDIKANFITPAIVSKGWKNGEHIAYEEYFTDGRIEVRGDKARRKEGKKSDYSLYYQFGTRIAIVEAKDNKHSVRAGLQQAIEYGEILDVPFVYSSNGDGFIEHDRITREERELELDEFPTREELFSRMTKEKGLTYEITEAISTPYYTDAFSMKTPRYYQQIAINRTIETVARGQKRVMFVMATGTGKTFMAFQIIHRLRKAGLAKRVLFLADRNILVDQTMAEDFRPFEKVMTKITPKLLTAPEKLNSFEIYLGLYQQLTGEDGTETHYQKFDKDFFDLIVIDEAHRGSAKENSNWRKIIDYFSSATQIGMTATPKETKNASNTEYFGEPIYTYSLKQGIEDGFLAPYRVMRVNLDVDVDGYRPETGKVDANGQLIEDRYYGRKDFDKTIVIDDRTQRVAKFVSDYMKQNNARFDKTIVFCVDIDHAERMRAALVKENLDLVQEDYRYVMQVTGDNAEGKAQLDNFMDVNSNFPAIVTTSKLLTTGVNAKTCRLIVLDSNIQSMTEFKQIIGRGTRLYPQKGKEFFTIIDFRNVTNLFADPDFDGDPVKVLETGAKTVSGSTPGFVGEEGDPVEKYIVTDKQVTILNSTVQVLDENGKLITESLTDYTRKNILGSYATLNDFITVWHTADKKKLILDELYKKGVYLDAIRESEGISEQEIDDFDLLLKLAYGQKELTKTERINKLKQSGYLYKYSEEARAVLEILLNKYMDKGIGELESIETLKLPEFQIYGGTFKIINTYFGDKKRYLQAIKELEQELFTVA

SEQ ID NO: 4658 - protein, 487 aa, Streptococcus pneumoniae
MSITSFVKRIQDITRNDAGVNGDAQRIEQMSWLLFLKIYDSREMVWELEEDEYESIIPEELKWRNWAHAQNGERVLTGDELLDFVNNKLFKELKELEITSNMPIRKTIVKSAFEDANNYMKNGVLLRQVINVIDEVDFNSPEDRHSFNDIYEKILKDIQNAGNSGEFYTPRAATDFIAEVLDPKLGESMADLACGTGGFLTSTLNRLSSQRKTSEDTKKYNTAVFGIEKKAFPHLLAVTNLFLHEIDDPKIVHGNTLEKNVREYTDDEKFDIIMMNPPFGGSELETIKNNFPAELRSSETADLFMAVIMYRLKENGRVGVILPDGFLFGEGVKTRLKQKLVDEFNLHTIIRLPHSVFAPYTGIHTNILFFDKTKKTEETWFYRLDMPDGYKNFSKTKPMKSEHFNPVRDWWENREEILEGKFYKSKSFTPSELAELNYNLDQCGFPKEEEEILNPFELIQNYQAERATLNHKIDNVLADILQLLEDK

SEQ ID NO: 4659 - protein, 516 aa, Streptococcus pneumoniae
MTPEQLKASILQRAMEGKLVPQNPNDEPASELLKRIKAEKEKLISEGKIKRDKKETEIFRGDDGKHYGKFADGSTQEIDVPYDIPDTWEWVRIKSIYWNFGQNKPEKSFRYIDTSSIDRKKNIINYKNLQYLSPEQAPSRARKLVSQNSVLFSTVRPYLKNIAVVRELKEYLIASTAFIVLDTLLNETYLKYYLLSDNFINRVNNKSTGTSYPAINDYNFNLLLIALPPLSEQQRIVEAIESALEKVDEYAESYNRLEQLDKEFPDKLKKSILQYAMQGKLVEQDPNDESVEVLLEKIRAEKQKLFEEGKIKKKDLDISIVSQGDDNSYYGNKDETTSYPIYKIPEAWRYIKFASLVNFRIGKTPPRSEATFWGTEIPWVSISDMPISGYVTNTRESISKLALKSKKIDISPKGTLLMSFKLSIGKVAILDIPATHNEAIISIFPYANKENIIRDYLMIFLPLISTLGDSKDAITGKTLNSTSISELLIPISNHEEMKRIIFKVDLLFQKVSQLFE

SEQ ID NO: 4660 - protein, 429 aa, Streptococcus pneumoniae
VRFSTLVEIVRGGSPRPIKDYLTSEVDGINWIKIGDTEKGEKYINNVKEKIKKSGLNKTRFVKKGTFLLTNSMSFGRPYILNVDGAIHDGWLAISNYENSLNKDYLFYILSSNVVYSQFLSLISGAVVKNLNSDKVASILIPLPPLSEQQRIIEAIESALEKVDEYAESYNRLEQLDKEFPDKLKKSILQYAMQGKLVEQDPNDESVEVLLEKIRAEKQKLFEEGKIKKKDLDISIVSQGDDNSYYGNIPMNWVVIKIKDIFSMNTGLSYKKGDLSINNKGVRIIRGGNIKPLEFSLLDNDYYIDTQFISSEQVYLKHNQLITPVSTSLEHIGKFARIDKDYDGVVAGGFIFQLTPFESSEIISKFLLFNLSSPLFYKQLKAITKLSGQALYNIPKTTLSELLIPLAPFEEQELITQKVEKLFEKVNQL

SEQ ID NO: 4661 - protein, 73 aa, Streptococcus pneumoniae
SICLHLISIYYIISINDDGDCFVCACRFLNPDRAEEYFCRGCQGENPEDIEFYDEQLQAEKVEVLNIRLEVKN

SEQ ID NO: 4662 - protein, 448 aa, Streptococcus pneumoniae
MPITAADIRREVKEKNVTFIRLMFSDILGTMKNVEIPATDEQLDKVLSNKVMFDGSSIEGFVRINESDMYLYPDLDTWTVFPWGDENGSVAGLICDVYTTEGEPFAGDPRGNLKRALRHMEEVGFKSFNLGPEPEFFLFKLDENGDPTLEVNDKGGYFDLAPTDLADNTRREIVNVLTKMGFEVEASHHEVAVGQHEIDFKYDEVLRACDKIQIFKLVVKTIARKHGLYATFMAKPKFGIAGSGMHCNMSLFDAEGNNAFFDPNDPKGMQLSETAYHFLGGLIKHAYNYTAIMNPTVNSYKRLVPGYEAPVYIAWAGRNRSPLVRVPASRGMGTRLELRSVDPMANPYVAMAVLLEVGLYGIENKIEAPAPIEENIYIMTAEERKEAGITDLPSTLHNALKALTEDEVVKAALGDHIYTSFLEAKRIEWASYATFVSQWEIDNYLDLY

SEQ ID NO: 4663 - protein, 118 aa, Streptococcus pneumoniae
MKEKEFRRNMAVFPIGSVMKLTDLSARQIRYYEDQELIKPDRNEGNRRMYSLNDMDRLLEIKDYISEGYNIAAIKKKYAEREAKSKKAVSQTEVRRALHNELLQQGRFASVQSPFGRG

SEQ ID NO: 4664 - protein, 175 aa, Streptococcus pneumoniae
MSYFKKYKFDKSQFKLGMRTFKTGIAVFLVLLIFGFFGWKGLQIGALTAVFSLRESFDESVHFGTSRILGNSIGGLYALVFFLLNTFFHEAFWVTLVVVPICTMLTIMTNVAMNNKAGVIGGVAAMLIITLSIPSGETILYVFVRVLETFMGVFVAIIVNYDIDRIRLFLEKKEK

SEQ ID NO: 4665 - protein, 125 aa, Streptococcus pneumoniae
LFIKSYFSVKAASPGRTLPSRSSIDAPPPVLIHENLSARPRLIAAAAESPPPMIDLTPGCFTIASITPIVPAWKSGFSNTPIGPFHTTVLAPVKASSNLAIDFGPMSRPRKPSETASPSVSRTSV

SEQ ID NO: 4666 - protein, 398 aa, Streptococcus pneumoniae
MAKLTVKDVDLKGKKVLVRVDFNVPLKDGVITNDNRITAALPTIKYIIEQGGRAILFSHLGRVKEEADKAGKSLAPVAADLAAKLGQDVVFPGVTRGAELEAAINALEDGQVLLVENTRYEDVDGKKESKNDPELGKYWASLGDGIFVNDAFGTAHRAHASNVGISANVEKAVAGFLLENEIAYIQEAVETPERPFVAILGGSKVSDKIGVIENLLEKADKVLIGGGMTYTFYKAQGIEIGNSLVEEDKLDVAKALLEKANGKLILPVDSKEANAFAGYTEVRDTEGEAVSEGFLGLDIGPKSIAKFDEALTGAKTVVWNGPMGVFENPDFQAGTIGVMDAIVKQPGVKSIIGGGDSAAAAINLGRADKFSWISTGGGASMELLEGKVLPGLAALTEK

SEQ ID NO: 4667 - protein, 1646 aa, Streptococcus pneumoniae
MKNPFFERRCRCSIRKLSVGACSLMIGAVLFAGPALAEETAVPENSGANTELVSGESEHSTNEADKQNEGEHTRENKLEKAEGVATASETAEAASAAKPEEKASEVVAETPSAEAKPKSDKETEAKPEATNQGDESKPAAEANKTEKEVQPDVPKNTEKTLKPKEIKFNSWEELLKWEPGAREDDAINRGSVVLASRRTGHLVNEKASKEAKVQALSNTNSKAKDHASVGGEEFKAYAFDYWQYLDSMVFWEGLVPTPDVIDAGHRNGVPVYGTLFFNWSNSIADQERFAEALKQDADGSFPIARKLVDMAKYYGYDGYFINQETTGDLVKPLGEKMRQFMLYSKEYAAKVNHPIKYSWYDAMTYNYGRYHQDGLGEYNYQFMQPEGDKVPADNFFANFNWDKAKNDYTIATANWIGRNPYDVFAGLELQQGGSYKTKVKWNDILDENGKLRLSLGLFAPDTITSLGKTGEDYHKNEDIFFTGYQGDPTGQKPGDKDWYGIANLVADRTPAVGNTFTTSFNTGHGKKWFVDGKVSKDSEWNYRSVSGVLPTWRWWQTSTGEKLRAEYDFTDAYNGGNSLKFSGDVAGKTDQDVRLYSTKLEVTEKTKLRVAHKGGKGSKVYMAFSTTSDYKFDDADAWKELTLSDNWTNEEFDLSSLAGKTIYAVKLFFEHEGAVKDYQFNLGQLTISDNHQEPQSPTSFSVVKQSLKNAQEAEAVVQFKGNKDADFYEVYEKDGDSWKLLTGSSSTTIYLPKVSRSASAQGTTQELKVVAVGKNGVRSEAATTTFDWGMTVKDTSLPKPLAENIVPGATVIDSTFPKTEGGEGIEGMLNGTITSLSDKWSSAQLSGSVDIRLTKPRTVVRWVMDHAGAGGESVNDGLMNTKDFDLYYKDADGEWKLAKEVRGNKAHVTDITLDKPITAQDWRLNVVTSDNGTPWKAIRIYNWKMYEKLDTESVNIPMAKAAARSLGNNKVQVGFADVQAGATITVYDNPNSQTPLATLKSEVGGDLASAPLDLTNQSGLLYYRTQLPGKEISNVLAVSVPKDDRRIKSVSLETGPKKTSYAEGEDLDLRGGVLRVQYEGGTEDELIRLTHAGVSVSGFDTHHKGEQNLTLQYLGQPVNANLSVTVTGQDEASPKTILGIEVSQEPKKDYLVGDSLDLSEGRFAVAYSNDTMEEHSFTDEGVEISGYDAQKTGRQTLTLRYQGHEFNFDVLVSPKAALNDEYLKQKLAEVEAAKNKVVYNFASPEVKAAFLKAIEAAEQVLKDHETSTQDQVNDRLNKLTEAHKALNGQEKFKEEKTELDRLTGEVQELLAAKPNHPSGSALAPLLEKNKALVEKVDLSPEELATAKQSLKDLVALLKEDKPAVFSDSKTGVEVHFSNKEKTVIKGLKVERVQASAEEKKYFAGEDAHVFEIEGLDEKGQDVDLSYASIVKIPIEKDKKVKKVFFLPEGKEAVELAFEQTDSHVIFTAPHFTHYAFVYESAEKPQPAKPAPQNKVLPKPTYQPASDQQKAPKLEVQEEKVAFHRQEHENTEMLVGEQRVIIQGRDGLLRHVFEVDENGQRRLRSTEVIQEAIPEIVEIGTKVKTVPAVVATQEKPAQNTAVKSEEASKQLPNTGTADANEALIAGLASLGLASLALTLRRKREDKD

SEQ ID NO: 4668 - protein, 170 aa, Streptococcus pneumoniae
LISFGFNVFSVFLGTSGWTSFSVLLASAAGLDSSPWLVASGFASVSLSDLGFASADGVSATTSLAFSSGLAALAASAVSDAVATPSAFSSLFSLVCSPSFCLSASLVECSLSPETSSVLAPLFSGTAVSSAKAGPANKTAPIISEQAPTDNLRILQRQRLSKNGFFIFSS

SEQ ID NO: 4669 - protein, 543 aa, Streptococcus pneumoniae
MSINWQEILFHFLGGLGLFLYSIKTMGDGLQQAAGDRLRFYIDKYTSNPFFGVLVGIGMTALIQSSSGVTVITVGLVSAGLLTLRQAIGIVMGANIGTTVTSFLIGFKLGNYALPMLFIGAVCLFFTKNRTVNNIGRILFGVGGIFFALNLMSGAMAPLKDLQVFKDYMIELSKNPVLGVFVGTGLTLLIQASSATIGILQNLYAGNLIDLQGALPVLFGDNIGTTITAIIASLGANIAAKRVAGAHVAFNVIGTVVCVIFLVPFTVLIHWFEATLNLAPEMTIAFAHGTFNITNTIVQFPFIGALAYFVTKIIPGEDEVVKYEPLYLDEHFIKQAPSIALGNAKKELLHLGNYAAKAFDLSYKYIIDLDEKVAEKGHKTEEAINTIDEQLTRYLIALSSEALSQKESEVLTNILDSSRDLERIGDHTEALLNLTDYLQRKNVEFSDAALKELEEVYRQTSDFIKDALDSVENNDIEKARSLVERHEAINKIERVLRKTHIKRLNKGECSTQAGVNFIDIISHYTRVSDHAMNLAEKVFAEQI

SEQ ID NO: 4670 - protein, 535 aa, Streptococcus pneumoniae
MSTKYIFVTGGVVSSIGKGIVAASLGRLLKNRGLKVTIQKFDPYINIDPGTMSPYQHGEVFVTDDGAETDLDLGHYERFIDINLNKYSNVTTGKIYSEVLRKERRGEYLGATVQVIPHITDALKEKIKRAALTTDSDVIITEVGGTVGDIESLPFLEALRQMKADVGADNVMYIHTTLLPYLKAAGEMKTKPTQHSVKELRGLGIQPNMLVIRTEEPAGQGIKNKLAQFCDVAPEAVIESLDVEHLYQIPLNLQAQGMDQIVCDHLKLDAPAADMTEWSAMVDKVMNLKKQVKISLVGKYVELQDAYISVVEALKHSGYVNDVEVKINWVNANDVTAENVAELLSDADGIIVPGGFGQRGTEGKIQAIRYARENDVPMLGVCLGMQLTCIEFARHVLGLEGANSAELAPETKYPIIDIMRDQIDIEDMGGTLRLGLYPSKLKRGSKAAAAYHNQEVVQRRHRHRYEFNNAFREQFEAAGFVFSGVSPDNRLVEIVEIPENKFFVACQYHPELSSRPNRPEELYTAFVTAAVENSN

SEQ ID NO: 4671 - protein, 43 aa, Streptococcus pneumoniae
VFLTLSVLSTTSKQCFEQPTASFLACSLIFIEYKIQEDNFLKK

SEQ ID NO: 4672 - protein, 195 aa, Streptococcus pneumoniae
LELEVFAGQEKSELSMIEVARAILELRGRDHEMHFSDLVNEIQNYLGTSNSDIREALPLFYTELNFDGSFISLGDNKWGLRSWYGVDEIDEEIIALEENDDDEVAPKAKKKRVNAFMDGDSDAIDYNADDPEDEDAYEADPALSYDDENPDDEKNEVEAYDAEINEIAPDDLGEDVDLNEDDDEFSDDDAETSEE

SEQ ID NO: 4673 - protein, 149 aa, Streptococcus pneumoniae
LCFVPYYKVNYCEEAFAWYQNVNLVYLVDGVKLPYSQATLKAMYSNLDRHGELFWIEVKEKGEWFPIGDITLSQDNLPIVIGNSAYQHRGLGKKILSALIELARVKGWKELRVKEIYTYNNASRRCFKSLGFVENGATEKGRSFILELV

SEQ ID NO: 4674 - protein, 129 aa, Streptococcus pneumoniae
MKVNIADLHPTQLYLSEKKLQDIQMLYQSAETIQVDPISILAFGDCLLITDGHHRAYQALLAGRDTISAEWDRDGGDELYHLYAQACEERKIYSVFDLEDRILAQDGYEAKWYNWCDGFNQAATLLLKR

SEQ ID NO: 4675 - protein, 216 aa, Streptococcus pneumoniae
MKDKQTFLMKGSFALLLFVILGYMVKFYPEMLVNFDQSIQTAIRGDLPDYLTILFRSLTRLIDIPVIITWVVITAFVFYRKRWKIESFFMLGNLALAGLLIVTFKNIYQRPRPAILHLVEEKGFSFPSGHSLAVTLMVGTLIVILSQRIKDPVWRKIVQIVLGLYLVSVLVSRVYLGVHYPSDVLASLCVGLGVLFIEFPFYDKLRFQWRFKGKQK

SEQ ID NO: 4676 - protein, 187 aa, Streptococcus pneumoniae
MTNTRRLSTIAILSAISFVLMYFDFPLLPAASFLKIEFSILPVLVGLVVMDLPAALGVLLLRSLLKLLLNSQGVNTYIGLPMNIVALGVFVIVFALIWKKERTTLRFLLGSLAGTVGLTLAMLVLNYVYAVPLYAKFANFDIGKILGLSNYLMTMVLPFNLIEGVIFSVSFWLLYVLLKPTLKHYER

SEQ ID NO: 4677 - protein, 72 aa, Streptococcus pneumoniae
LERIPLSILTFYIPKVPSYSIKEKQSKWLQSGYKSIKTDKAILSSSPIQTILSVVESHHISLRSRTSLKRRK

SEQ ID NO: 4678 - protein, 155 aa, Streptococcus pneumoniae
MTNHIVLFEPQIPQNTGNIARTCAATNSPLHIIKPMGFPIDDRKMKRAGLDYWDKLEIYFYESLEDFISQMKGKLYLISKFAEKVYSEVDLSTDEDHYFLFGREDKGLPEDFMREHSEKALRIPMNDEHCRSLNVSNTVCMIVYEALFQQNFCRS

SEQ ID NO: 4679 - protein, 276 aa, Streptococcus pneumoniae
MQAKLIGYQHRDTVIHRLSGAGKLLFFILVSLAAMISYDTRMLLLIAIFSVFLLYLSEIRFKDVSFVAVFATVFAVLNVLMVYRFSPEYGVGLYGERSVIWQGIGVYTLTSQELFYLLNLAIKYLCTIPLAIIFLMTTHPSQFASSLNQIGVPYKIAYSVSLTLRYIPDLQEEFFTIKMSQEARGMELSKKASLMQRIKGNLLIITPLIFSSLERIDTIATAMELRRFGKEKKRTWYSYQALKKGDYITLLLATLFLVVSLLLILQNQGRFYNPWK

SEQ ID NO: 4680 - protein, 415 aa, Streptococcus pneumoniae
LSGGQKQRVSLAGVLIDESPILLFDEPLANLDPKSGQDIIELIDQIHKEEGTTTLIIEHRLEDVLHRPVDRIILINDGRILFNGSPDQLLATDLLTQNGIREPLYLTTLRQLGVDLVKEEQLANLDNMSISKGQVQLQNELAKETPELQSLFKLEDVSFSYDDRPILKSLHLDIKKGEKIAIVGKNGAGKSTLAKAISSFIQTEGRYLWEKQDIKGDSVAERAERVGYVLQNPNQMISTNMIFDEVALGLRLRGVDEKEIETRVYETLKICGLYEFRNWPISALSFGQKKRVTIASILVLGAEIILLDEPTAGQDQKNYTEIMEFLEELHQKGHTIVMITHDMQLMLDYSDRVLVMVDGELIADTVPASLLSDPELLVKANLKETSIFNLAKKLDVDPLDLTAFYKERREGCKLN

SEQ ID NO: 4681 - protein, 127 aa, Streptococcus pneumoniae
MKEAIIEWKDFSFRYETQQEPTLQGIDLTIYKGEKVLIVGPSGSGKSTLGQCLNGIIPNIYKGQTYGEFLIKGQTAFDMSIYDKSHLVSTVLQDTDGQFIGLSVAEDLAFALENDVTALDEMKGSCL

SEQ ID NO: 4682 - protein, 70 aa, Streptococcus pneumoniae
DFLSLVNGQVYPLQGRFLLCFIPEREILPLNYSFFHLTLFIRFLDFYFIINQALLAVSSLKILAPKRFLS

SEQ ID NO: 4683 - protein, 85 aa, Streptococcus pneumoniae
MKIKEQTRKLAAGCSKQCFEVVDETDEVSSKQCFEVVDETDEVSNHTYGKAKLTWFEEIFEEYKMMGKAGQLVFFDVYRLVRQVS

SEQ ID NO: 4684 - protein, 182 aa, Streptococcus pneumoniae
MEIKFTIKQVVAVGIGAALFVVIGMINIPTPVPNTSIQLQYAVQALLSIIFGPIIGLLVGLIGHAIKDSLVGYGLWWTWIISSGLFGLVVGLFRKYVRVINSVFDWKDILIFNLIQLLANALVWGVLAPLGDVVIYQEAAEKVFAQGIVAGIANGVSVAIAGTLLLLAYAGTQTRAGSLKKD

SEQ ID NO: 4685 - protein, 291 aa, Streptococcus pneumoniae
MIKDIQGDKMNNNLLVLQSDFGLVDGAVSAMIGVALEESPTLKIHHLTHDITPYNIFEGSYRLFQTVDYWPEGTTFVSVVDPGVGSKRKSVVAKTAKNQYIVTPDNGTLSFIKKHVGIVAIREISEVANRRQNTEHSYTFHGRDVYAYTGAKLASGHITFEEVGPELSVEQIVELPVVATIIEDHLVKGAIDILDVRFGSLWTSITREEFYKLEPEFGDRFEVTIYHADMLVYQNQVVYGKSFADVRIGQPILYINSLYRLGLAINQGSFAKAYNVGVGSSWTIEIKKIEG

SEQ ID NO: 4686 - protein, 449 aa, Streptococcus pneumoniae
MKIILVGGGKVGFALCRSLVAEKHDVLLIEQDEAVLNHIVSRFDIIGILGNGADFAILEQASVQDCDIFIALTEHDEVNMIAAVLAKKMGAKETIVRVRNPEYSNSYFKEKNILGFSLIVNPELLAARAIANIIDFPNALSVERFAGGRVSLMEFVVKSTSGLCQMPISDFRKKFGNVIVCAIEREHQIIIPSGDMTVQDKDRIFVTGNRVDMILFHNYFKSRAVKSLLIVGAGRIAYYLLGILKDSRIDTKVIEINPEIASFFSEKFPNLYIVQGDGTAKDILLEESAQHYDAVATLTGVDEENLITSMFLDRVGVQKNITKVNRTSLLEIINAPDFSSIITPKSIAVDTIMHFIRGRVNAQYSDLQAMHHLANGQIETLQFHIKEANKMTAKPLSQLKLKKGVLIAAIIRKGKTIFPTGEDMLEVGDKLLVTTLLPNITKIYDLIAR

SEQ ID NO: 4687 - protein, 479 aa, Streptococcus pneumoniae
MNKSMIRYLLSKLLLIEAVLLLVPVAIAVYYRESSQVFTALFSTIGILVLLGGSGSLQKPKNQRIYAKEGVLIVALCWILWSFFGGLPFVFSGQIPSVIDAFFEISSGFTTTGASILNDVSVLSRSLLFWRSFTHLIGGMGVLVFALAIMDNAKNSHLEVMKAEVPGPVFGKVVSKLKNTAQILYLLYLALFSLFVIIYYLAGMPLYDSFVIAMGTAGTGGFTVYNDGIAHYGSSLITYLVSIGVLIFGVNFNLYYYLMLRRIKAFFGDEELRAYLVIVLVSTGLISLNTLYLYPGFSKSFEMTFFQVSNIITTTGFGYGDITNWPLFSQFILLFLMTIGGSAGSTAGGLKIIRGLILSKIAKNQILSILSPHRVLTLHVNKTVIDKDTQHKILKYFVIYAMILLSLIFIVSLDSNDFLIVTSAVFSCFNNIGPILGTTSSFSIFSPISKILLSFAMIAGRLEIYPILLLFMKRTWSKR

SEQ ID NO: 4688 - protein, 559 aa, Streptococcus pneumoniae
MDKLVAAIEKQQGKFEKISTNNYMMAIKDGFIATMPLIMFSSFLMIIIMIPKNFGVELPSPAIVWMRKVYMLTMGVLGIIVSGTVGKSLVGNVNRKMPHGKVINDTSAMLAAICSYLVLTVTLVVDEKTGSTSLSTNYLGSQGLITSFVSAFITVNVYRFCIKRDITIHLPKEVPGAISQAFRDIFPFSFVLLISGLLDIVSRFSLDVPFAQVFQQLLTPIFKGAESYPAMMLIWFMCALLWFVGIHGPSIVLPAVTALQLSNMEENAQLLANGQFPYHSLTPNFGNYIAAIGGTGATFVVPFILIFFMRSKQLKSVGKATITPVLFAVNEPLLFGMPVILNPYLFVPFLMTPPVNVFLGKVFIDFFGMNGFYIQLPWAFPGPLGLLIGTNFQPISFVLLSLMLVVDILIYLPFCRAYDRQLLMKEDVASSNDIILEEDTSEIMPGEIDVIKSKELKVLVLCAGSGTSAQLANAINEGAQLAEVRVIANSGAYGAHYDIMGVYDLIILAPQVRSYYREMKVDAERLGIQIVATRGMEYIHLTKSPSKSLQFVLEHYQAV

SEQ ID NO: 4689 - protein, 470 aa, Streptococcus pneumoniae
MENLQFKALPKEFLLGAATAAYQVEGATRVDGKGINMWDVYLQENSPFLPDPASDFYYRYEEDIALAAEHGLQALRLSISWVRIFPDIDGDANILAVRYYHRVFQSCLKHNVIPFVSLHHFDSPQKMLETGDWLDRENIDHFIRYARFCFQEFTEVKHWFTINELMSLAAGQYIGGQFPPNHHFQLSEAIQANHNMLLAHALAVLEFHQLGIEGEIGCIHALKPGYPIDGQKENILAAKRYDVYNNKFLLDGTFLGYYSEDTLFHLNQILEANNSSFIIEDGDLEIMKRAAPLNTMFGMNYYRSEFIREYKGENRQEFNSTGIKGQSSFKLNALGEFVKKTGIPTTDWDWNIYPQGLFDMLLRIKEEYPQHPVIYLTENGTALKEVKPEGENDIIDDSKRIRYIEQHLHKVLEARDRGVNIQGYFIWSLQDQFSWANGYNKRYGLFFVDYETQKRYIKKSALWVKGLKRN

SEQ ID NO: 4690 - protein, 64 aa, Streptococcus pneumoniae
DSLALKHEYNLSLPQFLIDEIRGLQEHAPTTYYDSLELLQIIENDDLEETDLLYIDLQQETSVH

SEQ ID NO: 4691 - protein, 114 aa, Streptococcus pneumoniae
MKSKEEINMLGFTIVAYAGDARSDLMDALAFARDGYFEQARELVESANDSIVSAHREQTNLLAEEASGDNFEVSFIMIHGQDTLMTTMLLYDQVKFFIDEYERIRKIEEHIGLQ

SEQ ID NO: 4692 - protein, 646 aa, Streptococcus pneumoniae
LQINAILKKKKLLLEGNKMVIRVFDQQKNTYSSFALEELSYYMNRVFKTNIELVEEKEADIFVGLVNKEDRKDHVLISLDKGKGRIESNTIVGLLIGIYRMFHEFGVVYTRPGRRHDFVPELRFEDFLDKELSIDETASYYHRGVCIEGADSFENILDFIDWLPKIGMNSFFIQFENPYSFLKRWYEHEFNPYLNKEKFSNELVQELSDRLDKELQKRGLIHHRVGHGWTGEVLGYSSKFGWESGLSISEEKKPYVAEINGKRELFNTAPILTSLDFSNPDVADKMVEIIKDYAKKRPDVNYLHVWLSDARNNICECENCRQELVSDQYIRILNQLDRALTSEGLDTKICFLLYHELLWAPQKEKLDNPERFTMMFAPITRTFEMSYADVDFDNSIPTPKPYLRNKIILPNSLEENLSYLFEWQKTFKGDSFVYDYPLGRAHYGDLGYMKISQTIYRDVSYLSNLHLNGYISCQELRAGFPHNFPNYVMGEMLWKKTRSYEELIEEYFSALYGENWQSVVEYLEKLSSYSSCDYFNAIGSRQNDVLANHYYIAYNLADNFLPIIEENISKLLNSQKDEWKQLSYHREYVVKMAKALYLQATGKTRQAQDEWRNVLNYIRGHELLFQSNLDVYRVIEVAKNYAGFHL

SEQ ID NO: 4693 - protein, 440 aa, Streptococcus pneumoniae
MNNILAFLETKVAPFGEKVGNQRHLKAIREGFMMAMPLILVGSLFLILISWPQEAFTNWLNSVGLLSILTTMNQSTVAIISLVACFGIAYRLSEGYGTDGPSAGIIALSSFVLMAPRFSSMVYDKNGEQVKQLFGGAIPFSSLNASSLFMAITIGLVTAEIYRMFIQRGITIKMPSGVPDVVSKSFSALLPGFTTFVLWALVLKGLEAAGVAGGLNGLLGAIVGTPLKLIAGTLPGMILCVIVNSFFWFCGVNGGQVLNAFVDPVWLQFTTENQEAVAAGQTLQHIITLPFKDLFVFIGGGGATIGLAICLFLFSKSRANKTLGKLAIIPSIFNINTAILFTFPTVLNPIMLIPFIATPTINALITYVSMAVGLVPYTTGVILPWTMPPIIGGFLATGASWRGALLQVVLILVSVAIYYPFFKIADKRNLEKEKATVGGK

SEQ ID NO: 4694 - protein, 407 aa, Streptococcus pneumoniae
MITKQSAFLQNRATILEFLYRNPATSRTDIVNETGLTPATTTNIIKELSEQSLIYETGDEFSEFSGSGRRRKTISITDNIPYVVGGIEINVLGIFLSLCDLQGKTLFETEILNEDYPISEINSTITNMIKTAIEYVPLETKLLGFGLSIPGHYYKDSGSIITNNPIWESFNLLNVIKRFNFPFIVKNNIDCMAIGQYLFNPHNTPDNFIFLHAGLGIYTSFFTKEKIGASKNPYIGEIGHTIVELNGQYCECGKKGCLQTYISDAWLIKHAQLLFKNSQLTVLKSLVKTEKDIHLDTLLTAYNLGDSALRQQIDKGVNLLATSIANLLLINPADKIYINSQLLNYQPFTHEVRDKIQDQLHFVPFTRNIEIEILPYNKHRGSIGACALAIVAFFIEHSNVLQDIISP

SEQ ID NO: 4695 - protein, 72 aa, Streptococcus pneumoniae
KETSNAHETTNTGIKTMTKQIPKFTKDTAQLYTCKWLLYNKVTKMYDHTVVNHSVREYITDSISTNTSKESG

SEQ ID NO: 4696 - protein, 57 aa, Streptococcus pneumoniae
LLIINRFFSLFVLDWYRTELWINTLVSYPVPKYVGRKMKQLLRVSVLEKILSIEFFK

SEQ ID NO: 4697 - protein, 61 aa, Streptococcus pneumoniae
IPNFLYLLILINNTSVTILPVRSLSNHTENSSKIYLVRQSSKNSTIVQTLSYRIDFLNYIL

SEQ ID NO: 4698 - protein, 94 aa, Streptococcus pneumoniae
MDWYDYMIQASKQSQFNASHWFRYLRKVIFEDYSYLTNQDVEKLLDSKELTRFQKISLKYAFQEHTPTHKYVISLNKPAKLTNVQKLMEKYKHG

SEQ ID NO: 4699 - protein, 172 aa, Streptococcus pneumoniae
MEQLHFITKLLDIKDPNIQILDIINKDTHKEIIAKLDYDAPSCPECGNQLKKYDFQKPSKIPYLETTGMPSRILLRKRRFKCYHCSKMMVAETSIVKKNHQIPRIINQKIAQKLIEKISMTDIAHQLAISTSTVIRKLNDSHFEHDFSRLPEIMSWDVETVRGVTVSIGRWR

SEQ ID NO: 4700 - protein, 255 aa, Streptococcus pneumoniae
MEMSFIAQDFEKLDIITVLEGRTQAVIRDHFLKYDRAVRCRVKIITMDMFSPYYDLARQLFPCAKIVLDRFHIVQHLSRAMSRVHVQIMNQFHRKSHEYKAIKRYWKLIQQDSCKLSDKRFYRPIFRMHLTNKEILNKLLSYSEDLKHHYQLYQLLLFHFQNKEPEKFFGLIEDNLKQVHPIFQTVFKTFLKDKEKIINALQLHYSNAKLEATNNLIKLIKRNAFGFRNFENFKKRIFIALNIKKERTKFVLSRA

SEQ ID NO: 4701 - protein, 420 aa, Streptococcus pneumoniae
MEHINHTTLLIGIKDKNITLNKAIQHDTHIEVFATLDYHPPKCKHCKGKQIKYDFQKPSKIPFIEIGGFPSLIHLKKRRFQCKSCRKVTVAETTLVQKNCQISEMVRQKIAQLLLNREALTHIASKLAISTSTSTVYRKLKQFHFQEDYTTLPEILSWDEFSYQKGKLAFIAQDFNTKKIMTILDNRRQTTIRNHFFKYSKEARKKVKVVTVDMSGSYIPLIKKLFPNAKIVLDRFHIVQHMSRALNQTRINIMKQFDDKSLEYRALKYYWKFILKDSRKLSLKPFYARTFRETLTPRECLKKIFTLVPELKDYYDLYQLLLFHLQEKNTDQFWGLIQDTLPHLNRTFKTTLSTFICYKNYITNAIELPYSNAKLEATNKLIKDIKRNAFGFRNFENFKKRIFIALNIKKERTKFVLSRA

SEQ ID NO: 4702 - protein, 85 aa, Streptococcus pneumoniae
WVEEKLSSRKDKFCPFFFDVQSDENPFFEVFKVPKTKGIALDVFDEFVSGLKFSVRIRQFNGVSDVVFIANKCAQSGFKGAVEMR

SEQ ID NO: 4703 - protein, 774 aa, Streptococcus pneumoniae
MVVKTVVEAQDIFDKAWEGFKGVDWKEKASVSRFVQANYTPYDGDESFLAGPTERSLHIKKIVEETKAHYEETRFPMDTRPTSIADIPAGFIDKENEVIFGIQNDELFKLNFMPKGGIRMAETTLKENGYEPDPAVHEIFTKYVTTVNDGIFRAYTSNIRRARHAHTVTGLPDAYSRGRIIGVYARLALYGADYLMQEKVNDWNAIKEIDEETIRLREEVNLQYQALQQVVRLGDLYGVDVRKPAMNVKEAIQWVNIAFMAVCRVINGAATSLGRVPIVLDIFAERDLARGTFTESEIQEFVDDFVMKLRTVKFARTKAYDQLYSGDPTFITTSMAGMGNDGRHRVTKMDYRFLNTLDNIGNSPEPNLTVLWTDKLPYNFRRYCMHMSHKHSSIQYEGVTTMAKDGYGEMSCISCCVSPLDPENEEQRHNIQYFGARVNVLKALLTGLNGGYDDVHKDYKVFDIEPIRDEVLEFESVKANFEKSLDWLTDTYVDALNIIHYMTDRYNYEAVQMAFLPTKQRANMGFGICGFANTVDTLSAIKYATVKPIRDEDGYIYDYETIGDYPRWGEDDPRSNELAEWLIEAYTTRLRSHKLYKDAEATVSLLTITSNVAYSKQTGNSPVHKGVYLNEDGSVNLSKLEFFSPGANPSNKAKGGWLQNLNSLSSLDFSYAADGISLTTQVSPRALGKTRDEQVDNLVTILDGYFENGGQHVNLNVMDLNDVYEKIMSGEDVIVRISGYCVNTKYLTPEQKTELTQRVFHEVLSMDDALDALS

SEQ ID NO: 4704 - protein, 91 aa, Streptococcus pneumoniae
HLFILFENLFKPRQLPSATSKQYFELTSSVLFTTSKQCFEQPAASFLVCFSISIECNCLFSFIIPFFLKKRKKDFIFFKNIIQFEIKYRLF

SEQ ID NO: 4705 - protein, 77 aa, Streptococcus pneumoniae
NSLYFISNCIIFLKKIKSFFLFFRKKGIIKENKQLHSMEIEKQTRKLAAGCSKHCFEVVNRTDEVSSKYCFEVADGS

SEQ ID NO: 4706 - protein, 356 aa, Streptococcus pneumoniae
VLGMLIFPLLNDLSRKIIHIDMDAFFAAVEIRDNPKLRGKPVIIGSDPRQTGGRGVVSTCSYEARAFGVHSAMSSKEAYERCPQAVFISGNYEKYKSVGLRIRAIFKRYTDLIEPMSIDEAYLDVTENKLGIKSAVKIARLIQKDIWKELHLTASAGVSYNKFLAKMASDYQKPHGLTVILPEQAEDFLKQMDISKFHGVGKKTVERLHQMGVFTGADLLEVPEVTLIDRFGRLGYDLYRKARGIHNSPVKSNRIRKSIGKEKTYGKILRAEEDIKKELTLLSEKVALNLHQQEKAGKIVILKIRYEDFSTLTKRKSLAQKTQDASQISQIALQLYEELSEKERGVRLLGITLTGF

SEQ ID NO: 4707 - protein, 62 aa, Streptococcus pneumoniae
LVNTVSCLVVFCYFTVLSVYLYKKNLEGVTLQGFILLENLFKPRQLYLQPQNSVLSSLRLAS

SEQ ID NO: 4708 - protein, 281 aa, Streptococcus pneumoniae
MYLIEILKSIFFGIVEGITEWLPISSTGHLILAEEFIQYQNQNEAFMSMFNVVIQLGAILAVMVIYFNKLNPFKPTKDKQEVRKTWRLWLKVLIATLPLLGVFKFDDWFDTHFHNMVSVALMLIIYGVAFIYLEKRNKARAIEPSVTELDKLPYTTAFYIGLFQVLALLPGTSRSGATIVGGLLNGTSRSVVTEFTFYLGIPVMFGASALKIFKFVKAGELLSFGQLFLLLVAMGVAFAVSMVAIRFLTSYVKKHDFTLFGKYRIVLGSVLLLYSFVRLFV

SEQ ID NO: 4709 - protein, 216 aa, Streptococcus pneumoniae
LDKIVGKHSEYTYQLLTRYPNPQKRLEAGFDKLIEIKRLTASKIQDILSVAPRSIGTTSPAREFEIIEIIKHYKRLIDKAETCVNDLMAEFNSVITTVTGIGGRLGAVILAEIRNIHAFDNPAQLQAFAGLDSSIYQSGQIDLAGRMIKRGSPHLRWALIQAAKACARFSPAFKVYLKTKLEQGKHYNVAIIHLAKKLIRTLFYILKKSCHLTNKK

SEQ ID NO: 4710 - protein, 61 aa, Streptococcus pneumoniae
MLVSQIQQVPTPYLLEVEVLAVASLEAEVAAVSEPFKESYHRLKKYDIMEDRRKTNYKKSQ

SEQ ID NO: 4711 - protein, 630 aa, Streptococcus pneumoniae
LMKKTFFLLVLGLFCLLPLSVFAIDFKINSYQGDLYIHADNTAEFRQKIVYQFEEDFKGQIVGLGRAGKMPSGFDIDPHPKVQAAKNGAELADVTSEVTEEADGYTVRVYNPGQEGDIVEVDLVWNLKNLLFLYDDIAELNWQPLTDSSESIEKFEFHVRGDKGAEKLFFHTGKLFREGTIEKSNLDYTIRLDNLPAKRGVELHAYWSRTDFASARDQGLKGNRLEEFNKIEDSIVREKDQSKQLVTWVLPSILSISLLLSVCFYFIYRRKTTPSVKYAKNHRLYEPPMELEPMVLSEAVYSTSLEEVSPLVKGAGKFTFDQLIQATLLDVIDRGNVSIISEGDAVGLRLVKEDGLSRFERDCLNLAFSGKKEATLSNLFADYKVSDSLYRRAKVSDEKRIQARGLQLKSSFEEVLNQMQEGVRKRVSFWGLPDYYRPLTGLEKTLQVGMGVLTILPLFIGFGLFLYSLDVHGYLYLPLPILGFLGLVLSVFYYWKLRLDNRDGVLNEAGAEVYYLWTSFENMLREIARLDKAELESIVVWNRLLVYATLFGYADKVSHLMKVHQIQVENPDINLYVAYGWHSMFYHSSAQMSHYASVANTASTYSVSSGSGSSGGGFSGGGGGGSIGAF

SEQ ID NO: 4712 - protein, 521 aa, Streptococcus pneumoniae
MRKIYLSIFTSLLLMLGLVNVAQADEYLRIGMEAAYAPFNWTQDDDSNGAVKIDGTNQYANGYDVQIAKKIAKDLGKEPLVVKTKWEGLVPALTSGKIDMIIAGMSPTAERKQEIAFSSSYYTTEPVLLVKKDSAYASAKSLDDFNGAKITSQQGVYLYDLIAQIPGAKKETAMGDFAQMRQALEAGVIDAYVSERPEALTAEAANSKFKMIQVEPGFKTGEEDTAIAIGLRKNDNRISQINASIETISKDDQVALMDRMIKEQPAEATTTEETSSSFFSQVAKILSENWQQLLRGAGITLLISIVGTIIGLIIGLAIGVFRTAPLSENKAIYGLQKLVGWVLNVYIEIFRGTPMIVQSMVIYYGTAQAFGINLDRTLAAIFIVSINTGAYMTEIVRGGILAVDKGQFEAATALGMTHNQTMRKIVLPQVVRNILPATGNEFVINIKDTSVLNVISVVELYFSGNTVATQTYQYFQTFTIIAVIYFVLTFTVTRILRFIERRMDMDTYTTGANQMQTEDLK

SEQ ID NO: 4713 - protein, 246 aa, Streptococcus pneumoniae
MTQAILEIKHLKKSYGQNEVLKDISLTVHKGEVISIIGSSGSGKSTFLRSINLLETPTDGQILYHGQNVLEKGYDLTQYREKLGMVFQSFNLFENLNVLENTIVAQTTVLKRERTEAEKIAKENLEKVGMGERYWQAKPKQLSGGQKQRVAIARALSMNPDAILFDEPTSALDPEMVGEVLKIMQDLAQEGLTMIVVTHEMEFARDVSHRVIFMDKGVIAEEGKPEDLFTNPKEDRTKEFLQRYLK

SEQ ID NO: 4714 - protein, 71 aa, Streptococcus pneumoniae
MAKSNFEKVESVVGWVRDKKITGYRISKETNAREMSIIALAQGRAKVKNISFETALGLIDFYEKNYEKFED

SEQ ID NO: 4715 - protein, 76 aa, Streptococcus pneumoniae
LFHMNLSNDGFVAFHYRSYGTFFLHKNRLHNIYSGFTHYKYYRAFFLLTKVVKTYTIKYYKEENRRKTWLSQTLKK

SEQ ID NO: 4716 - protein, 65 aa, Streptococcus pneumoniae
MKSDKTIIRKIHMEQLHFITKLLDIKDPNIKILDIINMDTHKEIIAKLDYEASSCPDCGSLIEEI

SEQ ID NO: 4717 - protein, 127 aa, Streptococcus pneumoniae
MIKELYEEVQGTVYKCRNEYYLHLWELSDWDQEGMLCLHELISREEGLADDIPRLRKYFKTKFRNRILDYIRKPESQKRISDKEPYEEVGEISHRIGEGGSGLEIIISFLEPFGVLEPSWLGETREL

SEQ ID NO: 4718 - protein, 183 aa, Streptococcus pneumoniae
MKGNIMDSFDKGWFVLQTYSGYENKVKENLLQRAQTYNMLDNILRVEIPTQTVQVEKNGKRKEVEENRFPGYVLVEMVMTDEAWFVVRNTPNVTGFVGSHGNRSKPTPLLEQEIRDILVSMGQTVQEFDFDVEIGQTVRIIDGAFADYTGKITEIDNNKVKMIISMFGNDTVAEVNLNQIAEL

SEQ ID NO: 4719 - protein, 58 aa, Streptococcus pneumoniae
MRFIGDIFRLLKDTTWPTRKESWRDFRSIMEYTAFFVVIIYIFDQLIVSGLIRFINIF

SEQ ID NO: 4720 - protein, 731 aa, Streptococcus pneumoniae
MKLDKLFEKFLSLFKKETSELEDSDSTILRRSRSDRKKLAQVGPIRKFWRRYHLTKIILILGLSAGLLVGIYLFAVAKSTNVNDLQNALKTRTLIFDREEKEAGALSGQKGTYVELTDISKNLQNAVIATEDRSFYKNDGINYGRFFLAIVTAGRSGGGSTITQQLAKNAYLSQDQTVERKAKEFFLALELSKKYSKEQILTMYLNNAYFGNGVWGVEDASKKYFGVSASEVSLDQAATLAGMLKGPELYNPLNSVEDSTNRRDTVLQNMVAAGYIDKNQETEAAEVDMTSQLHDKYEGKISDYRYPSYFDAVVNEAVSKYNLTEEEIVNNGYRIYTELDQNYQANMQIVYENISLFPRAEDGTFAQSGSVALEPKTGGVRGVVGQVADNDKTGFRNFNYATQSKRSPGSTIKPLVVYTPAVEAGWALNKQLDNHTMQYDSYKVDNYAGIKTSREVPMYQALAESLNLPAVATVNDLGVDKAFEAGEKFGLNMEKVDRVLGVALGSGVETNPLQMAQAYAAFANEGLMPEAHFISRIENASGQVIANHKNSQKRVIDKSVADKMTSMMLGTFTNGTGISSSPADYVMAGKTGTTEAVFNPEYTSDQWVIGYTPDVVISHWLGFPTTDENHYLAGSTSNGAAHVFRNIANTILPYTPGSTFTVENAYKQNGIAPANTKRQVQTNDNSQTDDNLSDIRGRAQSLVDEASRAISDAKIKEKAQTIWDSIVNLFR

SEQ ID NO: 4721 - protein, 291 aa, Streptococcus pneumoniae
MQFTFTLPASLPQMTVKQLLEEQLLIPRKIRHFLRIKKHILINQEEVHWNEIVNPGDVCQLTFDEEDYSQKTIPWGNPDLVQEVYQDQHLIIVNKPEGMKTHGNQPNEIALLNHVSTYVGQTCYVVHRLDMETSGLVLFAKNPFILPILNRLLEKKEISREYWALVDGNINRKELVFRDKIGRDRHDRRKRIVDAKNGQYAETYVSRLKQFSNKTSLAHCKLKTGRTHQIRVHLSHHNFPILGDPLYNSNSKTSRLMLHAFRLSFTHPLTLEKLNFTALSNTFETELKKNG

SEQ ID NO: 4722 - protein, 359 aa, Streptococcus pneumoniae
VICSDSSYSFHNKNFMIFIRRKSLMVVKVGINGFGRIGRLAFRRIQNVEGVEVTRINDLTDPVMLAHLLKYDTTQGRFDGTVEVKEGGFEVNGKFVKVSAERDPEQIDWATDGVEIVLEATGFFAKKEAAEKHLKGGAKKVVITAPGGNDVKTVVFNTNHDVLDGTETVISGASCTTNCLAPMAKALQDNFGVVEGLMTTIHAYTGDQMILDGPHRGGDLRRARAGAANIVPNSTGAAKAIGLVIPELNGKLDGSAQRVPTPTGSVTELVAVLEKNVTVDEVNAAMKAASNESYGYTEDPIVSSDIVGMSYGSLFDATQTKVLDVDGKQLVKVVSWYDNEMSYTAQLVRTLEYFAKIAK

SEQ ID NO: 4723 - protein, 91 aa, Streptococcus pneumoniae
PYDSFEAAFIAAFTSSTVTFFSRTATNSVTDPVGVGTRCADPSSLPFNSGITRPIALAAPVELGTMFAAPARARRRSPPRCGPSRIIWSPV

SEQ ID NO: 4724 - protein, 316 aa, Streptococcus pneumoniae
MGKKRWARNGSESNDASYAQVVSLYDDTSISVSNNETDKVLTGSLYTETNEQGLTIPSSLLKNWNEQTGKNLTTNDLIGKSVSASIVESAAETSKIAQFQTKIVRVINDEDDMEDSNSFMLSHQMETILKEAGFTKAVSYFILELKDPSQTKVVTEELQKNKKYTVLSQQRVLDIVITFIRVIQGLLIVLSSQAIVVAAVMIGIIIYINIMQRSKEIGVMKAVGYQNRGVKGIFIYEAIWIVGIALLLAFLVAQGVGSLANAIVSHFYPSITKVFELNLLSVLGTLVFALLLGYVSAYFPARKISKMDPVESLRYE

SEQ ID NO: 4725 - protein, 112 aa, Streptococcus pneumoniae
LVAGLTNGELIAPMTYEEMMTSDFFEAWFQKFLLPTLTTPSVIIMDNARFHRMGKLELLCEEFGHKLLSLPPYSPEYNPIEKTWAHIKKHLKKVLPSCNTFYEALLSCSCFN

SEQ ID NO: 4726 - protein, 86 aa, Streptococcus pneumoniae
MVWLMLVRETSETKLQKSRSSSSLRKSLERLTHHLLDLQPKKSSDIFFQILYLFLTDLLMSDHILDKNKYRILFHQSKQVLGALNY

SEQ ID NO: 4727 - protein, 115 aa, Streptococcus pneumoniae
MWYNLLMAYSIDFRKKVLSYCERTGSITEASHVFQISRNTIYGWLKLKEKTGELNHQVKGTKPRKVDRDRLKNYLTDNPDAYLTEIASEFGCHPTTIHYALKAMGYTRKKEPHLL

SEQ ID NO: 4728 - protein, 299 aa, Streptococcus pneumoniae
VILKIEDLVMSIISTDLTPFQIDDTLKAALREDVHSEDYSTNAIFDHHGQAKVSLFAKEAGVLAGLTVFQRVFTLFDAEVTFQNPHQFKDGDRLTSGDLVLEIIGSVRSLLTCERVALNFLQHLSGIASMTAAYVEALGDDCIKVFDTRKTTPNLRLFEKYAVRVGGGYNHRFNLSDAIMLKDNHIAAVGSVQKAIAQARAYAPFVKMVEVEVESLAAAEEAAAAGADIIMLDNMSLEQIEQAITLIAGRSRIECSGNIDMTTISRFRGLAIDYVSSGSLTHSAKSLDFSMKGLTYLDV

(The sequence listing continues in the following parts.)

What is claimed is:

1. An isolated nucleic acid encoding a S. pneumoniae surface protein having at least 80% identity to SEQ ID NO: 3110.

2. A recombinant expression vector comprising the nucleic acid of claim 1 operably linked to a transcription regulatory element.

3. A cell comprising the recombinant expression vector of claim 2.

4. The isolated nucleic acid of claim 1, wherein the S. pneumoniae surface protein elicits an immune response.

5. An isolated nucleic acid encoding a S. pneumoniae surface protein having at least 80% identity to SEQ ID NO: 5328.

6. A recombinant expression vector comprising the nucleic acid of claim 5 operably linked to a transcription regulatory element.

7. A cell comprising the recombinant expression vector of claim 6.

8. The isolated nucleic acid of claim 5, wherein the S. pneumoniae surface protein provides protective immunity against an infection by S. pneumoniae.

9. An isolated nucleic acid having at least 80% identity to SEQ ID NO: 449, wherein the isolated nucleic acid encodes a S. pneumoniae surface protein.

10. A recombinant expression vector comprising the nucleic acid of claim 9 operably linked to a transcription regulatory element.

11. A cell comprising the recombinant expression vector of claim 10.

12. The isolated nucleic acid of claim 9, wherein the S. pneumoniae surface protein elicits an immune response.

13. An isolated nucleic acid having at least 80% identity to SEQ ID NO: 5327, wherein the isolated nucleic acid encodes a S. pneumoniae surface protein.

14. A recombinant expression vector comprising the nucleic acid of claim 13 operably linked to a transcription regulatory element.

15. A cell comprising the recombinant expression vector of claim 14.

16. The isolated nucleic acid of claim 13, wherein the S. pneumoniae surface protein elicits an immune response.

17. An isolated nucleic acid selected from the group consisting of:
a) a nucleic acid encoding a protein having at least 80% identity to SEQ ID NO: 5328;
b) a nucleic acid fully complementary to a nucleic acid encoding a protein having at least 80% identity to SEQ ID NO: 5328; and
c) an RNA of a) or b), wherein U is substituted for T;
wherein the isolated nucleic acid encodes a S. pneumoniae surface protein.

18. A recombinant expression vector comprising the nucleic acid of claim 17 operably linked to a transcription regulatory element.

19. A cell comprising the recombinant expression vector of claim 18.

20. The isolated nucleic acid of claim 17, wherein the S. pneumoniae surface protein provides protective immunity against an infection by S. pneumoniae.

21. An isolated polypeptide having at least 80% identity to SEQ ID No: 5328 wherein the polypeptide elicits an immune response.

22. An isolated polypeptide comprising at least 20 contiguous amino acids of the amino acid sequence set forth in SEQ ID No: 5328, wherein the polypeptide elicits an immune response.

23. An isolated nucleic acid molecule encoding a S. pneumoniae surface antigen comprising at least 20 contiguous amino acids of the amino acid sequence set forth in SEQ ID No: 5328.

24. A recombinant expression vector comprising the nucleic acid of claim 23 operably linked to a transcription regulatory element.

25. A cell comprising the recombinant expression vector of claim 24.

26. The isolated nucleic acid of claim 23, wherein the S. pneumoniae surface antigen elicits an immune response.

27. A method of treating a subject, comprising the step of administering to the subject a composition that includes a S. pneumoniae surface protein having at least 80% identity to SEQ ID NO: 5328, wherein administration of the protein elicits an immune response to S. pneumoniae.

28. An isolated polypeptide having at least 80% identity to SEQ ID No: 3110 wherein the polypeptide elicits an immune response.

29. An isolated polypeptide comprising at least 20 contiguous amino acids of the amino acid sequence set forth in SEQ ID No: 3110, wherein the polypeptide elicits an immune response.

30. An isolated nucleic acid molecule encoding a S. pneumoniae surface antigen comprising at least 20 contiguous amino acids of the amino acid sequence set forth in SEQ ID No: 3110.

31. A recombinant expression vector comprising the nucleic acid of claim 30 operably linked to a transcription regulatory element.

32. A cell comprising the recombinant expression vector of claim 31.

33. The isolated nucleic acid of claim 30, wherein the S. pneumoniae surface antigen elicits an immune response.

34. A method of treating a subject, comprising the step of administering to the subject a composition that includes a S. pneumoniae surface protein having at least 80% identity to SEQ ID NO: 3110, wherein administration of the protein elicits an immune response to S. pneumoniae.
